United States Patent Application Publication US 2005/0228172 A9 - sequence listing, part 157

SEQ ID NO: 710695 - DNA, 1283 bp, Homo sapiens
ttttaacaaccagctttccctggaactaatagagtgagaactcaattatcacccctcacagggagggcattaatctattcatgagatatctacccacataatccaaatacttcccattaggccccatctccaacactggggatcaaatttcaacatgaggtatagggggacaaacatccaaactatagcagctctgaaatgaaaatgtgaaagtattcatcttatggtttctaatgacctaagggaatataattcagtggaagcattcctttgagagattgaaacaatgagtcatggatatgcatttttctaatggtttaaattggtgaagaagagaacatagaatgcatacagttatgaatggacatgaatataagaggtcagttgatactaaattgtctagctgggaatttgataacacacatttcaagagcctgctatgtaaataatgggtcaccaatttaaaatatgagccatgtgttttagatggagaaaaatcagggtcaagtctaacattctataaggaaaattaaatsttgacacttagtctaagctcaactaaaagtcatctcactgcattttgggagctgagtgtcccatgcttctttagggattatcttatttctaagcaactttccctgctacccagttgcctaactcttgaaatattacctgagacctctccttctggacagcacctataattcagacatttcatgagcacctgtactccctgctgcccaatatcacattcaccttgagcagatttggcaaccctgacttcatataaaaatcatttcaggagcttttaaaaaatactgatccctgctatccacccctccccacgaaggcgctaacttaatttatctggtggaggactcaagcattggtagttcttaaacactcccaaggtgatgctgtagtgcagccagagttaatgactgcagtctttgaacctaactagataatctgcatctatacctttaaccaattcatggtgagatactaatgtgtgagcaacgatttacatttaacctagaagcttccagagagatggtggcttactctaactgaaaatctaatgctgcatattatagcacctctacaagtcagtggagggcagtattatgagtagacagttctttcagcctagtaaattataccagcctgactttctctaggatgggtttggtttttattccaggtgattgattgaaaatgagacagtaatagatgtgacagccctcacattgtcacattgtgatatttaaatacttaagaat

SEQ ID NO: 710696 - DNA, 1787 bp, Homo sapiens
cagaatactttattcctttaaattgtgccttcattcaatcaggagttggaagtttgtggtggggggggcggtgtttgttgttctttttcctttaccccatttgtgagtattcattcttccttagcttgttatgaaaaatcccagttgtgacccatttctgtaattatcactcttaaaaggtcatctaaagatgtactgatttttatcaaaagagttatttaatttttttctgatgcctgggagttcctatgtataaaaacaaacaaaaatgacctgatttggtgcaaaacyacagaagtgctaccaaggtttcacagtggtagctcactctgctctcaacagcatggttgataatgatcaggactcactctagaagtgcttctaaaagaaatctgctacatatgaaatctacacaccatcaccttcagctggccctgagctatttcttacaggtcagtctcaagtctctataaaactacctacatatgtaggtaggtacatctaaaaagaaacatgttcggtaagtgtgggtgatgctttcagttggctgtgctcatttcatggaagttatgcaacccaatttcgagtattctggcacaatctagggccacctcatgagtaaaatgcaaagcccttccgtgttgccctctctcactgccgccagctgtgggttgcgattggctgccagacacacacttcctccactagcactgccacctggctcccagtgagcccctgcagactggactagggtgtttctgcatcaaccccatccctgctccccaccagggatgccacccaggaagctgacactgccccattcgcaacacattaatattatcgtgaagtccgagctgctgatttcatttgactgggggcatgtagacaacaggagcagctgaattttaaaactgactttcatgcaatcgtcacttgtcattggtaaggatcccctaaaaggaaatcctatcaaagtaatctcctttcattaaggtcactaagaaaataagcagagagagataaacttattctgttccataacaaagaatgtatttcatgtcataggaagagtaggaaagaaaaggatgtggtgattatctgacctttcagattactgcatatttgagttgctgaacaaaggacaagagggctgtgaaatacattttgaaaagaaagggttactcacttcatttggaaaaagtaagatcctgtgtcattcaactcaactggccaaaactccaaaacacaatcatgcaaagcaattctcgaggaactccttgggttcagctccacatgttcctgtgatccactgcttttgtaccagcttttggtggttgtttcaatctcatgtgcaagtgaacacgagcaatgtttcagatagaaaggttccccttcaaccacagtaatgtggggacgtgaagtacaagattcttcaaaagattagtaaagtaaaataaataaaaacaaaaaccaaaatgacaaggtaactttttttggtctcctaatgcattaggtgaagaagcaaggttagcaagaaagtcctgagaaatctcggtgtcaatttcctgtgggttctttatttttgcgtcaatctttccaacactagaaaggataaggcactttcagaacatagatgaaaacacaacttctgacagtttctccccaacaggaaggtatcagaacttaaccaaccatagctagaagactgataattgtgtcacctcttagaagaaaatattacacattacaacttcttcatagggaaagccacagaagtcacggtgctg

SEQ ID NO: 710697 - DNA, 1311 bp, Homo sapiens
ttaagttatcctctatgcctgacacatttgtgcccaccttaggctcttccagttcccctttaggtctacaataggatagaaggaagaaaagactaacacttactgagttccaggtattagactatgtacatgcaagggagatgactattttccttaggctcagatgagaatgctaaatctcagacaggttaaacaactcactcaggccacacacttgctacaagatggggccaggatacaaatgcacatctatttggccccagaggccagaagtgctctgcacaattctacactttcacaatccaatgaatctggccccttcaccttgggcatgaatttataaaagattggccgtgactggagaatgtggcaggctgttgtcacagttataggcagtgggtccatggccatgggacatgatagagctacctggctcttgaaatggattcaggatcccattggcagcaccttcttctcaagtgtgttttcgtaatgtctccccaactttgacctcaatgaattggagagatagagatttctggatctctatgacttgttgcttaaaaggaatagggtacatgaatatccccattttttcagactacattgttctctacctctgtaatcctcaattcctaacactcaacaaatgctagaggactgatgacactccatgtgcaggacactgctctgggaacactgaaacaatcaacaacacactgcacctgccatccaggagctccaaggctagggttaacactgaggccaactgacccaaagctgtgaccacactttcctgctgcaggcccagcccatcctggttatgaaaaccactcatttttgtccacagacaccaggggataaacaccagcccccacttctgaggctgctcaccaagctgaacttgctgcctgtcagcctaggattggtttattagatttctgtgtgtacatttccctctaccttcatttcttcatctctatcattgaaaactatcccttttgtatccccttccttcttagttgatttcgttcttaaaatttggtgggataaagtgattttcactgcaggattaaattatcagtcctcagtggcatttgattattagcaatgtactcctaaaaattaaagaattactgttctaacgggaaattttcaggtgtaaagtctgttcactgatagatcccacatcaaactrcaaagggttacacacctaagttagaacacatatgtgtatacacacacatctgcagtaaatactgcttactaattatgctatatttgaatatgtctgtatcttctatgctcctg

SEQ ID NO: 710698 - DNA, 647 bp, Homo sapiens
tacacatatctacaaagcatctgtaaaatctggacacagatgacattattttattcctttacaggttgatgttcttgatggcattaggtctcttcacctatgtttctagactttatgcacacttctggagaggcagaaatgagtctggaggggtatagctcagaatgctaataaaagttatatggaggtgggcagggtagttatgggggaatttttttctctgtttttctgtgttttccagtcttaccraagagacatagaatatttgggtaaagaaataaaaactttcttcaaaaatcaaatcaaactcaaagccaaaatggccacagctgaacaccaaagcacaccagctctgagagcacagagcaattccaggaaggtttgcctgggaacacagctgcccacgtgggaagagaaggtgctgggccacaggaggctggcttaggctggcttgggctacggtgatacatctgccagcaggatcccgagaggtgccaagaggctgcagcccacccatccctggagggaatggcctcctgactttgctgaaaggaggaagttgtgaggccaggctggctccttgacctccaacagacagcaggggtcagatggagaaacgttacaccagttccccaagacagacacaa

SEQ ID NO: 710699 - DNA, 660 bp, Homo sapiens
tacaatcagaaatttgactggctttttcctaccttgcacaaactcaggagggatattcgtactgctaactgccactgtatatgtgcagataatttgcattttcawtgttctttattttatgttattagttattcatgagatgaatatcacattcaacaactaatctataaagcctttgctttttaaataacaatgtgctgtttttgttgtagagggtagaatggagaatggacgtcccatttagagatcttatacaaagaactgaaaaatgaatgacacataagctcttccttgccatatgtaaaatcgggatctcaaagagagtgacattagagttggaaaatacagactgtactacataggtttatacatataagagccatattagccagctggacctactgagaaaggtctctcaccagcaagccaaagagaagagaaggtcaagtttaaccgtactatgtaatgaacctgtaaatgactaattatttctcaccaaacagcacaatctgcatgtgaggcaaaaaccaacatagaaagcatctgaactcgtttttattttcagttggatatagtccaagtttcatacacattggtttcacttttcccaataaaggcttatgtctatattaacacaaattgaaaagaaaaaaatgaaaa

SEQ ID NO: 710700 - DNA, 2303 bp, Homo sapiens
tggaatactacatattgaaatgaagatgtagaagaatattaaatggtgtacgaaggtagtcatgacatattaaggttaaaaaaagattacatactatgttatttatttgcatgttttggtataactattttctaaagatatcacaattagtcattttgttttttaattagagggatcaacattatttgacgataaatttgtcattccttttacatgctgcaagtgtaacaaaaagccccatcccaggtgtatcttcaattatacagtgttatcacagaagaatttacgaatcactaccgactatatggcattgtttaaatttgaaactctggtgactcatgactaggtatgccagtcatttgctgttttaatacttcaataattagtaaaagcagtagagtttgtttggaatagaaactaggaatttttgttgataggtccagctttgccatgttttagttgaatggctcagagataattaccatttctttttcatttcattttcctacctgtcaagtgaggatatgtctgaattcaaactccttgagagaaaaacctaccgtgtataattcaactttgtgtcctcaacttccttacctcctcaatagcttacctgtctacttcatagaagtacatcagagaatattgacaagcataccatcactctgcaagcaaggtttccatagggagggaacatgaatcagatacttcttacatgccaagtcagattctcttatattcacccatccccagggcttttaccatcagtggctaccaactctgtgggaagtctgaccaacttcatatgagcacaacccaataggatctcaccatacacccatatcacaactctgatgtatagcctctcttccccagaagcaaaggagtctttgtgaatttcccaaaaaccttgcccaatgcccatgattaaggcaaggagtagccctacagtgaacaatgggcagattttcccataatccttttcttcataaatctttctgttctgatggtgctgaccccatcactccaaggatgagcatgagatcaggcctgccccatcagaggctccgttcatcctattgctatggtttgaatgtttcccttccaaatttatggtgaaacaatccccactgtgatgttattaggcagtggtgcctttagcaggtgattagaccacaagggctccccctcatgtatgaattagtgccttatagaagggcttaagggaattagcttaggcccctttttgtcctctgccatatgagaatgccaccatgagaagatgctgccactgataaagcaggcctcaccggacaccaaatctgctggtgcttgatcttggacttctcagcctccagaactgtaagaatacatttgtgttgctataaattacccaatctgtggtattttgttagagaggcacaagtgaactaagaaacctacataccatgattgcttcagggattggtctctgattggagccaagccaatcttggaatctttatamcagtgctttaagaaaaaaatgctttctttctgctggggcactgaagctggaaaaatgtcagtcttgagcctcttagtgtccaataactaagccaacagaacaaaagtagagcttagaggtgaaaacagattttcacctctaccatgcaacttagttgggactagcaagagataagcattcaacttctaggaagagtcagggtttttttgttgtttttcttttatgaccacagcatgagatgatgtgttggcaccttcattagttgagatttgagggtagtaaaaaggccattcaagcaagcgtgagcgtaacagactaataggtagggtttgcttcagatacgactggctctgggggtccaaataatataatcataactgtctattttcagctgagcactgcttttttttcctccttcttcctgcaggcttattgggcagattctatgcggagagcagccgtggtcttgacgctgtgtgtggtggttatactgactgtagtccctggcagttgcagcaggcatcaagcagagagaaatgtgatgaggcagctctggagagggggagccacaggtgcacccctgcattgggaagataccatcaactgcagcaaagagaatagatgcaccacacactcctggatttgctggggaatttaagaaaaatgcagtcagaaatcaaaggtggagttctaggggtcctcctggaaagaagctagggagagaacttcttctgattggcatttttttcctctgtagctctacttttgtcctgctaaaagcaggaatcagatcaga

SEQ ID NO: 710701 - DNA, 2303 bp, Homo sapiens
tggaatactacatattgaaatgaagatgtagaagaatattaaatggtgtacgaaggtagtcatgacatattaaggttaaaaaaagattacatactatgttatttatttgcatgttttggtataactattttctaaagatatcacaattagtcattttgttttttaattagagggatcaacattatttgacgataaatttgtcattccttttacatgctgcaagtgtaacaaaaagccccatcccaggtgtatcttcaattatacagtgttatcacagaagaatttacgaatcactaccgactatatggcattgtttaaatttgaaactctggtgactcatgactaggtatgccagtcatttgctgttttaatacttcaataattagtaaaagcagtagagtttgtttggaatagaaactaggaatttttgttgataggtccagctttgccatgttttagttgaatggctcagagataattaccatttctttttcatttcattttcctacctgtcaagtgaggatatgtctgaattcaaactccttgagagaaaaacctaccgtgtataattcaactttgtgtcctcaacttccttacctcctcaatagcttacctgtctacttcatagaagtacatcagagaatattgacaagcataccatcactctgcaagcaaggtttccatagggagggaacatgaatcagatacttcttacatgccaagtcagattctcttatattcacccatccccagggcttttaccatcagtggctaccaactctgtgggaagtctgaccaacttcatatgagcacaacccaataggatctcaccatacacccatatcacaactctgatgtatagcctctcttccccagaagcaaaggagtctttgtgaatttcccaaaaaccttgcccaatgcccatgattaaggcaaggagtagccctacagtgaacaatgggcagattttcccataatccttttcttcataaatctttctgttctgatggtgctgaccccatcactccaaggatgagcatgagatcaggcctgccccatcagaggctccgttcatcctattgctatggtttgaatgtttcccttccaaatttatggtgaaacaatccccactgtgatgttattaggcagtggtgcctttagcaggtgattagaccacaagggctccccctcatgtatgaattagtgccttatagaagggcttaagggaattagcttaggcccctttttgtcctctgccatatgagaatgccaccatgagaagatgctgccactgataaagcaggcctcaccggacaccaaatctgctggtgcttgatcttggacttctcagcctccagaactgtaagaatacatttgtgttgctataaattacccaatctgtggtattttgttagagaggcacaagtgaactaagaaacctacataccatgattgcttcagggattggtctctgattggagccaagccaatcttggaatctttataccagtgctttaagaaaaaaatgctttctttctgctggggcactgaagctggaaaaatgtcagtcttgagcctcttagtgtccaataactaagccaacasaacaaaagtagagcttagaggtgaaaacagattttcacctctaccatgcaacttagttgggactagcaagagataagcattcaacttctaggaagagtcagggtttttttgttgtttttcttttatgaccacagcatgagatgatgtgttggcaccttcattagttgagatttgagggtagtaaaaaggccattcaagcaagcgtgagcgtaacagactaataggtagggtttgcttcagatacgactggctctgggggtccaaataatataatcataactgtctattttcagctgagcactgcttttttttcctccttcttcctgcaggcttattgggcagattctatgcggagagcagccgtggtcttgacgctgtgtgtggtggttatactgactgtagtccctggcagttgcagcaggcatcaagcagagagaaatgtgatgaggcagctctggagagggggagccacaggtgcacccctgcattgggaagataccatcaactgcagcaaagagaatagatgcaccacacactcctggatttgctggggaatttaagaaaaatgcagtcagaaatcaaaggtggagttctaggggtcctcctggaaagaagctagggagagaacttcttctgattggcatttttttcctctgtagctctacttttgtcctgctaaaagcaggaatcagatcaga

SEQ ID NO: 710702 - DNA, 2303 bp, Homo sapiens
tggaatactacatattgaaatgaagatgtagaagaatattaaatggtgtacgaaggtagtcatgacatattaaggttaaaaaaagattacatactatgttatttatttgcatgttttggtataactattttctaaagatatcacaattagtcattttgttttttaattagagggatcaacattatttgacgataaatttgtcattccttttacatgctgcaagtgtaacaaaaagccccatcccaggtgtatcttcaattatacagtgttatcacagaagaatttacgaatcactaccgactatatggcattgtttaaatttgaaactctggtgactcatgactaggtatgccagtcatttgctgttttaatacttcaataattagtaaaagcagtagagtttgtttggaatagaaactaggaatttttgttgataggtccagctttgccatgttttagttgaatggctcagagataattaccatttctttttcatttcattttcctacctgtcaagtgaggatatgtctgaattcaaactccttgagagaaaaacctaccgtgtataattcaactttgtgtcctcaacttccttacctcctcaatagcttacctgtctacttcatagaagtacatcagagaatattgacaagcataccatcactctgcaagcaaggtttccatagggagggaacatgaatcagatacttcttacatgccaagtcagattctcttatattcacccatccccagggcttttaccatcagtggctaccaactctgtgggaagtctgaccaacttcatatgagcacaacccaataggatctcaccatacacccatatcacaactctgatgtatagcctctcttccccagaagcaaaggagtctttgtgaatttcccaaaaaccttgcccaatgcccatgattaaggcaaggagtagccctacagtgaacaatgggcagattttcccataatccttttcttcataaatctttctgttctgatggtgctgaccccatcactccaaggatgagcatgagatcaggcctgccccatcagaggctccgttcatcctattgctatggtttgaatgtttcccttccaaatttatggtgaaacaatccccactgtgatgttattaggcagtggtgcctttagcaggtgattagaccacaagggctccccctcatgtatgaattagtgccttatagaagggcttaagggaattagcttaggcccctttttgtcctctgccatatgagaatgccaccatgagaagatgctgccactgataaagcaggcctcaccggacaccaaatctgctggtgcttgatcttggacttctcagcctccagaactgtaagaatacatttgtgttgctataaattacccaatctgtggtattttgttagagaggcacaagtgaactaagaaacctacataccatgattgcttcagggattggtctctgattggagccaagccaatcttggaatctttataccagtgctttaagaaaaaaatgctttctttctgctggggcactgaagctggaaaaatgtcagtcttgagcctcttagtgtccaataactaagccaacagaacaaaagtagagcttagaggtgaaaacagattttcacctctaccatgcaacttagttgggactagcaagagataagcattcaacttctaggaagagtcagggtttttttgttgtttttcttttatgaccacagcatgagatgatgtgttggcaccttcattagttgagatttgagggtagtaaaaaggccattcaagcaagcgtgagcrtaacagactaataggtagggtttgcttcagatacgactggctctgggggtccaaataatataatcataactgtctattttcagctgagcactgcttttttttcctccttcttcctgcaggcttattgggcagattctatgcggagagcagccgtggtcttgacgctgtgtgtggtggttatactgactgtagtccctggcagttgcagcaggcatcaagcagagagaaatgtgatgaggcagctctggagagggggagccacaggtgcacccctgcattgggaagataccatcaactgcagcaaagagaatagatgcaccacacactcctggatttgctggggaatttaagaaaaatgcagtcagaaatcaaaggtggagttctaggggtcctcctggaaagaagctagggagagaacttcttctgattggcatttttttcctctgtagctctacttttgtcctgctaaaagcaggaatcagatcaga

SEQ ID NO: 710703 - DNA, 2303 bp, Homo sapiens
tggaatactacatattgaaatgaagatgtagaagaatattaaatggtgtacgaaggtagtcatgacatattaaggttaaaaaaagattacatactatgttatttatttgcatgttttggtataactattttctaaagatatcacaattagtcattttgttttttaattagagggatcaacattatttgacgataaatttgtcattccttttacatgctgcaagtgtaacaaaaagccccatcccaggtgtatcttcaattatacagtgttatcacagaagaatttacgaatcactaccgactatatggcattgtttaaatttgaaactctggtgactcatgactaggtatgccagtcatttgctgttttaatacttcaataattagtaaaagcagtagagtttgtttggaatagaaactaggaatttttgttgataggtccagctttgccatgttttagttgaatggctcagagataattaccatttctttttcatttcattttcctacctgtcaagtgaggatatgtctgaattcaaactccttgagagaaaaacctaccgtgtataattcaactttgtgtcctcaacttccttacctcctcaatagcttacctgtctacttcatagaagtacatcagagaatattgacaagcataccatcactctgcaagcaaggtttccatagggagggaacatgaatcagatacttcttacatgccaagtcagattctcttatattcacccatccccagggcttttaccatcagtggctaccaactctgtgggaagtctgaccaacttcatatgagcacaacccaataggatctcaccatacacccatatcacaactctgatgtatagcctctcttccccagaagcaaaggagtctttgtgaatttcccaaaaaccttgcccaatgcccatgattaaggcaaggagtagccctacagtgaacaatgggcagattttcccataatccttttcttcataaatctttctgttctgatggtgctgaccccatcactccaaggatgagcatgagatcaggcctgccccatcagaggctccgttcatcctattgctatggtttgaatgtttcccttccaaatttatggtgaaacaatccccactgtgatgttattaggcagtggtgcctttagcaggtgattagaccacaagggctccccctcatgtatgaattagtgccttatagaagggcttaagggaattagcttaggcccctttttgtcctctgccatatgagaatgccaccatgagaagatgctgccactgataaagcaggcctcaccggacaccaaatctgctggtgcttgatcttggacttctcagcctccagaactgtaagaatacatttgtgttgctataaattacccaatctgtggtattttgttagagaggcacaagtgaactaagaaacctacataccatgattgcttcagggattggtctctgattggagccaagccaatcttggaatctttataccagtgctttaagaaaaaaatgctttctttctgctggggcactgaagctggaaaaatgtcagtcttgagcctcttagtgtccaataactaagccaacagaacaaaagtagagcttagaggtgaaaacagattttcacctctaccatgcaacttagttgggactagcaagagataagcattcaacttctaggaagagtcagggtttttttgttgtttttcttttatgaccacagcatgagatgatgtgttggcaccttcattagttgagatttgagggtagtaaaaaggccattcaagcaagcgtgagcgtaacagactaataggtagggtttgcttcagatacgactggctctgggggtccaaataatataatcataactgtctattttcagctgagcactgcttttttttcctccttcttcctgcaggcttattgggcagattctatgyggagagcagccgtggtcttgacgctgtgtgtggtggttatactgactgtagtccctggcagttgcagcaggcatcaagcagagagaaatgtgatgaggcagctctggagagggggagccacaggtgcacccctgcattgggaagataccatcaactgcagcaaagagaatagatgcaccacacactcctggatttgctggggaatttaagaaaaatgcagtcagaaatcaaaggtggagttctaggggtcctcctggaaagaagctagggagagaacttcttctgattggcatttttttcctctgtagctctacttttgtcctgctaaaagcaggaatcagatcaga

SEQ ID NO: 710704 - DNA, 2303 bp, Homo sapiens
tggaatactacatattgaaatgaagatgtagaagaatattaaatggtgtacgaaggtagtcatgacatattaaggttaaaaaaagattacatactatgttatttatttgcatgttttggtataactattttctaaagatatcacaattagtcattttgttttttaattagagggatcaacattatttgacgataaatttgtcattccttttacatgctgcaagtgtaacaaaaagccccatcccaggtgtatcttcaattatacagtgttatcacagaagaatttacgaatcactaccgactatatggcattgtttaaatttgaaactctggtgactcatgactaggtatgccagtcatttgctgttttaatacttcaataattagtaaaagcagtagagtttgtttggaatagaaactaggaatttttgttgataggtccagctttgccatgttttagttgaatggctcagagataattaccatttctttttcatttcattttcctacctgtcaagtgaggatatgtctgaattcaaactccttgagagaaaaacctaccgtgtataattcaactttgtgtcctcaacttccttacctcctcaatagcttacctgtctacttcatagaagtacatcagagaatattgacaagcataccatcactctgcaagcaaggtttccatagggagggaacatgaatcagatacttcttacatgccaagtcagattctcttatattcacccatccccagggcttttaccatcagtggctaccaactctgtgggaagtctgaccaacttcatatgagcacaacccaataggatctcaccatacacccatatcacaactctgatgtatagcctctcttccccagaagcaaaggagtctttgtgaatttcccaaaaaccttgcccaatgcccatgattaaggcaaggagtagccctacagtgaacaatgggcagattttcccataatccttttcttcataaatctttctgttctgatggtgctgaccccatcactccaaggatgagcatgagatcaggcctgccccatcagaggctccgttcatcctattgctatggtttgaatgtttcccttccaaatttatggtgaaacaatccccactgtgatgttattaggcagtggtgcctttagcaggtgattagaccacaagggctccccctcatgtatgaattagtgccttatagaagggcttaagggaattagcttaggcccctttttgtcctctgccatatgagaatgccaccatgagaagatgctgccactgataaagcaggcctcaccggacaccaaatctgctggtgcttgatcttggacttctcagcctccagaactgtaagaatacatttgtgttgctataaattacccaatctgtggtattttgttagagaggcacaagtgaactaagaaacctacataccatgattgcttcagggattggtctctgattggagccaagccaatcttggaatctttataccagtgctttaagaaaaaaatgctttctttctgctggggcactgaagctggaaaaatgtcagtcttgagcctcttagtgtccaataactaagccaacagaacaaaagtagagcttagaggtgaaaacagattttcacctctaccatgcaacttagttgggactagcaagagataagcattcaacttctaggaagagtcagggtttttttgttgtttttcttttatgaccacagcatgagatgatgtgttggcaccttcattagttgagatttgagggtagtaaaaaggccattcaagcaagcgtgagcgtaacagactaataggtagggtttgcttcagatacgactggctctgggggtccaaataatataatcataactgtctattttcagctgagcactgcttttttttcctccttcttcctgcaggcttattgggcagattctatgcggagagcagccgtggycttgacgctgtgtgtggtggttatactgactgtagtccctggcagttgcagcaggcatcaagcagagagaaatgtgatgaggcagctctggagagggggagccacaggtgcacccctgcattgggaagataccatcaactgcagcaaagagaatagatgcaccacacactcctggatttgctggggaatttaagaaaaatgcagtcagaaatcaaaggtggagttctaggggtcctcctggaaagaagctagggagagaacttcttctgattggcatttttttcctctgtagctctacttttgtcctgctaaaagcaggaatcagatcaga

SEQ ID NO: 710705 - DNA, 991 bp, Homo sapiens
tttcatttacacatttctccctgaagaaatcagggattaaggttgctatttgcaagacaggggtgttaaattacctaaaaaagacattttgaatacaaggaggaaatgattggcactcctaaaacattaggtaaaaatctttgctacacttgtctgtccaacataaaatatcaagtcaacacgaggagagggttagaaaaacctttaggttggcatctcaggtggcagtattgagtaggaattacacacaaggcctctgkacttaacagctcagctttgcctcttactagatgtgtgacttcaggtaagttgtttaacctctccacgcctccgttttctcatttataaaatgaggataataaaagttcccaacttattggattattatgtgaaaaagtacagggactagtccatagatatcactaaaaagtgataggtattatgtatttaaaatcaatcaaacattcatgtggtatcaataagtcccacatatatggatgtctcattttgatccacagaacaactataaaagttggcaaagtagattgtctttatttcatagattatagaactgattcaaaattacacaaagtctactcttctcatagctaatggcctaactgtgcctgcatctaggatttcatgggtcccttcaactctttcaacacagcgtgctgcttctcttgatcaactttattttttaagaaactgatagactcaagtacgaatcacttcacagcctgatgatcaatagtctactgcctcttacatatcttcttttcacaacatggtgccttcaataactacattaaattgaacttggccttgaaagtagtttcaaagaatattttggacaagaacagatttgcaactcctgtttcctctgcctgggacaagcttttcccaaatacacatctcttcgtctttcccactacactactatatgcttcataaaggaagtgcctagaatgtaaatgcgtaataaatagca

SEQ ID NO: 710706 - DNA, 991 bp, Homo sapiens
tttcatttacacatttctccctgaagaaatcagggattaaggttgctatttgcaagacaggggtgttaaattacctaaaaaagacattttgaatacaaggaggaaatgattggcactcctaaaacattaggtaaaaatctttgctacacttgtctgtccaacataaaatatcaagtcaacacgaggagagggttagaaaaacctttaggttggcatctcaggtggcagtattgagtaggaattacacacaaggcctctgtacttaacagctcagctttgcctcttactagatgtgtgacttcaggtaagttgtttaacctctccaygcctccgttttctcatttataaaatgaggataataaaagttcccaacttattggattattatgtgaaaaagtacagggactagtccatagatatcactaaaaagtgataggtattatgtatttaaaatcaatcaaacattcatgtggtatcaataagtcccacatatatggatgtctcattttgatccacagaacaactataaaagttggcaaagtagattgtctttatttcatagattatagaactgattcaaaattacacaaagtctactcttctcatagctaatggcctaactgtgcctgcatctaggatttcatgggtcccttcaactctttcaacacagcgtgctgcttctcttgatcaactttattttttaagaaactgatagactcaagtacgaatcacttcacagcctgatgatcaatagtctactgcctcttacatatcttcttttcacaacatggtgccttcaataactacattaaattgaacttggccttgaaagtagtttcaaagaatattttggacaagaacagatttgcaactcctgtttcctctgcctgggacaagcttttcccaaatacacatctcttcgtctttcccactacactactatatgcttcataaaggaagtgcctagaatgtaaatgcgtaataaatagca

SEQ ID NO: 710707 - DNA, 991 bp, Homo sapiens
tttcatttacacatttctccctgaagaaatcagggattaaggttgctatttgcaagacaggggtgttaaattacctaaaaaagacattttgaatacaaggaggaaatgattggcactcctaaaacattaggtaaaaatctttgctacacttgtctgtccaacataaaatatcaagtcaacacgaggagagggttagaaaaacctttaggttggcatctcaggtggcagtattgagtaggaattacacacaaggcctctgtacttaacagctcagctttgcctcttactagatgtgtgacttcaggtaagttgtttaacctctccacgcctccgttttctcatttataaaatgaggataataaaagttcccaacttattggattattatgtgaaaaagtacagggactagtccatagatatcactaaaaagtgataggtattatgtatttaaaatcaatcaaacattcatgtggtatcaataagtcccacatatatggatgtctcattttgatccwcagaacaactataaaagttggcaaagtagattgtctttatttcatagattatagaactgattcaaaattacacaaagtctactcttctcatagctaatggcctaactgtgcctgcatctaggatttcatgggtcccttcaactctttcaacacagcgtgctgcttctcttgatcaactttattttttaagaaactgatagactcaagtacgaatcacttcacagcctgatgatcaatagtctactgcctcttacatatcttcttttcacaacatggtgccttcaataactacattaaattgaacttggccttgaaagtagtttcaaagaatattttggacaagaacagatttgcaactcctgtttcctctgcctgggacaagcttttcccaaatacacatctcttcgtctttcccactacactactatatgcttcataaaggaagtgcctagaatgtaaatgcgtaataaatagca

SEQ ID NO: 710708 - DNA, 991 bp, Homo sapiens
tttcatttacacatttctccctgaagaaatcagggattaaggttgctatttgcaagacaggggtgttaaattacctaaaaaagacattttgaatacaaggaggaaatgattggcactcctaaaacattaggtaaaaatctttgctacacttgtctgtccaacataaaatatcaagtcaacacgaggagagggttagaaaaacctttaggttggcatctcaggtggcagtattgagtaggaattacacacaaggcctctgtacttaacagctcagctttgcctcttactagatgtgtgacttcaggtaagttgtttaacctctccacgcctccgttttctcatttataaaatgaggataataaaagttcccaacttattggattattatgtgaaaaagtacagggactagtccatagatatcactaaaaagtgataggtattatgtatttaaaatcaatcaaacattcatgtggtatcaataagtcccacatatatggatgtctcattttgatccacagaacaactataaaagttggcaaagtagattgtctttatttcatagattatagaactgattcaaaattacacaaagtctactcttctcatagctaatggcctaactgtgcctgcatctaggatttcatgggtcccttcaactctttcaacacagcgtgctgcttctcttgatcaactttattttttaagaaactgatagactcaagtacgaatcacttcacagcctgatgakcaatagtctactgcctcttacatatcttcttttcacaacatggtgccttcaataactacattaaattgaacttggccttgaaagtagtttcaaagaatattttggacaagaacagatttgcaactcctgtttcctctgcctgggacaagcttttcccaaatacacatctcttcgtctttcccactacactactatatgcttcataaaggaagtgcctagaatgtaaatgcgtaataaatagca

SEQ ID NO: 710709 - DNA, 957 bp, Homo sapiens
ctgcttctttcccaactgtttgtattcctggttgtggggttttcttggggattcacagactacttttaaatctactaaaggaaaacagaaagccaagagtaacaagagtggcacctgtcagaggtccccggaatgcctactactggttgtatccttttcctgttcccaaagagcaacatgttgccattgcaatgcccttttagctccatgagcatgggcctctttaggcttgttcaccaccatattgccagtacctaaaacaaacaaattactattyttaaaaaaccattgtttttaattctgtaaatgcaaactgcagaagatcataccaatgtttggttttcaaaaattatgcatcttgaaatgtctaatgagaatatgaggtagataggaggacttgctgtcttagcacaatcaaggatcatagttttttcccttatctgtgtttaacagatttaaacttaatttgccctttgcagaacatatggccattatgttacgtattcagaaaatgaaactagtatttaagattatatcatttgattccttatagttatgtttttatctgagtatttaaagatgtttcaaaagtaaaatcttgtgagtaagggctgccctctcaacctgacttaaaactgtaaaccgttctctttcctatatctctaataacccttagcctcctcagattttattttagtttttggttattttttatttttttgtttgttgcattttcaccttctaacacaccacatgtctttattttcttccctccctttacccccaattagaatataaatgccacagggattttttaaggacaggaatatttgttttgtttactaatgttttctgtatacttagctaaaacagtgcctgtcatagagtggatgctcactaattgttcaatgcatgaatattttttttaaattagatatgcccttctaccatacttat

SEQ ID NO: 710710 - DNA, 957 bp, Homo sapiens
ctgcttctttcccaactgtttgtattcctggttgtggggttttcttggggattcacagactacttttaaatctactaaaggaaaacagaaagccaagagtaacaagagtggcacctgtcagaggtccccggaatgcctactactggttgtatccttttcctgttcccaaagagcaacatgttgccattgcaatgcccttttagctccatgagcatgggcctctttaggcttgttcaccaccatattgccagtacctaaaacaaacaaattactatttttaaaaaaccattgtttttaattctgtaaatgcaaactgcagaagatcataccaatgtttggttttcaaaaattatgcatcttgaaatgtctaatgagaatatgaggtagataggaggacttgctgtcttagcacaatcaaggatcatagttttttcccttatctgtgtttaacagatttaaacttaatttgccctttgcagaacatatggccattatgttacgtattcagaaaatgaaactagtatttaagattatatcatttgattccttatagttatgtttttatctgagtatttaaagatgtttcaaaagtaaaatcttgtgagtaagggctgccctctcaacctgacttaaaactgtaaaccgttctctttcctatatctctaataacccttagcctcctcagattttattttagtttttggttattttttatttttttgtttgttgcattttcaccttctaacacaccacatgtctttattttcttscctccctttacccccaattagaatataaatgccacagggattttttaaggacaggaatatttgttttgtttactaatgttttctgtatacttagctaaaacagtgcctgtcatagagtggatgctcactaattgttcaatgcatgaatattttttttaaattagatatgcccttctaccatacttat

SEQ ID NO: 710711 - DNA, 1250 bp, Homo sapiens
aagaactattaggccttactctatatgttgccaatattttctcccagattttcagttatgatttttgatgtgcaaaaacatttaatgttatatagtcaaaattatcgatcttttttactgcctatagattttcaagcataattaaaaagccttttcctacaccaaaatgaaaaagaaatttactttttattgtatcatacagtttcatttttatgttagatctgtgatatattttgagttaattttgtgtatatataagctatgaattaatttcacctttttctaaatggctcctgggttgtcccgttgtcccagctttaatttttaaaaagtctatctttgtcttttattatatatcaaatttccatatgaactttagttctattattgagtcttctatttcaccggttgatttatcaatttatgctctaattgaccactgaaggatttacatcaaagaaatcagtaaatgatataaatcagatcccccgaccccaacccaaactacttgtttaccagtatgccactaaacttactctgtgtgtgtgtgtgtgtgtgtgtgtgtgtgtgtagtaatatataatcaaattatgtggatgttgcatgagctcttgagaagatgtattctctattgacakggtgtagagtttgacatacagtatatctacaagatctcctgtagtgattatgttgtttaggttttcaatctccttatttcttgcctacttcatctttgctgtattaagaaagctgtatgaatatctctgattaatgtgatttcttttttccccctccctccctggagatggagtcttgctgtgtcacccaggctgtagtgcagtggcacaatctcaagtcactgaaacctccccatcccgagttcaagcaattctcctgcctcggcctcccaagtagctgggactgcaggcactcgccactacacgtgactaatttttgtatttttagtagagacagggtttcaccatgttggccaggctggtctcaaactcctgacctcgtgatccgcccgcctcggcctcccaaagcactggaattacaggcatgagccatcatgcccagccaatgttatttcttttatgtctcctagcatctcctgtagtttggctttataaagatgattactatgttatttgacatataactgttcataaagatgtgtctacattgtaaagtatggttttcctgtgtaaaaagtgcctgtctttatcatgtttaagatttttggcttg

SEQ ID NO: 710712 - DNA, 1250 bp, Homo sapiens
aagaactattaggccttactctatatgttgccaatattttctcccagattttcagttatgatttttgatgtgcaaaaacatttaatgttatatagtcaaaattatcgatcttttttactgcctatagattttcaagcataattaaaaagccttttcctacaccaaaatgaaaaagaaatttactttttattgtatcatacagtttcatttttatgttagatctgtgatatattttgagttaattttgtgtatatataagctatgaattaatttcacctttttctaaatggctcctgggttgtcccgttgtcccagctttaatttttaaaaagtctatctttgtcttttattatatatcaaatttccatatgaactttagttctattattgagtcttctatttcaccggttgatttatcaatttatgctctaattgaccactgaaggatttacatcaaagaaatcagtaaatgatataaatcagatcccccgaccccaacccaaactacttgtttaccagtatgccactaaacttactctgtgtgtgtgtgtgtgtgtgtgtgtgtgtgtgtagtaatatataatcaaattatgtggatgttgcatgagctcttgagaagatgtattctctattgacatggtgtagagtttgacatacagtatatctayaagatctcctgtagtgattatgttgtttaggttttcaatctccttatttcttgcctacttcatctttgctgtattaagaaagctgtatgaatatctctgattaatgtgatttcttttttccccctccctccctggagatggagtcttgctgtgtcacccaggctgtagtgcagtggcacaatctcaagtcactgaaacctccccatcccgagttcaagcaattctcctgcctcggcctcccaagtagctgggactgcaggcactcgccactacacgtgactaatttttgtatttttagtagagacagggtttcaccatgttggccaggctggtctcaaactcctgacctcgtgatccgcccgcctcggcctcccaaagcactggaattacaggcatgagccatcatgcccagccaatgttatttcttttatgtctcctagcatctcctgtagtttggctttataaagatgattactatgttatttgacatataactgttcataaagatgtgtctacattgtaaagtatggttttcctgtgtaaaaagtgcctgtctttatcatgtttaagatttttggcttg

SEQ ID NO: 710713 - DNA, 1250 bp, Homo sapiens
aagaactattaggccttactctatatgttgccaatattttctcccagattttcagttatgatttttgatgtgcaaaaacatttaatgttatatagtcaaaattatcgatcttttttactgcctatagattttcaagcataattaaaaagccttttcctacaccaaaatgaaaaagaaatttactttttattgtatcatacagtttcatttttatgttagatctgtgatatattttgagttaattttgtgtatatataagctatgaattaatttcacctttttctaaatggctcctgggttgtcccgttgtcccagctttaatttttaaaaagtctatctttgtcttttattatatatcaaatttccatatgaactttagttctattattgagtcttctatttcaccggttgatttatcaatttatgctctaattgaccactgaaggatttacatcaaagaaatcagtaaatgatataaatcagatcccccgaccccaacccaaactacttgtttaccagtatgccactaaacttactctgtgtgtgtgtgtgtgtgtgtgtgtgtgtgtgtagtaatatataatcaaattatgtggatgttgcatgagctcttgagaagatgtattctctattgacatggtgtagagtttgacatacagtatatctacaagatctcctgtagtgattatgttgtttaggttttcaatctccttatttcttgcytacttcatctttgctgtattaagaaagctgtatgaatatctctgattaatgtgatttcttttttccccctccctccctggagatggagtcttgctgtgtcacccaggctgtagtgcagtggcacaatctcaagtcactgaaacctccccatcccgagttcaagcaattctcctgcctcggcctcccaagtagctgggactgcaggcactcgccactacacgtgactaatttttgtatttttagtagagacagggtttcaccatgttggccaggctggtctcaaactcctgacctcgtgatccgcccgcctcggcctcccaaagcactggaattacaggcatgagccatcatgcccagccaatgttatttcttttatgtctcctagcatctcctgtagtttggctttataaagatgattactatgttatttgacatataactgttcataaagatgtgtctacattgtaaagtatggttttcctgtgtaaaaagtgcctgtctttatcatgtttaagatttttggcttg

SEQ ID NO: 710714 - DNA, 1250 bp, Homo sapiens
aagaactattaggccttactctatatgttgccaatattttctcccagattttcagttatgatttttgatgtgcaaaaacatttaatgttatatagtcaaaattatcgatcttttttactgcctatagattttcaagcataattaaaaagccttttcctacaccaaaatgaaaaagaaatttactttttattgtatcatacagtttcatttttatgttagatctgtgatatattttgagttaattttgtgtatatataagctatgaattaatttcacctttttctaaatggctcctgggttgtcccgttgtcccagctttaatttttaaaaagtctatctttgtcttttattatatatcaaatttccatatgaactttagttctattattgagtcttctatttcaccggttgatttatcaatttatgctctaattgaccactgaaggatttacatcaaagaaatcagtaaatgatataaatcagatcccccgaccccaacccaaactacttgtttaccagtatgccactaaacttactctgtgtgtgtgtgtgtgtgtgtgtgtgtgtgtgtagtaatatataatcaaattatgtggatgttgcatgagctcttgagaagatgtattctctattgacatggtgtagagtttgacatacagtatatctacaagatctcctgtagtgattatgttgtttaggttttcaatctccttatttcttgcctacttcatctttgctgtattaagaaagctgtatgaatatctctgattaatgtgatttcttttttccccctccctccctggagatggagtcttgctgtgtcacccaggctgtagtgcagtggcacaatctcaagtcactgaaacctccccatcccgagttcaagcaattctcctgcctcggcctcccaagtagctgggactgcaggcactcgccactacacgtgactaatttttgtatttttagtagagacagggtttcaccatgttggccaggctggtctcaaactcctgacctcgtgatccgcccgcctcggcctcccaaagcactggrattacaggcatgagccatcatgcccagccaatgttatttcttttatgtctcctagcatctcctgtagtttggctttataaagatgattactatgttatttgacatataactgttcataaagatgtgtctacattgtaaagtatggttttcctgtgtaaaaagtgcctgtctttatcatgtttaagatttttggcttg

SEQ ID NO: 710715 - DNA, 1231 bp, Homo sapiens
cagcctggctgccttctctgtagaccctttttgatgtgcttggtccattagcaggacaaatagcactctcttcaagcatggttgtgtgctaatcactccaggctgtcaaagccatcagcagtttcaggagcactgattgcccaccctctgcagagctctggtgttcaaggtccacataaattgctctatagaaaagctgatcttagcttaaggtcaagggaaggagggctcggtgcttgtctaggccccttctctctgtcttcacttttttttgcattcatatcactgcctcctcgctattgattccttatcagccattgctaaagcacaaagaatagaacattttgaggctgagaagttgtgataggaagaggaggttgcctgaaaaaaggcagaaatcagaacaatatatataatagacacatgctagcttatattaaatattccaacatgtggagatacaytgagacagagagccagtcatttgctataaatacttatcagaaaataaaagaagattaaaagtactcgaagtcatacagtcctatagagaaataagaaggatccacaaacaaaatcagcagcagcgttgcatgatgatgaacttgctatcacttgagatgatcaggaaatgccaggtgacaacttgtcatgtatgcagcagtgagggttggttcattccctcattgaatcactcatcagtcacagagcatctgtgggggtagcagtccccatagaagcactgtggtctttgctcttgagaagctcacctttggaaggattatttagatgacttctggtatcttccatgtcagggattctataattctgtagctctacattcaggactgacacttagtgggtatgcactggtatgattttattggctgctaaaatgctaagatatttccatactggttggtaaacagccagtgtgaaccccgccacatccccttattccccaggatccagcaactagagagacagtatctgccccaaaaggggtctcgaggacctgcctttatcttaacattcagagcccttccagttaattggctcctatgtttaccaactgctaaatagttttaatatcactgtctccacatccatatctctcacacttgttagactttgtgaaagatccccaccaatttaacccatctacttctgcgctgttttggaaaggaattcaatgaaaacaatggagtgttttgtataaacaaataggaat

SEQ ID NO: 710716 - DNA, 616 bp, Homo sapiens
gaagcaagtcacatgatctgcttacacgaaaagtagggaattatacaggtgtgcgactcataggggacatttaagagtgtgtcgtccaaaaatacattcattaagttcttcatcaaaagttaaaaatctagtaagcattcttgttaaaattgaataatatattatgtttcmtatagtgatcttttaaaaacacagttggatccatggtctctaaccaacccctttctcctgctcatagcaatccaataatttcccaacttgtaataaaagcaaaactgcttctaaagtttatagactgtacatgagttgggtcctgttaatcattgtctctgtctttcccctttggctgtgtgccccagacacactccaaattacttcttagtgtagggctttgaagtagttgttctgtcaccttctcagaaaggccttttctgactagccaactagggttttaccactcaacattgggtattacataatctgctttttattgtctttttaaaacctgctgttggtgatagtttcttctaggtttattggttactgctggctacccagcccccaactcctctgcagtagaatacaagttccataagagcagaatcgcgatgtgtct

SEQ ID NO: 710717 - DNA, 2211 bp, Homo sapiens
ctctgaatttcttctagccatgaatcaggggttggggtggggaataggaatgtaacacctgtatgtgtagtttttgttcatgataggtcatttccattagattgtaatcccactggatgaaggacctttcatctctttttacctctagatatataatacaaaatagtgcctggaacataataggcactcaattggcagtttcttaataaatgaaatagagaataaagtgagttgattctggaaacacagataaaggtcattttgagtgtttttttttttttttttttttttttaaraaataccaaagaaaataagctattctctgtaggtagtggaattaagattcctacatgagacttgataagctttttgtcagactcgtcatatttttttgtctgttttttcagtctaaacattttttaacactaatcacatatcattttatagatggtgaaaggtttaattaataaaaaatgattactttgaaatcctttgaattgaaaaaacacttaaagctttactgtattcttaaggctagtttattaataaagacacattacttttatagaaatggctaaaaataaggcaaaaatatttaggcaagatgagagcaaaataggaagtgccacttttagaccatcagacctcatgagaactcactcactatcacaagaacagcacggaggaaacagcccccatgatccagtcacctccaaccaggtccctctcttgacatgtgaggttacaattcaaaataagatttgggtggggacacagagccaaaccatatcaatctccctcagagattctgatttaattgttttaggtgtaatctgggcatctacatttttttaaaaaaatcattaagtgattctaatgttcagccaagtctagtacttattgttttaagcctctctctggttgatgtcacttgtagctttaattagtatatgtaagtaatgaatgtgtatatgtatattctaggctttggaaactttcagtatatagttaaatgactattttagttttcagcacatttgagatcttgcaactgtccatgaacatcacacctgtaactaacatgtggcatatgtgatagtcaattttatgtgtcaacttgactacaacccagtgtgctcagattaaacattatttcaaggtgtgtttataagggtgtttctggatgagatttgcatttgaatttactcagtaaattagattatcttctccaatgtgggtggtactatccaatctgttgatggcctgaatagaacaaaatggtaaaagaaggagaaattaccttatttttatttttaattttactacctgcctgcttgagctgaacctgtcttctcctgccttctaccaggatatacaccatcagctcccctgcttattaggcttcagacttgaactagaattacattgtcagatttcttgagtttccaattgcaaactgcagatcatgggacttctcagcatccaaaattgcatgagccaatttctcacaaaatgtgtgtgtttatctatagatatagatatttgttatgtttcttatttgttatgtttctctggacaaacctgaaaaatactgtatagttcactgtaaccaaaaatattagaagtgattagagatagatctagtagtctttttataacttttattttagtttcaggggtgcaggtgcaggtttgttatataagtaaattgtgtgtcatgggggtttagtgtacagattatttcatcacccaggtaataagcacagtagcacagtgcctgataggtagttttttgaatctcaccctcctcccattctccaccctcaaataagccccagtatctgttgttcttttcttcgtgtccacttgtactcaaagcttccacttataagtgagaacatgtgatatttggttttgtgttcctatgttagtgcacttaggataatggcctccagcttcatccatattgctgaaaaaggacatgatctcattctttttatggctgtctagtattccatggcatgtgtgtaccactttttgtttaaccagtctaccattgataggcatttatgttgattccatgtctttactattatgaataatgctgtgatgaacatacatgtacatgtgtctttatgatataataatttatttcctttgggtatatacccaataatggaatcactgggtcaaatggtagttctgttttaa

SEQ ID NO: 710718 - DNA, 614 bp, Homo sapiens
gtttggagttctgcaatatagaatgcagcttcaaaaattgttgacttatgggaaagaaagaagtagtccaagagaaaaggagaactctcagaaaggaaaagaccaacagaaggtttcaagagagcaaattacagagagggcaacacttaagcttattttttctactaaaagtttggctccttactctctcaatctctttgtttcctgtgatatcattacatgagagcttggcaccatagaaacaaaatgaagctgctgtaaacctttcctggagtttacatttcaccccagaaagtgtttctgataaggttaagatgaggaaaaaatgagttactaagtgtgaatgagtctatctggtatagcacttgrcagaaattaggggctcgtcaatgtgaatttgcctttcttgaaaaaatacctgtagacagctcctctctgctaatcttttggccagtaaattctaaaattcagtaattaaatgtcttccaatacatacataagagaactatagtttcctctttccccactccattctcaccaaattcttataaaacatgctttagattgtcttgtaggatttcaaggtaatgagaaagaattttcagaaatacaca

SEQ ID NO: 710719 - DNA, 614 bp, Homo sapiens
gtttggagttctgcaatatagaatgcagcttcaaaaattgttgacttatgggaaagaaagaagtagtccaagagaaaaggagaactctcagaaaggaaaagaccaacagaaggtttcaagagagcaaattacagagagggcaacacttaagcttattttttctactaaaagtttggctccttactctctcaatctctttgtttcctgtgatatcattacatgagagcttggcaccatagaaacaaaatgaagctgctgtaaacctttcctggagtttacatttcaccccagaaagtgtttctgataaggttaagatgaggaaaaaatgagttactaagtgtgaatgagtctatctggtatagcacttggcagaaattaggggctygtcaatgtgaatttgcctttcttgaaaaaatacctgtagacagctcctctctgctaatcttttggccagtaaattctaaaattcagtaattaaatgtcttccaatacatacataagagaactatagtttcctctttccccactccattctcaccaaattcttataaaacatgctttagattgtcttgtaggatttcaaggtaatgagaaagaattttcagaaatacaca

SEQ ID NO: 710720 - DNA, 614 bp, Homo sapiens
gtttggagttctgcaatatagaatgcagcttcaaaaattgttgacttatgggaaagaaagaagtagtccaagagaaaaggagaactctcagaaaggaaaagaccaacagaaggtttcaagagagcaaattacagagagggcaacacttaagcttattttttctactaaaagtttggctccttactctctcaatctctttgtttcctgtgatatcattacatgagagcttggcaccatagaaacaaaatgaagctgctgtaaacctttcctggagtttacatttcaccccagaaagtgtttctgataaggttaagatgaggaaaaaatgagttactaagtgtgaatgagtctatctggtatagcacttggcagaaattaggggctcgtcaatgtgaatttgcctttcttgaaaaaatacctrtagacagctcctctctgctaatcttttggccagtaaattctaaaattcagtaattaaatgtcttccaatacatacataagagaactatagtttcctctttccccactccattctcaccaaattcttataaaacatgctttagattgtcttgtaggatttcaaggtaatgagaaagaattttcagaaatacaca

SEQ ID NO: 710721 - DNA, 614 bp, Homo sapiens
gtttggagttctgcaatatagaatgcagcttcaaaaattgttgacttatgggaaagaaagaagtagtccaagagaaaaggagaactctcagaaaggaaaagaccaacagaaggtttcaagagagcaaattacagagagggcaacacttaagcttattttttctactaaaagtttggctccttactctctcaatctctttgtttcctgtgatatcattacatgagagcttggcaccatagaaacaaaatgaagctgctgtaaacctttcctggagtttacatttcaccccagaaagtgtttctgataaggttaagatgaggaaaaaatgagttactaagtgtgaatgagtctatctggtatagcacttggcagaaattaggggctcgtcaatgtgaatttgcctttcttgaaaaaatacctgtagacagctcctctctgctaatcttttggccagtaaattctaaaattcagtaattaaatgtcttccaatacatacataagagaactatagtttcctctttccccactccattctcaccaaattcttataaaacatgctttagattgtcttrtaggatttcaaggtaatgagaaagaattttcagaaatacaca

SEQ ID NO: 710722 - DNA, 1874 bp, Homo sapiens
cgagttattatataaatatttgattaaaataatgactttctggctctcaagagaagaggcataaaaatcatagccccatttataaaccacactgcctcagtctaataaaacagcagtgtctgtaagagcctgacaagttaaaagtaagctcagtaacttcgaacatagtcttctatattcaataatttgaccctagacattttatttctggtatttctctttttatattttacatataaattgtacgcattctaattagtacatgtctataataaacatagcaatactaattgctttagggaatacaaattatttcacaccagcttgtggtctaaagaatttgcagtctagttggagaagaatgaatamagcacaaaatgttagatattgaaattaaaatggggctatgacaagcaatcatttcttagccttttctgacttctcagtaaaagacctatggagaccaaaagagtaacaaaaagagaaaaagtgatgaaaatgcatagctattaatggagtctagaggaaaatctaactagaaaactagattataactggatttagaacataatccaagcctcatactatgttgctggaaacagaacataccacttggtatgaaagaagggcatatggaattttccccaccttctatctgtaggttcagaaatgaaagttttgactgaagagattgttggaaaatcatctctctgtttcattgttactacttttggagacagccagagttctattcttgtcattctgctcctgcccccataccatcttttatactcatctgtaattaaagttttagaaagcagttaccagtaggcagggaatggggtggaacttacatggctctaccatagttttaggtaaagcaggagtagagagaatagtagcagtttatatataggcttatggtttatatatatatattcttgcaacagcccaatctgaggctaacaaagacatactccaaaatctctggacactcagatttggtcccggaaagtggatccaattacttaaacagaaaaaattgtaggaccaagggcaatgcacataccctacagctgggtacacatagagctctcctcatatgatgaaaaataaaaaacttcaatcacagacaactttcgaataaagagcttaaaagttcagcatttaagctcttttctacaagaatctagataaaatctagagatgttttttattttcttaatagcatttgtatagacaaaagccttttggagcccaaaagacatgaaaattgaacaccattcagtttaaaaggaaagagacagccattccctgacaagccttccaagatggcacaccaacaattctgtaccttttcccagccaaatcctgaagaagcctgagaagtaataaaaagttgttgcatcacagaaacataaaatctctcagaaacctacagagagataaaatcttgctaggtcctggtagagggaaaacagtccccaagagtagaagatggccaagctgttagcccccacgtagtctagcagtatgttggggagggaggttgttaactctgattttttttctctcacacattaaacagaaaaatgtatcatctcctccatcaccatcacaagagactactgcactgccaagccagtatctgctgcaggaagtggagtgatgggtaacttcaggatctagcctgagccagtttcttttgtgggagcataaagatgaaagaaaatggagccaggctcccctcatcctgacattttttgttttacacaaaaatctgtataggacattgctaccaaaagcttttctcagtcttgttttttacattttagatagcagagatagttgatctatcaaactctacaaggacc

SEQ ID NO: 710723 - DNA, 1874 bp, Homo sapiens
cgagttattatataaatatttgattaaaataatgactttctggctctcaagagaagaggcataaaaatcatagccccatttataaaccacactgcctcagtctaataaaacagcagtgtctgtaagagcctgacaagttaaaagtaagctcagtaacttcgaacatagtcttctatattcaataatttgaccctagacattttatttctggtatttctctttttatattttacatataaattgtacgcattctaattagtacatgtctataataaacatagcaatactaattgctttagggaatacaaattatttcacaccagcttgtggtctaaagaatttgcagtctagttggagaagaatgaatacagcacaaaatgttagatattgaaattaaaatggggctatgacaagcaatcatttcttagccttttctgacttctcagtaaaagacctatggagaccaaaagagtaacaaaaagagaaaaagtgatgaaaatgcatagctattaatggagtctagaggaaaatctaactagaaaactagattataactggatttagaacataatccaagcctcatactatgytgctggaaacagaacataccacttggtatgaaagaagggcatatggaattttccccaccttctatctgtaggttcagaaatgaaagttttgactgaagagattgttggaaaatcatctctctgtttcattgttactacttttggagacagccagagttctattcttgtcattctgctcctgcccccataccatcttttatactcatctgtaattaaagttttagaaagcagttaccagtaggcagggaatggggtggaacttacatggctctaccatagttttaggtaaagcaggagtagagagaatagtagcagtttatatataggcttatggtttatatatatatattcttgcaacagcccaatctgaggctaacaaagacatactccaaaatctctggacactcagatttggtcccggaaagtggatccaattacttaaacagaaaaaattgtaggaccaagggcaatgcacataccctacagctgggtacacatagagctctcctcatatgatgaaaaataaaaaacttcaatcacagacaactttcgaataaagagcttaaaagttcagcatttaagctcttttctacaagaatctagataaaatctagagatgttttttattttcttaatagcatttgtatagacaaaagccttttggagcccaaaagacatgaaaattgaacaccattcagtttaaaaggaaagagacagccattccctgacaagccttccaagatggcacaccaacaattctgtaccttttcccagccaaatcctgaagaagcctgagaagtaataaaaagttgttgcatcacagaaacataaaatctctcagaaacctacagagagataaaatcttgctaggtcctggtagagggaaaacagtccccaagagtagaagatggccaagctgttagcccccacgtagtctagcagtatgttggggagggaggttgttaactctgattttttttctctcacacattaaacagaaaaatgtatcatctcctccatcaccatcacaagagactactgcactgccaagccagtatctgctgcaggaagtggagtgatgggtaacttcaggatctagcctgagccagtttcttttgtgggagcataaagatgaaagaaaatggagccaggctcccctcatcctgacattttttgttttacacaaaaatctgtataggacattgctaccaaaagcttttctcagtcttgttttttacattttagatagcagagatagttgatctatcaaactctacaaggacc

SEQ ID NO: 710724 - DNA, 611 bp, Homo sapiens
cttgatgttcattgcagtgctgttcacaacggcaaagacatgcagtcaactcaggtgcccatcaacagtggattggataaataaaatgtggcacatatacaccatggaatactacacagctgtaaaaaagaaaaaagtcatgtcctctgcagcaacatggrtgcagctgaaaaccattatcttaagcaaaataatgcagaaatagtcatatattgcgtgttctcacttttaagtcgaaactaaacattgggtgcgcatgatcataaaaataaaaacaatggacactgggcaatacaagaggagggaggaaggaagcaggatgggtaagcgttgaaaacaactacctattgggtactatgctcactacctgggtgatagattcattcttactcctaacctcaattatgcaatatacttatgtcacaagtctgcatatatgccccctgattctaaaataaaagttgaaaagaaaaagatttatacatgaagagcagacttccatgttgtaaaacatattttgtatttattaatttgaaaaatgttactttttgttgagtactgttagtgtttatgtgaacaataattttagtgaactgtaggtaggtaatttg

SEQ ID NO: 710725 - DNA, 611 bp, Homo sapiens
cttgatgttcattgcagtgctgttcacaacggcaaagacatgcagtcaactcaggtgcccatcaacagtggattggataaataaaatgtggcacatatacaccatggaatactacacagctgtaaaaaagaaaaaagtcatgtcctctgcagcaacatggatgcagctgaaaaccattatcttaagcaaaataatgcagaaatagtcatatattgcgtgttctcacttttaagtcgaaactaaacattgggtgcgcatgatcwtaaaaataaaaacaatggacactgggcaatacaagaggagggaggaaggaagcaggatgggtaagcgttgaaaacaactacctattgggtactatgctcactacctgggtgatagattcattcttactcctaacctcaattatgcaatatacttatgtcacaagtctgcatatatgccccctgattctaaaataaaagttgaaaagaaaaagatttatacatgaagagcagacttccatgttgtaaaacatattttgtatttattaatttgaaaaatgttactttttgttgagtactgttagtgtttatgtgaacaataattttagtgaactgtaggtaggtaatttg

SEQ ID NO: 710726 - DNA, 611 bp, Homo sapiens
cttgatgttcattgcagtgctgttcacaacggcaaagacatgcagtcaactcaggtgcccatcaacagtggattggataaataaaatgtggcacatatacaccatggaatactacacagctgtaaaaaagaaaaaagtcatgtcctctgcagcaacatggatgcagctgaaaaccattatcttaagcaaaataatgcagaaatagtcatatattgcgtgttctcacttttaagtcgaaactaaacattgggtgcgcatgatcataaaaataaaaacaatggacactgggcaatacaagaggagggaggaaggaagcaggatgggtaagcgttgaaaacaactacctattgggtactatgctcactacctgggtgatagattcattcttactcctaacctcaattatgcaatatacttatgtcacaagtctgcatatrtgccccctgattctaaaataaaagttgaaaagaaaaagatttatacatgaagagcagacttccatgttgtaaaacatattttgtatttattaatttgaaaaatgttactttttgttgagtactgttagtgtttatgtgaacaataattttagtgaactgtaggtaggtaatttg

SEQ ID NO: 710727 - DNA, 1147 bp, Homo sapiens
taaattggcttcctttcctgcattctttatcatcactgcaatctctttttgccataacacaagttgagtgttttgttttatccttttcccatcactatcacatacacacagggcaccatcatgacttgctgtgcaaggattgcatgtgtgtgactcaggggaaagactggtttatgatgtggcaatgagaaaggacaccgtgttgggggaggggcctaaagctgaaaggttaaactcttaggaaacagctgtgaagtggcgtatctgttaagtattgtcatatgtataagcccatgaaaccatcaccaccaccaaaatagtgaatatgtccaccatcctaaaatttttctcacgcccctttgtaattcgtcactcttgcccctccccaggccatgactgatctgcttttctgttactagtgattagtctgcattttctagaatattatatcaatggaaatatacatacatatatgcacatatatgtgtatatgtgtgtatatatatgcaacctgttccaataaaagaaaacctgataagaaaaatatatatatttctattaacctgttctgtgtctgttggctgactgcaacctggtaacgcacacataaattgaattatctaaatcagtgaataataataggttttgatataagagttaatgacttgatgatggccttcatacacaacttaattgtcaagacatttgtttataaaatgataaatacacaaagtagcctatgagttatagcrtactaaagttttcctttcaaccgtttcatagaaaagaaaaaacctgaaaatactaatacttacaggacagaatttgtactgttagcaagaatagcttgtatctcatgtaggaacatatttgacttttgcttctgtgttaaaactttgacaaagatgattttgaataaagtttctttataatcagaccccatatctatcaggttctctgatactgtaatttaacatcactattgggcctaaatagcattctgtaaatgcttcaattggtattaatcatgatcatcttaacatctgtagaaaaataataaacaaggtcataaatccctcactacacaatttcacgttttcaccagcattttattctttctttagaagacttagtcaaagactcagaa

SEQ ID NO: 710728 - DNA, 2030 bp, Homo sapiens
agaatcagaagggaagagggagcttttatttcttcctttacatacttctgattttttgaggttttaaataagtatcccttactttatatatataagtatacaaatatatttcagctttggacctctgaagtactcttggtagcatcattttaaaaatcatgatataacayataatgatgcctagtcttcaaatatcttagtgtttttttttacataagatcaatttacataaccttatccttatttaacttttaatcctttttgacagttccatgtctatcttgaaaaagaatgtgtcttaatctctagaagtaaaaataaataagagctacctcttagatacacaccttccccaagccaccccaaccctcaagcctgagattcccacctagaaaataaagacagccatggtatatcttcatgagtgtcatgagggaggggtgaacacaggtgttcaaagtttccagcacagggcctgggacaaaatgactcttcagtggtagtttttgttgctattcaatgtcctcagagtaaaggggccccttctggaaatttatttttgcttggaggttcggtgaaccttaccctggctttctatctcttcaaacaccctagaagcagaaagaattccatggggccaactctgggccttcccactctgaaaacgacacagtcacaaactacaggcccaaggaagccagggcgggccctttaaaaccttaccctcattgactcaagcagcttgagaaggagccttggcagtcctctggccactgtaatcatctttcacattagtcgagacaaatgccttggaattttccttaaactgggtgtcacctcccatttttgatatgaaaagatacaagtgaagagctgccaatgggtggagtcttgggccgggtccccggatacgtcaggctactttcattttccagatatgggagaagagaaaagtaggccaggccagggctgcagtgtccccaagaggtcagcagctccaggctctgagccttgcttctgggctgccttccagccccactccattccagtttgcagtaatgaatgttatacacacactcatacacacacacacacacacacgcacacacacatacacacacacatgcacactgattttttttaggagccgtcaatgaagttttaagttgttgacaattattgttggtcatcaggccagcaattcttctgagtgaagtgttgaacaaggctgggcctcagagctacacagatgtatggcttcctgaaagccatacatctgtgtgtgcctgggtaacttgagaaatagtactatgcatgtgataagtgtgccacaaagacttagaaagatagaaaactcctcacagatttttcacttaaggaggtaatgtcctcttgaaaatgttattaagtacaaattaaacaaatgttcaaggtgcacctacctgacacaccaggggcgcctgacaaatatttctggaatgacagaatgattctttgctctgtggtctgaagcaaatgacttgccttggttgggtcccagtctcctttctgtgaatagaggtaatcacacctcctccatgggtggtgaaggctgaggaaaaacgctttgtccaggagggttgtgctgcgaataggagagcaggtttgggggaggtggctaaccttggcacccacctgggctcgcagaagccagtgggaggtatgagataaactgcccagggacctcctcagccacccttacatcttatctgccctgtagccacgtcctcccctgcagtcaggctgcttatcaggggctgacaccaggcgcagccaactttgtgctttgattcttgccaggtttcttctgtggaaggggtttccagcccccgcacccccttagccaaagtttgccctttaaagtcaatctccggtcacacatctccagtaagccttcaaacctcactccagagccgactctctcctccatcctcccctatgccttctgcccccacactaaggcagcaggttgcattcgccgggcactgccc

SEQ ID NO: 710729 - DNA, 2030 bp, Homo sapiens
agaatcagaagggaagagggagcttttatttcttcctttacatacttctgattttttgaggttttaaataagtatcccttactttatatatataagtatacaaatatatttcagctttggacctctgaagtactcttggtagcatcattttaaaaatcatgatataacacataatgatgcctagtcttcaaatatcttagtgtttttttttacataagatcaatttacataaccttatccttatttaacttttaatcctttttgacagttccatgtctatcttgaaaaagaatgtgtcttaatctctagaagtaaaaataaataagagctacctsttagatacacaccttccccaagccaccccaaccctcaagcctgagattcccacctagaaaataaagacagccatggtatatcttcatgagtgtcatgagggaggggtgaacacaggtgttcaaagtttccagcacagggcctgggacaaaatgactcttcagtggtagtttttgttgctattcaatgtcctcagagtaaaggggccccttctggaaatttatttttgcttggaggttcggtgaaccttaccctggctttctatctcttcaaacaccctagaagcagaaagaattccatggggccaactctgggccttcccactctgaaaacgacacagtcacaaactacaggcccaaggaagccagggcgggccctttaaaaccttaccctcattgactcaagcagcttgagaaggagccttggcagtcctctggccactgtaatcatctttcacattagtcgagacaaatgccttggaattttccttaaactgggtgtcacctcccatttttgatatgaaaagatacaagtgaagagctgccaatgggtggagtcttgggccgggtccccggatacgtcaggctactttcattttccagatatgggagaagagaaaagtaggccaggccagggctgcagtgtccccaagaggtcagcagctccaggctctgagccttgcttctgggctgccttccagccccactccattccagtttgcagtaatgaatgttatacacacactcatacacacacacacacacacacgcacacacacatacacacacacatgcacactgattttttttaggagccgtcaatgaagttttaagttgttgacaattattgttggtcatcaggccagcaattcttctgagtgaagtgttgaacaaggctgggcctcagagctacacagatgtatggcttcctgaaagccatacatctgtgtgtgcctgggtaacttgagaaatagtactatgcatgtgataagtgtgccacaaagacttagaaagatagaaaactcctcacagatttttcacttaaggaggtaatgtcctcttgaaaatgttattaagtacaaattaaacaaatgttcaaggtgcacctacctgacacaccaggggcgcctgacaaatatttctggaatgacagaatgattctttgctctgtggtctgaagcaaatgacttgccttggttgggtcccagtctcctttctgtgaatagaggtaatcacacctcctccatgggtggtgaaggctgaggaaaaacgctttgtccaggagggttgtgctgcgaataggagagcaggtttgggggaggtggctaaccttggcacccacctgggctcgcagaagccagtgggaggtatgagataaactgcccagggacctcctcagccacccttacatcttatctgccctgtagccacgtcctcccctgcagtcaggctgcttatcaggggctgacaccaggcgcagccaactttgtgctttgattcttgccaggtttcttctgtggaaggggtttccagcccccgcacccccttagccaaagtttgccctttaaagtcaatctccggtcacacatctccagtaagccttcaaacctcactccagagccgactctctcctccatcctcccctatgccttctgcccccacactaaggcagcaggttgcattcgccgggcactgccc

SEQ ID NO: 710730 - DNA, 774 bp, Homo sapiens
ttgtgaaggagctccgggcagtggaagactgctttggttcacatttcagaagttcctcaggacttgggaagaggagctaatgaaatgcttctctgcttcaagtcactcacaggaaaatgaatcttctaaaatttaagatatttcattttaaagtgcccagtaatattaacactacccaaagctacaattctctgatggggagtggagacccactgtctcccctgaggaattcatattcttgtaatcaacagcctaatactgatcaacggaattgctgagtcacaaattactagagtttattcgtaagtccagagatggaagaaacagatttcacgtgcaaggtagcaaaggaaaatttaaaattgttagtcttctaattttaaccagttagtcaatataagctggtttatagctacctgtcaacctacacattcaaccagggtttattgagtgcctgccaggtaacagatgtataataaggcccactggatatgtgaacatgaaccagctacagattttgtcctcaaggagattaatgtcaaaggtaaaaatatattttcagggaaatgataaatcagagctaatcgatccactctggatttttaaaattacttttaaaataattaaaatagctttacatagaattttttgctctttctcctcacaactttgagttctactggttcgaagatcttggtacttaagaagggaatgcttctaccaagggatgcaacaatggttccactgaattagargctgacactgccacttggc

SEQ ID NO: 710731 - DNA, 774 bp, Homo sapiens
ttgtgaaggagctccgggcagtggaagactgctttggttcacatttcagaagttcctcaggacttgggaagaggagctaatgaaatgcttctctgcttcaagtcactcacaggaaaatgaatcttctaaaatttaagatatttcattttaaagtgcccagtaatattaacactacccaaagctacaattctctgatggggagtggagacccactgtctcccctgaggaattcatattcttgtaatcaacagcctaatactgatcaacggaattgctgagtcacaaattactagagtttattcgtaagtccagagatggaagaaacagatttcacgtgcaaggtagcaaaggaaaatttaaaattgttagtcttctaattttaaccagttagtcaatataagctggtttatagctacctgtcaacctacacattcaaccagggtttattgagtgcctgccaggtaacagatgtataataaggcccactggatatgtgaacatgaaccagctacagattttgtcctcaaggagattaatgtcaaaggtaaaaatatattttcagggaaatgataaatcagagctaatcgatccactctggatttttaaaattacttttaaaataattaaaatagctttacatagaattttttgctctttctcctcacaactttgagttctactggttcgaagatcttggtacttaagaagggaatgcttctaccaagggatgcaacaatggttccactgaattagaggctgacrctgccacttggc

SEQ ID NO: 710732 - DNA, 627 bp, Homo sapiens
taaagttctttgaacaagtcagaatatgttgtaagacaattgatcaggtgtgagaaatgaaagctggwctgtaaagacagaaggagaaagaaaaagagataatggcagtcctggaccaggaaagagtatttggaaaatgactggaagtgagattaagtgagaggtaggggtcaagagtgactgtgccaggtttgaaggccaggtcacaagacagtgtttatgtcaatcatagaagtgggaagggtgagtggaggaggtgctttaggaggggcttttctgttgaagtcttggtgtgtgaatcaggaatatatgtccactgtgagttgggtgtaggagtgtggagctcagaacagagacttgcgactcgtgctcacctagcagagacttgataccagaacacactggtgagagatggtatcatccagggtgagaaggagagaaaggagagaatctaagacttggagaattgcctttattttaatggtaagcggaagagaagaagaatggaaccagagaaaacaaagactgagaatacctctgagcaagcacctgaagaaggcaatactacagatacccttggaagagggctcttcaaggaaagcacgcatggcccatggaactaaatgc

SEQ ID NO: 710733 - DNA, 582 bp, Homo sapiens
ttctaaggtgaagagaagggcggtggaagagctcagagcactgtcctggtgttctcagtaaagtcagacctcagttgagattgaggaagtcagactggggctgaagttgttttccaaactggttcactgacttgcccaaggtcaaacagttggaaaatgttagctgggatcagaaaccaagtcttccaaccaagctcagtgatctttctaccacattagaaattgtaaactttgttattctaatatgagatattaggtcttttcctaaagtgcccttaaatgagctattctgactttttaagcaagtagtctaaagtactttactttaaaagaagcccartgacaatttgagaccactgggggagtattaagaatttaatttatcaagtctcaaaaatcttaagcgatctcacaaaataaaataataaaaaataattaaaattttgtttaaaattgtaaattaagactttctcttttccaggtgaaaagatgcaaagaactctctaatgacctgcttctttcttgaaatctttgactaaaacttttaaggaagttccccataatcaatgtggaagaaaataa

SEQ ID NO: 710734 - DNA, 594 bp, Homo sapiens
ggatttgttttgtaaccttgaacaagtcagataaccaactccactgacctcagcatcttctctttgaaaatggggagctttgcctaggtgattttgttttagtttcattaagactatgatcaacgacacagtcacaaaaccaaaggccctcaaaatgaattcatttccaatcacacccaagtattaggattaaaatggatgatcaaatcctcaaacttgaaaaaacttgtcattatatgacttcgttagmtgactaattaaatggaatattatttaactaagtcaaagtttcagaaagattcatccagtgtcctcagaaatcttcttagtatgcactttggaccaggtcccaaggactagtagagatttcatacctagttccaaaattgagaaataagatgtctccttttattcaggcatttattcattataaattagagtttcaatattgtaacctaaactatctcaactttctcatctttactatagtcaatacaattgggacaactgcactgtgatcagcatcctggtgccatctttgttctgtggtgtggtgtgtgtgcttctctacagagacctgctagttctggacag

SEQ ID NO: 710735 - DNA, 594 bp, Homo sapiens
ggatttgttttgtaaccttgaacaagtcagataaccaactccactgacctcagcatcttctctttgaaaatggggagctttgcctaggtgattttgttttagtttcattaagactatgatcaacgacacagtcacaaaaccaaaggccctcaaaatgaattcatttccaatcacacccaagtattaggattaaaatggatgatcaaatcctcaaacttgaaaaaacttgtcattatatgacttcgttagatgactaattaratggaatattatttaactaagtcaaagtttcagaaagattcatccagtgtcctcagaaatcttcttagtatgcactttggaccaggtcccaaggactagtagagatttcatacctagttccaaaattgagaaataagatgtctccttttattcaggcatttattcattataaattagagtttcaatattgtaacctaaactatctcaactttctcatctttactatagtcaatacaattgggacaactgcactgtgatcagcatcctggtgccatctttgttctgtggtgtggtgtgtgtgcttctctacagagacctgctagttctggacag

SEQ ID NO: 710736 - DNA, 3133 bp, Homo sapiens
aaatgaaatcttatctatataacatgtaatctaaattaatataaaataattctgaagtgctagagggtgcaaggggcaggagagtttcacttggtcttggggtgctctgtgtggtttgtatcttgtaataagaraagattaatatcttaactaacagctacgtcaaccactctgttgctctttgatataaagcatgagtgactggctgtcttatgttttcacttcttagaccacatttaaattaattctatcacatagttgattcaagctgatgcttgcagatctggtaagaacgacccaagggaaaggttaggacaaaaacagacaagttgcggaagaaagccaatgaaccaaaaaacatatagcaaaatgttcaacctcatattagtcagggaagtatactatggagcagaaaagaaacaaataaaaacaaagctccacttaacaccagtcataaagtctgataacaccaagtattatttgggaacaaagggcatttactgctaatggggctgtaaattggcaaaccaataatttaataaaataccaagtgtttatgacacaaacatatttcataactcaaaacaatattctattttgttaatagatgcatacatatgtagaaaaagcataaaaacataaatggaaatgatataaatgacaagatgttactatactgtgggagcaaaggcctggaagagaatggggtcatagacctcaagttgtctttgcaatattttgttactttaaagaaaaaaaattatgatttgaagcatgtgggaaaatggtaacatagttaaaactggtgataggtacctggatgtcacaatatttctgtgtgtgaaatgtttcatacattttttaaatttattacaaaagcaaatcagggacatattcatggacaacccaacttgtgagaatttgaaactgtttcagaacttagccttccctgggggatggcaactttgatgtttgcccacatgaaaggttttacatgattacaagtatatgactatccttttctttccctaagaggaaaaacttactaagccaaaagaagataattttaatttgctgctcagatctcaaatcttgagataaaaatctcacttaccaatggttctcacttgaacaacagctctgactgtccacgaactcacagtatccgactgagtgtaatcacatacatatgtgccctggtgatagtcataaacttcatccactacgattcggttgctcctttccacagagaggagttttccattctaatccaaaagatattttaagcagataaatttgccacagaaaaactttatgaaatacatacctaaagaaaaatcttacaaatttgaacagggaggaagaaggtcaatctgagataagggtatctcacaagctatgaagacattgtgttcaaaaactgtacttgtagatttgaaacaagaggcattttccaatacaattgcattatgtgtagagatgagagagtcaaacctccaaacctgatcagcccctaaacagctatttaacaaaggacttcccagagcatgcatgacttggagccctgagagtattctggaagacctgtagtgttctaagggctgaaactgaaatgaattttttaatgtgtgtgtgtatacatacatatatatatatacacacacacacacatatatatacatacacacacatatatataacatatattgtatatatttacgtatataaacagatacatacttataaataaaaacttatataaacagaggttctggaacgtgagtggcttttttttctctctctgacaaagctggtaagtgagagcactgagaatcaacctcatttttttctggttctgagttttattttctgattgaggaatttcccttccactttgcctgcctactagtagaagctgggattcccccacgccacatccctcgtgtgtttcctgtggtccaagaaggaatttccagcaggctggaaaggagactaagggtgggggcagagtggccagagaagtgcagctgtgggcaggaagcaaaacaaggcaaagaggtagtggtatacaaggctaaatatataccagatgatctcaagaatcaggaacttttcaaaaggaagttttaaaacatagggggaaattcaaagataaaacttcagaggacgcagtgataacatataaagatcagaattcaggggagaggcgtgtcataaatcgcatgagaacgtaatggtgggaggacacagagccgtaactaagacctcacctaagccaagggggaggatggggaataatgtatcttttttacccataaataggtaagtgaggcttagtatgtatcattaagactttatgaaatggaacttagaggaaatatcaaagaaaagaaattagggagaagcaatttatgccaaggatgatgggaaacccattctaataatacaattacagttaatcctcataggacaaagagaggctaatgcagctgcacagggaactcttggttttgctcatatgtgaagcagtcatgagcagaatatggaaacaggaacatccgccactgtgaatctgaatgaataatgtccgtaagtcttcaaaagagtggaggcatgcaaaaaaaaaaaaaaaatgaagacactgcaaaggacttttaaaggtatatgtgaagcagggagaagaacagttattcttactactaggggcaggtattataatattatactgcagtattatcgatttcttatactaccagtcagtacagctactgagcatcacgcacactgtgttattctatgggaatggtacttcctggatttggacaacacactggagctcctagctggacttccactacccagtctgggaggactccaaagacctgcatttctttcactctcctccctggcctattctccctggtgcatttcaggttttcatatccattttaatgttccttatcatagactcattgtgtccaggtctgtattcatcacagctttcctgctcctaattgaatttactactactatctcatatatgttgagccagaaaaacaccaaatatgctactcatctattttacacacactcccagtcaaagcttttaatctttcattttattacatgaaaa

SEQ ID NO: 710737 - DNA, 3133 bp, Homo sapiens
aaatgaaatcttatctatataacatgtaatctaaattaatataaaataattctgaagtgctagagggtgcaaggggcaggagagtttcacttggtcttggggtgctctgtgtggtttgtatcttgtaataagaaaagattaatatcttaactaacagctacgtcaaccactctgttgctctttgatataaagcatgagtgactggctgtcttatgttttcacttcttagaccacatttaaattaattctatcacatagttgattcaagctgatgcttgcagatctggtaagaacgacccaagggaaaggttaggacaaaaacagacaagttgcggaagaaagccaatgaaccaaaaaacatatagcaaaatgttcaacctyatattagtcagggaagtatactatggagcagaaaagaaacaaataaaaacaaagctccacttaacaccagtcataaagtctgataacaccaagtattatttgggaacaaagggcatttactgctaatggggctgtaaattggcaaaccaataatttaataaaataccaagtgtttatgacacaaacatatttcataactcaaaacaatattctattttgttaatagatgcatacatatgtagaaaaagcataaaaacataaatggaaatgatataaatgacaagatgttactatactgtgggagcaaaggcctggaagagaatggggtcatagacctcaagttgtctttgcaatattttgttactttaaagaaaaaaaattatgatttgaagcatgtgggaaaatggtaacatagttaaaactggtgataggtacctggatgtcacaatatttctgtgtgtgaaatgtttcatacattttttaaatttattacaaaagcaaatcagggacatattcatggacaacccaacttgtgagaatttgaaactgtttcagaacttagccttccctgggggatggcaactttgatgtttgcccacatgaaaggttttacatgattacaagtatatgactatccttttctttccctaagaggaaaaacttactaagccaaaagaagataattttaatttgctgctcagatctcaaatcttgagataaaaatctcacttaccaatggttctcacttgaacaacagctctgactgtccacgaactcacagtatccgactgagtgtaatcacatacatatgtgccctggtgatagtcataaacttcatccactacgattcggttgctcctttccacagagaggagttttccattctaatccaaaagatattttaagcagataaatttgccacagaaaaactttatgaaatacatacctaaagaaaaatcttacaaatttgaacagggaggaagaaggtcaatctgagataagggtatctcacaagctatgaagacattgtgttcaaaaactgtacttgtagatttgaaacaagaggcattttccaatacaattgcattatgtgtagagatgagagagtcaaacctccaaacctgatcagcccctaaacagctatttaacaaaggacttcccagagcatgcatgacttggagccctgagagtattctggaagacctgtagtgttctaagggctgaaactgaaatgaattttttaatgtgtgtgtgtatacatacatatatatatatacacacacacacacatatatatacatacacacacatatatataacatatattgtatatatttacgtatataaacagatacatacttataaataaaaacttatataaacagaggttctggaacgtgagtggcttttttttctctctctgacaaagctggtaagtgagagcactgagaatcaacctcatttttttctggttctgagttttattttctgattgaggaatttcccttccactttgcctgcctactagtagaagctgggattcccccacgccacatccctcgtgtgtttcctgtggtccaagaaggaatttccagcaggctggaaaggagactaagggtgggggcagagtggccagagaagtgcagctgtgggcaggaagcaaaacaaggcaaagaggtagtggtatacaaggctaaatatataccagatgatctcaagaatcaggaacttttcaaaaggaagttttaaaacatagggggaaattcaaagataaaacttcagaggacgcagtgataacatataaagatcagaattcaggggagaggcgtgtcataaatcgcatgagaacgtaatggtgggaggacacagagccgtaactaagacctcacctaagccaagggggaggatggggaataatgtatcttttttacccataaataggtaagtgaggcttagtatgtatcattaagactttatgaaatggaacttagaggaaatatcaaagaaaagaaattagggagaagcaatttatgccaaggatgatgggaaacccattctaataatacaattacagttaatcctcataggacaaagagaggctaatgcagctgcacagggaactcttggttttgctcatatgtgaagcagtcatgagcagaatatggaaacaggaacatccgccactgtgaatctgaatgaataatgtccgtaagtcttcaaaagagtggaggcatgcaaaaaaaaaaaaaaaatgaagacactgcaaaggacttttaaaggtatatgtgaagcagggagaagaacagttattcttactactaggggcaggtattataatattatactgcagtattatcgatttcttatactaccagtcagtacagctactgagcatcacgcacactgtgttattctatgggaatggtacttcctggatttggacaacacactggagctcctagctggacttccactacccagtctgggaggactccaaagacctgcatttctttcactctcctccctggcctattctccctggtgcatttcaggttttcatatccattttaatgttccttatcatagactcattgtgtccaggtctgtattcatcacagctttcctgctcctaattgaatttactactactatctcatatatgttgagccagaaaaacaccaaatatgctactcatctattttacacacactcccagtcaaagcttttaatctttcattttattacatgaaaa

SEQ ID NO: 710738 - DNA, 3133 bp, Homo sapiens
aaatgaaatcttatctatataacatgtaatctaaattaatataaaataattctgaagtgctagagggtgcaaggggcaggagagtttcacttggtcttggggtgctctgtgtggtttgtatcttgtaataagaaaagattaatatcttaactaacagctacgtcaaccactctgttgctctttgatataaagcatgagtgactggctgtcttatgttttcacttcttagaccacatttaaattaattctatcacatagttgattcaagctgatgcttgcagatctggtaagaacgacccaagggaaaggttaggacaaaaacagacaagttgcggaagaaagccaatgaaccaaaaaacatatagcaaaatgttcaacctcatattagtcagggaagtatactatggagcagaaaagaaacaaataaaaacaaagctccacttaacaccagtcataaagtctgataacaccaagtattatttgggaayaaagggcatttactgctaatggggctgtaaattggcaaaccaataatttaataaaataccaagtgtttatgacacaaacatatttcataactcaaaacaatattctattttgttaatagatgcatacatatgtagaaaaagcataaaaacataaatggaaatgatataaatgacaagatgttactatactgtgggagcaaaggcctggaagagaatggggtcatagacctcaagttgtctttgcaatattttgttactttaaagaaaaaaaattatgatttgaagcatgtgggaaaatggtaacatagttaaaactggtgataggtacctggatgtcacaatatttctgtgtgtgaaatgtttcatacattttttaaatttattacaaaagcaaatcagggacatattcatggacaacccaacttgtgagaatttgaaactgtttcagaacttagccttccctgggggatggcaactttgatgtttgcccacatgaaaggttttacatgattacaagtatatgactatccttttctttccctaagaggaaaaacttactaagccaaaagaagataattttaatttgctgctcagatctcaaatcttgagataaaaatctcacttaccaatggttctcacttgaacaacagctctgactgtccacgaactcacagtatccgactgagtgtaatcacatacatatgtgccctggtgatagtcataaacttcatccactacgattcggttgctcctttccacagagaggagttttccattctaatccaaaagatattttaagcagataaatttgccacagaaaaactttatgaaatacatacctaaagaaaaatcttacaaatttgaacagggaggaagaaggtcaatctgagataagggtatctcacaagctatgaagacattgtgttcaaaaactgtacttgtagatttgaaacaagaggcattttccaatacaattgcattatgtgtagagatgagagagtcaaacctccaaacctgatcagcccctaaacagctatttaacaaaggacttcccagagcatgcatgacttggagccctgagagtattctggaagacctgtagtgttctaagggctgaaactgaaatgaattttttaatgtgtgtgtgtatacatacatatatatatatacacacacacacacatatatatacatacacacacatatatataacatatattgtatatatttacgtatataaacagatacatacttataaataaaaacttatataaacagaggttctggaacgtgagtggcttttttttctctctctgacaaagctggtaagtgagagcactgagaatcaacctcatttttttctggttctgagttttattttctgattgaggaatttcccttccactttgcctgcctactagtagaagctgggattcccccacgccacatccctcgtgtgtttcctgtggtccaagaaggaatttccagcaggctggaaaggagactaagggtgggggcagagtggccagagaagtgcagctgtgggcaggaagcaaaacaaggcaaagaggtagtggtatacaaggctaaatatataccagatgatctcaagaatcaggaacttttcaaaaggaagttttaaaacatagggggaaattcaaagataaaacttcagaggacgcagtgataacatataaagatcagaattcaggggagaggcgtgtcataaatcgcatgagaacgtaatggtgggaggacacagagccgtaactaagacctcacctaagccaagggggaggatggggaataatgtatcttttttacccataaataggtaagtgaggcttagtatgtatcattaagactttatgaaatggaacttagaggaaatatcaaagaaaagaaattagggagaagcaatttatgccaaggatgatgggaaacccattctaataatacaattacagttaatcctcataggacaaagagaggctaatgcagctgcacagggaactcttggttttgctcatatgtgaagcagtcatgagcagaatatggaaacaggaacatccgccactgtgaatctgaatgaataatgtccgtaagtcttcaaaagagtggaggcatgcaaaaaaaaaaaaaaaatgaagacactgcaaaggacttttaaaggtatatgtgaagcagggagaagaacagttattcttactactaggggcaggtattataatattatactgcagtattatcgatttcttatactaccagtcagtacagctactgagcatcacgcacactgtgttattctatgggaatggtacttcctggatttggacaacacactggagctcctagctggacttccactacccagtctgggaggactccaaagacctgcatttctttcactctcctccctggcctattctccctggtgcatttcaggttttcatatccattttaatgttccttatcatagactcattgtgtccaggtctgtattcatcacagctttcctgctcctaattgaatttactactactatctcatatatgttgagccagaaaaacaccaaatatgctactcatctattttacacacactcccagtcaaagcttttaatctttcattttattacatgaaaa

SEQ ID NO: 710739 - DNA, 2499 bp, Homo sapiens
tccagcttcatataattggggtagacagtactttcaaaaaaattaaagtatttgaatattcctggtcccaaaattgactcttgacattttgacaattgtgtgtcatttatgaagttgtttcttgttgatggattgtttctgctgttaatgcacatcaactgacttcattgattcttttcctactcaggcctgtgacactcctctgcaccccctgggcaggcttgtggagacactggttgcagtgtatagaatgacatacgtgggcgtaggagccaaccgcaggttattgcaggaggctgtaaaggagattaagtcctatcttaagcgaattttccagctggtgaggtaagagagcttttcactaaagtctgcgggctatggaatactattttataccagtgcttgggtagtttcaccctgaatcatcaagaaaatagttttatgccacagtcctttaatagattaagtaaaacatgttttaaatgtatgtgtaagctataaacataaaaaagatgaaccttagctattgttatttatttatttttatgtcttattaagtaaagctaaaataaatgtttggggtttttaaatctaattttggtatgaagtatagtagtcgtcttatttagattcagtctctaggcaaaatcatgtatctaaaacccaaccacagagtagacaaagtttaatatgaagttttgcccttgagtttttgtgtcttgtcctttggcaacagtatcacatatgttcatttatttaacaaatatttatggagcgtttctatgtaatagccatcattctaggctctcaagggatttatcagtgaacaaagacaaacagtctttgctgtcatggagcttacattctaatgggggaaaagagtaaacataaaaaatatatgtagtatgtcagatagtgattagcactatggagaaaaataaagggaaagagtactagatgtgagatgctattattttgaagagaaggtcagagcagactgactaatacggtggtagtatttgagcagagactcgaagaaggcaattaaatgagacagtaagcatctttgggaagagagttccaggcaacaaacagatttaagcttgtgagatataagatcttttactgagttgaagccaacaagtaaatactatagtgagataattatacaaaagtttgtaaatttgtcccagaacttccatatattgtttgcctcaacattggaaatgtttcaggttttgagggagaagtgtggtctattaaaaagatcactagcctgggctagctctgacattagctagatgagtataatgaaagtaagtgtcctgaccttttttagtttttttcaactatacaattagggcagatggaggtgcaagatgtaagtctacaaaaatagagaagactgcatattgcctttaaagggtcaaaatttaagtccgtaaaaataagagaaaataaacttatttatggtagagtacactagcatacaagaagtcagagataaaatctatggcagaactcaaagcccaggaaaaaaaattcctcaccaatttatccccttgatcatttgaaaaattaattttcagcaagttttaaaaacacatttttaaattttaggttgagtacagagggaaataatagacactgaggactctaaaagcggggagtgtgtgtgggagggtgagggttgaaaacttactgataggatacagtgttcactgttcaggtgatgggtacaccagaagcccagactttaccactacctgatatatccgtgcaacacaactacatatgtgcctcctgaatctataaaaataaaataaaactttacattgtgtcttctataattaatcattttttcccttaatgttggacacttaatttctgtcggtgtttgcttatattgtagaagagtggtccttgctcagagttaatataaattgacctcagatgagatttgccagtaaggaacacatatctcatatagatcagaattctccattccttggtaactagacagragaaaatcatagcacgtgaagattttgtagtggtattattcattagctgcattcttaattttatcctgttagaaacatcagttttctcagggaactaaaatacttagttgataataaagcttgctctcataactaatggaaatgtgtttttatgcttttcaacccccctagaggtataattgtataattatattttttattcttccttaggttcttatttcctgagctgcctgaagaaggcagcacaattcctctctctgctcctctgccaaccgaaaggaagtctttttgcactgggaagtcagattcccgatctgaatcaccagagccagggtaaatggagttgggtggggacagtgaagaaagggaatggtgactagatgatcttactcaaagagtcccagcgagaaagtgtgttctctagatctatttcctcatttctaaaatgatatggttggggccaggagggttgggg

SEQ ID NO: 710740 - DNA, 2499 bp, Homo sapiens
tccagcttcatataattggggtagacagtactttcaaaaaaattaaagtatttgaatattcctggtcccaaaattgactcttgacattttgacaattgtgtgtcatttatgaagttgtttcttgttgatggattgtttctgctgttaatgcacatcaactgacttcattgattcttttcctactcaggcctgtgacactcctctgcaccccctgggcaggcttgtggagacactggttgcagtgtatagaatgacatacgtgggcgtaggagccaaccgcaggttattgcaggaggctgtaaaggagattaagtcctatcttaagcgaattttccagctggtgaggtaagagagcttttcactaaagtctgcgggctatggaatactattttataccagtgcttgggtagtttcaccctgaatcatcaagaaaatagttttatgccacagtcctttaatagattaagtaaaacatgttttaaatgtatgtgtaagctataaacataaaaaagatgaaccttagctattgttatttatttatttttatgtcttattaagtaaagctaaaataaatgtttggggtttttaaatctaattttggtatgaagtatagtagtcgtcttatttagattcagtctctaggcaaaatcatgtatctaaaacccaaccacagagtagacaaagtttaatatgaagttttgcccttgagtttttgtgtcttgtcctttggcaacagtatcacatatgttcatttatttaacaaatatttatggagcgtttctatgtaatagccatcattctaggctctcaagggatttatcagtgaacaaagacaaacagtctttgctgtcatggagcttacattctaatgggggaaaagagtaaacataaaaaatatatgtagtatgtcagatagtgattagcactatggagaaaaataaagggaaagagtactagatgtgagatgctattattttgaagagaaggtcagagcagactgactaatacggtggtagtatttgagcagagactcgaagaaggcaattaaatgagacagtaagcatctttgggaagagagttccaggcaacaaacagatttaagcttgtgagatataagatcttttactgagttgaagccaacaagtaaatactatagtgagataattatacaaaagtttgtaaatttgtcccagaacttccatatattgtttgcctcaacattggaaatgtttcaggttttgagggagaagtgtggtctattaaaaagatcactagcctgggctagctctgacattagctagatgagtataatgaaagtaagtgtcctgaccttttttagtttttttcaactatacaattagggcagatggaggtgcaagatgtaagtctacaaaaatagagaagactgcatattgcctttaaagggtcaaaatttaagtccgtaaaaataagagaaaataaacttatttatggtagagtacactagcatacaagaagtcagagataaaatctatggcagaactcaaagcccaggaaaaaaaattcctcaccaatttatccccttgatcatttgaaaaattaattttcagcaagttttaaaaacacatttttaaattttaggttgagtacagagggaaataatagacactgaggactctaaaagcggggagtgtgtgtgggagggtgagggttgaaaacttactgataggatacagtgttcactgttcaggtgatgggtacaccagaagcccagactttaccactacctgatatatccgtgcaacacaactacatatgtgcctcctgaatctataaaaataaaataaaactttacattgtgtcttctataattaatcattttttcccttaatgttggacacttaatttctgtcggtgtttgcttatattgtagaagagtggtccttgctcagagttaatataaattgacctcagatgagatttgccagtaaggaacacatatctcatatagatcagaattctccattccttggtaactagacaggagaaaatcatagcacgtgaagattttgtagtggtattattcattagctgcattcttaattttatcctgttagaaacatcagttttctcagggaactaaaatacttagttgataataaascttgctctcataactaatggaaatgtgtttttatgcttttcaacccccctagaggtataattgtataattatattttttattcttccttaggttcttatttcctgagctgcctgaagaaggcagcacaattcctctctctgctcctctgccaaccgaaaggaagtctttttgcactgggaagtcagattcccgatctgaatcaccagagccagggtaaatggagttgggtggggacagtgaagaaagggaatggtgactagatgatcttactcaaagagtcccagcgagaaagtgtgttctctagatctatttcctcatttctaaaatgatatggttggggccaggagggttgggg

SEQ ID NO: 710741 - DNA, 736 bp, Homo sapiens
tgagcaccaactccggaggtaggttttgtgtctgaacacaagtataatatatagtaatagccatttttaaggagagatattcttttcagataaaactgggcaagtattattttatgtaggtggaatctactaaaaaccaggaacaaaggaattgtatggaaaagaataggatatataataaaagttcaaaataaaaacttgattttatgtctgtgaacttttcagtgatattgtcccctacttaacctatcgtgatactgtaaacagggcactacattgggggcagataaagctacattcaagtcctgactcttgcctactgtgtagccttgaacaaattactgatcttcagtatcatctgtagaatatgcttagttacttaccgtrtaggtttattgagatggttaaataagattaaaagtataataaaatgcttggcaaatatttagtacccaataaatgttagtgtcttctttcctctcttaattccttatttccttacatgtctcatttaaggcctatttcatagtcctggggtattcatagcattatggtatcaatatggtatggtattacaattagtgagttttaattgaaactaaacagtgctaaaatacacttacatttttttcagttaaaacctcttcagaaaattactgagccatccatgtttatgaatcttgcaccacctccagaaagaacagatcccgtgacgtaagtgttttaagtctcgtta

SEQ ID NO: 710742 - DNA, 1099 bp, Homo sapiens
tttttgctttaaaaaccgttgtcttccttgacctccctgtatatgcacatagtttactgtggcacttgtattcttattgcaatgcctactcctgaataaacatcattttctttcagagagtctccctctctgttatttaggctgacaaggatatgccaagaagtagcttggatatagcagttaactctgcctttaggatatgtgtatggggatataagagttaactaaaagctgacctttgagttggtccttgaataaaagaagaatagattccaaaaataagaggaataaataatgatcctgagctaggagagtacattttgcagacctttggtttccatattaagaaattcagatttttatgtacaataaagaagttctggaattctctggttttgttctgtttgcatttatttatatttttaacttttaggttcaagggtacatgtgcaggtttgttatataggtaaattttgtgtcatgggggtgtacagattatttcatcacccaggtaataagcctagtgcccaaaaggtagtttttgatcctctcccgcctcccacccttcgccgtcaagtaggccccagtgtctgttgctcccctctttgtgtccatgtgttctcattgtttagctcgcatttataagtgagaacgtggtatttggttttctgttcctgtgttagtctgcttaggataatggccttcagctccattcgttactgcaaaggactaatacgggggcagtgaaagggatggatgacagcaggttggcagacccatgagtaaatcattgcaattgtctcgtgtgtgtgttgtcccaaattaggtgccataaagggaaaaggtaagtaagattcagatatttagggtcagaattttaaaatgtgtctgaatgtttaagattttgtggatatgacattgctgcaccaaatgagtttggaacctactagaggtttaagagggaagatgaatattaacgtgttatgtgtctgtggaacaattgggtaaagatgtcaaagtagactgttggatatttaacrtctggagctcacgggacagtgtagaggaagtaatgactgacactgtaaatcttctagaa

SEQ ID NO: 710743 - DNA, 649 bp, Homo sapiens
aaaaaaaaaaagaatgacattattccatacagctgcaggattcatcgatttgtccaattatttattacattagttgaattttagggaaatcctaaagccttttctcctctatgctccatattatttttcagactttatctgtttaagtgttgagtagtgaagacagttttttattttttttattatactttaagttctagggtacatgtgcacaacatgtaggtttgttacataggtatatatgtgccatgttggcttgctgcacctgtcaagtcatcatttacattaggtatttctcctaatgctatcccttccccagccctccagccccctacaggccctggtgtgtgatgttccccaccctgtgtccatgtrttctcattgttcaattcccacctatgagtgagaatatgcggtgtttgtttttctgtccttgtgatagtttgctaagaatgatggtttccagcttcatccatgtccctgcaaaggacatgaactcatccttttttatggctgcatagtattccatggtgtatatgtgccacattttcttaatccagtctgtcattgatggacatttgggttggttccaagtctttgctattgtgaaaagtgccacaataaacatacgtgtgtatgtgtctttata

SEQ ID NO: 710744 - DNA, 649 bp, Homo sapiens
aaaaaaaaaaagaatgacattattccatacagctgcaggattcatcgatttgtccaattatttattacattagttgaattttagggaaatcctaaagccttttctcctctatgctccatattatttttcagactttatctgtttaagtgttgagtagtgaagacagttttttattttttttattatactttaagttctagggtacatgtgcacaacatgtaggtttgttacataggtatatatgtgccatgttggcttgctgcacctgtcaagtcatcatttacattaggtatttctcctaatgctatcccttccccagccctccagccccctacaggccctggtgtgtgatgttccccaccctgtgtccatgtgttctcattgttcaattcccacctatgagtgagaatatgcggtgtttgtttttctgtccttgtgatagtttgctaagaatgatggtttccagcttcatccatgtccctgcaaaggacatgaactcatccttttttatggctgcatagtattccatggtgtatatgtgccacattttcttaatccagtctgtcattgatggacatttgggttggttccaagtctttgctattgtgaaaagtgccacaataaacatacgtgtgyatgtgtctttata

SEQ ID NO: 710745 - DNA, 1019 bp, Homo sapiens
gattgaagaataggtaggagagatgggtctccagctattttacttcacctaggtgggccatcatcaatagggcttggaaacccctgattttcctatgcaatgcaggaatttttcctgttttactctcttggtgatgactttgtcgtccaccagctgcccaagagagaaatatgggaatcatctggactcctccctctggctgaatctcatgctttctcacatttcttacactctgcaccttggaacacctgattctgtgtcctgaatgaaactactttttcacttttgtctgtaagcacttcccatcctagaacccacatggccatgttaacttctactcagctcagaaattattccccgctaggaagccctggctgacccgccctgcaccctcatctcccccgctaggctgatcccacagcctatactcttagcttttaattttactgattaaaaaaaaaaaamaactcaaaatgcattcattttagggtttggacatatcttgtcatagagccctccacaaaagtaaaaccaacatgcacttcctccaagagtctgtaagaaagcccagtttccctggaaaacattgactcttattgccaaaaacaacaacagcaatttaaagagaataattaataagttgtgttttaatcttcagatcttagataactagtgatatttaacccatatttttttctcttagagttttattgcaaacagattttctgggatgttcaatttttttcttactgatgtatatatagctcctcatagagtgacatcatttaaatgatgtttataatataatttgtaattgtttcaagtttgacacattatttatctctttctgtgtaatggtatcttgttcatttactgggttacttgtttattgtctgtcttcccctcctcgaatgtaagttccatgatattgagaacttacatctatcttggtcacaactacatctctagcatctagtataaggcatggcgcatgagcaataaatgttgaatgaatgaaa

SEQ ID NO: 710746 - DNA, 654 bp, Homo sapiens
tctgagccataattggggccgtggctgcagtaggtcctggaaggttctttattgtctgtcacagctgaataaaagcagcagcagctgagagaacattggagaaaatgccagcagctaccctctggaagtggtcattaaaccatgtctcacagcctagacacagtattttggtaygctactggccgacaggcccataagcatttctagcttacgtagagatccgatgcatctctttgaataccagtggggacaagcaattaatttattgactcatttatggcctaagttcaattctgttatcaaagataatcatttagtcatgtttaataagatgttctgccttcattaaatagaatcactaataaacaaaatgtaataggatttcacacaatttacatctcacaatagagacctaagctaagtcaacatttccctgaaacagataattgaaaataaattgagaaaaataaagtcgattcagtaaagtataattttcctctgaagtcaaaaatcaccagttttcaagaaggatacacagtacaagatgatccattggaatataggaagaaagtattaaaatttccatttacattttcttttaatctaaaaaaataagaaattatccccaacacattaatgtactgactgacactg

SEQ ID NO: 710747 - DNA, 1683 bp, Homo sapiens
tggtcatacaacatggtggttaagagccagaatatttggatttaaattccatttttattacttactagctatgtgaccatctagcttgagcagttacttaatatacctgtggccttatagatagattccttatctgtaaaatgggggcattaatagtttctactccataagggaactatgcctcacacatagcatgtgcttaggaaatgttattcatatcatgttatgtagaaaattgctctttggcattttgtcactaaacctcattaaattttaatttttattatttttggaagtcaaattgatatttctacaaatgtgacaccatgacaaaacagtcatgatacaagccttcaaattgcagttcaaagatgacctgagccaggtcccctattacagaatctcacttcctcccgcaatgtcttggcaacactcatctcacgtaatatattctcgtttggtgcctggtttcccactagaacacaaactccacaagagcaagaacactgtatctcttgttcatggctgcattcccaatagctagcagagttcttagaacctaatagggcctctgtatacatttgttgagtgaataaataaataaatgtatgaatgactcaacccacagccaaaggcagaacaggaaatatgaagcactgagtgggtgctgtctctcaagagcaaaaagtgagactggctaaagtgagacagtactgtgagtcctggacctaaagtgaaagtatagtggtttgtgtcccatgttattaagatataatatgaagatatagagaaaagtcaagacaattatagcacagctaaagcccaaacccagaaaaatgaaaatttatgacatataacttaaatacggagaattgtaatttaggacttgattatgatgataactgtgtgaagatattgactgaaaatgagccctcactggtaaatttaagatgcaaaatttaaaaaatgaaatattgcttagtatgaaagtactatttacagttactgaattgaaggacattattgttgactggcaggcactatagtcagtacaaaaaccagaatgatgaacttgttataattatagctaataatataagtgttaaatactcctaattgattatatcactggactgtagcctttargatattgtcatgagaattgcatgaagtcattttattctcaatgacccctgcttatgccaatttgtttaaatcaagaaagataggcaatgattttctctttcctctattatcctaatactggctttccttttctcatccatatttccccagaatgtggaccttttacttaataactttgttcaacatggattcaaaaccaccataatttatttttccataatattgcccccaaaccaacacaattaatagccgtgaagtgttagtcacaactaaatcagtgttttgggtgttactgcttagtctgtgaaagcctttaacaagcagattgtggaagtatcttgatcgacaggctacacttttgccaagatacactttggcaaattgtaaatatttgttcaattacatgaagacactaaaatctggcccatctttgttaatattattaattgattttaagttttacactaccttttcttgggctttcaaattccttgggaagtggtataatatttcccatcaatttatcaaactgtttat

SEQ ID NO: 710748 - DNA, 596 bp, Homo sapiens
gtgcaagagaaggtttctcaaatttgtctaataatagtgaggctcttatagtaaatatcacagaatgctttgttaaatttgaagttcaacacataagaaaatgtccagaagaacacattaatgtccagaagacattacctaatcttgtcttttagaaattatcagcaacattgtgttgctgataayttctaagagacaagattaggttgtttgtggacatttatggaatagtcagtacaaatgtattgaagagaaatggtataattctgattgtgacactagattactattctgtttcttttaactttcttgcttctcaatttttagtgtaaaatatgaggggggtatattaaaaagataaaaggatctttgtaatcctaaggagctaggaagatagtctactagaagatataaatatagggattttgaaagctctgtgttcagaaatggcatcaaagtaataaagttccaatagagaaaaggaattacaattcacattacagtatttagataggactgtaagagaaataaatagctcttccttatttctcgtttaaaatttcagacaaatttgaccttcaaagatatgtctgaac

SEQ ID NO: 710749 - DNA, 837 bp, Homo sapiens
tccactttatggatgagaaaggggaactaataagtggtaaattttgggttcttatgtggatgatctaaatccaaagcgcatcacagtgyacttctataaataccatatacctaaatttctaaaataaatgcatattttttcttaatttataaagtacattggtatatttgtagaaaagacagaaacaaatacatcattaaaagtaaaattttaaagacatatgcacattgactaataaaacaataaacatgttactctaatattgtttccattactaagtacaaaataaaaatcacagttttgtattgatgacattcttttcccatggttttaactctctttgtctattataatgttatttattgctctctgatacttaccaaagtttctatttttccttcaaattatccttggaagaaaggcaaaattgaggtgcatatgcaaaatatctgtgtaatcattggtctcagtttaattagtgaatgcgggttcaaattaacactcatttgtaaaatttatgaatttggtagttggatacaagaaaaatttatcttcattttggttaataaaaccaaacctgtgtgctcacgaatatgctattgatcctccatgtgactgcactgtaaggagatgggcacttataaaccatctagttgctatgtaagtaaatcattgcaatttaacataccaaatgatatgctcaaaattcaccataatttcatgagaaacataaatgagcttaggttagcctaagcctgaatagagaaataactacagttttatacaaaagtttatgtcatattaacactttttaattcaaaaagatatgttccatgt

SEQ ID NO: 710750 - DNA, 837 bp, Homo sapiens
tccactttatggatgagaaaggggaactaataagtggtaaattttgggttcttatgtggatgatctaaatccaaagcgcatcacagtgtacttctataaataccatatacctaaatttctaaaataaatgcatattttttcttaatttataaagtacattggtatatttgtagaaaagacagaaacaaatacatcattaaaagtaaaattttaaagacatatgcacattgactaataaaacaataaacatgttactctaatattgtttccattactaagtacaaaataaaaatcacagttttgtattgatgacattcttttcccatggttttaactctctttgtctattataatgttatttattgctctctgatacttaccaaagtttctatttttccttcaaattatccttggaagaaaggcaaaattgaggtgcatatgcaaaatatctgygtaatcattggtctcagtttaattagtgaatgcgggttcaaattaacactcatttgtaaaatttatgaatttggtagttggatacaagaaaaatttatcttcattttggttaataaaaccaaacctgtgtgctcacgaatatgctattgatcctccatgtgactgcactgtaaggagatgggcacttataaaccatctagttgctatgtaagtaaatcattgcaatttaacataccaaatgatatgctcaaaattcaccataatttcatgagaaacataaatgagcttaggttagcctaagcctgaatagagaaataactacagttttatacaaaagtttatgtcatattaacactttttaattcaaaaagatatgttccatgt

SEQ ID NO: 710751 - DNA, 1384 bp, Homo sapiens
ttggcgatgcccttgtcggcggcctcgttagtgatatcgtgtgaggcatcctcgttagtgatgttgtgtacggtgtcctcatggggagctagaagaacacagagttaaggtcagtgccctggtagtggagactgtgaatcacccaggggcttgcttggtgtggtgcatggaggtggctgatcacagcatgggccaagctgatgctgggacatcctcccaggtggacctgcactagtgaagctaagggatgtggctcagaacactttctgcagtgggaatcagtttccaggttcaggtatgcattatccagtgaagtggggaaatataaaaaataaaaattgacaaattcatgaaaagccttccatgagtgcaagtgtgagttttttatccactttacattcagtatgcattcacacatamaaaatatttttacaagaaatcagaaattttaatttttgtcagttatgtgaaatctaacttagctgccagcataaagattctatctcatttacttggtctcgagaaaatctagcacatagtaagtagaccaaaatgtttattaaatgaaaacacagagcagagataggggggctgctaggcagactgggttgcacctgattacctggatgataataaactgcacaaaacctcggtcaaattaatattgaaactgccttttgcttgggctcgtttcccttgcggaagaaggatgaccaaggagatgaacaggaaagaaatgagaaacagaggcctttgcctagtagctaaaggccaccttctataacacgaaatagtctacaagcggccttgaactctgccgtgatttagtgacagagttccctcgtgtcttctacccaggttgaagtccagcaaaattgcgactgtcctctttacaacttgcgagaccacactgcttctgcatttgcctgttgtatgtatgagatttacacttgttttaaagcaacattttgtttcagttgggctggtggccatacccggcactagccggtcaatagtgagatggctcctcatggaggaggcttggcttgaggctgagggtctttaacccacatatacaagagagttgccactaagggatggaagccaggctaataaccaagtgccacacagagttcctatctgtccctcctcaccatttttggctggcaggatttgagcattttagggcttgggaagatagtattactaaatctactaaaatacatcacccatccttatagactttggccagttgctgagcaaattaacttcacaactgaagtgggccacactggcctttgtggtcccccactcctcttagaatttgtgagcgtggggcctactggagggtgggaggtgggaggagggggtggatcaggaaaaa

SEQ ID NO: 710752 - DNA, 1384 bp, Homo sapiens
ttggcgatgcccttgtcggcggcctcgttagtgatatcgtgtgaggcatcctcgttagtgatgttgtgtacggtgtcctcatggggagctagaagaacacagagttaaggtcagtgccctggtagtggagactgtgaatcacccaggggcttgcttggtgtggtgcatggaggtggctgatcacagcatgggccaagctgatgctgggacatcctcccaggtggacctgcactagtgaagctaagggatgtggctcagaacactttctgcagtgggaatcagtttccaggttcaggtatgcattatccagtgaagtggggaaatataaaaaataaaaattgacaaattcatgaaaagccttccatgagtgcaagtgtgagttttttatccactttacattcagtatgcattcacacatacaaaatatttttacaagaaatcagaaattttaatttttgtcagttatgtgaaatctaacttagctgccagcataaagattctatctcatttacttggtctcgagaaaatctagcacatagtaagtagaccaaaatgtttattaaatgaaaacacagagcagagataggggggctgctaggcagactgggttgcacctgattacctggatgataataaactgcacaaaacctcggtcaaattaatattgaaactgccttttgcttgggctcgtttcccttgcggaagaaggatgaccaaggagatgaacaggaaagaaatgagaaacagaggcctttgcctagtagctaaaggccaccttctataacacgaaatagtctacaagcggccttgaactctgccgtgatttagtgacagagttccctcgtgtcttctacccaggttgaagwccagcaaaattgcgactgtcctctttacaacttgcgagaccacactgcttctgcatttgcctgttgtatgtatgagatttacacttgttttaaagcaacattttgtttcagttgggctggtggccatacccggcactagccggtcaatagtgagatggctcctcatggaggaggcttggcttgaggctgagggtctttaacccacatatacaagagagttgccactaagggatggaagccaggctaataaccaagtgccacacagagttcctatctgtccctcctcaccatttttggctggcaggatttgagcattttagggcttgggaagatagtattactaaatctactaaaatacatcacccatccttatagactttggccagttgctgagcaaattaacttcacaactgaagtgggccacactggcctttgtggtcccccactcctcttagaatttgtgagcgtggggcctactggagggtgggaggtgggaggagggggtggatcaggaaaaa

SEQ ID NO: 710753 - DNA, 2092 bp, Homo sapiens
gtataattgttctctgtgtcagaccttgttgaaggaatactcacggcagtggtgataaccgatatcatagctaccagtaaattactcattgtgactggttgtccctctttcctcaggttttcttctgccatctgtgacagcttcttgatctgtccccaggtgggtggctgtgttcaatgggtgttgcttgtgacagttggctggtgtgagatgtgtttcagccccaggtctcagccagtggtcgcccagtggcacagtcagagccgggcctgcctggttccctgggctggcactctgagtccaaggtggcacggttgggcagcgacccctccctgagcccccaacctctgacctcctaggcactggcctgagccgtggcttctgaaaaggaaaacctggraattccttcaatgtccaccttaggtgatgatgggctcagggcaccatggggtgtgcccaagatgatgagcccctccctgcatgtcagtaacagggacacacatctctgatgcgcggggagggaagagtctgagtgtgtgaagctgtctgtccatgcaggccacatgtggatggggggcaaggacatggaatggaggaagacaggactcaatgtttttgcatcgaccgctcttgtataagagcggtctttacaaagtaataatgccttgagttaaccccacagtttatcttgtaatgtggaacagtcagggccaattgaagatgagcatccccctgaggctgactcatagccgggccgctggagccaggcccttcggggtatttgagatttctttagccaggcctggggggcactggcagggagtgcctccagagctgttcacggcctttgtctcccctctgggaagggcactgagtggagtcaggtgaggggcccgtgctcgcccaccagggttgttccaaacacaggcagcagggctccctggcaagctcccgggtgccctgtgagcagctctgacgtcggtggacagtgttcccagtgagtctgccgtcagtccttgtgcccagcattgattttccttccgcggtcaagctaggctgtgttgttggtactcgctgtacctccaggtgctgagcaagctgaccttggcctccctggccccacggctgcatgaggctaatctccccctacacaccccacccctctgcccccgccaacaccagggcacagaggggctggcccatggctttcttgaaacggtgcatttcacttctgattataaaactaaggcgtgctttggtagacagcgtggtggatatggggaaggataaaaggacatcaacctgttctgacatcccagcacccagggcagggacccagaggggagatttgggtgtatttctctccgttgtcttctctgcaggcatgacacaggtgtgcacacactcatccagcccactgacgtgtgcacaagcatgaacacatgtgggacacttgccctgcgctgcagtgtgtgtgagtcatgtgcacgtccactgccctctgtggaaggcgtgttcacacctgtgcacatacctgaggccgctctatcactgcaggcccctgtgcatttcctgggaggtatgttcccatttcattaagaattctcggccgggcgctgtggttcacacctgtaatcccagcactttgggaggccgaggcgggtggatcacgaggtcaggagatcaagaccatcctggccaacatggtgaaaccccgtctctactaaacatacaaaaattagccgggcgtggtggtgggtgcctgtagtcccagctacttgggaggctgaggcaggagaatggcgtgaacccgggaggcggagcttgcagtgagccgagatcccgccactgcactccagcctgggcgacagagcgagactccgtctcaaaaaaaaaaaaaaaaagaaaaagaaaaagaaaaagaaaaagaattctcagtgatggatctactccaggccctgcctcaccatcactagccacagagctactcacagccagtgctctcctcacaggggtctgaatggcaaggagtgagccgcaggatgacccaggacaagtggcagcaacagggtgagttcccaggatgctggac

SEQ ID NO: 710754 - DNA, 637 bp, Homo sapiens
ggttcagtgacaaggaaagcagatgttcagcaatgggccaggcatggaaggtggggaacatcgagcttataggagattrgatgaggaaggggtttctgggggctgcaatgccctgaaaggacatcgtggagggaaggagttgggccttaaagaatgaaaaggattggtatagaggcagggaaaaagacaggtaggacattccaggctgtgagtgggcctggggcttgggcagggctgacaagctgagaatctgatctggagtcctgcctgtactgacaatgaaggagcttccaaagctgctcctcactcttggtgtttgtcttcattcagcacctcaaggttgggcttctagactccagaggggcaaaataccaatgcagccaagctcacaggactgatctctttgtgaccaggaatcttgattccattccacagccacagactgacaaactcccatctccagctgtggtgtttactaaagatgacaaggagagccaggcaagagactgagggtgatgcagtgggaaactgtccaccatgtgcaccttcaattataggggtgtgggtctaggcagtgttagcaggatggactcatatatggagggccagcctgtggctgattggagggcattttcaa

SEQ ID NO: 710755 - DNA, 637 bp, Homo sapiens
ggttcagtgacaaggaaagcagatgttcagcaatgggccaggcatggaaggtggggaacatcgagcttataggagattggatgaggaaggggtttctgggggctgcaatgccctgaaaggacatcgtggagggaaggagttgggccttaaagaatgaaaaggattggtatagaggcagggaaaaagacaggtaggacattccaggctgtgagtgggcctggkgcttgggcagggctgacaagctgagaatctgatctggagtcctgcctgtactgacaatgaaggagcttccaaagctgctcctcactcttggtgtttgtcttcattcagcacctcaaggttgggcttctagactccagaggggcaaaataccaatgcagccaagctcacaggactgatctctttgtgaccaggaatcttgattccattccacagccacagactgacaaactcccatctccagctgtggtgtttactaaagatgacaaggagagccaggcaagagactgagggtgatgcagtgggaaactgtccaccatgtgcaccttcaattataggggtgtgggtctaggcagtgttagcaggatggactcatatatggagggccagcctgtggctgattggagggcattttcaa

SEQ ID NO: 710756 - DNA, 637 bp, Homo sapiens
ggttcagtgacaaggaaagcagatgttcagcaatgggccaggcatggaaggtggggaacatcgagcttataggagattggatgaggaaggggtttctgggggctgcaatgccctgaaaggacatcgtggagggaaggagttgggccttaaagaatgaaaaggattggtatagaggcagggaaaaagacaggtaggacattccaggctgtgagtgggcctggggcttgggcagggctgacaagctgagaatctgatctggagtcctgcctgtactgacaatgaaggagcttccaaagctgctcctcrctcttggtgtttgtcttcattcagcacctcaaggttgggcttctagactccagaggggcaaaataccaatgcagccaagctcacaggactgatctctttgtgaccaggaatcttgattccattccacagccacagactgacaaactcccatctccagctgtggtgtttactaaagatgacaaggagagccaggcaagagactgagggtgatgcagtgggaaactgtccaccatgtgcaccttcaattataggggtgtgggtctaggcagtgttagcaggatggactcatatatggagggccagcctgtggctgattggagggcattttcaa

SEQ ID NO: 710757 - DNA, 936 bp, Homo sapiens
aaaataaataaataaataaatytgtggaatgaacaaatggacaaaaaaatactttatacaaggaattcatttattcaatccatagatatttactgactgcttattatgtacaaagcactttttaaaggagaggaaataagagagaaatagtttgcacttccatgaaacttacagaaaagtgagaatgaatctttaaaccattttcacgctcaaaaaatttactgcacaacaggacataaaaacctaagttctttagccaggcatggtggtacatgcctgtagtcctagctactcgggggctgaggtaggaggatcacttgagtccaggtgttcgaggttgcagtgagttatgactgtgccactgcatgccagcctgggtgatggagctaagactgccttttttttttttttttttttgagacagagtctcgctctgtcgcccaggctggagtgcagtggcacaatctcagctcactgcaatgtccgcctcccgggttcaagccattctcctgcctcagcctcccgagtagctgggactacaggcgcccgccaccacgcccggctaatttttgtatttttagtagagacagggtttcactgtgttagccaggatggtctcgatctcctgacctcatgatccacccgcctcggcctcccaaagtgctgggattacaggcatgagccactgcgcccggccaagactgtctcttaaaaaaaaaaaaaaaaaaaaaaaaaaaaacctaaattctgcacaaatctatatacccttacagaccgtcttaaaacctaacaattatagtattgtttatcacacatctctaaagagcaatgaaatcttattagtggtaaaccacactcacttcataatgtctatccaaatctggaatccaattgctgtaaaacattggcagtgttgaaagctaccttcactgtgca

SEQ ID NO: 710758 - DNA, 745 bp, Homo sapiens
ttttcatatggtaccatgtaatacatatcattttacaacttgctttttcttctcaacactaagttctgatatttaacaatgtggttccatgaaaacctaggatttttatttttactttgattattctattataataacaatagtaaatcacatgtgatactatgtaccacagactgttctaaatgctttacacattaaccttttgttcttcattaagatacattcatcctatgctattattgttcccattttacagatgagaaaagtaaagcacagagcagtttgataattgtccttgattgtactgttagcaaatggtaggacctggatttgaacctgaagggtctgccccagcaattgtgtctttataatataaataccactgctatgtatctagtacactacccatgggcttgtagattgttcattttttgctctccccaactaagaacatcgtctttcttgtctccttgtgctgtatacctaatgaatctctttaacatgtacaacaacaaatggaactgttgygctgtggtacatacttaacttcgatggctgtttccagattgctgtctaatgtgaagcaaattccatcagcaatgtttaagagttcccatttctgcatatatttcccagcacttgacactggcagacttcacaaactgctattttaaaaaatgtgcatttcctttattactaaggttgctgaatttcttttcatgagttcatgggccttttgaatttt

SEQ ID NO: 710759 - DNA, 879 bp, Homo sapiens
caacgtaacaatagtagtagtaatattaagaatggtatctaatggaaactagatgccattaaagcagacacagattttttatttatttgtttgtttatktatttattttgagacagaatctcactctttcacccagtctggagtgcagtgcgcatgatactggctcactgcaacctccatctcccaggtgcaagtgattcttgtgcctcagctccctgagtagctgggattacaggtgccatcacacctgcctaatttttgtatttttagtagagacgaggtttcaccatgttggcgaagctggtcttgaactcctaacctcaggtgatctgcctgcctcagcctcccaaagtgctgggattacaggtgtgagccaccacacccagccccagacacagacactgatttaatgaccaattcattcattcctacagaagtactttttgagtactcattaagcaccaggcactgtgaagcactaggaatacaaagacaaaacacagtcttgatccctaaggagtttatggtctcagtaaggaggaaatagaaaaaactataccgcaatgtaataaatacttttgtgtatgtataggataccagggagtgctactagaattttctatttctagtttcatcttgcctcttaatactacaagtcacctttcccagttttcttctccattctctaattatctgagttatgcagaaacctactactcaaccccccattctcagcaaatgatattcccccacctttgtagagaaatgtaagcaagccataaaacaaattccttcagcttcctgccaccaaatctaaaatttaatttttctgtactcagtcttttcttcttccctcttattacaattaaagaaggttta

SEQ ID NO: 710760 - DNA, 2636 bp, Homo sapiens
ccgaatctaaaacatgataggtcatatcatcctattgcttatgacctgtcaaagctcccccttgccctccagatacagagcaaattactcagaaggattcacagagctgttcaacatctggaacctgctcttctctctgggcatgtttctagtcattcacatgtgccctatgtacggtcacactgagttacctgggatgctcccagacaggcccaaatgttcatgcctcagtgcctttgcatgagttttcacctggatgggacttccttctccttatcttccaggacaatgcctccttttccttaaggcttcctcttcttagaagccttccctgtcccttgccaagcacaagtgtttgctctgtctgtaccactccccaggcacttcatcattagggtggtcatctgattactctattggctgtgggttcctggaaagcaggttatcgagcaccatcactgtagaatatgtagctgattcatggcagatactcaaatgttcatggggggataagtgagcaaaacagagaaaaatgaggcaatgttagatattatgccagtacagttaaatagatggggatttttttaatgttctcaggaggattatgtaaaggaagtgcattaaagacagcaaatttgggtctcagaactaaaacctgatgcaaatgccgaggaatcaggtcagcaaaggatgcactgagggcagagcatcaagttaggatttgagatgcagtcccgaaactgggcagagagaaaacaggaaatgagagtgttatgttgtcaggctgtaaagtctgaagtcttgcaatttcctcctcttctgctacaatttttataataagatgacaaagttcatttccctaaagactgcaggcctgacccaggccagaggagtggagaagcgcagcactgctgtcacctaactgagctcagaccctcaagccagagctgctctgaagagcagcggggaagggggcagccagacggatgttcgcctgccagagagagaagacacagagggtccttggtctctgcgcctgcagcagcaggtcctccttcaacagctcagagatgcccaaactgctcttagctggaacgaattacttcttgccaggcttgaaattcgtttcaggtgggaggagaacattgccgtaagtggagattgcagagttggcaaaatgaagtgaggctgtaggactgggacctggtacctggtacgttaagggactgaagcctagagggtcagtctgaattggccttcatttttattttccacccatgccccaaagagtgcttttaaaagtgactctaccatggcacacgtttacctatgtaacaaaccttcatgtcctgcacgtgtatcccggaacttaaaataaaataaaataaaattttaattaaaaaattaggaaatatcattattttaaagagatgttaccggtccaaataaatagaaatgtaaatatgaagtcaattgctaattgtgcagatacaatgttgttttcttttcctttttttttttttctttgagacggagttctgcttttgtcgcccaggctagagtgcaatggcgcaatcttggctcactgcaacctctgcctctcgggttcaagcaattctcctgcctcagcctcccgagtagctgggattacaggcacccgcccccatgcctggctaatttttgtatttttagtagagacggggtttcaccacattggccaaggctggtctcgaactcctgacctcaggtgatccacccacttcggcctcccaaagtgctgggattacagatgtgagccactgtgcctggccccaaacttgttttcattatttgtctgtagtctctgggaaaggattgaagtaaggcagttttccatggaaggtgtgtaagttggtcaccagtcaatatttctaaaatgtatagtttttaaaagtaactacatttgtgaatttcatgggaccaaaagttctgtcttgtttgtaacattcaagacaagaaatgaactcaatatctttaatggaagcaaaaataaataaatctctgttcccttaaaaaaagaaaataaaagtgactctaccattttgcattcccttttattatataaagtttcgagtacttttttgtgtccaggtctcccagttgacactacttgaagcagaagaattgctcagttgagacaatcaacaaaaaagagaataaaatggtcattgttctaagcctgtaactgttggggtcatttgtatgtaacagtagataatcagaacagggtgtgagattggaggttggtgtattgtcagccagttgagttggcctcatgcagattgttaagggctttggcagacctgcgttatttcttcggtgcttgtgctttggggagtactagggttcttcaatttggatcacatcagtccaaaagcagtagacttttctagtgatcagaataattgctgcatgtcacaaaagaacatgaacccagactcagaaaagaaacacaggaaaccttcaacaacaaggatcttcacattggggcaaaggttacattttttggctcgcactttcyaagtctcctaataatactgatatcacttgttttggggtgtgtgttgttactgtgatggggcagggaaaggaaagtg

SEQ ID NO: 710761 - DNA, 2636 bp, Homo sapiens
ccgaatctaaaacatgataggtcatatcatcctattgcttatgacctgtcaaagctcccccttgccctccagatacagagcaaattactcagaaggattcacagagctgttcaacatctggaacctgctcttctctctgggcatgtttctagtcattcacatgtgccctatgtacggtcacactgagttacctgggatgctcccagacaggcccaaatgttcatgcctcagtgcctttgcatgagttttcacctggatgggacttccttctccttatcttccaggacaatgcctccttttccttaaggcttcctcttcttagaagccttccctgtcccttgccaagcacaagtgtttgctctgtctgtaccactccccaggcacttcatcattagggtggtcatctgattactctattggctgtgggttcctggaaagcaggttatcgagcaccatcactgtagaatatgtagctgattcatggcagatactcaaatgttcatggggggataagtgagcaaaacagagaaaaatgaggcaatgttagatattatgccagtacagttaaatagatggggatttttttaatgttctcaggaggattatgtaaaggaagtgcattaaagacagcaaatttgggtctcagaactaaaacctgatgcaaatgccgaggaatcaggtcagcaaaggatgcactgagggcagagcatcaagttaggatttgagatgcagtcccgaaactgggcagagagaaaacaggaaatgagagtgttatgttgtcaggctgtaaagtctgaagtcttgcaatttcctcctcttctgctacaatttttataataagatgacaaagttcatttccctaaagactgcaggcctgacccaggccagaggagtggagaagcgcagcactgctgtcacctaactgagctcagaccctcaagccagagctgctctgaagagcagcggggaagggggcagccagacggatgttcgcctgccagagagagaagacacagagggtccttggtctctgcgcctgcagcagcaggtcctccttcaacagctcagagatgcccaaactgctcttagctggaacgaattacttcttgccaggcttgaaattcgtttcaggtgggaggagaacattgccgtaagtggagattgcagagttggcaaaatgaagtgaggctgtaggactgggacctggtacctggtacgttaagggactgaagcctagagggtcagtctgaattggccttcatttttattttccacccatgccccaaagagtgcttttaaaagtgactctaccatggcacacgtttacctatgtaacaaaccttcatgtcctgcacgtgtatcccggaacttaaaataaaataaaataaaattttaattaaaaaattaggaaatatcattattttaaagagatgttaccggtccaaataaatagaaatgtaaatatgaagtcaattgctaattgtgcagatacaatgttgttttcttttcctttttttttttttctttgagacggagttctgcttttgtcgcccaggctagagtgcaatggcgcaatcttggctcactgcaacctctgcctctcgggttcaagcaattctcctgcctcagcctcccgagtagctgggattacaggcacccgcccccatgcctggctaatttttgtatttttagtagagacggggtttcaccacattggccaaggctggtctcgaactcctgacctcaggtgatccacccacttcggcctcccaaagtgctgggattacagatgtgagccactgtgcctggccccaaacttgttttcattatttgtctgtagtctctgggaaaggattgaagtaaggcagttttccatggaaggtgtgtaagttggtcaccagtcaatatttctaaaatgtatagtttttaaaagtaactacatttgtgaatttcatgggaccaaaagttctgtcttgtttgtaacattcaagacaagaaatgaactcaatatctttaatggaagcaaaaataaataaatctctgttcccttaaaaaaagaaaataaaagtgactctaccattttgcattcccttttattatataaagtttcgagtacttttttgtgtccaggtctcccagttgacactacttgaagcagaagaattgctcagttgagacaatcaacaaaaaagagaataaaatggtcattgttctaagcctgtaactgttggggtcatttgtatgtaacagtagataatcagaacagggtgtgagattggaggttggtgtattgtcagccagttgagttggcctcatgcagattgttaagggctttggcagacctgcgttatttcttcggtgcttgtgctttggggagtactagggttcttcaatttggatcacatcagtccaaaagcagtagacttttctagtgatcagaataattgctgcatgtcacaaaagaacatgaacccagactcagaaaagaaacacaggaaaccttcaacaacaaggatcttcacattggggcaaaggttacattttttggctcgcactttctaagtctcctaataatactgatatcacttgttttggggtgtgtgttgttacygtgatggggcagggaaaggaaagtg

SEQ ID NO: 710762 - DNA, 626 bp, Homo sapiens
tctaggtcaaatggcatgcacattttaagagactatatatataaaawatacaaaatataaatatatatcaatataatgtaaaatgtgtgagcaagcagctcattgcatgcaccctgccaacacattttcattaatataaacaataaaaaactcaaaaagaaattattttcaaaatgataggtaaaaattggtttctcatttctaatgatattcatcttttttctattgatttttgagagttcttttggtattaaagatattagccttttatagtatgctgcaatatttttccctttgccatttgctttgtttctctgattatagtagttattatcatatgcaagtgttaccttttttggtagccaaatatatctttttttgtggtttataggttttccctttccatttatgcttatatggggctgacttgcccctagattaaataaaaaatacacataaattttcttcaagttacttttacagtttcatttattttattttattttaaatctttaatctatctggaatttattttggccagcatattttttttgaaccatctagaatgctttcagtacacaggagcaaatgtccatgcagttttacaaattttataataaaatata

SEQ ID NO: 710763 - DNA, 626 bp, Homo sapiens
tctaggtcaaatggcatgcacattttaagagactatatatataaaaaatacaaaatataaatatatatcaatataatgtaaaatgtgtgagcaagcagctcattgcatgcaccctgccaacacattttcattaatataaacaataaaaaactcaaaaagaaattattttcaaaatgataggtaaaaattggtttctcatttctaatgatattcatcttttttctattgatttttgagagttcttttggtattaaagatattagccttttatagtatgctgcaatatttttccctttgccatttgctttgtttctctgattatagtagttattatcatatgcaagtgttaccttttttggtagccaaatatatctttttttgtggtttataggttttccctttccatttatgcttatatggggctgacttgcccctagattaaataaaaaatacacataaattttcttcaagttacttttacagtttcatttattttattttattttaaatctttaatctatctggaatttattttggccrgcatattttttttgaaccatctagaatgctttcagtacacaggagcaaatgtccatgcagttttacaaattttataataaaatata

SEQ ID NO: 710764 - DNA, 758 bp, Homo sapiens
tcctggggtatatgtatttcttgggcagaactgcacattggtgtcacctgggagttttctgatgccctggccacactcaggacaatttagtcagaatcttctaagctgtggcctgggcatcagtgctatttaaatctccctgatgattctaaagtgcaatcaggagtgagaaccagcagtggagaggcctggtcttctttcacgtctgaactccactctcatctcctggattatagtttaacttatgattttgctcagtctgagccaaattcatggatgattgagcatctttctttcccttaacttcacattatccttctctgttaatcaaacacatttagattctcctaaatatgtttatattctaagaatagggctgttctttaatttgaaagcatcattttttcataatttycagctaattaggatccacattagatttttgtttgtacttaaaggaatgcatgtagacttcttttgggttgagactatatcttttaatctgtctcctttcccaggaggatgctgaattaatgtatcttttcatttaattatccatggggcacagcatataatttaatgcttggcacatagagagtactcagcaaatcttagttgaatgtacatttgcccttgtcctttaactctggtgctcaaatattcaattagttcctgaatgttgttgacataggctctcaaacatatttaaatctatttcctgggttgcattagcaaccatcattgtcttggtgtagctc

SEQ ID NO: 710765 - DNA, 2304 bp, Homo sapiens
tgtgtaattttagagactataactttaagaataatgttagttaatagtggtaatgaaaagcatcctttttttgaatttacagacatacctctgatatttcattgttaagaacaattttggctctctaaattgagacagactcttcacactgttaaagaaacattcttttgctttagttttaacatgtttgtgaaattttgaaaccaggattaatgttacatttattgtatattatgttgcacctgtaagtatgaatacatagcagttctttcatctattaatgtgaaaaattagatcagtaaatatcttgagatcaaaccaaccttgcattcctaaaaaaaaaaacccagtatttggttatgatatattattcttctaatatacggttgaattctgtttaattatgttttatatggtatttttgcccttatatttgtaaatagatagtctatagttctcttgtctatgctctccttgttacattttggtaagcctgtggtctcttcccacacatgttcaactacttacgccatataaaattattataattctctagtgggtaatgccatttcagggcttaatggctttctatgggctgtcctccctggtgttttgcttttccttgtttgcctttcacactcatgcaaaactctgaccattgctgatcatttgtcccctcctcaatgaagttttctcaaatatgccctccccatttccaactcagttgatcattccctttcctgctgtctttcagtattttcatatcttcattgtaatattgatcatatggtaataaaattatttttctatttgtttctctcattctattttaagtctttgaaagtggagattttgacattttatttttatatcactagttctcagcttcatgcttatgaaatgctagttgaatgcatgagcgactgaaggaaactcatatatacatttactttaccttactgcagtgcttcctaaggatactgtaaattgctcccagcatgacagagagaaataagcacatcctttcttagtcatgtatctttcaaatggcctgattatgctcctttgcaaggccccaagacatgtgttgaattattcattcaatattcattcaatattgttgtgttgcttaatttggcattatggtggcacagcattatatttagatacaatggaggacagcattgtgaaaacatggatcattcttcaataaggttttcttttcctctgaaatgtatccaattaatgggagtgggagcatttgccattccacagatgaacacctgcaatgtgctagtaactgtgctggatgctgaagatttggcaggaaattaaacaaacacagtccttcatggcagcacttacattctatttggggagtgccaccaaaaataaccaaataaacaaaataatttctgacttgagagaaggtgatgaaatgggagaatggggtcattttagatactagtggtcagggaatgaatgtctcagcaggtactattggcctgaaatttgaaaaggagagagccaccccttctccagttagcctggaagattgttccagatgatgagcatggcatttttaaggaaaagcaggaaggccagcctggttgaaggtagtgagctagggcttctaaatggagatgaaggtgtaaagcaggaagagcgtagctcatctggggacytgtggaccatgactagggcttagttagattgtactttaaatgtgatgagatatttttggaaacttttgattaaaggagttttatgatctgtttaatacatttgaaagaacatttggctgctatgtagggaagaaaagttctgttcccctacacattattataagaaatggttagacaaaaatatttaactggctgctgtgtcaccaagaaggcgtatgaggatgtttgtgctgtagttggaaatatataggtgagaaattacaacttttcctattgagtcttaataacatctttttcaaccatgctgctttttcctctttcctcttactttcttccccagtgtgtggctttcaaccattatctttatatgtgtaattcacttcactcaccttttaaatttcttgttccacataatactccttaccatagcatcgttaactgccccagtattatatagacataatgctagatttttatacacctggaaagagataaaaagtagtttagaatttctcttttttaaaaaaaatgtccaaattgcatcctatgagtgactaagcagcattattaagagcctttataaaacagcagacagcccagaggtaccttacaatgatag

SEQ ID NO: 710766 - DNA, 648 bp, Homo sapiens
catatgatgaaattttgatttctctgaatctcagagtaatttaagatgggcaaatccaatgagttgatgtaacccatctacattttgtggctatttcatgtataaaatgaaaggctttagttatttctagaggagtcccatccaacactatttggcgactgttaatatgttataattattagacagtggaaaagcctttattgactaattgatttaacctcagtccaaagaacagtctctatacttgccctcatttactgataggctgctactagttaccatttgattgtcttgactttcgtcttcagttgaattggtgaaaacatcaacaaaaacaaaacccactgtgtcttaaaataaaatgttctgcattgtagtcaataaagggcttaagatgtraaacaatgcattttctctctcaagatgtcctgtgttatactttacaattagttgtatcaacttcagattcattaaattttaacagctgtatttagttataatttttgtatcttacaacagtatatataaagactattattaatagacaaaagcaaacccacgtttttgacaagccagcatattgccaatgctcgtcaaagacatttatgtttcttttacattcatgacagctaaagtattaacttggaa

SEQ ID NO: 710767 - DNA, 2500 bp, Homo sapiens
ttgcatgagcacagactcattacmtctgccaatcacattgttgtcaggcaggatcactgcttaccagcttcataaaaacatatgaccagccaggcgcagtgccttatgcctgtaatcccatgcctgtaatcgggaggccgaggagggcagatcacttgagggcaggagtttgagaccagcctgaccaacaaggtaaaaccccatttctactaaaaatacaaaaattagctgggcgtggtggtgtgtgcctgaaatcccagctacttgggaggctgaggcacaagaatagcttgaacttgggaggcagaggttgcagtgaaccaagatcatgccactgcactccagcttagacaacagagcaagactctgtcaaaaaaaaaaaaaattaccaatcttgtaagaagcagtctaaatcttgaattatctgactttattttgcaaggatcaaataggtgattattgagatagttgagaaaaatctacattatattatcagtttattcattatgagctggactttccatatctagaaaactggtgacatcgtaaagaaaaagaaaagaatacaaatggaaggaaaggtattataaaatagaagcaagctttaaactggttatattaagtaccatattgtgttaaccatgtgaatgagctcatgccttctatcactgagagaggcaattggcaagggagaaggccacccagctggaggggcactgggaggacagtgactctgcacctgcgcggagcaggtcagtcagtgctggaagggcccaggcatgtggttctctgtccaagtctcaattatatcatcagatggctatttctcaatttcctttggtgttctttccatctgtttactctctcctgctctccagcagttcttccatcattgctgtaaaatgcattctatttggcgaggcttatttgttcagattgagttaagagatgggatgacttccaatttttaagcaatgcccagtttttcttaacacattcaggtagatttattctgatgtcctttagctgtggcttcgagacctcctactttgaaatttctttgtcattatattcaggattcagaacaaacctttgggcacattttttcctcctttgtaaattatgaaagctctcttaatatacagatttctagagtagagaaagcaaggatgaaactacaaaaaagtctagtgttttctaaagccagaaaaacaactaatttatatcttattaaaacacatacactctctccctctctctcggacacacacacacatacacactcactctctctctctctctctctctctctctctctctctctctctctccctctctctctctctccccatgatgttactgcggagttttcaacctcagtcttactgagagtttggccagatcatcctgtcgtggggctgtcctgtgcattgcaagatctttaacagcatccctggcctctaaccactaaatgccagtagcatcccctgcaaggttgtgacaatcaaaaatatctccagatactgccaaatgtcccctggggagcacagttacccctcattgggtgccacaggcattccaaatagaggaaacagcatgggtgaatgcagacatgagcacctgtgatactagtagccataactgacccttggcacctgtggattagatgcagtaggagagtaaagtgagactggaagcctctgagtttaattgaatatgtttctgtattttaattctctaaccctgcaaaaaattatgaaggcgtaattatatcttgaatgattaaaaaaagttgctatctttgcttttgttgctaggaagctaaaaataaatttgtactccacctctaaaagcatgcaggttttgagtaataagcttactcctgacttcatcatatatgtccactcttacgtgttttcagctatttactttttatgtctgtaagctacttccagcccttctctgaaaggaggcaagaatacctccatgcacacatacatgcatacgtcaattaaatggattgattacagagcttcacatactctccaatttattttggttacctgtggtagttaaataagtgttgcattatttccagcagtagtggcattacattgtctgtttctaaaatcccacagaatttctcccttattgcctgggttagtcttaatcttggtagtgtttgggggctgtctcagatctctgaaaggagtaacgaagaggaaacttgaagtgcatctatagaacattcttatgggcctctccttacaacagtcagcagtaatggtaatttacaattttgtaggtaagaaataatagaggaggcacaatgccgttgtcctccccacagtaagacagtttttgtagggttggcctgaaggagcaatgatgattctctcaaaataggagaacaaaagtcctcttaaaatcagacctgagggaagtatgaaaagcattgctgtcttttcataacatggaacaggctctctttctccctttc

SEQ ID NO: 710768 - DNA, 1044 bp, Homo sapiens
aaagtatttttgggaacaagtgttaattagagtaagggccagaggggattttctttttacatgaataaagtacatggatattgtagcatctattttgattcctcacaggcagtttttctccttatttcttacatctggaattgttttcaggattaaygtattcatcttatagttaggtcttaagaaggtgagctgtttctctatttgcttaattctctttactcactggcctgatggctgataccacggttacttttgctcctcttttaaatgacaatggttccagctcagggcatgttttgactgagacccatgactttcttatatagaggtgaaaacattctgatctgaagatgccagcatcagtgctaacaggtagaattgggttatacaatgttcagtgtgagcaatttattatggctaaagaagagatcagaggttgaaagtcaaggaagagaaagtaagatatagtatctatgggaatcactctatcaatgtatttaattgctgtagtttccttcaacatggtaccattttatagactaatgctttgtgttgtccaatacatcaggccagtgtttcttaactctggatacataccacagtcatgtacatatcagggttgctaatgcagcttcaacaaatgaagactcctgggattcactctgtaaagtgcttctcaagggtaaatgtgcaaaggaatcaatcactgtagaaccagcaggtctgtgtttctaacaagctccctggtgatgctgatgctgattctgctggtctccagaccacactttgggtagcaaggtctagggagaacctgatacagtaggtatgaggcaggaagatgggcatctttaataatgtcttcaggtgattctcatatgcagcaaggttgagcctcactgtccattggtggctgactagtagtgactttctagcggaatatgcaggtgctttctttccataccttgcaggctactactatgtctttctcattttccttgtttttctctggttcttcctttctgatatcctcaggtggtttct

SEQ ID NO: 710769 - DNA, 1044 bp, Homo sapiens
aaagtatttttgggaacaagtgttaattagagtaagggccagaggggattttctttttacatgaataaagtacatggatattgtagcatctattttgattcctcacaggcagtttttctccttatttcttacatctggaattgttttcaggattaacgtattcatcttatwgttaggtcttaagaaggtgagctgtttctctatttgcttaattctctttactcactggcctgatggctgataccacggttacttttgctcctcttttaaatgacaatggttccagctcagggcatgttttgactgagacccatgactttcttatatagaggtgaaaacattctgatctgaagatgccagcatcagtgctaacaggtagaattgggttatacaatgttcagtgtgagcaatttattatggctaaagaagagatcagaggttgaaagtcaaggaagagaaagtaagatatagtatctatgggaatcactctatcaatgtatttaattgctgtagtttccttcaacatggtaccattttatagactaatgctttgtgttgtccaatacatcaggccagtgtttcttaactctggatacataccacagtcatgtacatatcagggttgctaatgcagcttcaacaaatgaagactcctgggattcactctgtaaagtgcttctcaagggtaaatgtgcaaaggaatcaatcactgtagaaccagcaggtctgtgtttctaacaagctccctggtgatgctgatgctgattctgctggtctccagaccacactttgggtagcaaggtctagggagaacctgatacagtaggtatgaggcaggaagatgggcatctttaataatgtcttcaggtgattctcatatgcagcaaggttgagcctcactgtccattggtggctgactagtagtgactttctagcggaatatgcaggtgctttctttccataccttgcaggctactactatgtctttctcattttccttgtttttctctggttcttcctttctgatatcctcaggtggtttct

SEQ ID NO: 710770 - DNA, 2034 bp, Homo sapiens
agaatgcagtggtatgatcacagcgtactgctaccttgaactcctgggctcaagggatcctcctgcctcaacctcccaaacagttgggcttacagacgtgtgccaccgtgcctggctacttttttattttttatagagacagagcctcactatgttacccaggctgtcttttctttctttagtagtgcctgaaatgttgaagcatattaaatactaaaatttctctttcagaaaaaaatttctcccacttcactttctccctctctgatgtgacaatcaggacagttaaaatattgatttttaaaatttattgtttaatgcatagagaaaatataaatgaataagcttgaaactatgtttaatctttttaatgttaaaaatgcaagctaaagcaaaatgagggggtgttttcctgtatcatgctagtaaatatggaacataaaattatatttaatcctggcagggatttgagattagggcttccctgaacactgttggtgaagtataagcaggcagggccattctggaaagcaatttcaagagccttaaaaacttttatattctttgacctagaaaacaaactcctaggaatatatcccaagttataatcagaggtatagacaaagatttatgtaaaaaaatgctcattagagcattatttctaatggatctggaaatcataaaatgttgaaaacacgccaacaataggaaatcctaggcatttattacaaatggtgtgtagtagattattaaattacctgtgaagtgttcagctctaaccttaagaatgactctgacaaggttaaaatatatgcagataaataactggaacaaatatactaacatgttaataatggaggaattattatttccattttatgttttctgtattttccccttttacatttgtatttaatataaaatatatattttatatagacataatttataaaattagaatcttatataaatgataaattgatataattacaaaaaacaattattttttaatctggtcatactgaaatcatatagatttataataatgaaaattgctttctaaaattattggcatgattaatctgtgctcatgttttccagttttcctgtcagtaatgaattataatcagaatccacattatgttcaagaaaagacatgaaataccagaacatctaatcaataatcaaatcagtaggtacttactgcatatttgtgtacctagaacttttataagcatgcctcattctagcccataaacttcctgttagatctttttggagaacctcagtttgctaacatagatagtatccacaatgccttcttgaaaaccaatttataaagcagatcctttaaacatagttcaggtttccctgatgctttaatttaggattatatactcaatgaaacatttagcatcaaataaatcagaacttcatagcaaagccatgacagcttattctctacaatcacataaatcataaaattatgcttcaaatcataggatatttaaagctaggaggagctttggaggtcatcctttattttatagaaaggaaaccagagccggttttaaccccttggctaatgctgcagtcgtttgggggaagaagttggaaccagaatgcgagtttgctggctacagtgtcggcctctttactccacttgctccctgtcagtacacacgtggattataaacaatactccaatgacaatgagcagtataaaactctgctctatcatgcattgaaacatatctaaagcaagcatgctacctcttaaatatattaattaaacacattaaacacttaattgacattaatttagagagcttttgagggatccttggatggctccgataccttaaaaatccagcgtccttaaggacaattatttgtttagaaatatttattgagtgcctatgatatgtggtsagcactagagatacaacactgagcacgacacagctcccacccttagtgagttaacagattttggagacccagaaaaatgacaaggtcaatatcttgcagcta

SEQ ID NO: 710771 - DNA, 592 bp, Homo sapiens
tggcagcctaagcataattcataatcacattattcctaatactactactactaatgctgctggactcggtggctcaagcctgtaatcccagcactttgggaggccgaggcaggcagatcacctaaggtcaggagttcaagaccagcctggccaacatggtgaaaccccatctctmccaaaaatacaaaaattagccaggcgtgtgatggcgggtgcctgtaatcccagctactcgggaggctgaggcaggagaatcacttgaacctgggaggtggaggttgcagtgagccgagatcgcaccactgcactccagcctggttgacagagcaagacttggtctcaaaaaataataataataataataataatgctagttgctgtttatcaaatacttacttttactaaggacagcaaccctgtacatatatcattacatttaatatttagaagaatgtagaaggattagtagtataatctccattctatagataagagaactgaggcctaaagagattaagcaactttcccagggtcatgcagccaataaggcaagatattggattcaaatccaaggcttcttgactccaaagca

SEQ ID NO: 710772 - DNA, 742 bp, Homo sapiens
taagttcacatgtaaaggaggtttgcctgcttagaatcttcctacaattattgttctgtctcagttgatattttcctaaacaccagtagaggcctccagacacttcattaagtaaacaaacataccaagatgctaacaccatccacacacgggggagagctgacatccatcgtgtccactgactctgtagagcgcaaatgaaatctttgatgatgatttcagtgagaatcagctataattaagggaggtgctaacctttgtggtaaaacctgcccaaatatccgttaaaaaaatacttggtccagaatggaaataagtcatggtaaatatgattgttatcttagatcacatttaacccaatatcataatatgagaatttttgttaggctttctaaaaagcctattttagatcacatttaaccccatatcataatatgagcatttttgtgaacaatttattgtattgttaataacaagttctctcaagctaactaatgtgttcagcattggaatcaaaagaycagaagtggagaagaatcaaaatgaggtaatgccaagacccccagcctgagttatttagcaagtacaacttttcttcaacacattttgaactgagtataatcctagcaaaaaagtttgctaaatagtgactagccatgacaactttatagaaaatataactaatgtaactcataaacagcctactcgtagtagtctaaggcacctattttatttgtgtata

SEQ ID NO: 710773 - DNA, 702 bp, Homo sapiens
tggaaagctagaagtctctscccaaggctgtcaacaacatcaaaatggatatcacacagccatgcattaatgcattttacccagaggtgactaaaatcatgtccccagttcagagcctcttagtcttatttagacagaattcttattagcttggttatagggcttcctaaatcgttacagattaaaaggaagtgtagtgagtggcaggcatcttgacagctgcaaaaattgagagcagaatgccccaaaacaaataaggatgtacaaaaggctgaggcaaaagttaaactggcaattcagaggaatctgatacaggggcaaatagtcctatgaactttagtggccctgaggcattgcccatttaacaacattgccacatagtaaaatatttaggttaagtaatcaagatccagagtcttccactgtggttaaaagaaaaaacattttgacactctaaaagaaggtaagcttcatcagttttctggaattttcatttatgtataatgttctatgaaagtgattctgtcaaataaaggagaggcccctctgcttgccattcttttcaccttcatctaattaacaccacattgtttgtgtaggaaaatgccttctgaattccatttttggagtctaggattatatattatctcagagggtttggcactagtacttttccttgtttttgaagaaagtacttattat

SEQ ID NO: 710774 - DNA, 1285 bp, Homo sapiens
atcagagatggggctgtgcctcctatttggatgctatttcaaaataaataaaatattgcccacagcaggtttgacacatagttcaaaaattgactgctgaatggtgatattgtttttatgtgtttttaaaaggatggtgtttttcaggtttaaaacattaattggtcagagtgtatatcttagcttctgaacatgaaacactgtttgatgtagcgattgaagcgttaaagcaatttctcctgaaactctatagatctcagttcctgttcagtgtttctctaaacaaaatattagaaggcaaatgttctatcttctaaggtggaatattagttttagtgtcaggtattttctaaatgaagtgtttgytactttctctgaggtttaagtaaatgctttttctttgatacgtaggtactttgaagatgtttccacttcccttcgaagatgttcaatgtccgtacatagaatgaaaggtgccaccttctccagcatgagacatatccccatgtgatcccttaccacgcagactcctggctgagttaggaagaaagaatagaagtcaatgcattccatttgttttcaaggcacacccaaaaagtatgaacttagatatatcacagagcttccaatttacctgcctgtatttacaaaataagtgtatgatttctcccgaaacattattttttgcaagttacatgccaataaccaccactgaacataagctgatatttttgctgaatgaaggattgtgaattatccttgtagctttctttgacttcattacacatttcaattacttctctaaacactgactgccgccataaaatatctttagttcttttcccctatgaaatgtgctgccaataataatattttactagaaaataatgcaataaattagcatgatcacaacctagaattatataaaataatatttgctttgtattcaagtgaacctttccatggacagaaacaagcaccttgtcatattttaagtaaacattaattatgaaaaacaaattatttgcaaggaggcaatacaaaagtggacgctggagttctatgttagagtaaatatctgacagatttaatatggaactttcttttaaagtcttaagttttcagtgctcttattggcaaatgatgtattagacctagtaacgtaaaacacaatgaaatagattgtatctactggaaacattagtactcattagatctgataactgtgagtctaaatgtgaaatctctactttatgaattatcacagatggtattgtagatgatg

SEQ ID NO: 710775 - DNA, 1285 bp, Homo sapiens
atcagagatggggctgtgcctcctatttggatgctatttcaaaataaataaaatattgcccacagcaggtttgacacatagttcaaaaattgactgctgaatggtgatattgtttttatgtgtttttaaaaggatggtgtttttcaggtttaaaacattaattggtcagagtgtatatcttagcttctgaacatgaaacactgtttgatgtagcgattgaagcgttaaagcaatttctcctgaaactctatagatctcagttcctgttcagtgtttctctaaacaaaatattagaaggcaaatgttctatcttctaaggtggaatattagttttagtgtcaggtattttctaaatgaagtgtttgctactttctctgaggtttaagtaaatgctttttctttgatacgtaggtactttgaagatgtttccacttcccttcgaagatgttcaatgtccgtacatagaatgaaaggtgccaccttctccagcatgagacatatccccatgtgatcccttaccacgcagactcctggctgagttaggaagaaagaatagaagtcaatgcattccatttgttttcaaggcacacccaaaaagtatgaacttagatatatcacagagcttccaatttacctgcctgtatttacaaaataagtgtatgatttctcccgaaacattattttttgcaagttacatgccaataaccaccactgaacataagctgatatttttgctgaatgaaggattgtgaattatccttgtagctttctttgacttcattacacatttcaattacttctctaaacactgactgccgccataaaatatctttagttcttttcccctatgaaatgtgctgccaataataatattttactagaaaataatgcaataaattagcatgatcacaacctagaattatataaaataatatttgctttgtattcaagtgaacctttccatggacagaaacaagcaccttgtcatattttaagtaaacattaattatgaaaaacaaattatttgcaaggaggcaatacaaaagtggacgctggagttctatgttagagtaaatatctgacagatttaatatggaactttcttttaaagtcttaagttttcagtgctcttattggcaaatgatgtattagacctagtaacgtaaaacacaatgaaatagattgtatctactggaaacattagtactcawtagatctgataactgtgagtctaaatgtgaaatctctactttatgaattatcacagatggtattgtagatgatg

SEQ ID NO: 710776 - DNA, 828 bp, Homo sapiens
tttttttttcagaaaaattttgagaactawtttttttaatggtttgtttgcttcctgttttgattttcttttttcaagcattctaattatttgcattttgatcttctttggctcctcaatatttatccccttctcttgaatccttttccctcttttacgaatttcctttttatttttaacattttttatttttcactttctagttctcttcaggcattatatcttgtgttcaatttctcttctagtttaccttcattctaattttttaaattttatttctaattctttcctgagatctgtcaattagagttcttataattttgatttgttattctttcatgtctttttttcataatgtattttagctcatgttcaaatgataagttacagttttatggtgtattgtaagcctatcttcctcagatattttcactccgtaggaatgttattctgctacttattcattgtattattatagtaactctgtatgagattttacctcagtactttcctgatgtacattttttttttttgagacagagtctcactctgttgcctaggctggagtgcagtggcaccatctcggctcactgtaacctccacctcctgggttcaagcaatgatctgcctcagcctcccgagtagctgggattacaggcgcctgccaccacgcctggctaatttttttatttttagtagacacagggtttcaccattttggccaggcttgtcttgaactcctgacctcaggcgatccacccaccttggccttccaaagggctgggattacaggcgtgagccactgtgcctggccgatgtacattttta

SEQ ID NO: 710777 - DNA, 587 bp, Homo sapiens
gcaccttgttgttctagtcagtctctcaatggattcagtgatgtccactcacactggggaaagccacctgctttactcagtttcctaattcaaatgctaatatcttctggaaatgtcctcacccagaaataatgtctaatcagctgtctgggcatcctatggcccagtgaagttgacacataaaatcagccatcataataacttcttgtcagatgaaaaattttactcccatgtttttacagagattcagggagctgttgagttttattcaaggaagtcatgactagctagagacaagttaaaactttcacaaacatataggtgcagaaataataaccatcataggtttcataaattatkctggtactaggaatataaaggaataacctgacatctgccctcataaatctcccagcatgttagacacacaaggagctctcagccttttaggaacatgcacagatcattgcagtacattgtggaaagtgcaaagggtgtgatgtgcatggcacatcgtgggagcacagactggggaatcggggtgggacttaattgagttctcttgatgatgttcagacaagtattcc

SEQ ID NO: 710778 - DNA, 545 bp, Homo sapiens
agatgcacaataattagttgagacaacagacatagaccaggaattccccaggcaaactggacacagatcatcctatatgtagctaaaaactcaacatatagataatcaaatatctctcacaaggggtgtattttgcaaacaatttacttgagataatttaccaggacagtgtagygtgtgaagtctaagtgttctttagtaacattgcttatatcagcttatatctgtttcaagataaaattttcaggccaaaactattaatatatttttgctctttatagctttcaaagttccactgtatatcttctaaatgtatttaaaatcctgtgaattccacaagagtcgagttaatatgtgcatttcatatatatataaattggggctcagaacatttagattgaaaagacgatgatgtaaagtagaagaatactgacccaaacacaaaacatgtatttgagcactggcatatcacgttttgtttttgtttttgtttttgtttttttttgcagtgctacccaaagcatgggtcgcatacagtttaacca

SEQ ID NO: 710779 - DNA, 545 bp, Homo sapiens
agatgcacaataattagttgagacaacagacatagaccaggaattccccaggcaaactggacacagatcatcctatatgtagctaaaaactcaacatatagataatcaaatatctctcacaaggggtgtattttgcaaacaatttacttgagataatttaccaggacagtgtagtgtgtgaagtctaagtgttctttagtaacattgcttatatcagcttatatctgtttcaagataaaattttcaggccaaaactattaatatatttttgctctttatagctttcaaagttccactgtatatcttctaaatgtatttaaaatcctgtgaattccacaagagtmgagttaatatgtgcatttcatatatatataaattggggctcagaacatttagattgaaaagacgatgatgtaaagtagaagaatactgacccaaacacaaaacatgtatttgagcactggcatatcacgttttgtttttgtttttgtttttgtttttttttgcagtgctacccaaagcatgggtcgcatacagtttaacca

SEQ ID NO: 710780 - DNA, 545 bp, Homo sapiens
agatgcacaataattagttgagacaacagacatagaccaggaattccccaggcaaactggacacagatcatcctatatgtagctaaaaactcaacatatagataatcaaatatctctcacaaggggtgtattttgcaaacaatttacttgagataatttaccaggacagtgtagtgtgtgaagtctaagtgttctttagtaacattgcttatatcagcttatatctgtttcaagataaaattttcaggccaaaactattaatatatttttgctctttatagctttcaaagttccactgtatatcttctaaatgtatttaaaatcctgtgaattccacaagagtcgagttaatatgtgcatttcatatatatataaattggggctcagaacatttagattgaaaagacgatgatgtaaagtagaagaatactgacccaaacacaaaacatgtatttgagcactggcatatcacgttttgtttttgkttttgtttttgtttttttttgcagtgctacccaaagcatgggtcgcatacagtttaacca

SEQ ID NO: 710781 - DNA, 854 bp, Homo sapiens
gtggtacttctagtccattcaacaaatataatacaaatataaaacaaaaataatacttcacagtgaagtattatttctttttgtaaaagaggtatctgaggcacagacaagattaataactttaaagtcatccagttagtgactgaaatgggactcacacccaagtctgattccaaggtccatgtgattttctgccacaccattctgattcaattaaatgttaattaagttgggatgacctcaccaggcagaaaacttgtagaagaaatagaattgggttagatatgaaacaacattcctccctcaccaagtccactttataagttctctcattgattaaaagtgggaaataaaccccaaggtttctactgaattgcttggtatactacttctgacacccttcctagatatctcttttcttctcctaaataatttgacaattctcagattataagctacgtaaaataacttagccatattacaccttgaaaatctgaagtcaaatttgctcaagaatatcgttttcctcatgtcacaactacaatgtcatcctagaacgctaaacccgcacatattgtgacccaactctattaggcttcatctaccttttataaaggcagcagaaaaatattgtacaacaactgttgttcactgaccagaaaagtaggaattgaagatgataagggcagaaaaatccttttwaaacataaactgacagcccatgggccaagcccaactgctgttatgttttgtttggattaaacagtattttaaagctatttgacttcatagccaatatttaaaagtttaaaattcacatagaaatcagatttctggcttcttttttaaaaaaa

SEQ ID NO: 710782 - DNA, 658 bp, Homo sapiens
gaggcagtgtggtgcgaccaaaaaaatcacaagtttttggtgtctgttgacctgagcttgtctcccagctttgccattcaccagctatgtgaacttgagcaagttccttaacttctctgagtctcagatttgctctcctttaaatgaggactttaactaacctgcagtttgtcaygagcttttgttttggggggtttgtcattttgttttcttttgagatagagtttcactcagtcgcccaggctggagtgcaatggtgcagtcttggctcactgcaacctccccctcccgggttcaagcgattctcctgcctcagcctcccgggtagctgggattacaggtgcagaatcagcaaaaacaggtctgcagtatgggatagaaatttcagatgggaccagaggaggaaaaaggactccaagaagaaggtccagagaacattcagggcacaggttctggggtcaaaggaccctggttcaggtttcagctccaacactcactggtgcagccttgagcaagccagctaacttctctgtgtctcagtgtcctatttataaaagagtgttaagtacagctctcgcctgatagggttgttacataggttaaacaagataacatctgtagagcacttagaatagtggctggcatagtaaacactaaa

SEQ ID NO: 710783 - DNA, 999 bp, Homo sapiens
tatttgttatttgtttactttgattactatctccccttgccagaatggaaattctatgagatcmgggatcttatttttctgcatttgcaatgcctagaactgtgcctgatacataagttgacaataaatacttactaaagaaatgagtggcactaataaagtcagtcttccaaccatcccattccctttgaagatttcctagaggtccaggttaggggttcagcctgggcttgaggtgcaaaacagtgacccaaaatattttagagttcaaacctacagacttaatagaatatgcaccaggccttgaccaaataaaaaagataggccactgacttattgacaataggagggaaagagagattttccagatggctgatattgaagaaaaacatcacaacatcgtgatgcatggttactatttatgagagacaagaaagccatggcagacagacaaacaagattgtcagcacccaccttagcctacttaccctctaatagaagtgttcaggagcagtgagggaaggagatgctccatctgaattccaccaatcagctaatttccctcaagccaaaactaagtttactatatgtaagcatataacttctcttaaaaatcttgtttatacctttccaatagcacaaaagagaaagttggttttgactatgcccattttccagaaggagaaactgaggcacacaggatctgtgaggtggccaagagcaagtaaatcatgggaccttacggtcagtggagggccgtgtttactgagatctcgttaaaaaatcacaacagaaagaaggaaagaggaacaggcagatgaggggtgccttgagcaactgccatcactttgtattgtgcaaaccgaggccatcattagactgttactcaatttgcatcaccactttgctcaaacgtcaactttcaaaccctatgttcagaacagagtccattcaggagatcctgagatcaggaaaagagttatgagagtgttattgtca

SEQ ID NO: 710784 - DNA, 1641 bp, Homo sapiens
taataaaaaggtacaaagttacttatcaaaaggcgtagggtatttaaaaaactcgtgacttacagtgaaagtgagtaaggtggaggtattactgtctagatttttaactagttaatgtctaccgtgtaagcctgtatctgaaacactggtgaaaaattacggaggcaaagtgaagagtctgtaaaattaggtccaaacactggagagagcaaggagtaggaagtgcagagaaaacactgtggtcttagaactctctatcttcttgagaaatagcccagttgggctgaggtctgggctggtggacaccaggagaacatggactctcagatgtatagcccaggctggatccatccttcaaatgcatctgcctctggtgaatccatttctctcaggtaagctcaaccattacagaggagaatctctattcaacatctttgcaagctttgttttgttttaaaaatggacccggttttatcaggcagattttctggtatcccaaagtagcattcccttttgtatgatgggagaaaacctagtttaacctaggtggtcacagcactcttcaagaagcggaaggttaaaaataatggttggctaaatgatattaaagctgaagcggtggctcagaggctcttaaatcacgtgtctgctcctgggtggactgccaaatggcaagtgaagaaagaagcagaaaaagagctgctgggcacacagggggcttaactataatgctgcccgaatttcacctgaagacccagagttccagggccagaagggcatgrgtttttggaaaagaatcacgtttctgaaacacaccaccaaattcctgcaatcagaaaatgaaaactaaagggcatctatcttggttaaatgtagattagggtggattaaaaatggccacaaattctttgtggcttatctcatcaagaagtggaacctactttccaaacctttgaatgagggcttgacctgggacttcctttgaccaacagaacatggcagaagtgttctgtaacttccaactcttggtctccaaaggctttgcaacttcctctcctgcttctgacatcatgtagggagaggggtctttccagccatcccagctgagtttccaaacatgggagggacatccagtctcagtcaacctgccagctggctacagaagaactgctcagtcaacacacagaatcaggacaaagaataaatctttgtcattttcagctacttcttttggggcggttgttacacagcagtgaataactgaaacacgtatgtggtatgcagatagaaatgtgttggtgagatataaattcatattccccgatatatttcttggacttaaaaacaacaaaacattgttatcaaaaaagctccagtggaaagagcacagggttttcaataaaaaaaaaattaaaaaacctgggttgaagccttgaacctgctctgtctcttgtaccaaggaaaatttgtgattttctgcaagtctcttattatctcaatctccattctcatacctataaattcctcatagaattaaagtgatggtaagatatgaatagggaaaatgctttataaacagcaaggcactttacacatttaaggtgtgactgctattgttatctatatgtcacttaaagacta

SEQ ID NO: 710785 - DNA, 1641 bp, Homo sapiens
taataaaaaggtacaaagttacttatcaaaaggcgtagggtatttaaaaaactcgtgacttacagtgaaagtgagtaaggtggaggtattactgtctagatttttaactagttaatgtctaccgtgtaagcctgtatctgaaacactggtgaaaaattacggaggcaaagtgaagagtctgtaaaattaggtccaaacactggagagagcaaggagtaggaagtgcagagaaaacactgtggtcttagaactctctatcttcttgagaaatagcccagttgggctgaggtctgggctggtggacaccaggagaacatggactctcagatgtatagcccaggctggatccatccttcaaatgcatctgcctctggtgaatccatttctctcaggtaagctcaaccattacagaggagaatctctattcaacatctttgcaagctttgttttgttttaaaaatggacccggttttatcaggcagattttctggtatcccaaagtagcattcccttttgtatgatgggagaaaacctagtttaacctaggtggtcacagcactcttcaagaagcggaaggttaaaaataatggttggctaaatgatattaaagctgaagcggtggctcagaggctcttaaatcacgtgtctgctcctgggtggactgccaaatggcaagtgaagaaagaagcagaaaaagagctgctgggcacacagggggcttaactataatgctgcccgaatttcacctgaagacccagagttccagggccagaagggcatgagtttttggaaaagartcacgtttctgaaacacaccaccaaattcctgcaatcagaaaatgaaaactaaagggcatctatcttggttaaatgtagattagggtggattaaaaatggccacaaattctttgtggcttatctcatcaagaagtggaacctactttccaaacctttgaatgagggcttgacctgggacttcctttgaccaacagaacatggcagaagtgttctgtaacttccaactcttggtctccaaaggctttgcaacttcctctcctgcttctgacatcatgtagggagaggggtctttccagccatcccagctgagtttccaaacatgggagggacatccagtctcagtcaacctgccagctggctacagaagaactgctcagtcaacacacagaatcaggacaaagaataaatctttgtcattttcagctacttcttttggggcggttgttacacagcagtgaataactgaaacacgtatgtggtatgcagatagaaatgtgttggtgagatataaattcatattccccgatatatttcttggacttaaaaacaacaaaacattgttatcaaaaaagctccagtggaaagagcacagggttttcaataaaaaaaaaattaaaaaacctgggttgaagccttgaacctgctctgtctcttgtaccaaggaaaatttgtgattttctgcaagtctcttattatctcaatctccattctcatacctataaattcctcatagaattaaagtgatggtaagatatgaatagggaaaatgctttataaacagcaaggcactttacacatttaaggtgtgactgctattgttatctatatgtcacttaaagacta

SEQ ID NO: 710786 - DNA, 1641 bp, Homo sapiens
taataaaaaggtacaaagttacttatcaaaaggcgtagggtatttaaaaaactcgtgacttacagtgaaagtgagtaaggtggaggtattactgtctagatttttaactagttaatgtctaccgtgtaagcctgtatctgaaacactggtgaaaaattacggaggcaaagtgaagagtctgtaaaattaggtccaaacactggagagagcaaggagtaggaagtgcagagaaaacactgtggtcttagaactctctatcttcttgagaaatagcccagttgggctgaggtctgggctggtggacaccaggagaacatggactctcagatgtatagcccaggctggatccatccttcaaatgcatctgcctctggtgaatccatttctctcaggtaagctcaaccattacagaggagaatctctattcaacatctttgcaagctttgttttgttttaaaaatggacccggttttatcaggcagattttctggtatcccaaagtagcattcccttttgtatgatgggagaaaacctagtttaacctaggtggtcacagcactcttcaagaagcggaaggttaaaaataatggttggctaaatgatattaaagctgaagcggtggctcagaggctcttaaatcacgtgtctgctcctgggtggactgccaaatggcaagtgaagaaagaagcagaaaaagagctgctgggcacacagggggcttaactataatgctgcccgaatttcacctgaagacccagagttccagggccagaagggcatgagtttttggaaaagaatyacgtttctgaaacacaccaccaaattcctgcaatcagaaaatgaaaactaaagggcatctatcttggttaaatgtagattagggtggattaaaaatggccacaaattctttgtggcttatctcatcaagaagtggaacctactttccaaacctttgaatgagggcttgacctgggacttcctttgaccaacagaacatggcagaagtgttctgtaacttccaactcttggtctccaaaggctttgcaacttcctctcctgcttctgacatcatgtagggagaggggtctttccagccatcccagctgagtttccaaacatgggagggacatccagtctcagtcaacctgccagctggctacagaagaactgctcagtcaacacacagaatcaggacaaagaataaatctttgtcattttcagctacttcttttggggcggttgttacacagcagtgaataactgaaacacgtatgtggtatgcagatagaaatgtgttggtgagatataaattcatattccccgatatatttcttggacttaaaaacaacaaaacattgttatcaaaaaagctccagtggaaagagcacagggttttcaataaaaaaaaaattaaaaaacctgggttgaagccttgaacctgctctgtctcttgtaccaaggaaaatttgtgattttctgcaagtctcttattatctcaatctccattctcatacctataaattcctcatagaattaaagtgatggtaagatatgaatagggaaaatgctttataaacagcaaggcactttacacatttaaggtgtgactgctattgttatctatatgtcacttaaagacta

SEQ ID NO: 710787 - DNA, 925 bp, Homo sapiens
attagtgccccaagagggtgatgagtaatggtggagccatctgtaaacatcggyagaggttgctggaagcagggaatagactgctttcaaatagcaggttagaagttttctgtcctcaggctgcagaggcagcagctcccactgtcaccaagaactctgctctggggttggtggtacatgaagtctcaaaattatctgttcccataagcttgggtgtgtgtgtgtccttctgtgtgttctctgccattccacaggctgtgtgtgtgtgtgtgtgtgtgtgtgtgtgttgttgttgctgttgtgtgtggtgggggggtgggtcagagggaattcagagggggctcagaggctccaaaataaataagtggatgaatgtctagttgcccccttcacccccgaggtggaagacagattcttttagtatcctccttgctctatctttagcaataaaaaaaattaattatgctgcatacatttttcttagatataatgctgttgcatatttaagagactagagtttagtgtaagcataacttttatatgtaccagaaaacaaaaacatttatgtgactcactttactgtgaccattacggcagtggtctggaactaaatcaacagtatctctgaggaagtatacctgtattttaatcaaagcaactgtttctccaaatgaaactggaaagcacaattcatgaaattctggttgaattggaatagcaacctcccagagctctgcacattcccaagagaggttctcgttttcagtgaggcagggtggggtgtcccggggcctgcagaggcttatgtccttgttccagccaagggagagaaacacagtagagaactggacatttggctgtgctctggccaaaggtggtgaaaatgagcaagagtcctgatccatagctaactgggatgccctcg

SEQ ID NO: 710788 - DNA, 925 bp, Homo sapiens
attagtgccccaagagggtgatgagtaatggtggagccatctgtaaacatcggtagaggttgctggaagcagggaatagactgctttcaaatagcaggttagaagttttctgtcctcaggctgcagaggcagcagctcccactgtcaccaagaactctgctctggggttggtggtacatgaagtctcaaaattatctgttcccataagcttgggtgtgtgtgtgtccttctgtgtgttctctgccattccacaggctgtgtgtgtgtgtgtgtgtgtgtgtgtgtgttgttgttgctgttgtgtgtggtgggggggtgggtcagagggaattcagagggggctcagaggctccaaaataaataagtggatgaatgtctagttgcccccttcacccccgaggtggaagacagattcttttagtatcctccttgctctatctttagcaataaaaaaaattaattatgctgcatacatttttcttagatataatgctgttgcatatttaagagactagagtttagtgtaagcataacttttatatgtaccagaaaacaaaaacatttatgtgactcactttactgtgaccattacggcagtkgtctggaactaaatcaacagtatctctgaggaagtatacctgtattttaatcaaagcaactgtttctccaaatgaaactggaaagcacaattcatgaaattctggttgaattggaatagcaacctcccagagctctgcacattcccaagagaggttctcgttttcagtgaggcagggtggggtgtcccggggcctgcagaggcttatgtccttgttccagccaagggagagaaacacagtagagaactggacatttggctgtgctctggccaaaggtggtgaaaatgagcaagagtcctgatccatagctaactgggatgccctcg

SEQ ID NO: 710789 - DNA, 925 bp, Homo sapiens
attagtgccccaagagggtgatgagtaatggtggagccatctgtaaacatcggtagaggttgctggaagcagggaatagactgctttcaaatagcaggttagaagttttctgtcctcaggctgcagaggcagcagctcccactgtcaccaagaactctgctctggggttggtggtacatgaagtctcaaaattatctgttcccataagcttgggtgtgtgtgtgtccttctgtgtgttctctgccattccacaggctgtgtgtgtgtgtgtgtgtgtgtgtgtgtgttgttgttgctgttgtgtgtggtgggggggtgggtcagagggaattcagagggggctcagaggctccaaaataaataagtggatgaatgtctagttgcccccttcacccccgaggtggaagacagattcttttagtatcctccttgctctatctttagcaataaaaaaaattaattatgctgcatacatttttcttagatataatgctgttgcatatttaagagactagagtttagtgtaagcataacttttatatgtaccagaaaacaaaaacatttatgtgactcactttactgtgaccattacggcagtggtctggaactaaatcaacagtatctctgaggaagtatacctgtattttaatcaaagcaactgtttctccaaatgaaactggaaagcacaattcatgaaattctggttgaattggaatagcaacctcccagagctctgcacattcccaagagaggttctcrttttcagtgaggcagggtggggtgtcccggggcctgcagaggcttatgtccttgttccagccaagggagagaaacacagtagagaactggacatttggctgtgctctggccaaaggtggtgaaaatgagcaagagtcctgatccatagctaactgggatgccctcg

SEQ ID NO: 710790 - DNA, 660 bp, Homo sapiens
catttattccaacctcaccatcattgctcagacttggttttggactgtctaactttgaattgcttccagaacgtacgttgtactctatcgaataactaaattatgccagatttttgccctttgaaggtggatttgatttgcttagaaaatcatttgaaatcacatttggtggctgaggtgacttatcagtggtttggataataatttggtaaatcattttttaattttttaaataattaattttttaattttaaagtctttttttgtagcagagactgaaaagtaggggtgaaatgttgttttctttaatattatctaaggttcttcctctctttgcctggttgatgacaggttcttcctcttcttactaacaggttaatgatgataattagttagtaattggctgacaatcttcagccaacagaatgtgtgaccaaaagagtgactttcagagtccagactcaactagatactgcaaactgacccaagggaataagggaagggagctattaagggaartaactaaagactgcaattctacctagagactaatttaaccataagatagggaagttgcggagacaagtagtgacttctgtgagtatgctgttcggagagtatggctatggcagacagggctttggaataaagtggacctga

SEQ ID NO: 710791 - DNA, 643 bp, Homo sapiens
ttgtccacatgaactttagcatctcaatattgtacaccttcccattactaattctacgaaatgtatacatttatttgtagacaacttttatgatattgagaattctgtatccagaagcatggtatctatttttattaaattgtgtatttttgttacttttggagctttatttcagttggttctgaatatttcaaattaagtttaatcctgcatattccaattgtttttgtcagtgggctctttttacaattatatgttctgcattgttgaatatatacaaaatctttaatgttgtatatgccatttttaactcatcatcttagtaaatttttattagtttatttcctttggttttctaggcaaagaacacaaggaaatcataactttrttatgtcatttccaataattaccaacctaattcatttccatggcttgtttttttctaaaactttcagaacagtgttaaaccatagttgtcacagtggtcatacttcttctctacttctctttaatgggaatcccctaggattttatgatagtgtgtgcatgtttctcatgttaaacaaaattatcttcctatttctaaaaaaattctgtccagaactaatattaaattacagctgcctcttgaacaatgctgggg

SEQ ID NO: 710792 - DNA, 598 bp, Homo sapiens
tgggttcaagggtaaattgcatatgaatgtctatttaacatctatttgaatatgatttttccacaatgagatgtcaccttacacctgttagaatggctattttatacacacacacacacacacacacacacacacacacacacacacatatatatatatacaccaaaaaaagataacaagtgttggtgaggatgtggaggaaagggaatctttggacactgttggtggaaatggaaattgttgtagtcactaaagaaaacactatggaggtttctcaaaatattaaaaatagaaccaccatataatcctgcaatctcacttctgggtatacatccaaaggaaatgaagtcaggattttaaaaagatatctgcattcccatgtttattcccacattattcamaatagccaagatatggaagcagtctaaatgtccatcaacagatgaatggataaagaaaatgtggtgtataaatatatataccctatggagctatggtctgaacgtttgtgtgccccaaaattcatatgttgaaatcctaacccccaaggagatggtattagaaggtggcaactttgggaggtcatcagatcatgagg

SEQ ID NO: 710793 - DNA, 598 bp, Homo sapiens
tgggttcaagggtaaattgcatatgaatgtctatttaacatctatttgaatatgatttttccacaatgagatgtcaccttacacctgttagaatggctattttatacacacacacacacacacacacacacacacacacacacacacatatatatatatacaccaaaaaaagataacaagtgttggtgaggatgtggaggaaagggaatctttggacactgttggtggaaatggaaattgttgtagtcactaaagaaaacactatggaggtttctcaaaatattaaaaatagaaccaccatataatcctgcaatctcacttctgggtatacatccaaaggaaatgaagtcaggattttaaaaagatatctgcattcccatgtttattcccacattattcacaatagccaagatatggaagcagtctaaatgtccatcaacagatgaatggataaagaaaatgtggtgtataaatatatataccctatggagctatggtctgaacgtttgtgtgccccaaaattcatatgttgaaatcctaacccccaaggagatggtattagaaggtgrcaactttgggaggtcatcagatcatgagg

SEQ ID NO: 710794 - DNA, 806 bp, Homo sapiens
ttttttaataaaaagtaaaaacaaaaaaacagacccacattggaacagtgaatcagtcccatagagagggcccgtggaccatcgctgtcatgagtgatgccctggcccttctgaaaccagccaacctaattacctgtattgtggaaatgcgcatgagtccccaaccccttgtttctatacattctatgttgtcttttaaaaagtgtgcttaacattgacacaataaatgttggagctttaggtggtgtttgcttgttctttaatttttaatgcttataagacaatgaggctgcttatgattttgtayttctgtacctgtttcctacagacacccatcgggtgggtaggaggaacagatttgagaaatgggcaggagatgtaggaggggaactaggttaccgcttatcagatggcataaattttcaaggagaatcaaaatgcaaaacttgggaataaatcatagcaatatcataattaatgtagtagtaatattgctgtttattaatgctgaagtgtggttttcctaactgtctgacttataatttgcataccattaaataatgcataatatggcacgccgaatcctgtttttcaaatatatgcttttggtggctaccatgcaggatttgaatttgtcttttaatttagcttaggaaagaacatcactgggcgagcggtaaatcctaaagaaggtgataaatgtcagtagtttcttattaaatattctaattttaggttcccaaaccttcaggaaatatatcttaatgcagacaaacaaacataaaacttctttagtacttacatca

SEQ ID NO: 710795 - DNA, 1400 bp, Homo sapiens
tgatgtccttagcagtgcctgatgatgtgatttgttgtaacctagcatctttgcactgggaacttgatgtgagatgtgtgacactgctagaagacaccwaacccagaggagggagggcttcccagaatttggcatgacttacaactacttaacaggttacaaatttaaaataatgactcatgatgtaaagaaaccatcttttaagtgttgggaatgtgatttggagtagcactgtgtcctgggagggggattatataggtaactggttcccaggcttcccagaaaaacttgactttgctgtgaagattcataggtgctgggttgtagaggcggaatattttacttggatttggaaatctgattggttctcatgctgcaggtaaatactgggatgagggtagtatgttgagtgaagagatggtcaagtattggaaaccgtttaatcttaacagggaatttggggtctggctaacatttgatacatttttttaaatagtagttttacaaaagcagtgcttgggaattgctgatctcaaatgatcaaaaaattttaggtcaattttttttttttttttttttttgagatggagtctcactctgttgcctgggctagagtgcagtggtgtgatctcagctcactgcaacctcggcctcccaggttcaagcaattctcctgcctcagccccctgagtagctgggattacaggcatgcgccaccatgcctggctaatttttctatttttagtacatacggggcttcaccattttggtcaggctggtctcgagctcctgacctcaggtgatccacccaccttggcctcccaaagtgctgggattataggcataagccacaatgcccagcccctaggtcaattttttaatagaactatacagtgctatttcttctccatctgattttatgttgtgactgccttgactgtgggaaactatattataaggaagatttatttaacagatagatacattgaataatatctctaagcaatgtttataatccaacagcctaaaagtcatgggagacattttcaggttgtcattatcataagagccagcagagggcagcactacattttctggaaaaccagagagtttgggaataatgaaaatgccaaaagaaacacaaaaaacaaaaaaccaaaaccatgaataaacttcggtgaatggtaataaaaatttgcaattattgacatggtgaaggggttgagttccaaatagcttggccaaaatgttaactatcagcagaagtttatgatgagaaaactaatgattaataattagtttaaaggtggtcaaaaatttagaatggtcaattcaaaccacagatgtcttcagaatcctacagtgatgaatgatgaggcataccattttgaaatcttgat

SEQ ID NO: 710796 - DNA, 1400 bp, Homo sapiens
tgatgtccttagcagtgcctgatgatgtgatttgttgtaacctagcatctttgcactgggaacttgatgtgagatgtgtgacactgctagaagacacctaacccagaggagggagggcttcccagaatttggcatgacttacaactacttaacaggttacaaatttaaaataatgactcatgatgtaaagaaaccatcttttaagtgttgggaatgtsatttggagtagcactgtgtcctgggagggggattatataggtaactggttcccaggcttcccagaaaaacttgactttgctgtgaagattcataggtgctgggttgtagaggcggaatattttacttggatttggaaatctgattggttctcatgctgcaggtaaatactgggatgagggtagtatgttgagtgaagagatggtcaagtattggaaaccgtttaatcttaacagggaatttggggtctggctaacatttgatacatttttttaaatagtagttttacaaaagcagtgcttgggaattgctgatctcaaatgatcaaaaaattttaggtcaattttttttttttttttttttttgagatggagtctcactctgttgcctgggctagagtgcagtggtgtgatctcagctcactgcaacctcggcctcccaggttcaagcaattctcctgcctcagccccctgagtagctgggattacaggcatgcgccaccatgcctggctaatttttctatttttagtacatacggggcttcaccattttggtcaggctggtctcgagctcctgacctcaggtgatccacccaccttggcctcccaaagtgctgggattataggcataagccacaatgcccagcccctaggtcaattttttaatagaactatacagtgctatttcttctccatctgattttatgttgtgactgccttgactgtgggaaactatattataaggaagatttatttaacagatagatacattgaataatatctctaagcaatgtttataatccaacagcctaaaagtcatgggagacattttcaggttgtcattatcataagagccagcagagggcagcactacattttctggaaaaccagagagtttgggaataatgaaaatgccaaaagaaacacaaaaaacaaaaaaccaaaaccatgaataaacttcggtgaatggtaataaaaatttgcaattattgacatggtgaaggggttgagttccaaatagcttggccaaaatgttaactatcagcagaagtttatgatgagaaaactaatgattaataattagtttaaaggtggtcaaaaatttagaatggtcaattcaaaccacagatgtcttcagaatcctacagtgatgaatgatgaggcataccattttgaaatcttgat

SEQ ID NO: 710797 - DNA, 1400 bp, Homo sapiens
tgatgtccttagcagtgcctgatgatgtgatttgttgtaacctagcatctttgcactgggaacttgatgtgagatgtgtgacactgctagaagacacctaacccagaggagggagggcttcccagaatttggcatgacttacaactacttaacaggttacaaatttaaaataatgactcatgatgtaaagaaaccatcttttaagtgttgggaatgtgatttggagtagcactgtgtcctgggagggggattatataggtaactggttcccaggcttcccagaaaaacttgactttgctgtgaagattcataggtgctgggttgtagaggcggaatattttacttggatttggaaatctgattggttctcatgctgcaggtaaatactgggatgagggtagtatgttgagtgaagagatggtcaagtattggaaaccgtttaatcttaacagggaatttggggtctggctaacatttgatacatttttttaaatagtagttttacaaaagcagtgcttgggaattgctgatctcaaatgatcaaaaaattttaggtcaattttttttttttttttttttttgagatggagtctcactctgttgcctgggctagagtgcagtggtgtgatctcagctcactgcaacctcggcctcccaggttcaagcaattctcctgcctcagccccctgagtagctgggattacaggcatgcgccaccatgcctggctaatttttctatttttagtacatacggggcttcaccattttggtcaggctggtctcgagctcctgacctcaggtgatccacccaccttggcctcccaaagtgctgggattataggcataagccacaatgcccagcccctaggtcaattttttaatagaactatacagtgctatttcttctccatctgattttatgttgtgactgccttgactgtgggaaactatattataaggaagatttatttaacagatagatacattgaataatatctctaagcaatgtttataatccaacagcctaaaagtcatgggagacattttcaggttgtcattatcataagagccagcagagggcagcactacattttctggaaaaccagagagtttgggaataatgaaaatgccaaaagaaacacaaaaaacaaaaaaccaaaaccatgaataaacttcggtgaatggtaataaaaattygcaattattgacatggtgaaggggttgagttccaaatagcttggccaaaatgttaactatcagcagaagtttatgatgagaaaactaatgattaataattagtttaaaggtggtcaaaaatttagaatggtcaattcaaaccacagatgtcttcagaatcctacagtgatgaatgatgaggcataccattttgaaatcttgat

SEQ ID NO: 710798 - DNA, 1374 bp, Homo sapiens
gccaccgtgcccaacctagaccccatttcaaataaggtcacagtctgaggtaatgggggttaggacttcaacatatcttttttttggtgggggaggagggttaccatccaacccataagactaactcaggagtggcaaccaccatttctgaatcccgatcactcattcattcagccaatatttgttaattgctcacattgttcaggcactattctagctgattgagatacttcactaaataagacagacaactatttcttccctcttagattttatatttaccaggcagggatagatwgtaaaaaagtaatattataaaattacattgtatattaaaagatggtaagtactacagaaagatgaaaaaattgaaaaggataaagggaatagaaggtggtttttaactttctttctttctttcttttctttaagacagtcttgctttgttgcctaggctggagtgcagtggcatgatctcgactcactgcaaccttcacatcctgggttccagcgattctcctgcctcagcctccaagtagctgggattacaggcgtgagccaccacagccagctaattttcatatttttagtacagatggggtttcaccatgttggccaggctagtctcaaacttctgacctcaagtgatctgcccacctcagcatcccaaatgctaggattacaggcttaagccactgcacccagcctggttttagctttcaataaggtggtctgagaaagactcgttgaaaaaataactgcaaaggcttgacagaggtgagggaattagtcgtggatatttccagcaagagtgttccaggcaccactgctatggcagaagtatgtctaacatattctagaagcaataaggatgccagtatgtctagggcaggatgagaaaaccgagcaagaggaagaaaagaaggaaaaaaattcaacaagaatgtaggaggttacatcatatagatgcttttcagcctttgaatgattttcgcaaaggggaaaagcaatctgatttttgttatagaaagatccctctttctgctgtgttgagaatagactgttaggtataatggtggggcaaacaagtaagaaatgggcagaccagatagaaaattattgcaataatcctggccagagatgacggtggcttggattaggtggtagcagtgaaggtgatgggaaatgattagattctaggtatattttgtagacagaaccaacagttttcttaatgaagtccaatataacccccagactttggagccttctgtaccagagtccaaggccttatacatcccctttcctcctcttctcatgggctagaatatagatgcagtgatgagccaccttgcaccaagtaaatgaagaaaa

SEQ ID NO: 710799 - DNA, 804 bp, Homo sapiens
tgaactatcactattagaaaactgttcttttgaagatattacattgtaaaagagaagatttatattaatctaatgaagctttaatagtgagaaaggtttgggcgattttaagtgggtcatcccctcccctcccatcaaccccatgagaaaaattggggttgccaacttggcctttcatcttttgatatcattaaggttagcattattctttctctttcttgcatgacgttaaatagcacatttctcccaaacatctaaaaactctgatgatagaaattttagaaatagacatttgggagaatattatatcatcaagtcatattaatttttgtcagtgatcattctaatctttttgttgttgtttgaaaaaaaaaatctatccggaacaaaagcattggaagagagatatacaaaaggacactttcttacaaagaagctgatttatgaaaaacaaagacacttcaatttttttcctcctgtcatacagggtgatgactatcttgtgtaaatkcctttcttagggctggctcttcagggtagtcacattggagattagacttaggaggcccttacttggttaaactgtgaggctggagacacacaaagctttttccagagactgaaatggactcacatggcaggctcagtagccctgggggtcacagcgaggaaccatggcaacccagccatacagggacgttttcatccacttaaagcagagaattcttaaaggcttctaaatgaggacgaagccttgtctagattcttgcttctaattctgttttgcccgatgcagaaagtgat

SEQ ID NO: 710800 - DNA, 804 bp, Homo sapiens
tgaactatcactattagaaaactgttcttttgaagatattacattgtaaaagagaagatttatattaatctaatgaagctttaatagtgagaaaggtttgggcgattttaagtgggtcatcccctcccctcccatcaaccccatgagaaaaattggggttgccaacttggcctttcatcttttgatatcattaaggttagcattattctttctctttcttgcatgacgttaaatagcacatttctcccaaacatctaaaaactctgatgatagaaattttagaaatagacatttgggagaatattatatcatcaagtcatattaatttttgtcagtgatcattctaatctttttgttgttgtttgaaaaaaaaaatctatccggaacaaaagcattggaagagagatatacaaaaggacactttcttacaaagaagctgatttatgaaaaacaaagacacttcaatttttttcctcctgtcatacagggtgatgactatcttgtgtaaatgcctttcttagggctggctcttcagggtagtcacattggagattagacttaggrggcccttacttggttaaactgtgaggctggagacacacaaagctttttccagagactgaaatggactcacatggcaggctcagtagccctgggggtcacagcgaggaaccatggcaacccagccatacagggacgttttcatccacttaaagcagagaattcttaaaggcttctaaatgaggacgaagccttgtctagattcttgcttctaattctgttttgcccgatgcagaaagtgat

SEQ ID NO: 710801 - DNA, 901 bp, Homo sapiens
cctggtggtagccggtagctctgacagagagcaaaagaaataaggtaaggtcccaacctagtgatcccaggtctgggcggtatttcacctttggtggtgccattggtttcctgttgtgagattattcctcccactggggttaggacacataggccaggggttggggggttgggtggggggtgcggtgtagtaggaggtcaggggtgggaggggtgagggaagactccctcctttgctatgggtgttactttcctggttcactttagcatttagccccaccttgggcggagatagcaatcttgcaattgttccatgcccttcagctctccttggcttgaggcagggaggacctggtctttaatctgtcttgtctttaaccttagtcaatcaggagctgctatgtggtctattcttgttagaccagaggcgcctggtcgcatggctctttttgggaggacttaggttgataatggcaacctcatgctttagggcggacacggtgaacaacagacaacagagggctttatgcagcccgcatagcagcagcacacccctccagcaagcagttctgcttccccacrtggtgctagccatgggggaagagccacagcaagccacacgcaggtcaaaggcattttgttgtgccccttgtggttgtgaccacacaccctgcttgctgtgccagttgtatttttctctaatttgatctttcctctaatttgctcctgagacagacagtagctatgaagtctagcctgtcctgaaggggctgccctgaagaggatgcttatattgtgtttttcacagaatacttctttatcctgacctaatgcctgattgtccagcctgtatccaggtgtccctctcacaggaagcttgtttatatgggcaggtgcccttg

SEQ ID NO: 710802 - DNA, 596 bp, Homo sapiens
tagagataagactaaacttgaggaacaggttctctcttaacctaacaacattaaagcttgtcagaaatccaataggggccaggcactgggcataatgtacaggcaattatgtgtgatgaagaggtgcacaggctttacagtacagtatattcactttttttttttttttttttttttttgagacagagcctccctctgttgcccaggctggagtacagcagtgtaatcttgggctcactgcaacctccacctcccaggttcaagcaattatcatgcctcagcctcctgagcagctgggattacaggcacgtgccaccatacccagcctggattcacttttctatgtaaaaagsaagtttacaaatttctgagagtttagttgccaaattctgacctagcatataagaattcaagtgtttaataaatcagtagcaattttcccaaatccagagtttgatacggagctaaaccatgtcatgagctcacccatcattcgagttactttgccccttatcaatgaagtcattggaagtagtagcaacctggtttgagagggttatgtggtacatcgtttcacaaatttcagaaataattta

SEQ ID NO: 710803 - DNA, 1466 bp, Homo sapiens
gtataaactatttctgatggccacggtattattattgagaacattagagcagtgatttactaaatatggatagtacaatagtcaaccatcagatataaatctgatatattctactgctgattgtggtcattaagagttttaagaataggccttctgaatccttttccattaagtagcttcttcataaaaatgctaagaagyaaaaccgaatctacaccgcaaatataattgtggcttacgaagaaatggaaacaatttgcctcatgaccagtgacttctgtgatttttcaagatgcaatgactcattcaaataccgcattagctctttgagacctatgatttctatattagcatcagagactagactcctcaaggtacctgatagtaatgtaggtcttctggtcaactgtggttatcaatgtgattcttaacacacgccaatgtgaagcttacttgttaaggccaaaggatgaaagtggatgtgttggcatggagactctttgctcttggaagaaagactcgagaaattcaccgtgcaggttgttacgaaaaatttgaaatggacaaagggcaaagccttataacacccaccacatacttggtatcaacgtttacaacttatgaaacattaaaaaaaataactacagggatgtttggccccagactgaaattttgcaatggcctttgtacaaaagaaaactattacgccatgctagtctgtgtcagtgctaaattgtctccaataacagggcatcaaatactaggcaatgtgtcaagtataggaaaattgtgacttagaatgtatgaaattatgaaatccaaataattttatccttatgccaaactcccaaagaaattatatatatgtatataaaaatatatctaatatgtatataattttgtatatcttaaggctatgtataaagatggctaaaaacaggagacagaacattttccactgcctttctaaaataaacaaggaaaggtcaggccagaccataaggaacgaaatatctgagatgaagaatattctccagtaatctcttcccaacagaaccctttctggatactaggtgacaagagagaaaatcataatggaataatagccttccacataaaagaattatggtaagttgacattaggttgagctgcagtccagtcaaaatgaaagaagttctgagctgagcctgtcacggagtctctaaaagaggacaatcaatatgtgttttctgactgtcttcctcatattcagcctgcagtaacttgaactgagaattggctttttatggagatttattacaacagcattgccattcaagaataggcggctatcatcataaataaagagcggacacaaagggatgtgaagatccaagacagagaatttgtcaagatgggtaaatcatgaacttacttatattgcaaataaatacacactatgaaagccatccctcattaggagaaa

SEQ ID NO: 710804 - DNA, 1466 bp, Homo sapiens
gtataaactatttctgatggccacggtattattattgagaacattagagcagtgatttactaaatatggatagtacaatagtcaaccatcagatataaatctgatatattctactgctgattgtggtcattaagagttttaagaataggccttctgaatccttttccattaagtagcttcttcataaaaatgctaagaagcaaaaccgaatctacaccgcaaatataattgtggcttacgaagaaatggaaacaatttgcctcatgaccagtgacttctgtgatttttcaagatgcaatgactcattcaaataccgcattagctctttgagacctatgatttctatattagcatcagagactagactcctcaaggtacctgatagtaatgtaggtcttctggtcaactgtggttatcaatgtgaytcttaacacacgccaatgtgaagcttacttgttaaggccaaaggatgaaagtggatgtgttggcatggagactctttgctcttggaagaaagactcgagaaattcaccgtgcaggttgttacgaaaaatttgaaatggacaaagggcaaagccttataacacccaccacatacttggtatcaacgtttacaacttatgaaacattaaaaaaaataactacagggatgtttggccccagactgaaattttgcaatggcctttgtacaaaagaaaactattacgccatgctagtctgtgtcagtgctaaattgtctccaataacagggcatcaaatactaggcaatgtgtcaagtataggaaaattgtgacttagaatgtatgaaattatgaaatccaaataattttatccttatgccaaactcccaaagaaattatatatatgtatataaaaatatatctaatatgtatataattttgtatatcttaaggctatgtataaagatggctaaaaacaggagacagaacattttccactgcctttctaaaataaacaaggaaaggtcaggccagaccataaggaacgaaatatctgagatgaagaatattctccagtaatctcttcccaacagaaccctttctggatactaggtgacaagagagaaaatcataatggaataatagccttccacataaaagaattatggtaagttgacattaggttgagctgcagtccagtcaaaatgaaagaagttctgagctgagcctgtcacggagtctctaaaagaggacaatcaatatgtgttttctgactgtcttcctcatattcagcctgcagtaacttgaactgagaattggctttttatggagatttattacaacagcattgccattcaagaataggcggctatcatcataaataaagagcggacacaaagggatgtgaagatccaagacagagaatttgtcaagatgggtaaatcatgaacttacttatattgcaaataaatacacactatgaaagccatccctcattaggagaaa

SEQ ID NO: 710805 - DNA, 614 bp, Homo sapiens
ttttcagttattcatacatggtatcagtctattaatttggtttacctaagatctcagattgtaagcttcctgagtgctaacacaatgcctccttttggcaccattgcattctcaaggcctggcatatcatctttgtatcagtccgttcattaatatttactgagccaatgaaatagatgtctcagacatctacgcagtggaagttaacagaaagaatgaatcagattccatgctagatttttggtccaaacctgttaaatcagagaaaacatactatcaaaatgttttmaagggagctttaccctcatgacatctgttttatggttatgccttattaagactgccacatttcttttgtttacacagtcctggcttttcatattccttacaaaataaaaaataaactataaatagtctaacaatttagatttgaactcagatctggagtataaatcgaaaccatttggaatctaaattatgtaactgcttagcgtgaggaaagattcctataagctcagagtaacagtggactaggagaggaaccgtatacaataagatgaattactgagcacacaactactgttggatggaatggctatgtcattatgcagtgt

SEQ ID NO: 710806 - DNA, 3233 bp, Homo sapiens
taacaaacaatatatatatattttttccctatgggaaaaatcaattcctagttctaaattgccagcttctaaatggacttctggaacagtttatttctatgttggggactgcctgtaaacatgttgcttcctttcaaaaatgatttatgctatatttaaaggctagaaattcactcacatgttgtatagtccagatcttctcccatatagcttatatgtcaacaaattcctgtgaaagacacactgaaatataaaagggccaaagccactaaccaaaaaaaaaaaaaaattcagtttattttgtcctcttcttttctcaattttttttctttttgttttactacttgctgaaatctaagtgagcaaaatctcaactcttccagtggcattgatgtttcaccagtatcaagttcaataaaacttcaggcctttctaaaacccacgcaatgtatagacatggttttttctctctttttttctctgccttggtattgcttccaatcctcagttccactgtttttggaaatcaaaagatgtgttgataaagtcagccactgggagggaaccattgggatagagctcaagaaggttcatcaactgagaagggattgcccatcgtgtggcagcagcccaactgcaggagtctatggacacatacttttttttttttttttttcttggaraaagggtcttgctctgttgcccgagctggaatgcagtggcatgattatggctctctgcagccttgacctcctggactcaagcagtcctcctgtctcagcctctcatgtagctgggaccacagatgcatgccaccacacccccataattttggtatttttcatagagaaaggtttgactatgttgcccaggctggtctccaactcttgggctcaagtgatcctctcatctcggcctcccaaagtgctgaaattacaagcatgggccacccctcctggcctggatacaaacatttaatggctctaattctttaccccatctcaccttctaaaggttttaagaacagactatgtgcttgtcacaagacaataatccatgaagatataaacagagcaactctatgtaaagaaagagagcaactttagtcctttcaaataattctactgcttctcctggggtgaattgttccctcctctttcactatccctacaacctttatggatcagatttgtccccagagtattgctgagacaatctgtactcagatcgttctggggtgaattgctaggtccgaggtgaactaaaatgtcatttgcctatataaataaattccagaggtctgataatttctcatgaataattcagtgacatcatctgggttcctgggatagttcaaagatgctgaaccaatagacaaagtgaattttctttctccttttacataacaaataatggcagcaaatttaagtttgataatagatctattctttctaacgataaacaggagaatacacaaagggaaggcttttctttctctttccctggaaatctaagaagatgaagaaagtttatatcattattagaactcgaagttgtcgtagacagtttgtaattgtgcctaccatctacattctctttccctgttaacagcaccttgattttcctttgaggactctctcttcacctatccttatttatggagtctgggtggacttgacttcactgtctagttccaggggtggtcttgtggcctagttttagtctataagaatattgtggccgggtgcggtggctcaagcctgtaatcccagcactttgggaggccgaggcaggcagatcacgaggtcaggagatcgagaccattctggctaacacggtgaaaccccgtctctactaaaaatacaaaaaattagccgggcgtggtggtgggtgcctgtagtcccagttacttgggaggctgaggcaggagaatgccgtgaaccccggaggtggagcttgcagtgagcagagatcgtgccactgcactccagcctgcgtgacagagcaagactctgtctcaaaaaaaaaaaaaaaaaaaaaaaaaaaaaaaaaaaatactgcacctgtctggccatgaaggttggttcagaagtggacacgtgatccaggctgaatcaatcagcgctactgagaattgtgctgaacatccactccaggatgtttcctgatctacagagagactatctcctccttcagagttgttgtgttagagctgcagatggctgtctttctacctcaggtagccccttgagaatggtgcctgcagagagaatagcaaagctgacagatgaaaaaagagactcctaatggcctgtctggaggagttggatccagctttgcctgaagtcaagatatggttatggacttcttttaaataagtcaacaaaatttcctttatgaatcaggtcagtttgatttaggtctctgttctttggaatataagagctattgcctaaaccagaattgttcatcaatgtacttagtttttatcagatgcttttaaggaggagacaaggaaaatacatagaaatctccactctggtattggaccattgatggcacttgtcctcttttctcctggtgtttatgaaaaaccttctgatggcttttatacttctttggctattgcacattccatcttaaatcctttccttaagatggttagcatgatctcagcattgtgttttctctttcctccaagtgtggaattcaccagatttgtctcttgtcatccagatcagcggccaagtacgtttcttcaagttggcttctagaccatcttcacaacagaatgaacaaatctttcagatgtttacatttattcacccaaccatctcattgttccaactatgatctacctgagccaacccctgtgccagagagatatagcacaatttttgtttttgtttttgttttttttgagacagagtctcactctgtcaccaggctagagggcagtggtgcgatctcagctcactgcaacttccgcctcccgggttcaagtgattttcctgcctcagcctcccaagtagctgggactacaggtgtgcaccaccatgcccagctaatttttgtatttttagtaaagacagggtttcaccatgttggccaggttagtctcaatctcttgacctcatgatccaccttcctcagcctcccaaagtgctggggttacaggcgtgagccactgtgcccggccagcaccatgtttttaatgacagtggtaacaggta

SEQ ID NO: 710807 - DNA, 2193 bp, Homo sapiens
tttactttctatacttttgtcagaaaataaaaatttccaaatataaaattgttattatttataattattaattatattaaaattgaatcttccttttaaaaacactcatgttcctgtgaaccagcaagtacatcactcccttgggctagagcccccagttgagactcgatgaactccagcagagactctgacgaaggagtgacacagtgtgttgggtcagagagaaatgtgaagcccagcaaacatatgttcaaatccagatgccaccattcggtgaacatgcaccccgagcaactttccagggcttactttctttgtctataaaatgggaacaacaggtacagtaccatctagtccatgggggtcaccagaagaaactagaagatgtaacacacamggaacatttagaagcaagcatgtaacaaacactcagcaaatggcgactacattataacttgtccagccaaatagatatgaccagtggtaacacggaactgagaattttcacaatgtactatttttacatcttaatttctttgggcttctctgcttcctctttttaaaaaagcttaccacccacttgttattctggagggggatgaacatagataaaaagagagtttaagaactcttcatggaaagatagccaaaccactaaaatactatttcaacagaggaggtcacagaatggtggaatggtagatctgtaggactaaaggagacctcagatttgtcactcttatctgactcatgaaactgagacccagagaggtgaaagggtgtgctcggtccggtagctgtgttgcagactatgtgaatggcacctcttggtgtcatgcaatgcataacaaccacctgtgcagcctcatggccctgcacaacctcctgaccacagcgatggaataaagtggtccagtcaggggcattttcagcctctggggatgttgatatagtaactcctcctcttttcccataccctgaaaaaatgcagcccaagaagctgccgatgctcttacagctgtgaggggaggggctgcccgaggagagaggtaacctagagttgagagatggaggaagagatacagaatctggatggctatgctctgatcctgtaatccgactatgcctgaatgtggatctaccttccaaaggtagggtgcttttcgtttgtttgagccatctggtgtcagatgttctgtcacttactaccttgttataattaatagaggagctcaaagagctataaatatctaaggaggaagagttcaggttgcaaagccttcctagacaaggttgcttcaaaggaaggtctgaaaggaagaatgggaggcaggcaggctgcaaagggagagaaaattcagggaaggagaagaccaggaacagaggcctgagatatgagagcctggtactatggactggatgcttgtggctccccccttccccctaatcgacttgttgaagcccagtccccattgtgatggcattaggtggtgtggcctctggaaagtaattaggccatgagggtgaatccctcatgaatgggattagtgtcttcatgaaaagacaggagagagcttgctttctatcctctctgccatgtgaggacacaacgagagaatggtcatctgcaaacgaggaagaggtcccttaccagagccgaccatgctggcgccctgatctgacttcccggcctctagaacagtgagaaataaatctctgttgtctaagccacccagtatatagtcatttataacagcacagagtgactgagacacctggggtgggggtgtttggggaatcatatttaattaagcctatttggttagagtgttggatatccaaagcaggtaacgggggttaggattaaagatgtaggttcctaccagtctgtgagtttgttcttttgtattttggataataattcagcaagagaggagggatgagaatgaaaggagagaactggttgcgagactattggtaatttttgaagtatgagagtccatggcttctaaggtgaccaactgttctgatttgcccgggactgaggaatttcccaggatgtgggactttcagtgctaaaactgaacagttccatgcaaatggggatgattgaacaccctgaaacatcacccaaaccataaaggaagatattgatagatttcattccataaaaaataacatgtgaatgaaaaa

SEQ ID NO: 710808 - DNA, 3086 bp, Homo sapiens
ctctttcctgcatatacattaggtcctgattcttaggaattgaaagtatgtatctgacatatgttggataggaatttaatcagcttgagaaactctcatgggagatgtggaaagatgaatatgasataagagaaggaaatatggagctgccagtacatttcggcggtgttgtacacatggtattagcctcattatacaaatgaagaaaatgatgggggggtgcagaggggtgctaaagtgacttgtaggtggttattattttaatatcatcattactaataatattctgtttgtgagtgatttaaagaaagtctaaccatatctgatactgcttgacttttacataaattaatatgctgaatattttcattttagattgcaaattcaactgccataaacgctgtgcatcaaaagtaccaagagactgccttggagaggttactttcaatggaggtaaaattatttttcttaatttttgtgaaagatcagaaaaggccatgattctttggtgtattatctttggataaggttctgttttcctgatttattttgtttcttaaagattttcttctgatttaataatcaaacaaaatacacagaccactgacagtatacatttattagtaatcacgccttcccgtctttcctctggccacctgttactttgtagtctaatatagccagtggtactccatatcctctttcatttttagacataaaagaacttgttttaaaaccctgctcttgtctctattctttcatagttctaatatgtactaactgcttgctataccaggcactgttctaaactctttaaatatattgacatttcaacctaagaacaaccctttgaggtaggtactaagagatgagtaaactgaggcacaaatacatgaaataacttgccccagaaatatagccagtaggtggcagagctggaagttaaacccatatggtctggttccttagtccctagtgattagaacacactatactgcctcactgtccctttctctgtcaaataatcgttgtccattttccctttggggtctttttttttcttttcaagataatactaagcaaggcagttacctttttttggaaggaagcagtaaggactctagactttcagcataattttcctttaacaatttacatgactggtaaaaattttatgtaagtagttctgtaaaaggaaaagcataaaaggaatgaaaattctcttggggagagtttaattaacattttctcttgtggcttgttttctgtggttcttggttgtcttagtctgtttgtgctgctataacaaaataccataggctaggtagcatataaacaacagaagtttatttttcatagttctggagactgggaagtccagggcactggcagattctgtgtctggtgaggggggtccgtttcctggttgatggcaccttgtagttgcattctcacatggtggaatgggagaaggaactcctgtggacatattttataagggcacccatcccaaagataccaccttccaaagacccaccactacctaatacccttgccttgggagttaagatttttaaggggaacaaacattcataccatagcactgattaacaccttgacagagcatgattggttttctctttcggttaatctgaattagtatagtttgtctatgactaaagtcttttataaatttatacttcatgtatttgtgttttcgtgtttttctaccttataacaaatggatacgaaacaccatttatatttatcttaatgtgcatttgattactagtgagatgttcaaactcactagtaatcaaagaaatgcaccattttacattagcagtttatgaggattctgatttctctacatccctaccaccacttgttattgtatatctttttgattacaaccatcctaggtagtgcgaagtggtatctcattgtagttttcatttgcagttccctggtggctaataatattgagcatcttttcatgtgttcattcgccatttttatatattgtttgaaaaaagcacctattcagatcctttgcccatttaggttacttatctgtttatttttcattgagctgtaagaatttttaaataccctggatactagtcccttatctggcatatgatttgcttatattttctcccattctatgggctttcatttcacttcgtaaggtgttgtttgtagcacagaagttttgtattttgatgaaatccaatttatttatttatttatgttgtcacttatctttttggtgtattaagaaagctttgcctaaccaaggtcacaaaaatctactctcatgctttctcctatgagttttatagttttagctcttagatttttatgtgatccactttgagttaatttttatatatgatttatatgttcattcttttgcatgtagatatacagttatcctagcaccatttacttaaaagactattttttgcccgttgaattttcttgacactcttgtcaaaaatcagttgaccataatggtggtggcttatccgcatttatagtatcttttgtcatgtggaaatttaaaattctgatgtaatcaaattaattaactttgtgccttatgatttgtgtattttttatcttctttaagaaatactttatcttaggccaggcgtggtggctcacgcctgtaatcccagcactttgggaggccgaagtgggtggatcccctgaggtcaggagttcgagaccagcctggccaacatggcgaaaccccatctctactaaagatacaaaaattagctgggcatggtggtgggcgcctgtaatcccagctactgaggaggctgaggctagagaatcgcttgaacccaggaggtagaggttgcagtgagccgagatcacactccagcctgggtgacaagagtgaaactctatctcaaaaaaaaaaaaaaagagaaatactttacttaactcataaagatattttcttacattttaagactcttaagacttttttcacatttaatggacttcctctattaatataaaactctgaaattcatttaaaattttcccagaaccttccagtctgggaacag

SEQ ID NO: 710809 - DNA, 917 bp, Homo sapiens
gacagagtctcactctgtcacccaggctagaatgcagtgacacagtcctagctcaccgcaacctcaactccctgagctgaagcaattctcccacttcagcctcctgagtagctgggactacaggcacatgccatcacgcctggctaatgtttgctttctccatgtttcaccaagactggaggcagccatgaatgtggtgaaagctttgcgtgttgctgggagcgtgtgtgggtttggtttcacatgcagctttgatttcctcatctgggccatcttcacacagcgtgttaacaccaacgggatattggctcagactgaagactcagcagctgagattcatcattacaatgtctcccagaacagcggtccccaaactttttggcatcagggaccggttttgtggaagacaaaaccacggayggcggcctgggggttgtggggtggaaggatgatttccagatgaaactgttccacctcagaccatcagtcattagttggattctcctaaggagcacacaactcaggtccgtcacatggacagttcacaatagggtttctccttctgagaatcgaatgccgtggctgatctgactggaagcagagctcaggtggtaatgctgagtagcccagttcctaacaggaaactgatcagtaccagtccacagcccagggcttggggacccctgttctagaagaggcattacctccagccttgggagttctctggagtcagaggtgatgtggtctggatggaatgtgtgtactgaacagagtttcaaatttatttatcatacaaggtggggctctttgttttctcatatgccgtgatttagaatagggatcgggtctgatttatcttttccctccccagagcctggtgtggtgtctaacacatggcattgctcagtaaatctgtc

SEQ ID NO: 710810 - DNA, 812 bp, Homo sapiens
gctaatttttgtatttttggtagagacaaagtttcaccatgttggccgggatggtctcgatctcctgaccttgtgatctgcctgcctcagcctcccaaagtgctgggaatacaggcatgagccaccgcacccagccccgcaacttttttgttcagtgtaactattttttgtttatcttagcagctaagataaatcgtctttataaacsatcaaattggctgcataatctaattagttcaccaatatcccttgttttgtttttggctttcagacttagtctacaagtccccaccagaagtctctaggggaactccccaaacgaccactactatcattcaaatacccgtaagcagggagtgcgtggctgtggcagggactctaaagcagctgccttccccaataccaaagcagcaaagggctggaccctccaggagtgccgaaaggcaatttagaatatagatcacactttgggttgctatacatctatgttttaaaatggagaggagagaaaaagggagaaagagaaaaagtgagagagatggagatagggataaagcagagatagatggagactgagtagagaaagaaaaaaaatacaaagatgaagacatgagcacgagagagaggctgttacaagatagtctacttccaaagagtggtagggggatttattctaggttaacactagtgaatgatcctgggtttcatttaattaaacataaattctagtttccaggttctgagaaacaatgacatcagtagaccagatttgcttggaggaagccgattttccagtatttgtgttaagtctg

SEQ ID NO: 710811 - DNA, 812 bp, Homo sapiens
gctaatttttgtatttttggtagagacaaagtttcaccatgttggccgggatggtctcgatctcctgaccttgtgatctgcctgcctcagcctcccaaagtgctgggaatacaggcatgagccaccgcacccagccccgcaacttttttgttcagtgtaactattttttgtttatcttagcagctaagataaatcgtctttataaacgatcaaattggctgcataatctaattagttcaccaatatcccttgttttgtttttggctttcagacttagtctacaagtccccaccagaagtctctaggggaactccccaaacgaccactactatcattcaaatacccgtaagcagggagtgcgtggctgtggcagggactctaaarcagctgccttccccaataccaaagcagcaaagggctggaccctccaggagtgccgaaaggcaatttagaatatagatcacactttgggttgctatacatctatgttttaaaatggagaggagagaaaaagggagaaagagaaaaagtgagagagatggagatagggataaagcagagatagatggagactgagtagagaaagaaaaaaaatacaaagatgaagacatgagcacgagagagaggctgttacaagatagtctacttccaaagagtggtagggggatttattctaggttaacactagtgaatgatcctgggtttcatttaattaaacataaattctagtttccaggttctgagaaacaatgacatcagtagaccagatttgcttggaggaagccgattttccagtatttgtgttaagtctg

SEQ ID NO: 710812 - DNA, 1504 bp, Homo sapiens
ataatccaatatttagaaaatagaaagctggtattcaaacttttatttcctcccattaaattagagcttcagttaaagaaaaatcattaatcaaaatagcattatagcttgaaaagtaaattctcttttataacactatttcctgactgaatgctctttagtattaactttagtatcttgataattagctgaagaagtatctccggtaactgtctcaatacttcctctgatacctttcagttgccccggatctgtgtcatctttctgtagcttttcccactgggaactgaaaaaaaatagaagagcaaaaatgaattaaaaataaataaaatcaatatggtgtacttaaaacagagccctagaaaaactaaatttttttatttattaacaaaacagaaaagaaaaatatatacatgcaataaacatgtttgtacctgtacaaaataatttaatgtatatattagaatgkcataaatttataaagcaatacctagatattaactattttaataatctcttttactatgatgactgttgtagctatcaaaaaacttcacccaggccgggtgtggtggctcatgcctgtaatcccagcactttgggaggccaagataggaggatcacatgaggccaggagttcaagctcagcctaggcaacatggggaaaccccatctctattaaaaatacaaaaattagctgggtatggtggcgcatgcctatactcccagctacttgggtggctgaggcacgagaatcacttgaacctgggaggtggacgttgcagtgagctgagattgtgccactgcactccagcctgggcgagagtgagcctgtctttaaaaaaaacaacaacaaacaaaaaaccaataaatactaccacctaccactcggtaaaactcccaatgttctagttaccgtattagatgcaattgtcatatactatttctaaactctatagcaatccctcaaagtaggtatcacaccagaaaactgaggctcaaagattaagtcacccaaggacatttagccagtcaatactagagctacgagtcgaatccttgtaggatgcttgcagagttcaaggtattttaattgccccatcctggacttatttgcaattaaaactgttaaacaaccaaaacactattaagaatatgaagtgattatgacacgacaaattgaatttataaggcaacacactatagtataatgagtaaagaatgccctacgacagttttagctgcatgacttcgaaaaaatgaatagtttactcataaaaaaaaataaggcagtttgatgcaaaggtgctcaccaactctaaaactctcacagaactcttaaaaatgagctaatttacagggctaatttaaaaataatgccagattagaacaattaaatatccaaaatctgcatgaagaacagggtggaagtgataaggatgagtgtgggccttctttgagtatactttaaaaaaagtagttttagcttttgaagtattctttg

SEQ ID NO: 710813 - DNA, 1504 bp, Homo sapiens
ataatccaatatttagaaaatagaaagctggtattcaaacttttatttcctcccattaaattagagcttcagttaaagaaaaatcattaatcaaaatagcattatagcttgaaaagtaaattctcttttataacactatttcctgactgaatgctctttagtattaactttagtatcttgataattagctgaagaagtatctccggtaactgtctcaatacttcctctgatacctttcagttgccccggatctgtgtcatctttctgtagcttttcccactgggaactgaaaaaaaatagaagagcaaaaatgaattaaaaataaataaaatcaatatggtgtacttaaaacagagccctagaaaaactaaatttttttatttattaacaaaacagaaaagaaaaatatatacatgcaataaacatgtttgtacctgtacaaaataatttaatgtatatattagaatgtcataaatttataaagcaatayctagatattaactattttaataatctcttttactatgatgactgttgtagctatcaaaaaacttcacccaggccgggtgtggtggctcatgcctgtaatcccagcactttgggaggccaagataggaggatcacatgaggccaggagttcaagctcagcctaggcaacatggggaaaccccatctctattaaaaatacaaaaattagctgggtatggtggcgcatgcctatactcccagctacttgggtggctgaggcacgagaatcacttgaacctgggaggtggacgttgcagtgagctgagattgtgccactgcactccagcctgggcgagagtgagcctgtctttaaaaaaaacaacaacaaacaaaaaaccaataaatactaccacctaccactcggtaaaactcccaatgttctagttaccgtattagatgcaattgtcatatactatttctaaactctatagcaatccctcaaagtaggtatcacaccagaaaactgaggctcaaagattaagtcacccaaggacatttagccagtcaatactagagctacgagtcgaatccttgtaggatgcttgcagagttcaaggtattttaattgccccatcctggacttatttgcaattaaaactgttaaacaaccaaaacactattaagaatatgaagtgattatgacacgacaaattgaatttataaggcaacacactatagtataatgagtaaagaatgccctacgacagttttagctgcatgacttcgaaaaaatgaatagtttactcataaaaaaaaataaggcagtttgatgcaaaggtgctcaccaactctaaaactctcacagaactcttaaaaatgagctaatttacagggctaatttaaaaataatgccagattagaacaattaaatatccaaaatctgcatgaagaacagggtggaagtgataaggatgagtgtgggccttctttgagtatactttaaaaaaagtagttttagcttttgaagtattctttg

SEQ ID NO: 710814 - DNA, 578 bp, Homo sapiens
aaatacctccatgaggacatctgccaggcaaatccctgtccagctctgaactggcgccatccttgtaattgatccttgtagcaaagaataattatctcaaaacaattatgtaattctcttcattcttcctttaaaaaccttgtcttcctttacctcccygaagatgcagagtttactacagcatgtgctttcccattgcaatgccaatcctcaaacagatatctttttcttttagagtccctctctctgttatttaagttgagagagtatatatcccaaataaagatataaaaactagtatgcatactaaatagaaaattaccttgatatttccctgagataaacagtctgcatagctttcttcaaatgaggttcaatatttctccacagtttgcgagtatcacgttcacttgctaccccaaagggaagaaaatttcagtaatttatatcttgtaaaaacctttctcaaaataaatattaatgagtaaaattacacagttaccttctcctttaaccacgggttcacaatatttaggaaaattaagtactgcctgtaagtaaagaaaaaaaaagagaag

SEQ ID NO: 710815 - DNA, 604 bp, Homo sapiens
tcgaacagcctatgacattgtagcaggaaccattgtggtaaaaagaaatggggtcagagrtgcccccccaaagacctgatttccacacgctataatgacaagactaaattatgtatcaaggccatcagtatccctgggttccactaactgatgatttagaaattaaagcaatcactccagtgtgatgcagctgactactctgaaagttttgattgtacttgaatgccaaaaacttttccagaagaaaaacctattaaattcaagtattaaaatttttagatcaaaaaggcaaatgattttataaacaatgaacaatatatactttcttaagatctaaggtactttcataagatctaagaatttgctgaaagcattttcagctttgaaatctccaaatgaaactttaaaattgattttggtttatcccaaaacaatggaaaatgtccagttgtgttttgtaaacatgtatgtaactcatcttttagttcacacttcctggggagccaccaaagaaggtccccatgggagctaggggacccttaccctcaggaacagtcagtctattacttggaaggtctaaatttaaaagatgttactgtacata

SEQ ID NO: 710816 - DNA, 604 bp, Homo sapiens
tcgaacagcctatgacattgtagcaggaaccattgtggtaaaaagaaatggggtcagagatgcccccccaaagacctgatttccacacgctataatgacaagactaaattatgtatcaaggccatcagtatccctgggttccactaactgatgatttagaaattaaagcaatcactccagtgtgatgcagctgactactctgaaagttttgattgtacttgaatgccaaaaacttttccagaagaaaaacctattaaattcaagtattaaaatttttagatcaaaaaggcaaatgattttataaacaatgracaatatatactttcttaagatctaaggtactttcataagatctaagaatttgctgaaagcattttcagctttgaaatctccaaatgaaactttaaaattgattttggtttatcccaaaacaatggaaaatgtccagttgtgttttgtaaacatgtatgtaactcatcttttagttcacacttcctggggagccaccaaagaaggtccccatgggagctaggggacccttaccctcaggaacagtcagtctattacttggaaggtctaaatttaaaagatgttactgtacata

SEQ ID NO: 710817 - DNA, 608 bp, Homo sapiens
ggactaatgaaagtcaatgctttctctctctctctctctttttttttttttgaaacagggtcctgctgtcacccaggctggagtggtgcagtggcacaatctcagctcactgcaacctccgcctcccgggctcaagtgatcctcccactgcagcctccagagtagctgggatcacaggtgcacactaccacgctcagctaatttttgtatttttggtagagatggggttttgcccaggttagtcttgaactcctgagctcgcgtgatccacctgccagcctgccaacgtgatgggatcacgagtgtgagccaccaggccaggcccgtcagtgctttctctgaccacaagatgctttggttttgtagataatattagttgatattatgacaaaatcatgtatttttatttgagggacaacgccattctgggctttcataatraaatgatgtagttctcatctctctgagaaagcgcatgtagagcaaactggcaaagttcaaaatatcacaccaaagcaagtcaagctaaacatacatggggaattctgactctttttaaaatgcagccgaataacactatttgttttccattaggaatatattagcca

SEQ ID NO: 710818 - DNA, 621 bp, Homo sapiens
tttttaatggactcatttttattacagatctgaatgttagcagtgccttatgttaaaaatgtttaaatcacttttagtgtttttctaattataaaacaaatgcagagaaacacaaaagaagaaattaaaaccatccagaattctaccactcagtaataacctcagtcaataattctatttttccttctatcctctttgtgctcacatatatatatatatatatatatatatactttacaacatttgcattagatgtgtacacggtgcyagcatcctttttgcttaacttttcctcttaaacatttcccaaatgtatttaagcctcaaaacatttttaatggctgtataatatttatccataatttattcaaacagtccccaatttgaaatttttcaacttttcttatgtaattcattgtttcaaaaatatttgttgagggccggacgcggtggctcacgcctgtaatcccagcacttttggaggccgaggcgggcggatcacgaggtcaggagattgagaccatcccagctaacacggtgaaacctcgtctctactaaaaatacaaaaaattagccaagcgtggtggcaagcgcctgtagtcccagctactcgggaggctg

SEQ ID NO: 710819 - DNA, 635 bp, Homo sapiens
ctagtcttgagaataagataagttggatataatcacttagcagatgacacaagaggcagagtatgttttgtttaagatcacacagatagatactcttagggacagatactgttagggccaaatccagaacttcggtgtgtcccagtccaaactctgccctctttacctttcctcccccacaaaccactggtatttggaaggagtggaattaaaagttcctgaccttggccgggcgtggtggcttatgccggtaatcccagcactttgggaggctgaggcgggcggatcacctgaggtcaggagtttgagaccagcctggccaacatggtgaaaccttgtctctactaaaaatacagaaattagccaggcatggtggtggacacctgtagtcgtagctactcaggaggccgaggcatgagaatcacttgaagtcgagaggcggaggttgcagtgagctgagatcgcgccactgcactccagcctgggcgacagagcgagaygccatctcaaagaaaaaacaaaaagttcctgacctttccacacaggtcctcgtggtccgcggactccagagtggttctagctttctattaatatcacacagttttccttatttaagttatgcaaagggtcgtgtg

SEQ ID NO: 710820 - DNA, 620 bp, Homo sapiens
agcatttaaagccatttataaaaagaaagacaactgggcatttcagaatttaaaataattgaaaaaggtattgaagagtagagtgataaggaatatatgaactgtttttggaacactgatttgagtgatttttcaagtccttttttaggaaaacagtttaacaatttcccaagtaattaaaactcaataaatgatataagcaaaatttcacgtgacaggtataatactgaatgctcaacatgcataaccttgaactacagactatgtcaacataaaagaaggttaacatttttgtcaggtcttaaaataagctcagaggccgggcgcggtggctcacgcctgtaatcccagcactttgggaggccgaggcgggcggatcacgaggtcargagatcgagaccatcctggctaacacggtgaaaccccgtctctactaaaaatacaaaaaattagccgggcgtggtagcgggcgcctgtagtcccagctactcgggaggctgaggcaggagaatggcatgaacccgggaggcggagcttgcagtgagccgagatcgcgccactgcactccagcctgggcgacagagcgagactccgtctccaaaaaaaaataaaataaaata

SEQ ID NO: 710821 - DNA, 876 bp, Homo sapiens
tgactagttgttttgcatgagttgggaactgactagaagggaattccccacccccctgacccccgcctcaccaaagtttcaagaaaatatttcaagtcttagtgaataaagacagggccttccatggtgacttctttgaaggggatgatgaccatatgmcgtccactccggtgtatttgtctatcaaacaacaagacagagggtgtatttttttctgcttttaaatttgtaggacgggtcttgttgtattgcccagactggtgtcgatctcctggcctcaagcgatcctcccacctcagcctcccaaagtcctgagatgataggtgtgagccgccatgcctggcttgctgcattttctttttaatccttgctgtgcattagatgtggcaccaagccagctgatgctagataaagggccagggtcgtttatgagttagtgtttagtgaagacctacttcagagcgcagcagcagcaggcattgcccttttaaaactcctgctgcaggtcagcagcagctgtgtctgggagctcatggccaggacagaggaaagccatcctgagtgcttcgtcacccattcccttgcctgtggcccgctattggctggcagctctggacaggccattctgcattgatatgagacccccacctcaatgccacacactgcaaccacaccaccccttcctctgctgcccgtatccagcgcagacttcccggacctccagcccctaccatgtacagaatttgaggcatctacactgacagccctttctttccctgtcctgcccacaggaaaatcaacacattttcttcactaataaagtgaagattcaaatgacaggaaccttaaatctcattttaaagtgatgaatacaaa

SEQ ID NO: 710822 - DNA, 1416 bp, Homo sapiens
gaactatatgttctcccccactgctttagagtaacctctggatttttcccaaggtaagttaatatagtttaattctcaataaattgttctctgtgactagatcctacccaataaaagaaaacagaaaacaatagcaaaacacaaaaatcagtatcaaattagcactaacacaaaactaagatttcttgttttccttatagatgttatttatgttgacaaattagaatttgattgatttttatactaggcaacctcaggatgtcagttccttgtattgccttgagatggtctaggaccaatagcaagctcttttccaagagattgctgggtggataggaaggatctgaggggcctgaaggaagtggaggccaccacacacacacacacatgcacgtgcacgcrtgttttcttccttatatcccaactttctcaacattgcagtctggaacttattggattccagtgaattaagggaaaactttttaaaagaaggcatttaagcccttgccacaatcactctgtccccgtgatctctatctttccctccctcccaagttccactatataaggactggcacggtggctcatgcctgtaatcccagcactttgggaggccgaggcgggcagatcacaaggtcaggagatcaaggccatcctggctaacatggtgaaatcccatctctactaaaaatacaaaaaattagccaggcatggtggcacacgcctgtagttccagctacttgggaggctgaggcaggagaagcgcttgaacctgggaggcggaggttggagtgagccaagatcacaccactgtgctccagcctggatgacagagggagactctgtcaaaaaaaaaaaaaaaagaatctgctgccttgttgttggacctgtaggtttccggacctaagacttcttttaactagacctgtatttcaggtctcattcctctccaaaacactcaccatccttctgcctccttgccccacatacacacttacatgctatacaagcatctgggttgctgtaactgaggtttgttgggtcagacagcataagggtaaagagtggggagggagagggaagaaggcagaagtagaagaggaaagagaagaagagggaaggggaagaatatagtatcccccccaaatcacagattccttctgttccttaaaagaggatacatgatacatttaaatagcagtttaaaaacaaaaacaaaaacaaaacaaaaaccctacattttctaaatgtttgcatttaccatttcctgattgtccgttatcacaaggaggtgtgagtctctggctaggcagaattccagactagaattccagtccttttcctccactgagaaataataacaatggttaccatatttcatccagcggtctgggcagctaggacagctggcacaag

SEQ ID NO: 710823 - DNA, 715 bp, Homo sapiens
caagtgttgggaaggtttttgggtaaggagggactttatcagtggtgggttgctcttgaacccagtggccaagtcctcttaacagacctggtatatggccaacctgcttttgcccaacatctagagagactggttactgtttatatcatttttgtaaatcaagaaagaactgcactgagatgcttgtttgtgagtgatgacctacatttctttctaagtcctccagctacagttaggcccaccatgctacttgaccatcatgtttctcatctctggctgggggctttctccattgcctcaatggctatttcgaaccttcaccgtgctcctcaaggcaccttaccatccctggtcaatcaaggataatgattacactgactgcctcactgataatctaggggccagtggacatgccctctcaaaacttacctcctcttcatcccaaaatcatccccaattgtacccattatccttcttttcatcccttagtcacctacgacctttacttcaagctgatcagttcagggcaatccaggacgcagttaggaatttcatatggagatgaraggagaaattcttagtgaatactttctgttatagctaattctttattttttaatttttattttattttttattttgttgataatagaaaggccttggcctcccaaagtgttgagattatgggggtgagccatagtgccctgccaaagtc

SEQ ID NO: 710824 - DNA, 2907 bp, Homo sapiens
gcatagtttctgaccttcaatctgctaattgtgcttttaagctctgattccattttggctgttctgcactgaatctggcctttcacctctcaaaatctgttttcaacacccctcagctagcattgtaatcaatcaatttctctctctctcaatccccaccccttgataatcccatttcatctcttcttttcttccagcaacataaatacagcctctcaggcaaaagtcacattcaataactttttgtttctatttcctatattagggaacacatttttttttctcctctcaacagcaatagtctctatgctgacatagcaagaagtttgttctcaatataggaagagctacagataaatgtgtgtgcctgtatacgtagacatactgggagaggcaaagagagaaaggatttatcagctgaaatatggacaaagagaacagtctatgctgggcttgaaaactatttggacaatctgtcttgactttggttgaaaactttttgtattgaattgccctcttggggtttgaatctattcaaattgatcttttctatgagtaggcacatcattttagaaatgtttctgtgaagatgtgctgttttcatgcttagggaagcacactgcrtgctgagtgagaccgaaggaaatgccaaattaattcattctttctgtggcaatgttcttttcccgggaaaggactgctttaataaggcaggtggctgtgtgtgccatggcgtgcctgcctccgtaggaagcttggtaatcctctcccaggaaaacacagccttggtgtttgttgtgtgaggctcttgaatgtaatattagtttacagtcccactcctggccatattatataaacagtgggagaaaaatgacaatggaaattttggcagagaatgctttatttaagcctttcaaaatggacattgttgcgcatggctgtgggtctgttgtcagcgccctgcctgaatgagtgaatggctgctgtttgcagccaaaagcaggcgacggtggggcctcttcaaaccatcagtgcgacaatgttatcaagcggctgagtccctgcttctcgtcagtaagccatcattattcctcatgagccaactacaggagagggccactgtgacaaatacgctattatgttgcattttaatgtgtgccaatcagcttaattcaagctctgacattcctctcaggtactgctcttttccaccgcagctgcctgcatgcatccttcagttacagttccggaagtttctataagcgtgaataggcactgtgagcagccacctccaaataaataaaaaggaactcagcccgtgggatggttgagcttttcccaattaagcttcatgatatatttcaaagtactgtaaacattggtggctgaacaattctcacgttcactgatatatttggagatccaatactgagacatctatccagtcataatgaaattccattgtcagagttcgccaaagagtctattggtttttggagactttcaggtcctgtgaaggcttaattttgttctttagggagggatgtaaaatgtggttgtgatatttgccatcacttgacattttaggcttgggtttggagcctccagagattggttatttcctcaggggcctcataacttaacctaagatggccactgcatagtggtgtgatccctctgggtcccagcaacctgccctcctgggagaagatatgtctgggtcagtgatcttagcaacatttctgtccaaaccatgactgttctatggggggaatgcagaagaatttcattaaaatgtctgagcctgatagtcactatatttttaaaagtctgaatgtatacttcaaaacaaggctgtaagaaacacacagactctggtaatagactcttatcttcaggtagtgtcactgatacatctggactttatagagaaataattcaccttgaatttcctaaatgagataggacttccttgggatattctaggcagtcttatgtcaaaagacttttagctcgtgctctactgggatgtccctttagcccagggttttcaaatggcgtgatgaactaccaagaagagagaataatacggacaacatagtgaatatttcttaagaatagctttattgccagtcatggtggctcacacctgtaatcccagcactttgggaggccgaggagggcggatcacgaggtcaggagatcgaaaccatcctggctaacacagtgaaaccccgtctctactaaaaatacaaaaaattagccaggcctggtggtgggtgcctgtagtcccagctactcacgaggctgaggcaggagaatggcgcgaacccgggaggcagagcttgcagtgagccgagatagcgccactgcagtccagcctgagtgaaagagcgagactccatctcaaaaaaaaaaaaaagcttttttgaaattaaagttatgttttttaattttgaaattattatttttctgttgaggttgaattgttctttctctataaaataatgatgatagcatacagtgattttttttttttagtttaatgtcctagcttgacaaaataaactttactgtctgtggcagtatattcaatcacctattcattcacctacctatttttgtttttgaattttcatttttcctggttcttaacatccacaagtctagcagctactgtttcaccaaatgaatcataaattctgaagagatttaaaatgtctacaggctctttcaactgccaaataaaaacaaaacaaaacagtgagccaattaggtagtaatacaagatgtaaacctataaaagagtcagatttttttttcttaattagcaatctctgttcactggtttctcaattccttcagtcttctctcttattaagtatctagctaatagattttaccaat

SEQ ID NO: 710825 - DNA, 2157 bp, Homo sapiens
caaaggtgtgctaagtagacaaggacctatccctctggtgggacatcaggctaataagcaagtacaaactacgtgctgaaacgggggtaggacctggactgggagagctcccagcaggctccctgtgtctagtctaagaatacaacacactcagytctgaactgagaattgtagaggacaggggatgagagtgccaggagagagaacagcacacatgaggtccagagtgataaggagttcactcaacaatcaattccatgaaggccttggcttctccgattcatctttgtgactagagagaggcctgtccgcacactgccttaaatatcataaatgctcataaatgttggttgcacgaacaaatgaatcaacacattagtctcttatttttagtctagattaaactccaacatgaccctattgcctggcatgatccgttactatcaaagtgctctacaggtgaccgatgggacgccattctacagtgagccactcagatagatggaagaaatccacaggcccctgtctcacaccttggatgcctgtttggatgcccagccatgcccagctggctggaggcggggctccctgcactgagcagcagttgcaggaatctgtgatgctttcccaaagtgaggaagaactgtacctcctcccagagctttcctctccgaaaaagctggcgtggctcttctcctaacagacctggtcccagacggaccacctccagtagatgcccctgaactttaaaagctgtactgcagaggcctccctcttcctggtctccattttccagccctttccctttgccctaatgctcataagtcacagggaaggctgcagtgggaatgagggagaacccttcaagaaacaaggaaaagctttagtatatgacatcacagataaatatattaaagggctggggggatggagagaaccaaattcaaatctgctaacttcaggctccatctatgaacaatagaaggcaaaaagtgaaggccgatttctgggttatcatgaagcaggaagatgagcactcaggacctgtcatgaaaatacttgctttccctcactgctttgccctggttatgaagcaaggtcatcaacaaatgaacaacatcaagaaggcaggcagaggctcaataagctgagaatggagacaaggcctcttggatttacctgaattgaatgtaaagagcgactgagaccttgtagacagcatgttcccttttccttaaatagcaagacagcacagcctcgaggctgaggtgggggaggactggcgtcagggtgaaaggggccaaacactggccctgccacttgcttgctgtgagcatttgcgaaggatttatagcatccctggaaaactggaagcacaattttgctttctacccccagatagaaacgtggccttgctcctgctgggtttagcttgagattcaggaaggacgatgctctgtgcatgttcccttaagaagcagcaagtggatagttggtgtgtggtcttcattagtgggaataccatcctgagtgtggaaaggccacagtgagacaagcatttggtggctttctcaaggactccaagggagtggggggtgtccttggcatgggaggctagaaataaagcttcactaagatctgctactttcatctatttcactgccttgctcccatgagtgtctgaacctgcgactaaacaacttgaaaacaaaaattaagtctgcatatgtctccttgtgctgctgaaacactgcagctattgtgggcaggtttcaaatcttctgaagctgtaagcctctttttattcgtctctaaaatagacataataatccttgtgtcttgtgtcttgtggagacagaatgagatactgcatatgggaactttctggctcaggtcccaaagagtcccctagacactactgctgctgggtgtggccactgcagctattttctgcagctatttactgggataagaccagtagaaaccctagcaggcaacctaaaaatgatagattctcagcagtctagccagtttggtaatgtaaacatttaaagaggagggacaggaataacaagaaagcaaagggttaataaataccccttacccttttaaccatgttgtcccaagcaccatctcgggagtgtgcaccacttctca

SEQ ID NO: 710826 - DNA, 1170 bp, Homo sapiens
tttaagggccatttgaaactgaaattaccatcagaaagcaggaagcacaaaaatgagaaaaacgtggcctagacagactgggaaagggacacctgtttgaagcatgagagctgaaacaggaaggcagggtggtggcttggtgtcttgttcgacttcagctggaacatctgagttgggcaactcagattttttgccactgtgcattttccaagaatgatctaaaaaagcatgttgaatattgatttgggcattacaaataaattttagcaaaaaggcaaatttgcaaatacggaatccatgaataatgaggactgactgtatattgcaaagccctttgaatttaaaattcttctataacctttccctcactccaaaaggcaactctacttccctctctgcaacataaacattggccatgataaatgacctgcagtttcccaagcacccagtgttctttcacctttaactgttactttcaccacggattttcacactaccctcctagggacaacctacaactctcacgttctgctatcaccatctctcacggtgtcacagagcactggacgccattccaataatattaatatcaatcataagatcgtaataatagcatctagattcacagactatgtagcaagcactgctctgaacaacttccaagtatctactaatttaatctacacaacacacatattgatagagaaaattattatccctcattttaaagaataaaaaacagaaacatgaaaatgtcaagtaccttgcccaagtcactcagcctgtgattggtagagtcagaaatcgatgtcagcaacccaaatctacagcccaagcttaatcacaatgttactctcacaatgactgttgaagcctagtagcatttagacaaagacgcttccttccgtagtattaggatggggacagagatagagaaggaaaaatataaatatgcagttcatttcattccctgccatctctatttgctgaaaaaatattattaagatgacaccaacccctgcatatgtaattttgtgtaattatacttgtgtaactacagataattatcttccatcacccaagaaggyagaaaatcctcttaaaaatttgaacatgaatcttaattctgaaatgttttcaccattacccataacctcttccaccttcaca

SEQ ID NO: 710827 - DNA, 961 bp, Homo sapiens
ggctgcagtgagctgtgattgtgccactgcactccagtctgggtgtyagagtgagaccctgcttctaaaaaacaaaattttgaaactgaagagttcttatgaaaaaaattcttattccagtcatcttttaagcatgcaggatcttaaaatttctaaatagactatattttgtgattttaagtatgtttatgatacagtaattttatgacatagagcatatatcgcacttttatgatataaatgcagtatattagaaattttaagatttgtctggcataaaagactaacattagaaatttttcataagaatgaactatcatcagtgttataattttctatttatcataaatttgtaacttaaaattccacatcagcattatagaaatattcattttaatgtgttcaagctgtttcatttcctctttctaactagggccctcatttgagcagatgtagagttgcaaacttatttattgcgtaagcacttccttctcagtggatttgtttctgtcatattctttatggggatatgtatttgagctttaatctgcctctctccttaatttctagtgttatgccccatttaactggacttttttttctttattggggtgtagattgtattatagtttctgtacactttcccattgtttcaaaatactgtcctgaaagatgtgttttttgtgtgttataaccttagggaagtagattccttagtagcagtagtgattttcaaaatgtggttccaaagcccatttttattattagaaacataaggaagcttattcaagccatcgattcctaggccatactccaaatctctggaataaaaatctctggggtggagcctgggaattggcatttttaacaagtacctcaggtatttcttcggctcactataggttgaaacttgctttcctagaatgaggatttttgcattaaatgtcttttctgtattttt

SEQ ID NO: 710828 - DNA, 1354 bp, Homo sapiens
ttgactggccctgcccattcttgtattcaaagtcacaaacctctgcagatacaatatgaaaacatagaatggcaaatgcaaactgctctattccctagagatgacattctaaagacgtgagagaagatccaaaaaggctgacttcagagatctgtaataaagatttattgaaacagattaaatctgtttctaaatctatttctatttatctaatcttcaattagaacatattattatttgccacataagttcatatatgatgtgtctgtaaattgtatgacactcatattcctataaactgtcttcaacagactggcattggcacataatttatcctattttatattaaaatatattgaatcttttaaagatataaataaacattgtttgggatgatcctggccaatagttatttcaataattgcatttatttaggcctgaactttatggccaactaaaattgcttgaagtagaaacagaaagaaaatcaaacataattatttgatgtcaggttttcaaaggatttcagccactgttttgaattagccacataatccacaaaggttttttttgagtagtgaagccaggattttctttgcatggactacgtagggttaaaacattcaattaaaattttctttttaatgtctctgggcaacagagatgacatttatgagattaaaatactggaaagacaaccaaaaatatgttgaaaagtaacagggagaatagcagaaacaaagagaatgcagcaaatcttctaggaagcattaacatgatgaagaacatttttgatttgcactttccatgttgtgttcaagtattcagtaatgagtctccaaaaacccttctagtcgcatgagaatgttgggtctgttttcagttttctagtatatagggatcttgggaatatgctgtagaacttgtaaaatattatattctcctcctcagcagaaagtcacctttaccttcttggtgtgagcaaggtttgcacttgctgctgcgtggcccagggtaccacagccctgaggttgtgaagtccagatgtttatttggctggtcctgcccattattttattcaaaatcacaaacgtctgcagatacaatgtgaaaacatggccggccaaatgtaaactgctctgttccttagaggtgacattctaaagacctgacagtagatacaaaaaggctgacttcggagatctgtgataaagatttattgaaacagattaaatctattgcttaatctatttctatttataagcctacaatgggaccctggattggtactatggtgactcaattcacctgcctaaaaagaagatgttgaaaaatgaamaaaaaattgtgtaaa

SEQ ID NO: 710829 - DNA, 603 bp, Homo sapiens
tgattttgaggcctctccagccatgtggaactgcaagtccaattaaacctctttttctccccagtcttgggtatgtctttatcagcagygtgaaagtggagtaatacattctccccaagacccccactctctctctctctcattctctctgtctctctctccctccctcactctctttttccatctcaagcagtattcatgcaaaatactaaggcgtgagaggcacacctaatccctttctactgtttatcacacaattagaagtgttaacttttttattattcagcttaaaatattttctaattttcaatatcatatctttggtcaatggtgtatggagaattacatgtcttaacttccaaatatgcagaggtttccagtgatttgatttatttttgctacttgtttaggacttaattgtattatagtaacagattgcatgctgtggattattgctatgttttttagttactaaaatttgtaaaaattagtttttagtttagggtcagtttttttaaatttgtgaattctcagggtgtgcttatatagagtgttggcagtgatatcattaaaaatcaatggttgatatgtccatgaagtcaa

SEQ ID NO: 710830 - DNA, 603 bp, Homo sapiens
tgattttgaggcctctccagccatgtggaactgcaagtccaattaaacctctttttctccccagtcttgggtatgtctttatcagcagtgtgaaagtggagtaatacattctccccaagacccccactctctctctctctcattctctctgtctctctctccctccctcactctctttttccatctcaagcagtattcatgcaaaatactaaggcgtgagaggcacacctaatccctttctactgtttatcacacaattagaagtgttaacttttttattattcagcttaaaatattttctaattttcaatatcatatctttggtcaatggtgtatggagaattacatgtcttaacttccaaatatgcagaggtttccagtgatttgatttatttttgctacttgtttaggacttaattgtattatagtaacagattgcatgctgtggattattgstatgttttttagttactaaaatttgtaaaaattagtttttagtttagggtcagtttttttaaatttgtgaattctcagggtgtgcttatatagagtgttggcagtgatatcattaaaaatcaatggttgatatgtccatgaagtcaa

SEQ ID NO: 710831 - DNA, 606 bp, Homo sapiens
gagaactacaaaccactgctcaaggaaataaaagaggatacaaacaaatggaagaacattccatgctcatgggtaggaagaatcaatatcatgaaaatggccatactgctcaaggtaatttgtagattcaatgccatccccatcaagctaccaatgactttcttcacagaattggaaaaaaactactttacagttcatatggagaaatggtattttaagagcacaatctgagtactagaaatattaatcattcttaagcaggttggttgataattgtttctggtctttttttgctggaaaagctatactatctatctattttttctatttatctacatacagataaayagtataattactttggtttcttgccatcttttactaccattacttcctgtcttaaggcagcaactatccagtagttgagctacatccaatacacatttttacattgggtttaattcctagctttgtcatgtaaccatgtggtcttggacaagtacttgacctttatttgcatcaagtttatcctttatatcaaaaaggattgttgtactagtgtactaaactcagaagtttcaataattatagagttagtatacaaaa

SEQ ID NO: 710832 - DNA, 602 bp, Homo sapiens
tctgtcattgtttgccactatttgtcagaaagcggctggagacattatattttaaaaatgggcatggctgtgtttcaataaaactttacttataaaaacagtcagtgggcctaattcagtctgtgggccatagctttctaaccccggtctgcacataatataatatatagcacagttctactcaccatatgaaatgatgcctaaaatgattggtgacaataggttctcttgaagtccagggatttatctcctgtgatggttaatattaagtgtcaacttgattggattaaaggatgcaaagtattatttctgggtgtgtctgtgagggtgttgctagaggagtttaacatttgagtcagtggactgggaggggaagacccaccttcaatgtgggtrggcaccatccaattgcctgccagcatggctagaaaaggcaggcagaaagtggaatgagcaggcttgctgagtcttctggcactcacctttctcctctgctgcatgcttcctgccctcaaacatcagactccaagttctttggctgttggacccttggacttataccagtggtttgccaggggctctcgagcctttggccatagact

SEQ ID NO: 710833 - DNA, 595 bp, Homo sapiens
tgggaattaccctattctttgaaatcgccctttaatatcatagtgtaaaacggtagttcccaatcacctggagaatttcctaaaaccgaagttgctgaccttgtcctcaggatttctgatatagcaagtttaggatggaggctgagaatctgcatttctaacaagttcccaggtgatattgatgctattggtctagggaccacattgtgagaaccactgctgtgggaataaaaggctttcattgtccctgggaactaccagaaacatgtattatatacaatatttggccagatgtggtggctcatgcctgtaatcccagcaatttgggagacagaggtgggaggactgcttaaaaagcaagttcaagactaatctgggcaacatagcatgaccccatctctacaaaaatttwaaaaaattagctgagcacagtggcacctgcctgttgtcccagttacttggtaggctgagacagaaggatcacttgaatccaggagttggaggctgcagtgaaccatgaccacaccactgtatttcagcctgcgtgacagagtgagagcccgtctcaaaaaaacatatatatatgttttttata

SEQ ID NO: 710834 - DNA, 628 bp, Homo sapiens
gatgcttccttttcttccctaagttactttcccctgtaccagtcacctagtgcactgggactgagtttcttcttaaaaagagagagagagagagagagagagagagagagagagcgacagagacagagacagaaagttggayagatgatctctaagggtttttttgttgtctgaaataactctaaagtattacaactacacttaaagtaccccgtaatacaaatgggaaaaattacatgtcctaaagcgtatgtttataaattacggtagaaagcatctgtcttatgtagcactgtcctaatgcctaaaattatcacgatctatgtacatttctttttaccttctgcaattctcttaaaaagattgctctacaatgggaccaccaaaattgttcttcccaaggaaaataccattttattctggcattaaacttttagaatgagcctcaaaatcattagggagaaatgctgactttatttaaagggcacatccagcatcttaatgtgaatactgctaaaagatttcctttggatttaattttgaattattgctttgcatgaataacatcattacacctattaagatgaaaactaaatccatttcaataaagaagaatgaagacatagaa

SEQ ID NO: 710835 - DNA, 562 bp, Homo sapiens
gataaagtctgtggggcctgcacaacagacaatggttgggcctgcagaacagacaaagtctgtgcaggtgtgttgacagacttccatttttcttcctgcaacatgagttcagtcaatacaaactcagggaagggaccagacatgactgttttcttctttggcaggtctggactttaggcagataaaggaacttcagagaacaatccatcatgtgctttgggagagacagaggattgagagagatggggaagggagatgtcagagagaccttgaggcttctttttcagttcggaaggtggaaacaccatattataagatactggtttctaagacctgacaagaatatatttgyaatccaaccatttttcactgtctctgttgatgtgttcccaactccatcatcagtacacagacgtccactggttgtcacccaagccctgcttcttgctgaatctaatgactgtcaattatttggtctttttaaatttgacctctcttgatgaaactttttttctctttgtgcctctgtgacctccagttatttcagtatggagaacttaac

SEQ ID NO: 710836 - DNA, 1769 bp, Homo sapiens
atttctttttctctattcccaatgttcctttcttctggtgatgatatgctatagaaattgtcacgggtgattagcaactatctggggctggtggcatgggggtaagaagaatttatcaagatagttgtaggtaaagaaaggcagatatattagagaacgtatgaaaatacgttgcaaggaagcaatgggcagcacagcagagaaggggctgtctgmaaggagacaaaggcgtgctggagattttacaggatggtgcttgtactgtgtgctgaagagggtttgtgtggtactgataacactaaggttgcagtgagctaagttacatttttctatcagctgaaggtctggtgatagctgggtgcaggaatattgtgcaggagggctatgtgtcctggaccatgaagaaggtgagtcttatacattacctgctttctttctttgttttttgttttttggttttttttatttatttatcacattgtgcaggttagttatatatgtatacatgtgccatactggtgcgctgcacccactaacttgctttcctctggtcctgccagcctgacttcttttccctaaggaggactccacagaaatgaattctgggtgatttctatattctacgatggagactatagctatagatcattatacaacactacctaattaatcaagaccaaaataaatagtcctacctgcaggacaataaccagtaacaaataatttacaattagaaattagttccagacagaaggaaatatttcttattttacctgcacttacatgactgcattttagctaactggagcctgtgatggacaaccaaaacatgggttttcttcacagatatttttcttttgactcattaggttactgtgaaaagataattttctttcagagatttgtaatttttcagaagtgtttttgaatccttgaactcatatttgttgcagagcagcgtcaatataccatgagacactctaagaactttttgcataagtgttgatgtgtaaagagaatcactaaattcaaacccagctctgcccagggagtaataaatcctaagagactattttaactcacttacatatgttcttctggtttggtttggtttggtttctactatcaggtacctaggaagtagcactcaagattaggagaaaaaataagtttattctggatcaaaaattttttaactttttcagattaatctgtttttttcctataatgttcttaaaaattctagagacaattttctctatgcacctttgaaaatgaaataaatgtaacgactaaaaccaagcaaagtgaaatagattatccttcacaatggaggtgaaatccaagagataattcaaaaaaattacgtatctcaagttcctgtctgtcagatttggcaccagagatttcatccagtggaattactgatttggaacctaaatagaattttattttccaagttccagtattttcaattttcatgaaattcaggccttcataaataaataaataggagaaaacaggctctacatctcagaagaaaagattcctgtgggttccttgcccctactctgaagtataatcattaaggaattcccaagggactaaaaggttataacttagaatttatatttcactcttattaggaatacaggtaaaatagtataacttatctaacaataagcaatgagaaatgtggagaaggcaagtttcaggaaatcaaagatcataattccagctctaaccaatttatattttagcctgcagaa

SEQ ID NO: 710837 - DNA, 1769 bp, Homo sapiens
atttctttttctctattcccaatgttcctttcttctggtgatgatatgctatagaaattgtcacgggtgattagcaactatctggggctggtggcatgggggtaagaagaatttatcaagatagttgtaggtaaagaaaggcagatatattagagaacgtatgaaaatacgttgcaaggaagcaatgggcagcacagcagagaaggggctgtctgcaaggagacaaaggcgtgctggagattttacaggatggtgcttgtactgtgtgctgaagagggtttgtgtggtactgataacactaaggttgcagtgagctaagttacatttttctatcagctgaaggtctggtgatagctgggtgcaggaatattgtgcaggagggctatgtgtcctggaccatgaagaaggtgagtcttatacattacctgctttctttctttgttttttgttttttggttttttttatttatttatcacattgtgcaggttagttatatatgtatacatgtgccatactggtgcgctgcacccactaacttgctttcctctggtcctgccagcctgacttcttttccctaaggaggactccacagaaatgaattctgggtgatttctatattctacgatggagactatagctatagatcattatacaacactacctaattaatcaagaccaaaataaatagtcctacctgcaggacaataaccagtaacaaataatttacaattrgaaattagttccagacagaaggaaatatttcttattttacctgcacttacatgactgcattttagctaactggagcctgtgatggacaaccaaaacatgggttttcttcacagatatttttcttttgactcattaggttactgtgaaaagataattttctttcagagatttgtaatttttcagaagtgtttttgaatccttgaactcatatttgttgcagagcagcgtcaatataccatgagacactctaagaactttttgcataagtgttgatgtgtaaagagaatcactaaattcaaacccagctctgcccagggagtaataaatcctaagagactattttaactcacttacatatgttcttctggtttggtttggtttggtttctactatcaggtacctaggaagtagcactcaagattaggagaaaaaataagtttattctggatcaaaaattttttaactttttcagattaatctgtttttttcctataatgttcttaaaaattctagagacaattttctctatgcacctttgaaaatgaaataaatgtaacgactaaaaccaagcaaagtgaaatagattatccttcacaatggaggtgaaatccaagagataattcaaaaaaattacgtatctcaagttcctgtctgtcagatttggcaccagagatttcatccagtggaattactgatttggaacctaaatagaattttattttccaagttccagtattttcaattttcatgaaattcaggccttcataaataaataaataggagaaaacaggctctacatctcagaagaaaagattcctgtgggttccttgcccctactctgaagtataatcattaaggaattcccaagggactaaaaggttataacttagaatttatatttcactcttattaggaatacaggtaaaatagtataacttatctaacaataagcaatgagaaatgtggagaaggcaagtttcaggaaatcaaagatcataattccagctctaaccaatttatattttagcctgcagaa

SEQ ID NO: 710838 - DNA, 1769 bp, Homo sapiens
atttctttttctctattcccaatgttcctttcttctggtgatgatatgctatagaaattgtcacgggtgattagcaactatctggggctggtggcatgggggtaagaagaatttatcaagatagttgtaggtaaagaaaggcagatatattagagaacgtatgaaaatacgttgcaaggaagcaatgggcagcacagcagagaaggggctgtctgcaaggagacaaaggcgtgctggagattttacaggatggtgcttgtactgtgtgctgaagagggtttgtgtggtactgataacactaaggttgcagtgagctaagttacatttttctatcagctgaaggtctggtgatagctgggtgcaggaatattgtgcaggagggctatgtgtcctggaccatgaagaaggtgagtcttatacattacctgctttctttctttgttttttgttttttggttttttttatttatttatcacattgtgcaggttagttatatatgtatacatgtgccatactggtgcgctgcacccactaacttgctttcctctggtcctgccagcctgacttcttttccctaaggaggactccacagaaatgaattctgggtgatttctatattctacgatggagactatagctatagatcattatacaacactacctaattaatcaagaccaaaataaatagtcctacctgcaggacaataaccagtaacaaataatttacaattagaaattagttccagacagaagraaatatttcttattttacctgcacttacatgactgcattttagctaactggagcctgtgatggacaaccaaaacatgggttttcttcacagatatttttcttttgactcattaggttactgtgaaaagataattttctttcagagatttgtaatttttcagaagtgtttttgaatccttgaactcatatttgttgcagagcagcgtcaatataccatgagacactctaagaactttttgcataagtgttgatgtgtaaagagaatcactaaattcaaacccagctctgcccagggagtaataaatcctaagagactattttaactcacttacatatgttcttctggtttggtttggtttggtttctactatcaggtacctaggaagtagcactcaagattaggagaaaaaataagtttattctggatcaaaaattttttaactttttcagattaatctgtttttttcctataatgttcttaaaaattctagagacaattttctctatgcacctttgaaaatgaaataaatgtaacgactaaaaccaagcaaagtgaaatagattatccttcacaatggaggtgaaatccaagagataattcaaaaaaattacgtatctcaagttcctgtctgtcagatttggcaccagagatttcatccagtggaattactgatttggaacctaaatagaattttattttccaagttccagtattttcaattttcatgaaattcaggccttcataaataaataaataggagaaaacaggctctacatctcagaagaaaagattcctgtgggttccttgcccctactctgaagtataatcattaaggaattcccaagggactaaaaggttataacttagaatttatatttcactcttattaggaatacaggtaaaatagtataacttatctaacaataagcaatgagaaatgtggagaaggcaagtttcaggaaatcaaagatcataattccagctctaaccaatttatattttagcctgcagaa

SEQ ID NO: 710839 - DNA, 924 bp, Homo sapiens
aaaatgtcctgttacatgacaaatttaaaacaatacattttagaatttaccttgacaacactctcagagaagattattttagaaactattgataaattaaaaatctaagtgaattatatgcctaaaagctttcttttaagtgatacttgaggggaaaaaaacgtcatcccaacatttttagacattgaactttacaagtgtagaaatggtcacagaaagcctatgttattctgaaatatattttgtttcagctatgtttgtgaaaattgaccagctacttgacaaatctagattttcttaaaggcactcaactaaatgctattgtctcctaggacttgtcttggccatyttgattatcataactctccaatataggctttaggatttccaaattcatactctgaagcccaaaattattcccactataatttagagttagcctttgaaataacttatagaaagcattaattgattccatatctaggggccttctgagttgtttataacttatatatatctacatatatatttattgataaaattttatttttaatataatttacaaccagatttctcttacaaaaaagattcaatctattttaaaagtatgataatcaattatattatataatttgtgccacaattcatacttatctattgatttagaaaccacattcaagataatcctctctaccaagaattggcccccagcgtagcagcaaagcaccattaactatcatttccaccgacagctgaagttgtggttttgcattcagcacttttttccttgtgtggagtatagaacaaaagatgttactaatgtaataatgtgagtcatcatccaaatctgtggttactactaccatgaaaagttttctttctcagtaggaaagtgtcattggtcattcccaagatgttacagat

SEQ ID NO: 710840 - DNA, 655 bp, Homo sapiens
cttttgccaagctttctacatgttctttatattgctcatcaaaggccattcattccataccatttcycaagaacgtgctgtggacaaatccctatgcttggtgctctgaaggacatagatggggtcaagggtaaacaagggagactaaatgaccatactaaaaacaagccaacaactgtcaggcaacaaacagactgtacaaccatggtactgacactgtatcgcaaaccatacattcttctgccaaaacaatcaattaacactcctggaaatgaattagaatagtacactgttttcctgcagatgccctagtttgctgaggataatggcttccagctccatccatgtgcctgcaaaggacatgatctcgttcctgtttatggcttcatagcattcaatcgtgtatatgtaccacattctctttatccagtctatcactgatggacagttgggttgattccacgtctttgctattgtgaatagtgctgcaatgaacatacacatccatgtatctttgtaatagaatgatttgtcttcttttgggtgtattcccagtaatgggattgctgggtcaaatggggagggagagcattaggaaaaatagttaatgcatgctgggcttaatacctaggtgatgggttgataggtgcagcaa

SEQ ID NO: 710841 - DNA, 655 bp, Homo sapiens
cttttgccaagctttctacatgttctttatattgctcatcaaaggccattcattccataccatttcccaagaacgtgctgtggacaaatccctaygcttggtgctctgaaggacatagatggggtcaagggtaaacaagggagactaaatgaccatactaaaaacaagccaacaactgtcaggcaacaaacagactgtacaaccatggtactgacactgtatcgcaaaccatacattcttctgccaaaacaatcaattaacactcctggaaatgaattagaatagtacactgttttcctgcagatgccctagtttgctgaggataatggcttccagctccatccatgtgcctgcaaaggacatgatctcgttcctgtttatggcttcatagcattcaatcgtgtatatgtaccacattctctttatccagtctatcactgatggacagttgggttgattccacgtctttgctattgtgaatagtgctgcaatgaacatacacatccatgtatctttgtaatagaatgatttgtcttcttttgggtgtattcccagtaatgggattgctgggtcaaatggggagggagagcattaggaaaaatagttaatgcatgctgggcttaatacctaggtgatgggttgataggtgcagcaa

SEQ ID NO: 710842 - DNA, 655 bp, Homo sapiens
cttttgccaagctttctacatgttctttatattgctcatcaaaggccattcattccataccatttcccaagaacgtgctgtggacaaatccctatgcttggtgctctgaaggacatagatggggtcaagggtaaacaagggagactaaatgaccatactaaaaacaagccaacaactgtmaggcaacaaacagactgtacaaccatggtactgacactgtatcgcaaaccatacattcttctgccaaaacaatcaattaacactcctggaaatgaattagaatagtacactgttttcctgcagatgccctagtttgctgaggataatggcttccagctccatccatgtgcctgcaaaggacatgatctcgttcctgtttatggcttcatagcattcaatcgtgtatatgtaccacattctctttatccagtctatcactgatggacagttgggttgattccacgtctttgctattgtgaatagtgctgcaatgaacatacacatccatgtatctttgtaatagaatgatttgtcttcttttgggtgtattcccagtaatgggattgctgggtcaaatggggagggagagcattaggaaaaatagttaatgcatgctgggcttaatacctaggtgatgggttgataggtgcagcaa

SEQ ID NO: 710843 - DNA, 655 bp, Homo sapiens
cttttgccaagctttctacatgttctttatattgctcatcaaaggccattcattccataccatttcccaagaacgtgctgtggacaaatccctatgcttggtgctctgaaggacatagatggggtcaagggtaaacaagggagactaaatgaccatactaaaaacaagccaacaactgtcaggcaacaaacagactgtacaaccatggtactgacactgtatcgcaaaccatacattcttctgccaaaacaatcaattaacactcctggaaatgaattagaatagtacactgttttcctgcagatgccctagtttgctgaggataatggcttccagctccatccatgtgcctgcaaaggacatgatctcgttcctgtttatggcttcatagcattcaatsgtgtatatgtaccacattctctttatccagtctatcactgatggacagttgggttgattccacgtctttgctattgtgaatagtgctgcaatgaacatacacatccatgtatctttgtaatagaatgatttgtcttcttttgggtgtattcccagtaatgggattgctgggtcaaatggggagggagagcattaggaaaaatagttaatgcatgctgggcttaatacctaggtgatgggttgataggtgcagcaa

SEQ ID NO: 710844 - DNA, 655 bp, Homo sapiens
cttttgccaagctttctacatgttctttatattgctcatcaaaggccattcattccataccatttcccaagaacgtgctgtggacaaatccctatgcttggtgctctgaaggacatagatggggtcaagggtaaacaagggagactaaatgaccatactaaaaacaagccaacaactgtcaggcaacaaacagactgtacaaccatggtactgacactgtatcgcaaaccatacattcttctgccaaaacaatcaattaacactcctggaaatgaattagaatagtacactgttttcctgcagatgccctagtttgctgaggataatggcttccagctccatccatgtgcctgcaaaggacatgatctcgttcctgtttatggcttcatagcattcaatcgtgtatatgtaccacattytctttatccagtctatcactgatggacagttgggttgattccacgtctttgctattgtgaatagtgctgcaatgaacatacacatccatgtatctttgtaatagaatgatttgtcttcttttgggtgtattcccagtaatgggattgctgggtcaaatggggagggagagcattaggaaaaatagttaatgcatgctgggcttaatacctaggtgatgggttgataggtgcagcaa

SEQ ID NO: 710845 - DNA, 1525 bp, Homo sapiens
atttctacggagacagtaggtttcccattggattgttgtcagatgaattgaccttatctcttttcaacccttactctcagaaagatgcagaaatgcagcaactattgcagggattccgtgagaccaaggacctgtctccatagcagggtgatgttgcctttagtaataattataatgataaaaatatcatctgatgtttatggaacaatgccaagtactagaacagtggttctcaaccaggggcagttttagcctcccaggggacacttggaaatgtctggagacatatttgatggtgatgatggagaagatggtggtccgtggggggggtgctaacatctgatggatagaagctgaggatgttgctaaacatcctgtaatgcacgagacagtgtccctaacctccaacaaagaatgatccctcacaaaatgaaaagagtgttacagttgagcaacctttcagtagactgaggcttttacacatatttagccttcaaaataaccctataagacacacagttattgtccccactttacagatgagcatatttaagcttgaaggaactagctccaattgttttgacctttgaatgctctcaggtttctttgttaagatctatttggttctatggccatagcagaacatttaggtttgttcagtggctgggaattggttccctcaaatgtcaccatggaagttattcagcttaagctgacccagtccctctcccattctgctgactaacagctggtggctggagctgcggggagaagatattatataatgtctacaaaagtaacgaaaagttgatttaactgctaagataagcaaccagcaagatagaatttacactgatttaaaaatatgtttgctgagcataatatctagactgccccccacaccctctgttctttattcctgacttctgatagtgctgtggcatgtgctgttgagaaatcagaggtctcaatgccatgagaatcagacaagaggcaatctccacactgcaaccatacacagaattaggtcattgaattccaagagtattgggtcctttggaagacaaactctgttattctttttttttttttttcctttttgataaatgcctacctccttttaaaaatatttccgacaggaaaatcagactttttcttttgaatcatttctctgcatctgggttggatgttgactacttcttctctttcctctgctctttttctatccttttcgctatttttttcaacctttttcacagttgtttctatttccttcttctcccctctccttataatagctcccactgtgcaccaggcaaatcagtatggttgggtcaataagggcaaagacctctttagagtgrtggggaggcaccaactttgaagtctttggtaaatgaataaaaaccccctgaaagtttttgaaacctaagctgggtacaacagggtacaaatagaaataatttttcccctcacaattttcaaaaactttctatcctaaccagctatctgccttgtcctactg

SEQ ID NO: 710846 - DNA, 1525 bp, Homo sapiens
atttctacggagacagtaggtttcccattggattgttgtcagatgaattgaccttatctcttttcaacccttactctcagaaagatgcagaaatgcagcaactattgcagggattccgtgagaccaaggacctgtctccatagcagggtgatgttgcctttagtaataattataatgataaaaatatcatctgatgtttatggaacaatgccaagtactagaacagtggttctcaaccaggggcagttttagcctcccaggggacacttggaaatgtctggagacatatttgatggtgatgatggagaagatggtggtccgtggggggggtgctaacatctgatggatagaagctgaggatgttgctaaacatcctgtaatgcacgagacagtgtccctaacctccaacaaagaatgatccctcacaaaatgaaaagagtgttacagttgagcaacctttcagtagactgaggcttttacacatatttagccttcaaaataaccctataagacacacagttattgtccccactttacagatgagcatatttaagcttgaaggaactagctccaattgttttgacctttgaatgctctcaggtttctttgttaagatctatttggttctatggccatagcagaacatttaggtttgttcagtggctgggaattggttccctcaaatgtcaccatggaagttattcagcttaagctgacccagtccctctcccattctgctgactaacagctggtggctggagctgcggggagaagatattatataatgtctacaaaagtaacgaaaagttgatttaactgctaagataagcaaccagcaagatagaatttacactgatttaaaaatatgtttgctgagcataatatctagactgccccccacaccctctgttctttattcctgacttctgatagtgctgtggcatgtgctgttgagaaatcagaggtctcaatgccatgagaatcagacaagaggcaatctccacactgcaaccatacacagaattaggtcattgaattccaagagtattgggtcctttggaagacaaactctgttattctttttttttttttttcctttttgataaatgcctacctccttttaaaaatatttccgacaggaaaatcagactttttcttttgaatcatttctctgcatctgggttggatgttgactacttcttctctttcctctgctctttttctatccttttcgctatttttttcaacctttttcacagttgtttctatttccttcttctcccctctccttataatagctcccactgtgcaccaggcaaatcagtatggttgggtcaataagggcaaagacctctttagagtggtggggaggcaccmactttgaagtctttggtaaatgaataaaaaccccctgaaagtttttgaaacctaagctgggtacaacagggtacaaatagaaataatttttcccctcacaattttcaaaaactttctatcctaaccagctatctgccttgtcctactg

SEQ ID NO: 710847 - DNA, 1525 bp, Homo sapiens
atttctacggagacagtaggtttcccattggattgttgtcagatgaattgaccttatctcttttcaacccttactctcagaaagatgcagaaatgcagcaactattgcagggattccgtgagaccaaggacctgtctccatagcagggtgatgttgcctttagtaataattataatgataaaaatatcatctgatgtttatggaacaatgccaagtactagaacagtggttctcaaccaggggcagttttagcctcccaggggacacttggaaatgtctggagacatatttgatggtgatgatggagaagatggtggtccgtggggggggtgctaacatctgatggatagaagctgaggatgttgctaaacatcctgtaatgcacgagacagtgtccctaacctccaacaaagaatgatccctcacaaaatgaaaagagtgttacagttgagcaacctttcagtagactgaggcttttacacatatttagccttcaaaataaccctataagacacacagttattgtccccactttacagatgagcatatttaagcttgaaggaactagctccaattgttttgacctttgaatgctctcaggtttctttgttaagatctatttggttctatggccatagcagaacatttaggtttgttcagtggctgggaattggttccctcaaatgtcaccatggaagttattcagcttaagctgacccagtccctctcccattctgctgactaacagctggtggctggagctgcggggagaagatattatataatgtctacaaaagtaacgaaaagttgatttaactgctaagataagcaaccagcaagatagaatttacactgatttaaaaatatgtttgctgagcataatatctagactgccccccacaccctctgttctttattcctgacttctgatagtgctgtggcatgtgctgttgagaaatcagaggtctcaatgccatgagaatcagacaagaggcaatctccacactgcaaccatacacagaattaggtcattgaattccaagagtattgggtcctttggaagacaaactctgttattctttttttttttttttcctttttgataaatgcctacctccttttaaaaatatttccgacaggaaaatcagactttttcttttgaatcatttctctgcatctgggttggatgttgactacttcttctctttcctctgctctttttctatccttttcgctatttttttcaacctttttcacagttgtttctatttccttcttctcccctctccttataatagctcccactgtgcaccaggcaaatcagtatggttgggtcaataagggcaaagacctctttagagtggtggggaggcaccaactttgaagtctttggtaaatgaataaaaaycccctgaaagtttttgaaacctaagctgggtacaacagggtacaaatagaaataatttttcccctcacaattttcaaaaactttctatcctaaccagctatctgccttgtcctactg

SEQ ID NO: 710848 - DNA, 885 bp, Homo sapiens
ccttcttggtcttgaggtccctatatcattttgcagacatttagggagcaggaaaatccatcaagaaggaaggtggtaactcctttctgaggactgggatatgcaaccacagtaagtgtgctcttgacaagaacctaggatgtccatctttttggtggccttccctttggttctttggtctttagttcactgaaaggggtatatgaaccccttattcaatgagaaataacacctttatgtgtaattttctaaaactttctcattttggcaaaactgattgtaactggttatttytaacatatgttccttcttccaatctgagacatggggaaaattcactctaatttccacagtttgactaattctgcttggctatagctgttctttatgtgcagtgcagctttcttccactgcctgctcactaaagggtcagggacatggaaagccaagtgggctgagccgtaaatggcacttccagatcctgcagtaagctagcaaaggagaaaccataccaagtgcaggcatgatttagtgaatcagagtggatgacttcagtgctgcaaaatgtaaataacctctgtggataacttagctactaacagggcaaaacccctaagtcagtggacttaataaatatgattgaagaggcccattactttgcaatttttgcaggacttacagctgagcgtttttgttgttgttgttgtttttaaaccagtctctctctttccagacttcccctttgcctcttctctggtcccaccctcaacacaaaacagctgcccaggtatttagctaaactgtgaatggagctacaattaggatgaggttaatgattgttttcttggggcacaaatattgtttaaatttgtgttaaactctggc

SEQ ID NO: 710849 - DNA, 885 bp, Homo sapiens
ccttcttggtcttgaggtccctatatcattttgcagacatttagggagcaggaaaatccatcaagaaggaaggtggtaactcctttctgaggactgggatatgcaaccacagtaagtgtgctcttgacaagaacctaggatgtccatctttttggtggccttccctttggttctttggtctttagttcactgaaaggggtatatgaaccccttattcaatgagaaataacacctttatgtgtaattttctaaaactttctcattttggcaaaactgattgtaactggttatttctaacatatgttcyttcttccaatctgagacatggggaaaattcactctaatttccacagtttgactaattctgcttggctatagctgttctttatgtgcagtgcagctttcttccactgcctgctcactaaagggtcagggacatggaaagccaagtgggctgagccgtaaatggcacttccagatcctgcagtaagctagcaaaggagaaaccataccaagtgcaggcatgatttagtgaatcagagtggatgacttcagtgctgcaaaatgtaaataacctctgtggataacttagctactaacagggcaaaacccctaagtcagtggacttaataaatatgattgaagaggcccattactttgcaatttttgcaggacttacagctgagcgtttttgttgttgttgttgtttttaaaccagtctctctctttccagacttcccctttgcctcttctctggtcccaccctcaacacaaaacagctgcccaggtatttagctaaactgtgaatggagctacaattaggatgaggttaatgattgttttcttggggcacaaatattgtttaaatttgtgttaaactctggc

SEQ ID NO: 710850 - DNA, 885 bp, Homo sapiens
ccttcttggtcttgaggtccctatatcattttgcagacatttagggagcaggaaaatccatcaagaaggaaggtggtaactcctttctgaggactgggatatgcaaccacagtaagtgtgctcttgacaagaacctaggatgtccatctttttggtggccttccctttggttctttggtctttagttcactgaaaggggtatatgaaccccttattcaatgagaaataacacctttatgtgtaattttctaaaactttctcattttggcaaaactgattgtaactggttatttctaacatatgttccttcttccaatctgagacatggggaaaattcactctaatttccacagtttgactaattctgcttggctatagctgttctttatgtgcagtgcagctttcttccactgcctgctcactaaagggtcagggacatggaaagccaagtgggctgagccgtaaatggcacttccagatcctgcagtaagctagcaaaggagaaaccataccaagtgcaggcatgatttagtgaatcagagtggatgacttcagtgctgcaaaatgtaaataacctctgtggataacttagctactaacagggcaaaacccctaagtcagtggacttaataaatatgattgaagaggcccattactttgcaatttttgcaggacttacagctgagcgtttttgttgttgttgttgtttttaaaccagtctctctctttccagacttcccctttgcctcttctctggtcccaccctcaacacaaaacagctgcccaggtatttagctaaactgtgaatggagytacaattaggatgaggttaatgattgttttcttggggcacaaatattgtttaaatttgtgttaaactctggc

SEQ ID NO: 710851 - DNA, 1541 bp, Homo sapiens
gaggctgggtgctgtggctcacgcctgtaatcccagcagtttgggaggctgaggcgggtggatcacctgaggtcaggagttctaggaccagcctgaccarcatggtgaaaccccgtctctactaaaaatacaaaaaaactagcagggcatagtggcaggtgcctataatcccagctacttgggaggctgaggcaggagaattgcttgaacctggcaggcggaggttgcactgagccaaggttgcgccattgcactccagcctgggtgagagagcaagactcctctcaaaaaaaaaaaaaaaaaaaaaaaaaaaaaatgaataaaaataaatgaataaatggaagcccatttaaattatccacatgtttaaacttatgagaattgtaaagaagaatacagctttcattgcatatttagatgactacatggattaggcaacagaatgatactgtgagtggttgaaaagtagattgctttggtctattttagtgaatgattaatctactgattgcttatatgcaaatataaaatgctgtgatattctaaaaactactcttgtgcagtttaagaatgcatgttgaaaccaagcacagttattaatttattcacgttaagcattattgatactgcagagactctcaaagtaatgcaacattcttgagtgttgaccaaattgatcaaattctcttcaattgttgagagtcggcattataacaattgcctaggtaaaaagtattataaaatccaagaaagttttagaagaaacattctaaacttgatattctcttattagtttctgtgaaaagggagtttcttttatacaaatatccccaaatctaagagaacacagcatgttggccagatgtttttatttgttgtcgttatgaagagctgcttctaaacataccccacttcctccattgttttgagtttcttctcttccttcctttactgtattcttctctgccttcctccctccttttcttcctttctgctctctctctttctttctgtcatccctttcactggctgtatactctctatatgttgtatattcgacttttctagaaagagaatctagtgaatctattacttatccttgtcccgttggacaaatctttcagttcaggtcgccccataagctactcaccagatcttagttttggtggcagatgatccagttgctggatccaattggatccactggtgatccaaatagctgtcattagaatagaggccacatgatacactctcctcagagcagatgtaggagcagcaagctttctacacaagcatcttttctatatgttgtctgactgaaaattgttttcagtttagctataaaatacccatgagaattacaatctgttcaacagattactggctaacatgtggtacataagtcaagtgggcaaggctctttaaatcatggggacggtcaaagaatttggagattgaaatgttttgtgtgctcagaactcttatccacttcttttacttattaacaatgtgagcaaaaagcaagatggataagaaatgca

SEQ ID NO: 710852 - DNA, 1541 bp, Homo sapiens
gaggctgggtgctgtggctcacgcctgtaatcccagcagtttgggaggctgaggcgggtggatcacctgaggtcaggagttctaggaccagcctgaccagcrtggtgaaaccccgtctctactaaaaatacaaaaaaactagcagggcatagtggcaggtgcctataatcccagctacttgggaggctgaggcaggagaattgcttgaacctggcaggcggaggttgcactgagccaaggttgcgccattgcactccagcctgggtgagagagcaagactcctctcaaaaaaaaaaaaaaaaaaaaaaaaaaaaaatgaataaaaataaatgaataaatggaagcccatttaaattatccacatgtttaaacttatgagaattgtaaagaagaatacagctttcattgcatatttagatgactacatggattaggcaacagaatgatactgtgagtggttgaaaagtagattgctttggtctattttagtgaatgattaatctactgattgcttatatgcaaatataaaatgctgtgatattctaaaaactactcttgtgcagtttaagaatgcatgttgaaaccaagcacagttattaatttattcacgttaagcattattgatactgcagagactctcaaagtaatgcaacattcttgagtgttgaccaaattgatcaaattctcttcaattgttgagagtcggcattataacaattgcctaggtaaaaagtattataaaatccaagaaagttttagaagaaacattctaaacttgatattctcttattagtttctgtgaaaagggagtttcttttatacaaatatccccaaatctaagagaacacagcatgttggccagatgtttttatttgttgtcgttatgaagagctgcttctaaacataccccacttcctccattgttttgagtttcttctcttccttcctttactgtattcttctctgccttcctccctccttttcttcctttctgctctctctctttctttctgtcatccctttcactggctgtatactctctatatgttgtatattcgacttttctagaaagagaatctagtgaatctattacttatccttgtcccgttggacaaatctttcagttcaggtcgccccataagctactcaccagatcttagttttggtggcagatgatccagttgctggatccaattggatccactggtgatccaaatagctgtcattagaatagaggccacatgatacactctcctcagagcagatgtaggagcagcaagctttctacacaagcatcttttctatatgttgtctgactgaaaattgttttcagtttagctataaaatacccatgagaattacaatctgttcaacagattactggctaacatgtggtacataagtcaagtgggcaaggctctttaaatcatggggacggtcaaagaatttggagattgaaatgttttgtgtgctcagaactcttatccacttcttttacttattaacaatgtgagcaaaaagcaagatggataagaaatgca

SEQ ID NO: 710853 - DNA, 1541 bp, Homo sapiens
gaggctgggtgctgtggctcacgcctgtaatcccagcagtttgggaggctgaggcgggtggatcacctgaggtcaggagttctaggaccagcctgaccagcatggtgaaaccccgtctctactaaaaatacaaaaaaactagcagggcatagtggcaggtgcctataatcccagctacttgggaggctgaggcaggagaattgcttgaacctggcaggcggaggttgcactgagccaaggttgcgccattgcactccagcctgggtgagagagcaagactcctctcaaaaaaaaaaaaaaaaaaaaaaaaaaaaaakgaataaaaataaatgaataaatggaagcccatttaaattatccacatgtttaaacttatgagaattgtaaagaagaatacagctttcattgcatatttagatgactacatggattaggcaacagaatgatactgtgagtggttgaaaagtagattgctttggtctattttagtgaatgattaatctactgattgcttatatgcaaatataaaatgctgtgatattctaaaaactactcttgtgcagtttaagaatgcatgttgaaaccaagcacagttattaatttattcacgttaagcattattgatactgcagagactctcaaagtaatgcaacattcttgagtgttgaccaaattgatcaaattctcttcaattgttgagagtcggcattataacaattgcctaggtaaaaagtattataaaatccaagaaagttttagaagaaacattctaaacttgatattctcttattagtttctgtgaaaagggagtttcttttatacaaatatccccaaatctaagagaacacagcatgttggccagatgtttttatttgttgtcgttatgaagagctgcttctaaacataccccacttcctccattgttttgagtttcttctcttccttcctttactgtattcttctctgccttcctccctccttttcttcctttctgctctctctctttctttctgtcatccctttcactggctgtatactctctatatgttgtatattcgacttttctagaaagagaatctagtgaatctattacttatccttgtcccgttggacaaatctttcagttcaggtcgccccataagctactcaccagatcttagttttggtggcagatgatccagttgctggatccaattggatccactggtgatccaaatagctgtcattagaatagaggccacatgatacactctcctcagagcagatgtaggagcagcaagctttctacacaagcatcttttctatatgttgtctgactgaaaattgttttcagtttagctataaaatacccatgagaattacaatctgttcaacagattactggctaacatgtggtacataagtcaagtgggcaaggctctttaaatcatggggacggtcaaagaatttggagattgaaatgttttgtgtgctcagaactcttatccacttcttttacttattaacaatgtgagcaaaaagcaagatggataagaaatgca

SEQ ID NO: 710854 - DNA, 990 bp, Homo sapiens
tggagggttgttgtgcatccaggtgctcctctgtggattcccctgggggattgtgggcagtggccaggcccaatgctcccagctcccacctgaccttccccttcagcttctctgagccttgagtcaggtggttgtgcagctccttggtgagggacactcacctatctgcaccctatcactgagattggagggggtgacagacagatgtgagaccaagatttttccctcaaattcccatttgtcctctcttttgcatgtcacattcatctttctttcttaagcaccagctttgataacttcaaactcaaaggcaagcacatacataagtatcttaagtagactgtataacccatgaggtcaataacaaggcctatatctatacctaaataaagcatgagaatgacttcgtatcacccatagtgattcttcttttcttatccaactgtatataaatgatcaagaaatggtcacatgccaggagaattttgcaaatgcgagatgctgagagcttgagaagggtggttaagagagagatgtcagaggattcctacaaaatcatgatcaaccatgtgtgctctgataagactaccttgyagtgtgacccaaaactcgtccacaaagttgcaaaaatcttaatgtgaatgcatttatagtggcatcaatcaagagatgaattaagatgtctagctcagcaaagaagaaacctaaacatcacaagctaacacaggacataagaagaggtagccacagggaagacagatgatccacaggtgttacagacagggtgctggactaactagtttttcccattgggaatatcgggtcaggatgatctacatctctatgggtgaaataaattccaagggtcatatgaattacatttatttacccacatctgatgactgatgtgtcacaagattctgtatccacttttgtccaagttcttgacttagctcctgcctcccagccctgtgtttatgctgtaattca

SEQ ID NO: 710855 - DNA, 990 bp, Homo sapiens
tggagggttgttgtgcatccaggtgctcctctgtggattcccctgggggattgtgggcagtggccaggcccaatgctcccagctcccacctgaccttccccttcagcttctctgagccttgagtcaggtggttgtgcagctccttggtgagggacactcacctatctgcaccctatcactgagattggagggggtgacagacagatgtgagaccaagatttttccctcaaattcccatttgtcctctcttttgcatgtcacattcatctttctttcttaagcaccagctttgataacttcaaactcaaaggcaagcacatacataagtatcttaagtagactgtataacccatgaggtcaataacaaggcctatatctatacctaaataaagcatgagaatgacttcgtatcacccatagtgattcttcttttcttatccaactgtatataaatgatcaagaaatggtcacatgccaggagaattttgcaaatgcgagatgctgagagcttgagaagggtggttaagagagagatgtcagaggattcctacaaaatcatgatcaaccatgtgtgctctgataagactaccttgtagtgtgacccaaaactcgtccacaaagttgcaaaaatcttaatgtgaatgcatttatagtggcatcaatcaagagatgaattaagatgtctagctcagcaaagaagaaacctaaacatcacaagctaacacaggacataagaagaggtagccacagggaagacagatgatccacaggtgttacagacagggtgctggactaactagtttttcccattgggaatatcgggtcaggatgatctacatctctatgggtsaaataaattccaagggtcatatgaattacatttatttacccacatctgatgactgatgtgtcacaagattctgtatccacttttgtccaagttcttgacttagctcctgcctcccagccctgtgtttatgctgtaattca

SEQ ID NO: 710856 - DNA, 639 bp, Homo sapiens
tttcccggagcctacaggaacctgatggcaccactgttctgacagtatgtaaaaggggtgcatttttcagctctaaaaatgtctctttaaaaaaaaaaaagaaaggccaggcgcagtggctcacacctgtaatcccagcatttaggcgggaggatcacgatgtcaggagatcgagaccatcctggctaamacggtgaaaccacgtctctactaaaaatacaaaaaattagccgggtgtgggggcgggctcctgtagtcccagctacttggaaggctgaggcgggagaatggcgtgaacctgggaggtggagctcgcagtgagccgagattgcgccaccgcactccagcctgggagaaggagcgagactctctctcaaaaaaaaaaaagaaagaaagaaaaagaaaaaaaaatggaatgctttgcacaaggacgaatttgcatgtcatccttgtgcaaaatatttctctttcaatttctaacataatcagtatcagtgtatgcaacccaaataaaaaaaagtcctgtggggaccacaataatcttcaagactgtgagaagttcctgcttccagagagttggagaatctctccgccctagggagatttgggaggatccgtgtaaagcagagctgtctggac

SEQ ID NO: 710857 - DNA, 639 bp, Homo sapiens
tttcccggagcctacaggaacctgatggcaccactgttctgacagtatgtaaaaggggtgcatttttcagctctaaaaatgtctctttaaaaaaaaaaaagaaaggccaggcgcagtggctcacacctgtaatcccagcatttaggcgggaggatcacgatgtcaggagatcgagaccatcctggctaaaacggtgaaaccacgtctctactaaaaatacaaaaaattagccgggtgtgggggcgggctcctgtagtcccagctacttggaaggctgaggcgggagaatggcgtgaacctgggaggtggagctcgcagtgagccgagattgcgccaccgcactccagcctgggagaaggagcgagactctstctcaaaaaaaaaaaagaaagaaagaaaaagaaaaaaaaatggaatgctttgcacaaggacgaatttgcatgtcatccttgtgcaaaatatttctctttcaatttctaacataatcagtatcagtgtatgcaacccaaataaaaaaaagtcctgtggggaccacaataatcttcaagactgtgagaagttcctgcttccagagagttggagaatctctccgccctagggagatttgggaggatccgtgtaaagcagagctgtctggac

SEQ ID NO: 710858 - DNA, 634 bp, Homo sapiens
aggggaagcctctacaacgcttatttctcccttagagtaaactaacttatttgtaaaagaaaactagaagactaaatagttctcacctggcctgatagagcaaacatgcttcttcaagaattgaactaagagaagactttagaccctcagcattcatcttttaattttgatgtatgcattcatgtatcttttttttttttttgagttggactttcrctcttgttgcccaggctagagtgcaatggcacaatctcagctcactgcaacctccacctcctgggttcaagtgattctcctgcctcagcctcccaagtagctgggattacaggcatgtgctaccacgcccggctaaatttttttgtatttagtagagaaggggtttcactctgttggtcaggctgctgttgaactcctgaccttaggtgatccgcccgcctcggcctcccaaagtgctgggattacaggcatgagtcaccgcacccggcctcttctaagtatttttgacagaatttttaaaatacgtattattccaaaacgcaataatatagcctaataatctttcaataaaattcaatatatttttatttactgaggtgttcacttatcactgattaggaattatggaatgggaagg

SEQ ID NO: 710859 - DNA, 634 bp, Homo sapiens
aggggaagcctctacaacgcttatttctcccttagagtaaactaacttatttgtaaaagaaaactagaagactaaatagttctcacctggcctgatagagcaaacatgcttcttcaagaattgaactaagagaagactttagaccctcagcattcatcttttaattttgatgtatgcattcatgtatcttttttttttttttgagttggactttcactcttgttgcccaggctasagtgcaatggcacaatctcagctcactgcaacctccacctcctgggttcaagtgattctcctgcctcagcctcccaagtagctgggattacaggcatgtgctaccacgcccggctaaatttttttgtatttagtagagaaggggtttcactctgttggtcaggctgctgttgaactcctgaccttaggtgatccgcccgcctcggcctcccaaagtgctgggattacaggcatgagtcaccgcacccggcctcttctaagtatttttgacagaatttttaaaatacgtattattccaaaacgcaataatatagcctaataatctttcaataaaattcaatatatttttatttactgaggtgttcacttatcactgattaggaattatggaatgggaagg

SEQ ID NO: 710860 - DNA, 555 bp, Homo sapiens
tatagtggcagcattccccctactttctgtaacttgttggaacttactatgattgtagcatgaagaattctgtttagggtttgtcagtttctgcagctactttgtatgttccatgagattggagatgttgtcttactgmtctctatgatctctgaagcaaagtgcttggttcaaagcaaacactgaaaagacatttatcaaatcaatgaaacaaagcctggggaaatcttccactcattgtaaatgtccagcccactgactcactcagtgtgtgattcacacatccattcatttatttttcattcatttcttttcaataatatgaaccactctgggtttcagttttgtcactataaaatgagagtcatgatccctctttcattaccttactagaaatttgtaaggtttaaaagagatgatgtttaaaaggcacctatcaatgtgtaaaattaagaaaaagaaccatggggagtgaggtattgaaaatatagatacattttggcattttttcaggaaatgattttgttaaagcagcaatatcacaaaattaggtat

SEQ ID NO: 710861 - DNA, 555 bp, Homo sapiens
tatagtggcagcattccccctactttctgtaacttgttggaacttactatgattgtagcatgaagaattctgtttagggtttgtcagtttctgcagctactttgtatgttccatgagattggagatgttgtcttactgctctctatgatctctgaagcaaagtgcttggttcaaagcaaacactgaaaakacatttatcaaatcaatgaaacaaagcctggggaaatcttccactcattgtaaatgtccagcccactgactcactcagtgtgtgattcacacatccattcatttatttttcattcatttcttttcaataatatgaaccactctgggtttcagttttgtcactataaaatgagagtcatgatccctctttcattaccttactagaaatttgtaaggtttaaaagagatgatgtttaaaaggcacctatcaatgtgtaaaattaagaaaaagaaccatggggagtgaggtattgaaaatatagatacattttggcattttttcaggaaatgattttgttaaagcagcaatatcacaaaattaggtat

SEQ ID NO: 710862 - DNA, 1778 bp, Homo sapiens
agaacattggaactcatcagcttttggggccagcttgaggatagatttacagggtctatgtctaccttgtctccatagactttctcttaaagacgaaaagtgctcaagatattggacaaacagaaagacaatagatgatggtgttaaaagctaaattttgcaaaggaacaatataatttgatgtgaaatcaaaagcctaagaaaccagatataaataacactccagatttcaagcaataattgaaacttagcttcatcatgaaacttactttgctgtagtaggcaaagtagccttgagtaggtggactttcaaggggtcttagataagcacactgttttcaaggtcctgttttgcagtggtaggcttctttttggaatcttagtaggacctctaggatagttggtgtgctctgatcaatgaatggccaataggaacacacctgaagcttaaaaaatgttagattttttttttttggcactctagggaaactctgggaacatctcagcaaagaaaaattggcaggggattgttatagggtgtatgggtatatgttgagtgatttttaattttatttatttatttaaataaataaataaataggctggagtgcagtggtgcaatattggctcactgcaacctccgcctcccaagttcaagtgattcttctgcctcagcctcccaagtagctgggattacaggtgcccaccaccacgcttggctaattttttgtatttttagtagagatggggtttcaccatggtggtcaggatggtctctatctcttgacctcgtgatctgcccacctcagcctcccaaagtgctaggattacaagtgtgagccaccacaccctgcttatgttgagtgatttttttaaggagaaaataggaaagcaagttataagtttaaagttctcaatttggtgagtgaatatattagtaatttttatctagtgtattagctcaagctgccataacaaaatatcatatactgggcagcttaaacaatagaaattattttattgccgttctggaggctagaagtctgagatcagggtgtcagcatggctggattctggttagggctctcttcctggcttatgcatggctgccttcttcctgtgtcctcacattgcagaagatcagagagtgagcaagctctctggtgtctctgtataagggcactaattatatcacaaggaccccaccttcatgatcttctttaaaccaaattacctcccaaaagtcccatctccagataacatcccgttggagattggggcttacacatatgaattttcagggaaagcagttgaggtccattgcatctaggaagcaggaaaattaaagcacatgggaatggtcttgytaagattcagcaaccactgagtaatggaacattattcagaagacaggatgctcagtcatttttgtgttgcagagtggcattgcctaagtcttgttccatatataatcatggattggccttgtctatgtcttggtctgagggttgtttatgttcttttgtgaaaatttactgacttgttctcagaaaggctgtttttcttagtagattagaaacatcttcattactacctgttgtttttaatggccttaattcctctttttgcctttaatgaataaaaggaatatgtaaattattatttcatttgattgcaaggtgataactctttggaaaagaatatgagttaacttttatctttattaaagtaatatgtatatatgcattatagaaaaaataaaaaatatgaaaaagcta

SEQ ID NO: 710863 - DNA, 1149 bp, Homo sapiens
tttctgcccctaagatgaggaaatgttttgttggagacaatcaaaatctcttgctgagtagggagtgacatgagttttgagaaaactctgtcactctcagtgctatgagaaaatgtgtgctgagtcccatcccagtgggagttcagaaggagagacgatatgtccaactccaagagctgctcatttgcaggtagcagttgacctctgctcctgtactctagacttggaaggatttaagcacgtttggtggcttattacaaactcatcatcctaaattatgaaatgccctttgtgcctctcagtgcctgtgtctggcattaggtgtgtcgtggatgtactttttctagttctttggaaggcaggtcactgagtagcagcagtgccaacctcctctctgatagagggtgtgtggtatgtatgagacccagggcaggtgtcacagcacaaagtartgattatcggtaatatgatttgagtacttagtatgtgccagatgctgttttaagggctttgggtaattaacttatttaattctcaaagcaaacccatagtaggtaaaatttttatccacctattacatgaaggaactataatagttattggtgctgtttggcattttttctggtttttcttctaagcataccatgagtttatagtttcccactcactttgaagttaggtatggccatgtgacttgttttgaccaatggcgtatgagcataagtggcatgtatctcttcctggtagcagctttaagagccagcctgtgattggttccattccctctgtcacagagactccaatgctccatgtgtgtcaatctgagtcccaaggggagggtcatgagtaccaaaacccccagacaatccatgatggaaatggagcatgagtgaaaaatacatcgttttattttcaatcaccgtgagcctgggatcgcttgttattagagcatagcctattctatcctgatacaggaaaggaaatcacagaggctaaattagcttctcaaggtcacattactaagtgaaagaaccaaggtttgggctctgacattctgtctccggagtccacctgtctctcacattagtacatagcatacctagctagtggctccaaattggagcttaaggagaagaatcaaaagctctc

SEQ ID NO: 710864 - DNA, 1149 bp, Homo sapiens
tttctgcccctaagatgaggaaatgttttgttggagacaatcaaaatctcttgctgagtagggagtgacatgagttttgagaaaactctgtcactctcagtgctatgagaaaatgtgtgctgagtcccatcccagtgggagttcagaaggagagacgatatgtccaactccaagagctgctcatttgcaggtagcagttgacctctgctcctgtactctagacttggaaggatttaagcacgtttggtggcttattacaaactcatcatcctaaattatgaaatgccctttgtgcctctcagtgcctgtgtctggcattaggtgtgtcgtggatgtactttttctagttctttggaaggcaggtcactgagtagcagcagtgccaacctcctctctgatagagggtgtgtggtatgtatgagacccagggcaggtgtcacagcacaaagtagtgattatcggtaatatgatttgagtacttagtatgtgccagatgctgttttaagggctttgggtaattaacttatttaattctcaaagcaaacccatagtaggtaaaatttttatccacctattacatgaaggaactataatagttattggtgctgtttggcattttttctggtttttcttctaagcataccatgagtttatagtttcccactcactttgaagttaggtatggccatgtgacttgttttgaccaatggcgtatgagcataagtggcatgtatctcttcctggtagcagctttaagagccagcctgtgattggttccattccctctgtcacagagactccaatgctccatgtgtgtcaatctgagtcccaaggggagggtcatgagtaccaaaacccccagacaatccatgatggaaatggagcatgagtgaaaaatacatcgttttattttcaatcaccgtgagcctgggatygcttgttattagagcatagcctattctatcctgatacaggaaaggaaatcacagaggctaaattagcttctcaaggtcacattactaagtgaaagaaccaaggtttgggctctgacattctgtctccggagtccacctgtctctcacattagtacatagcatacctagctagtggctccaaattggagcttaaggagaagaatcaaaagctctc

SEQ ID NO: 710865 - DNA, 1818 bp, Homo sapiens
cttggtgggaaggcaagctggtgccctctcatgctttgctggccaggaaagaggttttttgtttgtttgttttcaggaggcagggcttggtgtctttaacaattttataatacttgttaatctctcctttttttttttttcgtttgagacggagtctggctctgtcgcccaggctggagtacagtggcgtgatctcggctcactgcaacctccgcctcccaggtttacaccattctcctgcctcagtctcccaagtagctgggactacaggcgcgtgccaccacgcccaactaattttttgtatttttagtagagacagggtttcaccatgttagccaggatggtctcaatctcctgacctcgtgatccacccacctcggcctcccaaagtgttgggattacaggtgtgagccactgcgcctggcctgttaatctctcctttataacaaagaggaagcagctcttaggtacagagcttcccatcactaacatttaactagaattaaacaactctgggatgtttaaacaagcatttttatgttttctttctttcatttgtggcagacaatactggtttacctgtacaataagtgaaacagagttaccatatgaaatgcattttttacaaacctaggataatttcagatgagattgagcacattcagggtggtatggcagtagacccaagataatttcaaagaaaaatattaagtaaatagtcatacaggttttacaaagaaatgccaggatagtgaagttgggaagccaagagctaaaggtggggaaacactgccttgggctttaaagttcagagccaggttcaaatggccccgtgcttgtgaagccttcctcaatccctcctctgccacatcagccaccggctccctccccaccttaagatatttagctcacgctgtgagtgttatcattggctctgtatcttttagccagagtctgagtctttttatccctgttagcactctcagttctttctatccttattcaaatgacatggttttggatccttctccattttagtcaccctcttgcagataaagatgattttgtcaatgttcttcagaaatttgatacttcaattgtagctcctgtgatctggtacttcacttctattgatataacccaagattgtgtgtgtgtgtgtgtktgtgtgtgtgtgtgtaggagagaaagaaagacagagaaacatttttcctccaataaaatgggctcatattatacaaattgtttcctaacttgtttttttctcacttaatcacacgtcacaaacatcttttcaaagcaataaatatatatctcctctatctttgttaattgctacataatagcctattgatgggtgtgtcatgatttagttaaacagtaatttagttttttccgaagttcccccaactacaaaccagtctaataagctcaagccagaatttgtgacaaactattgtcattatctcttggaggggttccctgggatctcttttggccagtgttccctgcgtgtctcgcctctgtgccgggagctgttggagaggctgggaaggatgagcaggctggggaggacagatcatcacagtactgggtgctagagggtgttcctaaatgttctgggagcaggaaggaaactctggctcattctgtctcagaaaggttgaagatggcttcacataggcggagatacttaattcaggctttgaagaataagtaggaatccagttttgaagactaaattgagcattggctcagctgaagccactctggacatcccatcgaatctaggaccaagctcctgaacaactcagataa

SEQ ID NO: 710866 - DNA, 643 bp, Homo sapiens
tcatgcctgtaatcccagcactttgggaggccgaggcaggaggatcacgaggtcaggagatcaagaccatcctggctaacacggtgaaaccccgtctctactaaaaatacaaaaaattagccgggcgtggtggcgggtgcctgtggtcccagctactcgggaggctgaggcaggagaatggcgtgaacctgggaggcagagcttgcagtgagccgagatcaggccactgcactccaactccagcctgggcgacagaacgagactctgtctcaaaaaaaaaaagaaaaaaaaaaggaaaatattgatstgaagttacttgcaagtccagaactctgtgtgctggagcaactagaggaggctttacagaggaggagtggcctgagctggccctgaaaggtggccagggtttggataatcagagctgatatagtttggatgtgtgtcccctcccaaatctcctattgaaatgtaatccccagtgttggaggtgaggcctggtgagaggcgattggattatggggtgcatttccatttcttatgaaaatttagcaacatccctcttggtgctgttgtggcgacagtgagttcaggtgagatctggttgtttaagtgtgtggctcctcccctctggctcctgctttca

SEQ ID NO: 710867 - DNA, 652 bp, Homo sapiens
ggtggaggggaccagactgagggcttgtcgaagttttcttactatttcctatcggtgtgaattcagctttctcatcctgtacataactgtcacatgcaatcttaggaacgcactttacttccctcttgcaggcagaagacacatctgtaatcagcctcctctgttggagagaaaatacctgcatgagcgaagcgaattgaatagggggaggagagcctctttttgccagctgagagcctgagcctggctctgtggagccacctgggccttgcatggtgacaggaactctttgctgacaagcccttagtctgtgggaaggtttatctgccagcgctttaataaactcttcattatagcagctcaaacctggtgacctttaccctctgtgggggcctccatgtgtcacgcactatttattcactgcctcgagacttccagkcaggaaggtcgagacctgctgtaatttgataagcatttgggatgtcaaagtacagaatccagcttcttttctcctttggacaacagaaatagtgtgctgatgtttggtgtttcttcctctcccattcctctgcagtagtgattatactctcatggctttctttcttttggtttgtcacatctgtggatgaaagggagagatgggcttgggttt

SEQ ID NO: 710868 - DNA, 652 bp, Homo sapiens
ggtggaggggaccagactgagggcttgtcgaagttttcttactatttcctatcggtgtgaattcagctttctcatcctgtacataactgtcacatgcaatcttaggaacgcactttacttccctcttgcaggcagaagacacatctgtaatcagcctcctctgttggagagaaaatacctgcatgagcgaagcgaattgaatagggggaggagagcctctttttgccagctgagagcctgagcctggctctgtggagccacctgggccttgcatggtgacaggaactctttgctgacaagcccttagtctgtgggaaggtttatctgccagcgctttaataaactcttcattatagcagctcaaacctggtgacctttaccctctgtgggggcctccatgtgtcacgcactatttattcactgcctcgagacttccagtcaggaaggtcgagacctgctgtaatttgataagcatttgggatgtcaaagtacagaatccagcttcttttctcytttggacaacagaaatagtgtgctgatgtttggtgtttcttcctctcccattcctctgcagtagtgattatactctcatggctttctttcttttggtttgtcacatctgtggatgaaagggagagatgggcttgggttt

SEQ ID NO: 710869 - DNA, 3090 bp, Homo sapiens
gttagacaagaaacactctgaaaactttcagatgagggctcttgaaggaaaggtaatttgcttttttggggggtggtgaaagttcatacttaggttatgagccacgacggtcctgcaaatggggccacttggacaaaatcattcacccttccttccatacatcctagaacagggaacaggcccctgctgattttacacccccaagaccaccatggtgcttttcttgcagtcggattgcaaaaggggmagccccatttctctgagcccttgccttacctggccacaagggggcgtaaaagagaccctttttttttttttttttttttttttccctctgcgtgcagaggtaacctgtgaggctgcgcacctctgggccaggtgtggctgatggatgactcggtccgctgggtttgggcggactaaaagggcgctggacatctgcctgctcatgggagtcagcctcaccccaaatctgaaaattcattatgctggggcaagacaggcttccgctgtacaggaaataaatggatgggaggactgtggcgggtgaaagtgtgggctttggaggctctgggacttatttgctgtgtgattttaagtgcactagttagcttttttgagtctcaatttcgtaaactataaaatggggataataatctcactttataaggttcatgagaggagtccatgaaattataaatataataagttggcatgaaagtgacgggtactcaatgcagaatggtcattatgatggctctgtccctccgcagccccaccctgcccacaaaatgtgctgcctgcagagaatccaggcatatcccactgcctttttcatattttaacagaaagttctacttaaatatacagtaagtcttctaatggaagttgtctttttttctttttttttttgagacagggtttcactctgtcacccaggctggagcacagtggcacaatcacagctcactccagcctctagttcccagcctcaggcgatcctcccatctcagcctcccgagtagctgggaccacaggcacatgaaaccactcctagctaatttttctatatttttttttgtagagatggggttcctccatattgcccaggctggtctcaaacccttgggctcaagtgatctgcctcccttggcctcccaaagtgttgtgattacaggcatgaaccactgtgcctggccagaagcagtctttgaatctaaatatatacatatgtgtgtgtatatatatttattcatgcatgcattaactactgagtgcctagcatgtgccaggtactctggaggcgctgggcataaaattgagagcagagagcaagcccagtgcctgccctcatggagctcccagtctaggccagtaatgttcaatagaatgttctgtggtgatagaaatacttatctgtgatgtccaatatggtagccattagccacatgtggctactgaacacttgaattgtggtagtgacaggaagtgtattttcattttaaatagtcacacatgactaatggttactctattggatggtagaggtctagaggagaaacatgaaaatgtttagcacagagcctggcatacagtcagtattcaataagtgcatctttcctttccctccctccactatgtggcacctggtaccatgtttgttaactcctctgctgctgttacatgttcttaaggatgagtaaggtcatctcaaacagactctagaaagataggcctcaccgggaggcggagcttgcagtgagccgagatcccgccactgcactccagcctgggcgacagagcgagactccgtctcaaaaaaaaaaaaaaaaaaaaaaaaaaaaaaaaaaaaaaaaaaagaaagataggcctcagtgtggattatttatatgtgtcttccaggattttgcacacagtaagtgctctttaaatgcctattaaagagacaatatggtgtaagaaagggaacatgctttggcactaagaagaaataaatttatatcttggctccatcactcagccgctgcacaacctgaacaagttactcaagctgtctgggtctcagctttctctctgttcaatggggtgatgatgggctactctgtgggggtagttgtgaaaacagatgaactcatgcatgaaaagaacccagcatggatccttacacaaagctgctctccaaacaggagaaagccaaccagaagacaaatgatgatgcttctttggatgttcccagcttcacagatgtgggccctgtaaccatattcaatgagtgtgactctgttgtcctggctgtgatgacttgctgagggattagcatctgattctagataaacaaatcatattacttacctgtttgttgttgttgttatttatttatttatttttacagtagatctaaggggagaagttcatctcttctctgctggtcccaaccacaagaacttctcattaccaagttaccccttaggtggaggaagctggtctgcagtaagaaataataaaatcaacaacgcatgcaagagaaactgtaatacatagtgggaaaaggcatgtaagtcctggaaatgttcacgccctgacccctgacccctgatccagcctgcagacccagcagaagccctcccaggtcacaggaggctccttactcatccttcacagacattctcctttctgcctgagcagatttgagctgggtttctctcacttgcaatgaaacaatttctaatcaaaacagcaatcatccagacatgccgtctgtcttctattcatctgcatcccatcagaactttgccttgaattctgtcctgccttctcttcccacatctgctgtggcataactcagaacctggagtggtttcggggctggggagagtgctatgtccctgggagttaattagggcagttggagtcattttctgtagtgtttatgtgatgttgcctcaggacaatttagtagcaaaagagcaaatgcaggtgtctctgaagtgcccctcagagaggcagccccatgtgtgcagcagagagcaggctgaatcaggagacagaaacacaggtacaacgtccccgcctgaatgctcgccagtatga

SEQ ID NO: 710870 - DNA, 3090 bp, Homo sapiens
gttagacaagaaacactctgaaaactttcagatgagggctcttgaaggaaaggtaatttgcttttttggggggtggtgaaagttcatacttaggttatgagccacgacggtcctgcaaatggggccacttggacaaaatcattcacccttccttccatacatcctagaacagggaacaggcccctgctgattttacacccccaagaccaccatggtgcttttcttgcagtcggattgcaaaaggggaagccccatttctctgagcccttgccttacctggccacaagggggcgtaaaagagaccctttttttttttttttttttttttttccctctgcgtgcagaggtaacctgtgaggctgcgcacctctgggccaggtgtggctgatggatgactcggtccgctgggtttgggsggactaaaagggcgctggacatctgcctgctcatgggagtcagcctcaccccaaatctgaaaattcattatgctggggcaagacaggcttccgctgtacaggaaataaatggatgggaggactgtggcgggtgaaagtgtgggctttggaggctctgggacttatttgctgtgtgattttaagtgcactagttagcttttttgagtctcaatttcgtaaactataaaatggggataataatctcactttataaggttcatgagaggagtccatgaaattataaatataataagttggcatgaaagtgacgggtactcaatgcagaatggtcattatgatggctctgtccctccgcagccccaccctgcccacaaaatgtgctgcctgcagagaatccaggcatatcccactgcctttttcatattttaacagaaagttctacttaaatatacagtaagtcttctaatggaagttgtctttttttctttttttttttgagacagggtttcactctgtcacccaggctggagcacagtggcacaatcacagctcactccagcctctagttcccagcctcaggcgatcctcccatctcagcctcccgagtagctgggaccacaggcacatgaaaccactcctagctaatttttctatatttttttttgtagagatggggttcctccatattgcccaggctggtctcaaacccttgggctcaagtgatctgcctcccttggcctcccaaagtgttgtgattacaggcatgaaccactgtgcctggccagaagcagtctttgaatctaaatatatacatatgtgtgtgtatatatatttattcatgcatgcattaactactgagtgcctagcatgtgccaggtactctggaggcgctgggcataaaattgagagcagagagcaagcccagtgcctgccctcatggagctcccagtctaggccagtaatgttcaatagaatgttctgtggtgatagaaatacttatctgtgatgtccaatatggtagccattagccacatgtggctactgaacacttgaattgtggtagtgacaggaagtgtattttcattttaaatagtcacacatgactaatggttactctattggatggtagaggtctagaggagaaacatgaaaatgtttagcacagagcctggcatacagtcagtattcaataagtgcatctttcctttccctccctccactatgtggcacctggtaccatgtttgttaactcctctgctgctgttacatgttcttaaggatgagtaaggtcatctcaaacagactctagaaagataggcctcaccgggaggcggagcttgcagtgagccgagatcccgccactgcactccagcctgggcgacagagcgagactccgtctcaaaaaaaaaaaaaaaaaaaaaaaaaaaaaaaaaaaaaaaaaaagaaagataggcctcagtgtggattatttatatgtgtcttccaggattttgcacacagtaagtgctctttaaatgcctattaaagagacaatatggtgtaagaaagggaacatgctttggcactaagaagaaataaatttatatcttggctccatcactcagccgctgcacaacctgaacaagttactcaagctgtctgggtctcagctttctctctgttcaatggggtgatgatgggctactctgtgggggtagttgtgaaaacagatgaactcatgcatgaaaagaacccagcatggatccttacacaaagctgctctccaaacaggagaaagccaaccagaagacaaatgatgatgcttctttggatgttcccagcttcacagatgtgggccctgtaaccatattcaatgagtgtgactctgttgtcctggctgtgatgacttgctgagggattagcatctgattctagataaacaaatcatattacttacctgtttgttgttgttgttatttatttatttatttttacagtagatctaaggggagaagttcatctcttctctgctggtcccaaccacaagaacttctcattaccaagttaccccttaggtggaggaagctggtctgcagtaagaaataataaaatcaacaacgcatgcaagagaaactgtaatacatagtgggaaaaggcatgtaagtcctggaaatgttcacgccctgacccctgacccctgatccagcctgcagacccagcagaagccctcccaggtcacaggaggctccttactcatccttcacagacattctcctttctgcctgagcagatttgagctgggtttctctcacttgcaatgaaacaatttctaatcaaaacagcaatcatccagacatgccgtctgtcttctattcatctgcatcccatcagaactttgccttgaattctgtcctgccttctcttcccacatctgctgtggcataactcagaacctggagtggtttcggggctggggagagtgctatgtccctgggagttaattagggcagttggagtcattttctgtagtgtttatgtgatgttgcctcaggacaatttagtagcaaaagagcaaatgcaggtgtctctgaagtgcccctcagagaggcagccccatgtgtgcagcagagagcaggctgaatcaggagacagaaacacaggtacaacgtccccgcctgaatgctcgccagtatga

SEQ ID NO: 710871 - DNA, 602 bp, Homo sapiens
caaacgatattccaaagtggttataccatttgcattccatccagcagtaaatgagagagttctccttctctacatccttgccaactcttgtatggttagttttttaaattttattcattttaatggtttggagtagtatctaacattgtgcttttaatttgcatttcctgaacgactaaatgatgttgagcatattttcatgtttttttgacatctgtacatcttcttttgcaaagagtctgttcaagtatttggcctccttttttgtcgtttctgttgtgctctttggtttatttcctttttgttttgttttgttttacttttttgttgttgttgcattatgatttaatctaattgcacaaaaatttgaaattacaactcctcctattttctaagaggaaggttatgcacatgattgtgtaatagtcagttgaacccgttgttttacttttttgagacagggtctcactttgttgggcaggctggagtgcagtgccmtgaacatggctcactgcagccttgacctccagggctcaagtggacctcccacctcagcctcccgagtagctggggctacaggcatgcatcaccatgcctggcta

SEQ ID NO: 710872 - DNA, 1302 bp, Homo sapiens
tctccaaatattgcaatctccttgacagcagggccttgctttccaattttttttgaatccttcatagtgcttggcccagaataaggatccaattaatgctctttgtggaacactaattaagtagactcaggccccctcctcgcttgatagtcactctgccagctcctgggaaagaagggaacatccaagaaagcaatgcagagaaaactctwctctcactacattgtgagctgctcaagggcagggaccaggtctcatcaacccccatctccttgcaccagttggaaaaaagaagacaggaagagaaggagggaagaatggctcctcctgttgtattcaggagtctgcttgtgttggctccttctcaggaaaatgagctgggtagtgtgactgagcaagtgggagctctccttgcgtgccttttctggctcttcctgaggctgcttcatcactgtgggcatcccccaggctccctgcctctgccttctgcacttctctttcagtgtagagtgcccccactcctgaggcttctgttactgcctccaaagcttcactcacatcttcagctctaaccttcctccagacttcatgtctgcattcctgcctgttgaatatttttttcttgcaaactccaggtgtccagatccaaactcactgacaactccatcccccatacatactgactgttttcctgattccttagattttgttaataaaacccttcatttttctaatcagtgtcatcattggctctcatcagccacattcagttagtaaggaactttctccaattctttcttcaaaaggtttcatatctcaaccgtcctttcttttcccactgtcaacatcaccactggtatcaacctcttttcactgatctccccagtttctcccagttctaactttttagaccccacaacctgacaaatctgattatactattgctttcatcatttatttccacctggagcatagcacatgaaaatattccaatctcttcctcctaattataatatccctcaacttcagtgctgaggcacaccataatctgacataacagtggtaggtctctctaccaggtagcctgtaggatttatcattgttttgagtttctctctcactaaaattttaatgatgttttcactctttcacagcaaagagacaaaaatgactgataattcgcaatttatgtggctgtcttatgttctatcaagtcttgagcaggtgccaaaaatagattttctctgttcagctgtgatctggtgggaggatattataatctaagagggaaacatagtttta

SEQ ID NO: 710873 - DNA, 894 bp, Homo sapiens
tatttcctttaaatatatttcaaattgatccagttatccacaaatcactatattcaaagttgattaaattcttgagaagcaattaaaaaggaagaaactagtagcgttatatagtgattaactttaagcccataaatagtttgcattcatagcagtttttactgaactgacacaccttactatctttacatgaatttagacaacaatattagacaaaataattttacatattttgtttatcctaatatacatacaattcatcattaaaatcatattacctcattctttgtttaatcaataattattcaatggcttccgggatcattaaatgaaagatagttctatcaataaatcctataggtaaggacagttctctttcttggaacatgcagtaaattttcttatatatggaattgtttaaagaatacagaaaatcagtcatatgtaagcaaattaatcctaggttatggaggcgtttgtaagtaatttgttctttatgatttaaaagtaatgtcaaaaagttagaatactcatattaaaagaaattttcacaaactaaacattaaaactaaattgaaaaagataagaatacttgagagatattgtctaaattaatatattctagccaataaaaacaaactaataacgaaacaaaataccaggaggtagctcttttattttaatacgttttcttcgtatttggaggaatattctcactcactattcttactaatcaagacaaagtgatgtagataattttaaatcatcactagtttatagttactatattgttgccccaaataatacatgaaactcaattaagattatattaaaacatggatccctgcatcaaattcaattttgacactgcccgtyctaacttcttcatataga

SEQ ID NO: 710874 - DNA, 585 bp, Homo sapiens
ttaagtaaccaagagccacataccgaacaattcagagagtccagtgtgtctgattccaaagtcacatggtgtttccacaacgaaacattgtttcctcccagatgtgtgttggctcggggggcaggactatattttaaagcacatcgcatttaggcaggctcctaaattatttagctggcatgtacatgcgaatatcgtcatcatccttcagcgtttgtattcggtgctcatactccactcaatctctcctccccaaaatggctggttctggaacccctaagcacttggcagcatgttaccaactctcagacaggaagttttcattctcttccacagttgatagtcgatgcctgagactttaaggagccacacygcgggcttgagagacgctgggagtcgcagtcaggactgcgaaagaactcaagtgatgattcacctcctgaggtctacttgctcacatctctatggcagataccgggctgcgaattgtggctcccttttgactaaaccttttcactccctgcttagcctggtctctatcctgggtcactgccactgtgagtagtttcgcttctaattctggcc

SEQ ID NO: 710875 - DNA, 876 bp, Homo sapiens
aaactcctactgttatgcttatatagaaatcattctcagaccttccttggattaatttctgttcctagagcaaactggtagttatttctttctttaatagaacatgaacttgtccatcacatcctagaaagttagtcctagggatatcctttaaagcctaaaggagtaaattaagagcaaaaaaaggaagtagaccttgcaacaggtggtgagtgtctgagatatagcactaggagagaaataatatagattgaaaacagaaatccttaaacatttctcatataaacccatgaaagatagatccataaatattgtggggactatggggactaggaagcttggaagtatccctaatctagatagtgatggtaggctaaatatctacggcttccgtaaacgttcctctaaacctccctgtaaaaaacacactaagctgattgtgtaatgagctgatccagtacaattgcctccaatttcattctggaccctgaacaggaggggacatcgtgacaaagcaaattgtctggtatcatgaatttggaacaccgtaagtgatctttactgagggttacattctgtcattgtcagccttttaaggaggccttgccaccagcgcaggggaggtgaagtctaagggaaggtaatattgtcaatgcctgctaattagttctaccctggagattttaactttctrcgaagtttttaaaaacaacttccaaaactctgctgatcctgaaatgttcgagaattcagagttcctagacaatggctactgtcccccttcccactgattaggggagttggcatttcaggaaccagagtttctaagggcgccaaatagaagggctcaaagggaatcagcaggcgatggttact

SEQ ID NO: 710876 - DNA, 642 bp, Homo sapiens
tgaataatcatctacttacagcaattatggtctttgagttaagtttagtttgctgtattttgtacttyatctacttaaggacagtaaggtagatagatccagccaaaagtaataaaatagccataatatccataaaaatataaatatttttggaaactagtgggttttttattatgtatttatttatttagagacagaatctctgtgttgcccaagttggagtgcaatggcatgatctcggctcactgcagcctccacctcctgggctcaagtgattctcatgcttcagcctcctcaagtagtgagattacagatgtgagccaccaatgcctgactaatttttgtatttttagtagagacagggtttctccatgttggccaagctggtctcaaactccagaactcaaagtgatctgccttccaggcctcccaaattgctgggattacaagtgtgggccaccgtgctctggcagaaactcattattaattcttaaactatggggcaccacaccaataaagacacttctacctccatgatgacaacaactagatctaaagcacagtctagagaaaaggcagctgctcaagaacatgcagcagaatctcagagctcccctgttcttcacgtccttattcctactg

SEQ ID NO: 710877 - DNA, 2013 bp, Homo sapiens
tgcttgcatggtttttgatgacaccttgattttaactcagtgagatacatgttagacttctaacctatgaactataagataataaatttgtgttgttatgactcactaagtttgtggtaatttgttttaacagcaatagaaaactaatatactagtttaggtcttcagtatcttttagcttaagcagaatctaattgttcattccctctcaaggtttattctcttcaaatccatctttaatactgctgtcagaatgattgatcaaaaactaaaatttgacagagtcttcattttatttcctaaaactctgtaagctacaaaataaatactaagcatataacgtgaaaaaggaagccctctatgacctggccccactcacctatttagcttcagttttcatcatatacttacaattttgtctactcatgataccaaattgcttgtagcttctactggagaaatttctttagttttaagtaaatggaaataaaagctggttaacttaagtaaaaatagagttcactgaatgggttctagattaattaatgtaaaactcttggaagacaggaatcatctctccagagagctggccacaaatgactcagcaccaacaccaattgccattggtttccatgtgtctgctcaaggcttaaatttctggaatagtcccggtgcggtggctcacatctgtaatcccagcactttgggaggctgaggcaggtggatcacctgaggttgggagttcgagtccagcctggccaacatggtgaaaccctgtctctactaaaaacacaaaaaaattggccgggcatggtggtggatgcctgtaatcccagctactttggaggctgaggcagaagaatcagttgaacctgggaggtggaggttgcagtgcaccaagattacgccattgcattccaggctgggcgacaagagtgaaactccatctcaaaaaaaaaaaaagaaaaaagaaaaaagaaaaaaaaagaaaaaaaaagaaatttctggaatagagaggagtagagtcacttattttatatggaaactctcacttatctcaaatctcactacctccataggccaaccatgtggccaaggagagtgggatagattaattatttcatgcctttgatccaagaactacaatctgtaacgcaaaggagagagagtgaaagctactaggcaaataaaaataaaaattctatacatatatgtggttcataactttatgccattaccatctttcttcacctagaataacagcaccaggttccctcctttcatctctaataataccttagatgtaaccttatctcatccctgaactctttatattgacattctcttcatagatgtcagtttcttcaactaggctttaaaatgaaggtttttccacactggttttggaagattaagccttcctctctctttccctgtctacctctcttctttcttctttccttgcttgcttctttgcttcctttctttctcttcatacacagatacagtttcaaccttggtccactaatgtataggtctgaggcaaagagaattagatgtcttaaaagttgttgaatagggattcaagtcaatctcttctagattttaagctgtcttagctgacatcgggattataaaatctagtaataaagacacgtgtaattaaataaaaamattagagtatacatactacataaaaagcaaatcatagaatttcactccaataatagctataagttttttaatgttgatattcattaaaaatttaactaactgcaacaaaacattgagaaaggcacaattcatgctatactctccagagaaaacaaaagtatctcttttacatctggacgaacaaccaaaaacatttattaaattatataaaacatcagattttaagtcactggacttgaagcaacaaatttcagtgatcccagagagataagaagcaaataaagtgagcccagtaattggcccaatgtgctgccttgaaagcatattccggttgctgca

SEQ ID NO: 710878 - DNA, 572 bp, Homo sapiens
aaaatctataaagaagaggaaaatccacctttcacatgtttaaaaagttgtgtagataaatgcaagatattaaaaaaaaagacccaaatcaaaatggaattctacttagcaatacaaaggagtaaactattgatacatactacaacrtctatgaatctcagaatcatcatgctgagttaaagaagccaaatagaaaatagtgcattctgtatgcttctatttatgaaaatctagtaaatgcaaactaatctatagtgacagtggttgccttggaatgggaaagaggggagaatatcggaaaggtaggaagaaggggtcacaaaagggcatggaaaacttggggcagggatagatatataattatctttattatggtgatggcttcttcgctatacacatatatcaaacttatcaaattgtattctttaaatatttttcagttttattgaatgtcaatcaatgtttaataaagctgtttagaaagcagtatccactgaaggatacaaaagattgctttgtggttagacataattctaaatctacccttccaccacttctattccaactcaacc

SEQ ID NO: 710879 - DNA, 614 bp, Homo sapiens
ttctttctttgaacctgcaactttttgtgacgtactttaagcattaagtctatataggctgtatgtatcttgtatctctatgaatgatatcttgccagagtttattcaaagctgtttgctgtggtatgtgccatggaagctgcttatagcttttcctatataagaagctgtaaaatgtcttatataaaatttaatgcaatttgctatttttatacgtgaggatgatttgtttaaaatgaaactactgggaaagagtgatgcttcatgcttcaccatagttgctaattaactaaaatgatttgaagcttgctatgctgactacaaattttatakgctttaatataataatataataactctaaaagagaaaataaaaataaattgccacatagggcataaatctagctgtaactttatctcacgctgatcaaacctggtgcttctaaatttttatgtaaggtcagctttatattggtacataattataagtgtaaaggtaaataggaatatgttgttaatattattttatctggcaatttatagcacagatgcttttttaatgttgatacaatattcattcttttttctttcattgtcatctttttaataatcat

SEQ ID NO: 710880 - DNA, 1602 bp, Homo sapiens
atgggttggggtatgactgatcccatcacccagatagcataggacccagtagtttttcagcccttgcccccctccctcctatagaaatgcttaaccacacagaagtgtgcaatttagaacaagacacagtccagataatcagttgcaagggccagagtaattttttaaataaaatcatattcattttgaagccatgtgtcaaattcttctgttttatccagattgatgtagactttgaacaaatagtaaatttaatataccatacaagaacaytttattttgtgactattaatggactcttgaagtttcttttggcagatggagatggacacatggatcatttactgccaggctgtgaagataaaaattgccaaaagagtaccatctacttagtgagatctgggatgaagcaggtatatcaagttgtttttaatgtaaacatttttttttatgtgcttggaaaaaaatcttctaaggttagaaaagatacctgtagaatcagaacagagggaaccccaaaattaagttaccgacttcctcattttaacttaatgaaatgcatttaaatatattattttttaatttgttgcgggaaaatcattgttataattatttctagtgaagaaaacccattctggatactataattaaatgatcttttagctttttatatgccaggaatatggcaaaacacactataataaaaggttacttagaagaacgttgtatctattttcgaaactgatcttgtttttatttgtgttatttaaacctattttattatctcatgctgacttttacctgtagcttgtaggtaagcaatttagaatctgacagtcacagtggaggattaatatgggaatgataggttataacaatcatattagaattaatgtttcttttggagggtaataaatgatagaataacgtattgacttttatagcccttatggaaaaggagcatcatattttatgtgaaaacaaatcttcacacagtcagcattctaaaagcatttaactggccagtgtgagtacagtggtgttaagtgaacacagccagttacagatttccttgttgcttctctacccccaaagcttcactttattagccttaaaaataaaataaatgaaaacatttaactgttatacctgtaagttttatcttgaactttttttaaggttttgaatcacttaaaactttaggtcaagtaactatcattggttcataattattagtaatcctagtaattattgcctatcgacagactactgtaagaatattttcaaattatacagtcatctctctctgggaagataaatgtcacagttctttggtgactattatcagtgtcatattgatactgaaaaatctttttactttttaggccttaatacatttaccttaacaggaatactttattcaatgtggtttatcctgattaataacctgtcagcctcttcagaaatttgtgataacgtggcattttgtgaaattctcatctgctgaaataaaacacaacaattttttaaaaaccaagtgaaaccattgaaacattttaatgatatataaaataatactgttttgcttaaagattgaaaaat

SEQ ID NO: 710881 - DNA, 1206 bp, Homo sapiens
tggcaggcccaaggcacacagaactgccaaggagaataggacaggtgggtattctagatcagcatcatttattagacattattatgacatgcctgatactgttctctgcattttatgtgccttatggcacataatattaatatttgtggcatagaggagtggtaaaaaacaaagcctttggtgtcagactgcctgtgttcaaatcctgtttctgccacttacttggtttgggaacccctaagtggggagtcttaaaggacccttctggttatgagctcttaatcctgggaagggwcttgtagaaggagtgcatggggaatagaagaggagacggaaggcatgcaaatgactgcacctagcagcagggtctggcacatgggccaggtggtaagagatgccaagtgacctgctgagtgcgtttggctgtgactgtagactctgtggctgtccaagcacccccacaaggcctgagggccaggaagagaatgcagccacaggtcactaaccaaacaacaggaactctagccgattggccctgcctgaacccaagactcaaagagcttgagtggaggccccctgctgcttcttcctttggagagacacttgtttggaaatggctgaggaatctgcctgtcacttgcaacccaacttacttcttggcttctgagatgttgacagaaattggcgatgataaatgtcactactgccaccacaaccactgtcatttactcagggctcaccatgctccaggcactttgcaaagcactttatgtacattattttatttaattttcatcagaaccccacaaagatagttatattgccatttatgaatgaaatacacagtacattatgagaactgttttgattataaagaatagacacccaacttgaaccagcttaagcaaaagacaactgtatgataggatactggatcatctcaacagaactcacaatgggaatgtggttgagcccccagaatagccataaaccgggactctgatgctgtcatatatcttgctcatactctcacttgtatttacttttcagtagcttctgccttcattcttctctccttccataggtcagtttctccataggctacaaaacatggctgcccagggcttctgaattttacatattatagcttatgccactagattgagactgacttaacattctcctgggtcctaccaaaaatcccga

SEQ ID NO: 710882 - DNA, 604 bp, Homo sapiens
agataggattttgccatgttgtccaggctggtctcaaactcctgacttcaggtgatccacctacctcagcttcccaaagtgttgggattataggtgtgagccaccatgcctggctaaaattgtcttttcactgtaagcacagattacctccttttcacatctgtcccaagcacttatgggccatggaacagtgaaggagctcatgctctcagaaagtctactccttgtgtggtcacctgaccttcttcttctcccactgggcccgacaagggattatggtagaagaggagagagggtgcttcctgcagccacttcctcccctctccagatgctgcccagagtctggaatcacacatacatatcccttcaccctaattgggccatagggtattattatggaagatttagtgatggraaacatggtttggtgcaacacccctgggctaaggaagataatgtcagtttctgtacttgcttgatagttcctggaaaaactgagaagatcaaaagatagaagagctgtaaaaaactttgggagcatggggcatatgactcatccctcccacccctgaatatttaccttagaaaaatgaaaacatgttca

SEQ ID NO: 710883 - DNA, 604 bp, Homo sapiens
agataggattttgccatgttgtccaggctggtctcaaactcctgacttcaggtgatccacctacctcagcttcccaaagtgttgggattataggtgtgagccaccatgcctggctaaaattgtcttttcactgtaagcacagattacctccttttcacatctgtcccaagcacttatgggccatggaacagtgaaggagctcatgctctcagaaagtctactccttgtgtggtcacctgaccttcttcttctcccactgggcccgacaagggattatggtagaagaggagagagggtgcttcctgcagccacttcctcccctctccagatgctgcccagagtctggaatcacacatacatatcccttcaccctaattgggccatagggtattattatggaagatttagtgatggamaacatggtttggtgcaacacccctgggctaaggaagataatgtcagtttctgtacttgcttgatagttcctggaaaaactgagaagatcaaaagatagaagagctgtaaaaaactttgggagcatggggcatatgactcatccctcccacccctgaatatttaccttagaaaaatgaaaacatgttca

SEQ ID NO: 710884 - DNA, 604 bp, Homo sapiens
agataggattttgccatgttgtccaggctggtctcaaactcctgacttcaggtgatccacctacctcagcttcccaaagtgttgggattataggtgtgagccaccatgcctggctaaaattgtcttttcactgtaagcacagattacctccttttcacatctgtcccaagcacttatgggccatggaacagtgaaggagctcatgctctcagaaagtctactccttgtgtggtcacctgaccttcttcttctcccactgggcccgacaagggattatggtagaagaggagagagggtgcttcctgcagccacttcctcccctctccagatgctgcccagagtctggaatcacacatacatatcccttcaccctaattgggccatagggtattattatggaagatttagtgatggaaaacatggtttggtgcaacacccctgggctaaggaagataatrtcagtttctgtacttgcttgatagttcctggaaaaactgagaagatcaaaagatagaagagctgtaaaaaactttgggagcatggggcatatgactcatccctcccacccctgaatatttaccttagaaaaatgaaaacatgttca

SEQ ID NO: 710885 - DNA, 1030 bp, Homo sapiens
tgaacgagataatttctaaagtttagtgatagagaccaaaaggagtatacgtctgagcattccaacttaggccaaagcctaaaagtgagaagcctgcccatatcaagggagtgaggtgtgtgtttggggcaggggtagtagaagagcaagacggttcatgaattcagtattcttgtttcactgatgcagcacccatcaccattctgatcaggtcccttggggacatggacagtgtccttagaatgacaatgatgatggtaccaccagcaccaccaccaccatttctctagcatgtgggtgagccaaacacctttggaaacaccttacatatttacatttacatcctactgaatcctcataacagccctgtgagatagatagaatttttattattctcattttacaaattagaaagctgaggcacagaaaggttaaataacttgcccaagtccatagggctaatctaatagcagagctgggatttgaaggcaagtagtctcactccctgcttttcttcctcgaaaaacacaagggcagggctgaactcagctcaggggacacaatctataccaggacaaggttacaatggccctataacttcttcttcttcttttttttttttttgagacraagtttcactcttgttgcccaggctggagtgcaatggcgcaatctcagctcactgcaacctccacctcccgggttcaagcaattctcctgcctcagcctcccgagtagctggggttacaggcatgtgccaccacacccggctaattttgtatttttagtagagatggggtttctccatgttggttaggctggtctcgaacttccaacctcaggtacccgccttggcctcccaaagtgctgggattacaggcgtgagccaccatgcccagccggcaatataacttcttttgcattctcattaactcagcctcagacgacactggcttccttggaagccactgcatactgatgattgaagtggagctgacaatcacctaaaaacccctaaatgcctttgaca

SEQ ID NO: 710886 - DNA, 1030 bp, Homo sapiens
tgaacgagataatttctaaagtttagtgatagagaccaaaaggagtatacgtctgagcattccaacttaggccaaagcctaaaagtgagaagcctgcccatatcaagggagtgaggtgtgtgtttggggcaggggtagtagaagagcaagacggttcatgaattcagtattcttgtttcactgatgcagcacccatcaccattctgatcaggtcccttggggacatggacagtgtccttagaatgacaatgatgatggtaccaccagcaccaccaccaccatttctctagcatgtgggtgagccaaacacctttggaaacaccttacatatttacatttacatcctactgaatcctcataacagccctgtgagatagatagaatttttattattctcattttacaaattagaaagctgaggcacagaaaggttaaataacttgcccaagtccatagggctaatctaatagcagagctgggatttgaaggcaagtagtctcactccctgcttttcttcctcgaaaaacacaagggcagggctgaactcagctcaggggacacaatctataccaggacaaggttacaatggccctataacttcttcttcttcttttttttttttttgagacgaagtttcactsttgttgcccaggctggagtgcaatggcgcaatctcagctcactgcaacctccacctcccgggttcaagcaattctcctgcctcagcctcccgagtagctggggttacaggcatgtgccaccacacccggctaattttgtatttttagtagagatggggtttctccatgttggttaggctggtctcgaacttccaacctcaggtacccgccttggcctcccaaagtgctgggattacaggcgtgagccaccatgcccagccggcaatataacttcttttgcattctcattaactcagcctcagacgacactggcttccttggaagccactgcatactgatgattgaagtggagctgacaatcacctaaaaacccctaaatgcctttgaca

SEQ ID NO: 710887 - DNA, 3623 bp, Homo sapiens
taacggagctacacttagcctatctgcatcgagctattttcaagtagagttttctgaacagatctctgtgttagtctttctgcagatcctcaattagatggatatgcttgttaaacttaaaacatgttttagacactgagggagracaaagtgacatttccaaaagctggggtgagttaatagcagaggtggaaccagaattagattatttatggattcttttcagactggaaaaaagaggggtgagcagtggctcgcatcccgaggtcagtgagcagctgttcctgcagagatgcagctagagaacaagagaaatggactttcattgtagcagtagggattgggctgaacccagggaaggatttccccatggtaaggagtgtgcgtgtgtgcacacatgtgagtgtgtgtatgtgtgtgtggcacccttctctggaggtctctagaagagtgagataaattgctgttgccatggcgtcctgtctgggggcgacgggaggataggtgagtctgaggtttttcccaccccaagatgttcttattcatttagccacgctctccctctctgccatcagcaaggataatctggagctggccatgtttctgtcctcagctgaggacggttatgatgaatcccgtggtgctctgctgggctgcagttagctttgcttttcatccggatgtcaaaccaagcttgcggcagctgtgatcagctgttgggagagggggagtcgggcagggagagggtagctcctggcctcctgccaagccctagtcgagtccccagtgtccacctctcagttgtgtctttctgttgctgattctatcactgcgctcttttttatctttgtgtgtgcgtctctttttctcttcctctttttctcttctcttcttctctcatctctctttggacaatggaaaacaaactagcttttgcatggaccttttagagcagctaattcatttatggcaggagaagggaccaaagagcacctacttgtgaatgtcccctaaactgcagtcactggtaagatgccctgtgataatgggaagaaagcctagattcagccagactcgcattcctaccctgactccacctttactggtcacgagactctggccacacacttcaacttctccaagcctcagtttcctcctgtgttatgctggggtaacaatgcctgcctgaggatgttgtcgtgaagatgaaatgtgaaaccttccagaaaaaccctttgctcagggattgacccgggcagagtccctacctgccttccttggcagccactatcattgcttggtggcctgacaccacccacctctttctctggcccaggatgagcaaagatttgttgaattccatggagaaaactgttccaggaagggtcatagttctggtaccagccccttgtcatttttccaggcttagaaaaatgtgagtctgagaaaatgagctagtattcacatgaatcattctgggatgggggtgaaaaggcaagggtgagggaaaacccaaggcttctctatgggtctgagaaagaggcatgagctcacgtcaggcattaacattttgtagtttaaaccatgcagacagatcaggaagatgattagcaaaacagaatactgatcaactgtgatgcttaatgaccctcccatcccaaattcactcagcctccagcttggtctggatcagccttctttttggttcaagaatgcagccatgaagcaaggccagcccctctagtggccgtagtcctgaagcatctggaaggggaagaagcccaagactgcctgctggtgtctgcatcttccccaacccccccggctgcagagcaccattcagggtgtctgggtctcccctacccacacagaggccacaggctagtgggaggcccaggtggacccactggcctggactaccctcagatgccctgggctcctttgggagttgatgcctgacaccaaagtaagctttgggagctattggagagggtagtagaaatgtctttttaggacatttctaggctgacattggctttcttggactttagtcctttttggaaatttgttggttaggccatagattccccccacttccccctgcttctcaagtcaatgccaagggcatgcgtgcctgatgctccagccagccctcgaggtttcacccagagaatgaccacccttttctccatgcgctcctgatcttaacaccacatttctctttgggcaggtttaaggattaccgagagccgccatgggccccgaacccttatgagttttcgaaacagtactggtttattctgtccgcccgtctggcttttgtcataatcttccaggtgagttgctgggatagggaatagcccattcgaatccgggctgcaggagtaaggacactgcactcattgcttgcacctacctccaggttccggtggtactctgtgacataagaaagcttcatgtgtggcaggcagaagtgagggctcctttccgggttgaagcaggaggactcttgagagggctttctttaatgggtggactttgcagacagaggataaaacacagtgtaaggttacaagacagatgtggaataagttgcagggtggagatagattcctgtttaaacctaaggcaaagaaaggaaaagggccattgaaaccagagtcccagcctggggcagacaaacagccccatctcatctctgcagccatgaaagagctcaggtttggaacctttcttcttgcactctgggctccctcctttgttagtgttgttttagccactgagacatctggtgagaagggcccccagagccatcgagccatccctgaatgaatagcaaactcgagcccagtgattcctatctgggacaatagccacagctccaattgcatcgctgagattctctgagctcgagggcccccaattcccactctgggtgcccccggtcttcaagcagggctggagaacgagcccagatccttttctctttggctccctcaggcttttgtattccctgaaggcagatctctggggggctctaaagtatcctgcccccagaccccagcccagaaagtggagaagcccatcggctagtctttcacctaaagaagacagccattcttcctctggagagatggaggcgatatgtttgaatgatcgctcagacatcccctgctgccccacccccaggagtctcctcactttcccgtatgtcacatgtcacatttcactcacacaggaaggagtggattcagaggaagagtgtgtgacttggtgaagcagctcccaagcacccaagatgcccaggagcctctggaagcagcagttggtccccagtgtcttcccctgaacccctaggaacatgtagggttcaagggctcagtcccagtctcagaggggaaaaggcatgtgagcgtgcaactggcagccagggaagtgtatcacaatgggaggagtgtgttgggtaaagctgggtgaagtgtggcctggggaaatggatgggaatcagatgcattcattgagccatgccaggcattgttgtcctatattcattcattgagacagtaagtgctctggggaaaaggtagtcctagcctactgtgtgcaccagcaaagggatgtgg

SEQ ID NO: 710888 - DNA, 3623 bp, Homo sapiens
taacggagctacacttagcctatctgcatcgagctattttcaagtagagttttctgaacagatctctgtgttagtctttctgcagatcctcaattagatggatatgcttgttaaacttaaaacatgttttagacactgagggagaacaaagtgacatttccaaaagctggggtgagttaatagcagaggtggaaccagaattagattatttatggattcttttcagactggaaaaaagaggggtgagcagtggctcgcatmccgaggtcagtgagcagctgttcctgcagagatgcagctagagaacaagagaaatggactttcattgtagcagtagggattgggctgaacccagggaaggatttccccatggtaaggagtgtgcgtgtgtgcacacatgtgagtgtgtgtatgtgtgtgtggcacccttctctggaggtctctagaagagtgagataaattgctgttgccatggcgtcctgtctgggggcgacgggaggataggtgagtctgaggtttttcccaccccaagatgttcttattcatttagccacgctctccctctctgccatcagcaaggataatctggagctggccatgtttctgtcctcagctgaggacggttatgatgaatcccgtggtgctctgctgggctgcagttagctttgcttttcatccggatgtcaaaccaagcttgcggcagctgtgatcagctgttgggagagggggagtcgggcagggagagggtagctcctggcctcctgccaagccctagtcgagtccccagtgtccacctctcagttgtgtctttctgttgctgattctatcactgcgctcttttttatctttgtgtgtgcgtctctttttctcttcctctttttctcttctcttcttctctcatctctctttggacaatggaaaacaaactagcttttgcatggaccttttagagcagctaattcatttatggcaggagaagggaccaaagagcacctacttgtgaatgtcccctaaactgcagtcactggtaagatgccctgtgataatgggaagaaagcctagattcagccagactcgcattcctaccctgactccacctttactggtcacgagactctggccacacacttcaacttctccaagcctcagtttcctcctgtgttatgctggggtaacaatgcctgcctgaggatgttgtcgtgaagatgaaatgtgaaaccttccagaaaaaccctttgctcagggattgacccgggcagagtccctacctgccttccttggcagccactatcattgcttggtggcctgacaccacccacctctttctctggcccaggatgagcaaagatttgttgaattccatggagaaaactgttccaggaagggtcatagttctggtaccagccccttgtcatttttccaggcttagaaaaatgtgagtctgagaaaatgagctagtattcacatgaatcattctgggatgggggtgaaaaggcaagggtgagggaaaacccaaggcttctctatgggtctgagaaagaggcatgagctcacgtcaggcattaacattttgtagtttaaaccatgcagacagatcaggaagatgattagcaaaacagaatactgatcaactgtgatgcttaatgaccctcccatcccaaattcactcagcctccagcttggtctggatcagccttctttttggttcaagaatgcagccatgaagcaaggccagcccctctagtggccgtagtcctgaagcatctggaaggggaagaagcccaagactgcctgctggtgtctgcatcttccccaacccccccggctgcagagcaccattcagggtgtctgggtctcccctacccacacagaggccacaggctagtgggaggcccaggtggacccactggcctggactaccctcagatgccctgggctcctttgggagttgatgcctgacaccaaagtaagctttgggagctattggagagggtagtagaaatgtctttttaggacatttctaggctgacattggctttcttggactttagtcctttttggaaatttgttggttaggccatagattccccccacttccccctgcttctcaagtcaatgccaagggcatgcgtgcctgatgctccagccagccctcgaggtttcacccagagaatgaccacccttttctccatgcgctcctgatcttaacaccacatttctctttgggcaggtttaaggattaccgagagccgccatgggccccgaacccttatgagttttcgaaacagtactggtttattctgtccgcccgtctggcttttgtcataatcttccaggtgagttgctgggatagggaatagcccattcgaatccgggctgcaggagtaaggacactgcactcattgcttgcacctacctccaggttccggtggtactctgtgacataagaaagcttcatgtgtggcaggcagaagtgagggctcctttccgggttgaagcaggaggactcttgagagggctttctttaatgggtggactttgcagacagaggataaaacacagtgtaaggttacaagacagatgtggaataagttgcagggtggagatagattcctgtttaaacctaaggcaaagaaaggaaaagggccattgaaaccagagtcccagcctggggcagacaaacagccccatctcatctctgcagccatgaaagagctcaggtttggaacctttcttcttgcactctgggctccctcctttgttagtgttgttttagccactgagacatctggtgagaagggcccccagagccatcgagccatccctgaatgaatagcaaactcgagcccagtgattcctatctgggacaatagccacagctccaattgcatcgctgagattctctgagctcgagggcccccaattcccactctgggtgcccccggtcttcaagcagggctggagaacgagcccagatccttttctctttggctccctcaggcttttgtattccctgaaggcagatctctggggggctctaaagtatcctgcccccagaccccagcccagaaagtggagaagcccatcggctagtctttcacctaaagaagacagccattcttcctctggagagatggaggcgatatgtttgaatgatcgctcagacatcccctgctgccccacccccaggagtctcctcactttcccgtatgtcacatgtcacatttcactcacacaggaaggagtggattcagaggaagagtgtgtgacttggtgaagcagctcccaagcacccaagatgcccaggagcctctggaagcagcagttggtccccagtgtcttcccctgaacccctaggaacatgtagggttcaagggctcagtcccagtctcagaggggaaaaggcatgtgagcgtgcaactggcagccagggaagtgtatcacaatgggaggagtgtgttgggtaaagctgggtgaagtgtggcctggggaaatggatgggaatcagatgcattcattgagccatgccaggcattgttgtcctatattcattcattgagacagtaagtgctctggggaaaaggtagtcctagcctactgtgtgcaccagcaaagggatgtgg

SEQ ID NO: 710889 - DNA, 3623 bp, Homo sapiens
taacggagctacacttagcctatctgcatcgagctattttcaagtagagttttctgaacagatctctgtgttagtctttctgcagatcctcaattagatggatatgcttgttaaacttaaaacatgttttagacactgagggagaacaaagtgacatttccaaaagctggggtgagttaatagcagaggtggaaccagaattagattatttatggattcttttcagactggaaaaaagaggggtgagcagtggctcgcatcccgaggtcagtgagcagctgttcctgcagagatgcagctagagaacaagagaaatggactttcattgtagcagtagggattgggctgaacccagggaaggatttccccatggtaaggagtgtgcgtgtgtgcacacatgtgagtgtgtgtatgtgtgtgtggcacccttctctggaggtctctagaagagtgagataaattgctgttgccatggcgtcctgtctgggggcgacgggaggataggtgagtctgaggtttttcccaccccaagatgttcttattcatttagccacgctctccctctctgccatcagcaaggataatctggagctggccatgtttctgtcctcagctgaggacggttatgatgaatcccgtggtgctctgctgggctgcagttagctttgcttttcatccggatgtcaaaccaagcttgcggcagctgtgatcagctgttgggagagggggagtcgggcagggagagggtagctcctggcctcctgccaagccctagtcgagtccccagtgtccacctctcagttgtgtctttctgttgctgattctatcactgcgctcttttttatctttgtgtgtgcgtctctttttctcttcctctttttctcttctcttcttctctcatctctctttggacaatggaaaacaaactagcttttgcatggaccttttagagcagctaattcatttatggcaggagaagggaccaaagagcacctacttgtgaatgtcccctaaactgcrgtcactggtaagatgccctgtgataatgggaagaaagcctagattcagccagactcgcattcctaccctgactccacctttactggtcacgagactctggccacacacttcaacttctccaagcctcagtttcctcctgtgttatgctggggtaacaatgcctgcctgaggatgttgtcgtgaagatgaaatgtgaaaccttccagaaaaaccctttgctcagggattgacccgggcagagtccctacctgccttccttggcagccactatcattgcttggtggcctgacaccacccacctctttctctggcccaggatgagcaaagatttgttgaattccatggagaaaactgttccaggaagggtcatagttctggtaccagccccttgtcatttttccaggcttagaaaaatgtgagtctgagaaaatgagctagtattcacatgaatcattctgggatgggggtgaaaaggcaagggtgagggaaaacccaaggcttctctatgggtctgagaaagaggcatgagctcacgtcaggcattaacattttgtagtttaaaccatgcagacagatcaggaagatgattagcaaaacagaatactgatcaactgtgatgcttaatgaccctcccatcccaaattcactcagcctccagcttggtctggatcagccttctttttggttcaagaatgcagccatgaagcaaggccagcccctctagtggccgtagtcctgaagcatctggaaggggaagaagcccaagactgcctgctggtgtctgcatcttccccaacccccccggctgcagagcaccattcagggtgtctgggtctcccctacccacacagaggccacaggctagtgggaggcccaggtggacccactggcctggactaccctcagatgccctgggctcctttgggagttgatgcctgacaccaaagtaagctttgggagctattggagagggtagtagaaatgtctttttaggacatttctaggctgacattggctttcttggactttagtcctttttggaaatttgttggttaggccatagattccccccacttccccctgcttctcaagtcaatgccaagggcatgcgtgcctgatgctccagccagccctcgaggtttcacccagagaatgaccacccttttctccatgcgctcctgatcttaacaccacatttctctttgggcaggtttaaggattaccgagagccgccatgggccccgaacccttatgagttttcgaaacagtactggtttattctgtccgcccgtctggcttttgtcataatcttccaggtgagttgctgggatagggaatagcccattcgaatccgggctgcaggagtaaggacactgcactcattgcttgcacctacctccaggttccggtggtactctgtgacataagaaagcttcatgtgtggcaggcagaagtgagggctcctttccgggttgaagcaggaggactcttgagagggctttctttaatgggtggactttgcagacagaggataaaacacagtgtaaggttacaagacagatgtggaataagttgcagggtggagatagattcctgtttaaacctaaggcaaagaaaggaaaagggccattgaaaccagagtcccagcctggggcagacaaacagccccatctcatctctgcagccatgaaagagctcaggtttggaacctttcttcttgcactctgggctccctcctttgttagtgttgttttagccactgagacatctggtgagaagggcccccagagccatcgagccatccctgaatgaatagcaaactcgagcccagtgattcctatctgggacaatagccacagctccaattgcatcgctgagattctctgagctcgagggcccccaattcccactctgggtgcccccggtcttcaagcagggctggagaacgagcccagatccttttctctttggctccctcaggcttttgtattccctgaaggcagatctctggggggctctaaagtatcctgcccccagaccccagcccagaaagtggagaagcccatcggctagtctttcacctaaagaagacagccattcttcctctggagagatggaggcgatatgtttgaatgatcgctcagacatcccctgctgccccacccccaggagtctcctcactttcccgtatgtcacatgtcacatttcactcacacaggaaggagtggattcagaggaagagtgtgtgacttggtgaagcagctcccaagcacccaagatgcccaggagcctctggaagcagcagttggtccccagtgtcttcccctgaacccctaggaacatgtagggttcaagggctcagtcccagtctcagaggggaaaaggcatgtgagcgtgcaactggcagccagggaagtgtatcacaatgggaggagtgtgttgggtaaagctgggtgaagtgtggcctggggaaatggatgggaatcagatgcattcattgagccatgccaggcattgttgtcctatattcattcattgagacagtaagtgctctggggaaaaggtagtcctagcctactgtgtgcaccagcaaagggatgtgg

SEQ ID NO: 710890 - DNA, 1015 bp, Homo sapiens
ggggggatggtactccagaggaaaaatgagagctatggttctgctgtttgagcacacctggcaatgtgcgggcctgtaggtgctggctggtcaccagtgctgcccaccacctttctgatttcctcctaggaacatgcagaattgcactgactgccaaacctcgctcaggaaagcggcttcttcttttgtgggactaataggacatagatacagctcttagtgagagcrgtaggctaacgtataccaggccactcctgtacaggaaatcttacaaccagttttaatttcctcagatttttttttttaagacggagtttcactcttcttgcccaggctggagcacaacggtgcaatctcggctcaccacaacctccgcctcccaggttcaagcgattctcctgcctcagcctcctgagtagctgggattacaggcatgcgccaccatgcctggttaattttgtatttttagtagagacggggtttctccatgttagtcaggctggtctcgaactcctgacctcaggtgatctgaccgccttggcctcccaaagtgctgggattacaggtgtgagccaccgtatccggcctctcacatcttaatatgcaaacttaccacttgagctgaggttcaaactacagcagtatggaacactgcatcatttgacaataggctttacctgatttggggagagtgcggtgaccagtgggaggaagttgttattgcaaggagcattgatgacacggagattccaggcctatcaaaggaagcaatccccagggatgactgccagtgtgggtggtgttgacatttgcaggaagcagtgacagtccatggtcaaggttgagggctgcctccaccgccaagacacccacttggctccaaccgtgctatctccaggcccactggctgctcatggctggttcaggacccacttgtttttcttcctcttttttaaattaaaagaaacatttttgtatcatcataaaggttaagctcgcataccaagaaatgttc

SEQ ID NO: 710891 - DNA, 1015 bp, Homo sapiens
ggggggatggtactccagaggaaaaatgagagctatggttctgctgtttgagcacacctggcaatgtgcgggcctgtaggtgctggctggtcaccagtgctgcccaccacctttctgatttcctcctaggaacatgcagaattgcactgactgccaaacctcgctcaggaaagcggcttcttcttttgtgggactaataggacatagatacagctcttagtgagagcagtaggctaacgtrtaccaggccactcctgtacaggaaatcttacaaccagttttaatttcctcagatttttttttttaagacggagtttcactcttcttgcccaggctggagcacaacggtgcaatctcggctcaccacaacctccgcctcccaggttcaagcgattctcctgcctcagcctcctgagtagctgggattacaggcatgcgccaccatgcctggttaattttgtatttttagtagagacggggtttctccatgttagtcaggctggtctcgaactcctgacctcaggtgatctgaccgccttggcctcccaaagtgctgggattacaggtgtgagccaccgtatccggcctctcacatcttaatatgcaaacttaccacttgagctgaggttcaaactacagcagtatggaacactgcatcatttgacaataggctttacctgatttggggagagtgcggtgaccagtgggaggaagttgttattgcaaggagcattgatgacacggagattccaggcctatcaaaggaagcaatccccagggatgactgccagtgtgggtggtgttgacatttgcaggaagcagtgacagtccatggtcaaggttgagggctgcctccaccgccaagacacccacttggctccaaccgtgctatctccaggcccactggctgctcatggctggttcaggacccacttgtttttcttcctcttttttaaattaaaagaaacatttttgtatcatcataaaggttaagctcgcataccaagaaatgttc

SEQ ID NO: 710892 - DNA, 668 bp, Homo sapiens
ttccaatagaactttctgtccaataaaactttctgctctgatgaaaaatgttctgtatctgtgctgtccagtttggtagctacgaacctcagtggctactcaagattcgaaatgttattagtgtgattgaagaactaaaattttaactaatttaactttaaatagccacatgtgttagtggctatcctcccagacaatgcagctctaagagatgtcttttgggtcagtacaattccagaccagaattccagccaagtagggtagtgggaagggggctatggtagatattacgcaacctggatttttgactttgtctttccattatcatgatctacacacatcgtcaycacctttaccatgattttatagctcccatcatttcttgagtgcctataatattctaggccctgtgcagaatgcttaaatatgtataatattcctatcttacaatgatgagcaagctgttacaaggcttggcaagattcagtaactcgcacagaatatcacaattatttggggagagctagggtttgatctcaagtctgctagaatccaaagtccatatgtttagtcattattttattgcttctccaaagaccagtgtgacattgagtcactgaacactaagatatagtcacatgtcacctagagaccaggatacattctga

SEQ ID NO: 710893 - DNA, 1219 bp, Homo sapiens
tatttttgataatttttcatgtatggtaaagttaaaatgacaaattgatattctgatataaaactcaaagttttgaagtcagtgggaaaaaaggaggtttttagactttcttaaaagacgttaaaattttaggacagaattttcttgatgttgtttgatctaactttgcactctttgataataatgttttagataatgtgcgtaatccaaattggtattgtagcctctgttaacacagacagtatatgttttaaactttgatgtaaacctttttagacccaaacttgtggaagtatcatgtgttaagttctctgtctctgtttctttgttcatttattactaaaatgaacttgttattaaagtatatgcaaatatgaaatcttgtgtacgtgtttttttttcttttttggtaagggagagagtattgctgtatgatatatgattacaaattacaaagagattctataaaccacatcatcattttgaaggaacagctaccatatgtttagttaaacagtgtttttcaaaattatatgcaagaaagaggtaaaactaaagggacttttttcaagtaatggcatttgtaaccataaatcaggcagtatgggctagcaatcaatagagtgagctctcgagtcaaatgcccatttctgccattcattagctttgaggtcttgagcaagtttaaccttctatgtcttctttcttcttatctataaaatagggatgagggtagtatctgctttatagttcagttccatgtaaaatacttatgagctggcatgtgatagggtactcagtgttagccacagggctgccatgctgtgtcaccccctgtcgtgtacagtgcacagtctgcatagctgtatgccacagctctggttagctgccattatttttattastattgttattatccctttagtgttctctagtaggttagttcttgccattctgaattataaccagtggcttttcattttcccatcattaatcatgatagatatttagtatgataatttaaagataactgaagataaaagttgagtaaaaatacagaaacgataacattttagatgatatgcatttttaaaaatatcctggatagtgaattaacaatgatcaataaattccattactgaggctaggtgtggtggctcacgcctataatcccagcacttttggaggctgaggtgggaggatcactgaagcccaggag

SEQ ID NO: 710894 - DNA, 1219 bp, Homo sapiens
tatttttgataatttttcatgtatggtaaagttaaaatgacaaattgatattctgatataaaactcaaagttttgaagtcagtgggaaaaaaggaggtttttagactttcttaaaagacgttaaaattttaggacagaattttcttgatgttgtttgatctaactttgcactctttgataataatgttttagataatgtgcgtaatccaaattggtattgtagcctctgttaacacagacagtatatgttttaaactttgatgtaaacctttttagacccaaacttgtggaagtatcatgtgttaagttctctgtctctgtttctttgttcatttattactaaaatgaacttgttattaaagtatatgcaaatatgaaatcttgtgtacgtgtttttttttcttttttggtaagggagagagtattgctgtatgatatatgattacaaattacaaagagattctataaaccacatcatcattttgaaggaacagctaccatatgtttagttaaacagtgtttttcaaaattatatgcaagaaagaggtaaaactaaagggacttttttcaagtaatggcatttgtaaccataaatcaggcagtatgggctagcaatcaatagagtgagctctcgagtcaaatgcccatttctgccattcattagctttgaggtcttgagcaagtttaaccttctatgtcttctttcttcttatctataaaatagggatgagggtagtatctgctttatagttcagttccatgtaaaatacttatgagctggcatgtgatagggtactcagtgttagccacagggctgccatgctgtgtcaccccctgtcgtgtacagtgcacagtctgcatagctgtatgccacagctctggttagctgccattatttttattagtattgttattatccctttartgttctctagtaggttagttcttgccattctgaattataaccagtggcttttcattttcccatcattaatcatgatagatatttagtatgataatttaaagataactgaagataaaagttgagtaaaaatacagaaacgataacattttagatgatatgcatttttaaaaatatcctggatagtgaattaacaatgatcaataaattccattactgaggctaggtgtggtggctcacgcctataatcccagcacttttggaggctgaggtgggaggatcactgaagcccaggag

SEQ ID NO: 710895 - DNA, 651 bp, Homo sapiens
ttttatagaatagtgaaagagaaggaagtggaagaaaatgctgatggctctcatttctttatgcaagggtgtttcaaaatcttgttttgaaaaaaatgctggctcatcttttgctgttgtacrgtagtacttgtcactagtctggccatgggtccaccaagttagcaacttctttgactcaagaataagttaatactaaatgtttcttagtgcggatagttgccatgttttagtggatgttatataaaagctaagaatgcagacaaaggtgtagtgtccttaatatataaagaattgctacaagtcaaaaaaggtaaaggtcaacaacccaaaacaaatatttcatagaaaaatacagaaatctcttgaacagatgaaaacttcagcaacctcacttacggtaaaaaaaaaatgcaaaataaaactacaatatacaattttcactagtaataatgggaaagctcagagtttgcaaatgtatggtactggaaagaatgtagggaggcaggcattgtcacgcattgatgccaaaggtgagtaacttgcaaaatgtctgtagagaactatttttctatagctttcaaaattttaaatgtacactttttgactcagcagttcaaagaatgtgacactagcaaagaatatatgagt

SEQ ID NO: 710896 - DNA, 1057 bp, Homo sapiens
tataatctggggtgatgaatgtgttaactagcttgattgtggtaatcatttcataacatatatgtatatcaagtcatcacattgtacaccttaaatatatacaatttttattatactgcaataaagttaggggaaaaaaattccactgtttttttaaaaaagccatgatgttctaagctctgttattaatcaaaatacttgtacagttgattctcttggattttctagttataaaactgtgtctctgtaaataatgaaaatggtttcctttaacaccagatcttgatcattaaaattgtcatagtataaaatattatatctttgcacatgtctgctctgaaacctgtttttgtcttttgttccaggagcagtacatttttatccatcagtgtgtgcaactgatgtggatgaagaagaagcagcagttctgcatcagtgatgtcatatacgagaatgttagcaagtcctagttcagaatccggagcagtaagtggagaagagctctccacgagtgctcagtcttagaactattagagggggatgtgatggatgggacaaaagacagcagtagccatttgtattgactctgacttcacatgagtatttcttcccagctcctggcctcacatgggtggtcacagggagaaacaagtactgtagcagatctttgagtttcaatgcaccttggttggtgttggcaacaaacaggagcttctgcacatcatgatgactttacctccattccctctacccagaaccctaaattattctgttattggatctgtgcctgtaatatcaggatactaccatccaaatctatctagatatcttgtgcaaatattttattgattacaagggctgtatacggggttacaaaaagacatgagctggattggacactcctaaaaccaaaaacaacagtgacaatagagtctcaggatagcagagtctgaaaataccttggtctcccccattatgtgagcccttayttgagagcttcatgaagacacttgtaacatattcaacgtcctgtactccagttttgactacgagatca

SEQ ID NO: 710897 - DNA, 2946 bp, Homo sapiens
agccttaaagagcctacagtgtccttttggactctttcacttcgggacatttaataatggaccaaattcaacagaacaccaggaaggtcaagacgctctccaaagggcaggaagtacagcacttccgaagagtttagttggccctttgctggttgggctgagttttttatttttaagtgtttgtttttcagtgcaataatttttgtgtgtgtgtgattcttatcagaaagttgaattgttttctgcctacaccgttcatcagccccataacccaggaaggaacaggcattgttagcatcagattatacctcattattaaaaggaggcatggccacacatgaagaaatggtcattctacttcaaagaaattgagccagcactatctgtactccaacattaccggatctggattggggaggttggtcagggaagagaggggttctacccacagatcaactgtgtaatcttttactattcaagctataattcagcttcaaagtagagtagaaaaaaaattgtcttaactgttctagttcttgatggttttcttccttattaacagttggtgtttcttccttggcccttttggactaatgttactgtccaagttctttctcaagaaaccacatctggttcagaagagtgtcaagttggactctttgaactctgttgctgtctgagcaatcgtggtgcctagactttgcattccttgttctgttgacctgcatacatgtgagagctatttctttaagaactatataggctgtgaaaacgcactttctttcccccaaagagctgggaatttatgaagttatggcaatgaactgcagcatgctgggacaattatttgactacttttttttgtaatattgtcaaatgtctctatggattctgacagagatttctttttgttttgttattcttttggttgtcagtttcattttaacgagtgtaactagtaacattttattctttggattttgtataattacagtacatgattgtgtattgtgacatgaatgctgtcaaaatgacattgatggcattgtgaagcctgttactttgtgtcacttcctgataaataagaggtgatgacatggatatacaacagaaaacactttgagttgaaagtaaacacaagctggctgcttccctgtggcaactgtggctattgtgagcctccgtgtgtgtgcttccaggaggctttgctcctcttcatgcacccgacactgccccttccctggcttccctccatccctgatcatcttcatgaagccacagatataagatcagcttaatattttatcagtgaccttagtgttggtgaaggatgccaaatgaacagctctgcaccccaccgtctcttgtcactgaaaaggcttggccatggcagaccttggcagagtttcttgcaagatctggccagtgagtctcagtttcaccttgcagggtgaatggcagaggatgcccataccctgcaggttaacagcttgggctcctcaggggttgtcagttcctactcacctccctgctaccacctcctcctcttcttctcacccccgactcctttatttccctttttggacattttaataatgtgtcgcaccattctcaggaacaaacatggttaatgaaaggtggcaaagggatgtgtgacattcttagattttcacacatgggcagtcaggagtgaaatgtgcaaccttggaagagctgatacaatgtatggtaagctgaagtacgtttccaacactgctgctcagagcatacagaagttttgcatcctggaacattgcttcccatgaaacaaagcacttcataaatattttatgtttttcttgagcaccctttcaaggtagggatcaaatagtgccagatcaattttcccaaaaggaaagaggaagtatccagagtttagactgaaggcttagagtcaaaactacaggaaggtcacactgttctctggaacactgttgctcttcagtttgtagagtttatgatggaaaaggcatcagtctgtcaaaagacttgtttaatcctgataatgactttggaattatctctcctgggtctcagttaataaactgaagaatgacctaatcataactccatatcttgcaacaggtataagaagtatcagatacgataattgacccaaaggtgctttgtgtcttgttctctcatgtatgttccgtaaggctactctaaccagttctgtttccacaccaggacccaamtttaagcattcagaagggaggcttccagagcctctgtattattaactagggtttttaaaattcatttgagtaatgctttgttctaaaagaacacaggggccttagtgcatgtgttcataatagcctgtatggcacacaaaaagatctaaaaacttgagcgttacaaaacatttcattttgagtgctattttttttttctttttttttttgagacagatcctctctctgttgcccaggctggggtgtattgatgcaatggcgtgaccttggctcactgcaacctccacctcccaggtttaagcgattctcctgcctcagcctcctgagtagctgggattacaggtgcgtgccaccacgcccagcgaattttttgtatttttagtagaaacagggtttcaccatgttggcctggctggtctcaaactcctgacctcaggtgacccccccacctcagcctcccaaagtgctggaattacaggtgtgagccaccacaccaggccttgagggctattgagatcaaattccttggctgcaaaagataatttatgaagttaattgagaaactaccattaggatctaattaataaatgtaatagttgacagcagtatatccattacttcatatgatgatttcgtttaacttgaaaaaagtgatggatgacagcattttttggaaaagcattttaattcggggtctacaatttcccac

SEQ ID NO: 710898 - DNA, 1308 bp, Homo sapiens
tgcacgtccctcttgacattttgtcataggaaaactgggggtggatggattgtaaaatatttctcaacattacaaaacattttaaagctgataccagacctacactcatatctgctgattacaaataattctaagctattctggtatgccctgagcatctgtcttatatgcaaaataagtggcctcttctgttttcccctgtcttcttgaactgtctgtctcttttcaaaaactgtgtattcttcaaaattcctgcaatgcmgaatgaaaaacggaggccatccactacagtggaaaatgtagagcaactccaagaaaagaggctggaagaaaagacaggcttagagatgtctgacagacttgaagatggtttccattttcccattttgcaagaggggcaatggatcctctaacaacagagcctgagttagtatgttatcatgtattacctcgtttaatcccctcaatatctctatgagataggcactatttttatccctattttgtagctcagatacaggcttagaggtttagagaagtaaataacttgtcaaatgtgagtagtagggttgagatttgcacgaaaatgcgcctgacttcagggtctgacttaagcttaaactgccttgttttattgatcatattgatcactctatttctttctcctgaggactcgcaaagcaatgataataccattctgctcttgcatcatttgttgcacattcttgtttagaaagaaaatactaacaactattagagattttctgaacctagtaatttcattaacaagcattccccaagtctacagggcaaattttttgatactcacaatgttacttcttgtgaaaattttgaagtgatttctgaatcatcagagagatagagattaaagtgacactgttttaaaagttggtaattatcatacaattgcatgaaagctgatgtggtatttgtggtaaacttccgtattaggatgggtaagcctgtatggcagggttcttaacctgaactccagatccagcaaagggtccacaggtagatttcagggggtctgtgaacttgtatgggaaaacatttcatctacattttcatgcacccttaaatgacatttggcactgccttccatgatgaatgtagaaacaaatcacagtgttagcaatacctgtgactttgtccctaatagaaatgatggatatttccattcgtatcagttgttgctgatatctcaaaatgttatttttcgtcatcattaatgtgaaatcataattaataagctcaagaccagattatattgaacatattaataaa

SEQ ID NO: 710899 - DNA, 1308 bp, Homo sapiens
tgcacgtccctcttgacattttgtcataggaaaactgggggtggatggattgtaaaatatttctcaacattacaaaacattttaaagctgataccagacctacactcatatctgctgattacaaataattctaagctattctggtatgccctgagcatctgtcttatatgcaaaataagtggcctcttctgttttcccctgtcttcttgaactgtctgtctcttttcaaaaactgtgtattcttcaaaattcctgcaatgccgaatgaaaaacggaggccatccactacagtggaaaatgtagagcaactccaagaaaagaggctggaagaaaagacaggcttagagatgtctgacagacttgaagatggtttccattttcccattttgcaagaggggcaatggatcctctaacaacagagcctgagttagtatgttatcatgtattacctcgtttaatcccctcaatatctctatgagataggcactatttttatccctattttgtagctcagatacaggcttagaggtttagagaagtaaataacttgtcaaatgtgagtagtagggttgagatttgcacgaaaatgcgcctgacttcagggtctgacttaagcttaaactgccttgttttattgatcatattgatcactctatttctttctcctgaggactcgcaaagcaatgataataccattctgctcttgcatcatttgttgcacattcttgtttagaaagaaaatactaacaactattagagattttctgaacctagtaatttcattaacaagcattccccaagtctacagggcaaattttttgatactcacaatgttacttcttgtgaaaattttgaagtgatttctgaatcatcagagagatagagattaaagtgacactgttttaaaagttggtaattatcatacaattgcatgaaagctgatgtggtatttgtggtaaacttccgtattaggatgggtaagcctgtatggcagggttcttaacctgaactccagatccagcaaagggtccacaggtrgatttcagggggtctgtgaacttgtatgggaaaacatttcatctacattttcatgcacccttaaatgacatttggcactgccttccatgatgaatgtagaaacaaatcacagtgttagcaatacctgtgactttgtccctaatagaaatgatggatatttccattcgtatcagttgttgctgatatctcaaaatgttatttttcgtcatcattaatgtgaaatcataattaataagctcaagaccagattatattgaacatattaataaa

SEQ ID NO: 710900 - DNA, 2342 bp, Homo sapiens
tataaaagtttctgttaacctctttataagaagctgaagtacgaaggcatgatgtggctttcctaaggtcatcctgagtgggtgtcagagctgaggctgtacaacacaggtaccttccaccttgttatgccacagggcagtgaargagatttttaagcatttcaagaacagtcttcctacaatgttttccatggagagaattctgtgtgtttgaataatgtcaccttcatgagtggtttgcaaagtatggtctccaaatcagtagcatcagcttcacctgggaacttgttagaaatacaaaatcttgagacccacctcagatctacagaatcaaaaactctgtgcgaagctcccaaaattgtttgagcaaatcttccagcttgttttgaagcatattaatgtataagaactactaaccttgtagtttccttgaatctatataattgctaacacatttggaagactccccatcttggaaatcaaggtaatctggttgtttattggctgtaaacagtgaggaattagcttaaattcattaacttactcatttcattcatttaaattgatcaactatataattcatcctgtaattcactggtctgtattttagggataggaaaggaagaaacaacaaaaaatgaataaggtatgattctgtccttgaggaacttaggtatatcaagaaaaataagaaattacatttgatggtatttttttctcttttttttctttttgagatggagtcttgctctgttacccaggctggaatgccatggcttgatcttggctcactgcaacctccaactcctgggttcaggcaattctcctgcctcagcctcccaagcagctgggattacaggcgcccgctaccatgcccggctaattttttttttttttttttttttgtatttttagtagagacgaggtgtcaccatgtcggccaggctggtctcaaactcctgacctcaagtgatccacatgcctccgcctcccaaagtgctgggattacaggcatgagccaccgcacccagcctttatgatattttttaaatggtgcattgtaaatgttactattatttagaaatcgactgagacatcaagacccagatagaaacttcatagcctatggaagtctacagatgtttccaaaatttctataaattttcttgttgtcacatctgtctccaaatatctgatctctctggtcctcaatcaattggtctagctgtggaacgcaatcttcttctaattctaaggatcgaaggaaaaagaaaaagaaaaaaacacttgccaaaattattcatgaatgtagtcattttcactggagaattgagagtgttggaaaagggttctatactaaagaaggtgaacagattccaatcatggaatggatttcctgtacctaaaatgcccttgtgatttccctctgactttacccctctcagaatcaatccatccagtcttccattccctgactcctctcgtcacatccttccatccttcttttgcagagtatttaggccctgtttgttgtttaaaaaattcaccttttatggctgctgtaaaaaagggcacactcaaaatctagttggtgactagcaggacaattatccttggaatattaatagagccttcaaacatatatgatggtaaacatttgctctgcaaaatgtttatcaactgtttccaaagcactgcaaaatctacacagacaaataagtttctgtctttgcctttatggggcttaggaactagtaaggatttgggaagaagacagggatccccacaaatgtggagtaaattactgtcaattttctacaaagtaatcagaagtgctcaatccagtgctatttcattaattccacagtttcaaaaaaaaagtaggtatatgagccctgagagaaagtttagggctacagtcaagaaaatcagttgcttaatggtgatggttgaagccacaggagtcaattagaatgactaaaagaaaatacagaaagaatatgtgttgagggcggatattttctagatacctacagagaacatagaatcaagatgacaatgaagtattgtcaacatcgtaatctgtttggactgctataacaaaaataaacttggtggcttataaactacacaaagatatttctcagtgttcttggggccaaaaagcccaaggttaaggctcaggcggattcggtgtctggtgaggacccacttccacataggcagcaggcttctccttataaactcacatgacagacagaatgaaagtgttctctggggtctcatttataagaacactaatctcatttacgaggctccacacatcccaataccatcatttt

SEQ ID NO: 710901 - DNA, 1316 bp, Homo sapiens
ttctaaatacatgaagcaataaattgacagaattaaagaatatctacaaaaataaaatacacaattttttttcctgggaaccagtcctcattttattttacagcacattcatataagttccagcatttctaaggtaaccaagtcacattcaggttagcactgctagtaacaaaatcatacaactaccctggcttccaaaacaagttagggtgatgcacattaatacttctttccctttaatacagcataagacagtacatcccaaaataaaatctctaaaatcacatgccttttacaatccagtataaaagcacattatttatgttaaaattagaaatacggaacatgagaataaaaagagtttgaaagctctctaaaatttccctcaatgccatctttctcatctaactgccagttggcacattccgctccratgccatgggaagggaggggcagacaaaaatagcccgatgtcaatatctcttcctcagcaattaataaaacaattgtacacaatcaagtagtagggagagagaaaatttaaacaccataaccatcctgacctagttcatatttattgttcactgtgtgaaacaactgaactatattataattatgtataattatattatattctttaagtgcattaaagtatttaccaatatggaccacacatatcgtagaataaatttaagtaaattttaaaaggaattctcatggagtgcattctctgaacacaacagaattaaattagaataaaaaacaagatctctcaaagtcctttgggtttaatttgctcatctaggaagtagaaggaagaaaataaaaagcttaaatcaataaaataaaaaagacagataatataaaaattaaagctaaaattgtttctttggaaagatcaataaaattaaaaaccctctactaaatcttatcaaggtagctttctattcatcaagacattattaagaaaacaaattgaaaagttgccaactcagagagcatattcacaataaacatatctgacaaaaatgtatatccaggatatatgaagaatgcccatgactcaaaaacaaaaagaaaatcttaaataaatgtggggaaaattttggacccttcactaacaataatacatgaatggcatataagaacaggaaaaaaaaggtcagcacattaaccaagaaatacaaattaaaccaatgaaatctactgtatatccaatacaattgctaaaatgaagaagactaacaacagtaaatattaactaggatgtggaacaaataaaatacttacatgttattggtaggagtgtaaaatgg

SEQ ID NO: 710902 - DNA, 1316 bp, Homo sapiens
ttctaaatacatgaagcaataaattgacagaattaaagaatatctacaaaaataaaatacacaattttttttcctgggaaccagtcctcattttattttacagcacattcatataagttccagcatttctaaggtaaccaagtcacattcaggttagcactgctagtaacaaaatcatacaactaccctggcttccaaaacaagttagggtgatgcacattaatacttctttccctttaatacagcataagacagtacatcccaaaataaaatctctaaaatcacatgccttttacaatccagtataaaagcacattatttatgttaaaattagaaatacggaacatgagaataaaaagagtttgaaagctctctaaaatttccctcaatgccatctttctcatctaactgccagttggcacattccgctccgatgccatgggaagggaggggcagacaaaaatagcccgatgtcaatatctcttcctcagcaattaataaaacaattgtacacaatcaagtagtagggagagagaaaatttaaacaccataaccatcctgacctagttcatatttattgttcactgtgtgaaacaactgaactatattataattatgtataattatattatattctttaagtgcattaaagtatttaccaatatggaccacacatatcgtagaataaatttaagtaaattttaaaaggaattctcatggagtgcattctctgaacacaacagaattaaattagaataaaaaacaagatctctcaaagtcctttgggtttaatttgctcatctaggaagtagaaggaagaaaataaaaagcttaaatcaataaaataaaaaagacagataatataaaaattaaagctaaaattgtttctttggaaagatcaataaaattaaaaaccctctactaaatcttatcaaggtagctttctattcatcaagacattattaagaaaacaaattgaaaagttgccaactcagagagcatattcacaataaacatatctgacaaaaatgtatatccaggatatatgaagaatgcccatgactcaaaaacaaaaagaaaatcttaaataaatgtgrggaaaattttggacccttcactaacaataatacatgaatggcatataagaacaggaaaaaaaaggtcagcacattaaccaagaaatacaaattaaaccaatgaaatctactgtatatccaatacaattgctaaaatgaagaagactaacaacagtaaatattaactaggatgtggaacaaataaaatacttacatgttattggtaggagtgtaaaatgg

SEQ ID NO: 710903 - DNA, 1431 bp, Homo sapiens
agtagcttggattacaggcatgtgccaccacacccaggtaatttttgtatttttagtagagacgtagtttctccatgttggtcaggctggtcttgaactcctgacctcaggtgatccaccccctcagcctcccaaagtgctgggattacaggcatgagccactgcacccggcccattcagttaatctttaacaacctactatatgccaagggttcaataaatgactctgttacttcacaggcttattacaaagttcatatgagaatattaaattggtttataaattataaggcagaatacaaatggtatgatttgttactgagtcaagtaacagaaacaaactcacagggaaaaaaaaccaaacattttatgcttggggcttcaaaatagagagacagcttatatgacagcatctactcctgcttttattacatgaaagaatatgagagatcttagatgagaggaaataatttaaaaggcaaattacaaacagccttttagtttatgatcacagaaaggactcttatttgttcaattaaactggttgccaagggaaatagcaaacctgaaagcctttaatatcaaaagcctaaagatcaagaatttaaattcctgcagtagaacagccaacccagaatgaatcagaaggaaacatgccaaataaaaactggagataaaaccagaattagaaaagatccatccgattctaactggatgagatcagtcctcatcaaacctgctcattttaaatttatatcttatgtattatacaacaaagtataacaatttctaaatagaaataattgttttatttttaaaattgtttgaaagttaaaaatccgtggttcaaatctatagctcatagaagatagttcattatggtagcatcgtagctacttccaattagctctgaaacttaattggaatatcaacttatatacttaaacgccagtgacgagccccacaccattctaaaaatgttttaataaattcccccaaacttggcttattggaacctaaattaaatttgtcaaatagtttyatcactcaaattaatttagtcaattttattttaatgaagaattttccttttgaattcaaattctgacaaatacattgaataattttgataggacctgaggcagtggtagagacagaatctatttcagactggaaagagtggatttattgaagcactgctcccttccctggccttcccttgctttcttacagtaaatatttctaaagtaaatgcaagtgataaaccccatgattacagctaactgatgcttacgtcttatttccaaaataatggcagtgccagtcatgggacatcctgtgaatttagaaaatcaaagccacctaagattccaacagaaatattagccaacttgttaaattaagcacaagataaaggatcaaaaaatgccc

SEQ ID NO: 710904 - DNA, 1072 bp, Homo sapiens
tggcatttctaggaaactaacacacccattattcctggtgcatttatgtagttatctcctcaaacactctaacagacatataatttaagaaaataagacagaaaatagtgaactttcagtggctgctaaaggcataggagaaggcatttcaagcggttagaggacaaaagtagtaatccagggactgagggaaaaacagacaaggtgaagagaaaaggtcacaagtattgaagagaccatccacttttgtctaagggctcaggtaataagcctcgctgatttcctaaaaagcatttggaaaattaacatacttggaggagtttttaaaaattagcttaatatttctcttaaattacatgttagatattttatataaataaaaccaattttcataataaaaactttaatgaactttgattctgatatattaatacaaaacatacactttagataaatgaatgaatttttaaaaataaacttcaaaaagtgatattcatatgaaagccttcctaaagtcaacaataaatgtacatttatatcagctccagtcagaaaattattttaaaatggtatttgtacaaacaattctttgcttaaagtttcataaaactcttagtgaatactttcaaggctctttaaaaaaaacaaagtttgacttgaagttgattactttctcagaacaagcaagtaggagtcttacatgaagtgctgaaatcactcctagtcccattcattattaaggaaaaaacaaaaaaatacttcacaatttaataaacagagccttgtgctgggagtcaggagacttcaastgaattatagccgaggctgactttgatttactctacgactttaagtcaaatagttcgcctcccactgtctcgattttcaacttatttatagcatgtaacatttgccaagttatataatattgctcacctcaatttcttcatctattaaatgaaaataatgatgacatcgtcttgcagagttactatgagggttaggtgagttagtatagccaacgcattgagagtaacgcctggtatagagtagctagtattggtacttgcag

SEQ ID NO: 710905 - DNA, 597 bp, Homo sapiens
ctgttcctggtaatgtcagccccatttttctccttcagttgctaatggcctttggtcctagattacttttccttcaaccacctctgataagcttgaagtttcacttgtatgagtctgatatacacaattattcctcaccctctgtggcgtagtcactaggtggtgatcttttcctccacatttctctgagccaaagagaaaaaatgctggagcgtagagagcacctttgttcacatcccatcttttttttaatcgctaattatctgaaatggttggagaccccactgacaagctgtgccaaagtaatatttgagtcaagttaggcttgaagaaggtgtcactgccatgcccatgccccttgcccccagaagccagatcacgtgacttcacttatctgactgggccattaatcattacctgtctgtattcagacaagaggctgctmctgtctagatctttcccatatttgcctgatcatttcacccacactaacgatacttctcacagcatgaatggaaatgaagtataggaactgcaggcctgtttgatggctacacgttcatgaaggtaatttaattaaccaactagactctaaac

SEQ ID NO: 710906 - DNA, 644 bp, Homo sapiens
aaataaagaagaccccccacgatagttctttggcctttatcttattgattccacgtctctggagaaccctaatgcaaccttctaacacttcatcatgtttatacacgttttattatgtattaagagcacagtagtttgcatttttcatttcctttgaacctatatacaaaggtacgtggctaaggaaaagatattatatctctagataaccttaatctatgtacaaatgtttttccccattgtctttttcccattatcctccaaatatattcatatcccatcgtcttttatttttttattattattatttttttttgagacagagtctcaactgtcacctgggctggagtgcaggggcacgttcttggctcactgcaacctccgcctcctgggttcaagtgattcttctgcctcagtcttccgagtagctgggacttcaggcacccgccaccacgctaattttttgtatttttagtagagacggggtttcatcatgttggccatgctggtcttgaactcctgacctcgtgatctgcccgcctcggcctcccraagtgctgggattacaggtgtgagccatcacgcctggtccccatcttcttttccctcaatctgacctccccaaaacttacccttgtttctca

SEQ ID NO: 710907 - DNA, 620 bp, Homo sapiens
gacagtcatttaacagatctactgattctcagccaatctactgactggctgacctaactgactcatttcttctgacaaattttgtctatagacatcatcattctcttttctacacatttctagggaatattttctaaggtacgtcataagccaccttttccatttgtcattcattacacattaagcttaatttcttcttcagcatattttgtttagcatatttagatattaaacttttacacaattcaagatggtaacattatgagacattaaggattctaaaaaacttaagtgcctgtaccatragcaaatgaatatgattaaaagaatatgctggggctgggtgtaatcccagcactttgggaggccaaggagggaggatcacttgaggtcaggagtttgagaccagcctggccaacatgtgaaaccccatctctactgaaaatacaaaactcgctgggtgtggtggtgcacgcctgcagtcccagctactcgggaggctgaagcaggagaattgcttgaaacctggaggtggagtttgcagcgagcagaggtcatgctactgcactgcagcctgggcaacagaacaagactccatctgaaaaaagaaaaaaaaaaaa

SEQ ID NO: 710908 - DNA, 681 bp, Homo sapiens
ccaggcatggtggcrggcacctgtaatccagctactcgggaggctgaggcagaaaactgcttgaacccaggaggcggaggttgcagtgagctgagatagcgccactgcactccagtctgggcaacacagcaagactctgtctcaaaaaaaaaaaaaaaattggaagaatgcagaaccagggggttccatagcttggtggaacagttgcaaggcttgacttccttcgataagtgttcatcaaagactgatttttccaaatgaggagacttattctgctcatttcctgcctgcagtcacatctcctagttggggtgctgcatggaatggtaaaagctataatgcaaatatttctcagaaaaagaagtgcatttgtactccatttgccctttaagggttatctgatttcaatcatctttttccaaaaaatcttgctagaacttgcaaagttctaatagaaattggtatgaagcagtcaggcaatggcaagtacaagagggaaaaaatgaagagtcttgactttgaaaagtatttacatacattccagagcattctaaacacatgaagaataaacttagcagggaaaggcattccatgcctaaaattgtgtctttgaaactaggatctgagtggaagaaataagttatgttattaatatatggtgaggaacagaacagaaattga

SEQ ID NO: 710909 - DNA, 676 bp, Homo sapiens
tgtatactactatccaattccaaatcccaatacctgtgttgcgactgtttcacaactgcttgcccttcaactggcattcagcctctctctttctaaaggcctttcacctccaaatttagaactatcttaacactattccatatttctcaaatgtttgtcattattgttaaaaagcaaatatagtttaacagtttggaaaaacatttcctactacattcaaataaagttaagaaaatatcagtaaattgaaacaaacctggagaagagtcattggcctatcccaggggttcttaatctgggttcagagatagatggccaacatgtgtatactcctgaattgtctgtaatactgtgtgcatgtgtayacatggcatttatctaaaggagagcccatagcttttatcagcttctcaaagaggccatttgtaatgcctttcagaaccccagtgaaattcagtcctcactatgaggtttttccagttaaaggcaatgggttactaagccaattaccagattatgccctcaaggctccagatatacccatcattgtctgctttgtgataatatagataagtcctgtaaaaaattcttttccagcaggcatgacattaagctttgtcagtagagagcattggggggacactagagaaagaaatttctctacctgtacagtgta

SEQ ID NO: 710910 - DNA, 1103 bp, Homo sapiens
ggaaccattgctagagccaagagtgaggtagtgctatttaataaataaacaacgataaaagtaagaggtctatttcacccatttaggaccagttgtggctgggacgggcattggattggctttttggcaaaatatttaatcatttttattgcctgaaattttcgacccagaaattttagacctaaaatagaccctttatttagtataaccctttcactttagaaataaggaaaccagacctcaaacagataagtcccatgtgacacataagaaattaaaagttggaaaactaaattagtgaaagaatgttacaaagatactggtttatttatgtycaaaaaatctgagtgtacaaaaaacactaagagacagactattctatcagaaatatcacaatctaatcgggaaggaaagattagtataataaatataataactgtatgcacagggtgaggaagcctaatgatggagtttaggggagactcagggcaattttcaagaagagcagatgtctggactgagactcgaagagctgagtcagtgttgggaggcggctatgactgtgaagcaggttccagagtaagaatggggaagatgtgtgagcgtgtggtacgtggtgtgggaaacaatagggaggttgggccataggttttcgctgagaagtgtccatgtctgtctctcctctccctccctatcctctgcattgtcttctccctcatctctattatgttcacctccagcaaatcttaaaataaatttgcattctatcttctgatccaaatagcactgtgaaaaggttatttaagaacatttagagtggcagaaggaaaccatttggaatttgaaatttatcataattaaaccatgagttgtaaggagcctgtttcatttggggtacccaataaaacttcttccttaccccgtcttcttatggaggctgtcatttccttggtgaaggtcactttaaatggtattcaggtcttttcaggtgtttgcaatccaatgggtgttgtcatttttgcacttaataagcacacttccaattccttcatccagtcatgatgccctatagtacaccacccaatatatcctcctcccccagg

SEQ ID NO: 710911 - DNA, 1409 bp, Homo sapiens
ccgggacacatgagacccaatactttaataaactaaacttcaattttttaaagaccttgaaacatgaaatgacatgatttattaagtactttcaagatctgaattactcaaatgggtagaattagcacaataggagatgtgtccatttattgcttctcagctcaagaaaccaagccatgcagagaatcttactctttactcattgggcaacatcctttgtaatataagatttaatcamattctctcgatataactatttatatgttttgcttttagcttctatgtttatggttcaagctcagctaggggtataattattttgaaaggcagcagaaagaaaaatcatctaacattaagtagatctgttgtatggtcatcctttcaaaaccaactagatatttaatatttgacatatcaccctgatcccaattaccttatgtgtaaaatggagctgaaaatacttcacagcttattgactgggagctggaaataaatgatctctgcaggaattatataactctaagcgtgatgattaattgttctatgttaggccacagcctaatggccgagacatagaaaaagaatggtatagtggaacaagagttgttttggaagacaagacctgtattctgcttctgcttctgctgccagttccttttatgattctcagcaaatcattcatgttatctggaccttgtttcaccatttcgttgtccattttcctctcttaaataatgagaggataggagaatatgttctcttttgcctgttagcttgaaaaggcaccgattttaaactgaataaatgtaagtactttacatttagtgtttcaaataggatgagcttactacaacatacaacatgtcatcaagttcaaggtgatgtgaacatttcttatagatagaattatgtttagctatattctttctaatgaatgtttctcttttttttcttgcacacttgtattcagtacagattctttcatgaaataagtgatcagtaactttttctttttggtaatacctttttcccgtttctaatattttgaaagccggtgttttagtagtcattttctgtaaggccacgttagtctatgaagcaaagtttgattttaaaatatcaaggtagcaccaaatgcactttgtctacattgatggctttctatattgttacattggttcaattctcttattatcattatttaaagcacatagttatatggactacactggataaaggtatgtatgaaaagtataaatatgtatgccagtgtgattttaaatgtcatccttcaatgttcatatgaaaaaaatggaatgatatgtaggatggtagattcaaattagatttctcacctaacatttttaatatttggtttcttattaagcaaataaaataggtgataatgt

SEQ ID NO: 710912 - DNA, 1409 bp, Homo sapiens
ccgggacacatgagacccaatactttaataaactaaacttcaattttttaaagaccttgaaacatgaaatgacatgatttattaagtactttcaagatctgaattactcaaatgggtagaattagcacaataggagatgtgtccatttattgcttctcagctcaagaaaccaagccatgcagagaatcttactctttactcattgggcaacatcctttgtaatataagatttaatcaaattctctcgatataactatttatatgttttgcttttagcttctatgtttatggttcaagctcagctaggggtataattattttgaaaggcagcagaaagaaaaatcatctaacattaagtagatctgttgtatggtcatcctttcaaaaccaactagatatttaatatttgacatatcaccctgatcccaattaccttatgtgtaaaatggagctgaaaatacttcacagcttattgactgggagctggaaataaatgatctctgcaggaattatataactctaagcgtgatgattaattgttctatgttaggccacagcctaatggccgagacatagaaaaagaatggtatagtggaacaagagttgttttggaagacaagacctgtattctgcttctgcttctgctgccagttccttttatgattctcagcaaatcattcatgttatctggaccttgtttcaccatttcgttgtccattttcctctcttaaataatgagaggataggagaatatgttctcttttgcctgttagcttgaaaaggcaccgattttaaactgaataaatgtaagtactttacatttagtgtttcaaataggatgagcttactacaacatacaacatgtcatcaagttcaaggtgatgtgaacatttcttatagatagaattatgtttagctatattctttctaatgaatgtttctcttttttttcttgcacacttgtattcagtacagattctttcatgaaataagtgatcagtaactttttctttttggtaatacctttttcccgtttctaatattttgaaagccggtgttttagtagtcattttctgtaaggccacgttagtctatgaagcaaagtttgattttaaaatatcaaggtagcaccaaatgcactttgtctacattgatggctttctatattgttasattggttcaattctcttattatcattatttaaagcacatagttatatggactacactggataaaggtatgtatgaaaagtataaatatgtatgccagtgtgattttaaatgtcatccttcaatgttcatatgaaaaaaatggaatgatatgtaggatggtagattcaaattagatttctcacctaacatttttaatatttggtttcttattaagcaaataaaataggtgataatgt

SEQ ID NO: 710913 - DNA, 939 bp, Homo sapiens
aaaacaccggtttaagttattttgaatcaagtttctagccaccttcaattggccaagtcctgatatagcagtgacaaataagaactttcataacagtgctaatagtaatcagagaagtattttggttaagaagtgttcttacttgaccatatcagagacctagttttgaataaggagactctctcaggagactccaggagtatctgttcttagtttagccccataccaacctagcctcaagtggagtcacagcccactgggatataaacattgaagaatctgttccgtctaggacttcaaattattagaattttaaaattgtggagatatggataggactcttctctgaaactttatgtcagcttgaacacattctatttaaaagaactgcttaattttaatttcaatatctatgtttagaagagaacctttatagattgtctcaagggggagatttagtccctcaatctaaatatctctgcctttgatccaaatcattccaatttactttaacataagagggtgacttttttcaactggcttaatgctggatactgtgtcgtcaaggtaaaaatatagtsagaaatctcttgtgagctaatggcataaaagcggtatgttccctgattaacaattaaaatagaaaatgtgtgcttctgagaagtattgcatccttgatcaaaaaaattaaataaaacaaaaaccactgtccttcacatgcttatgaatgcagaatataccacatggaaagtactgggtttcctttagtgttatttttaaatatttagacatctctgtgatgcatgttgatgatttggcatatttaattctcatgataccttcttctcagaggatttatgctttgaaacatatctaagatctgaaaaattattgccttaattacaaaaatagtgtcttttgtacactttgtgtatttca

SEQ ID NO: 710914 - DNA, 611 bp, Homo sapiens
acagtgacagactatttgctaatatctttcaagtttttgtatctgtatgcaaaaatagcattagtgttttatattttatattgtctttatcaggtcaaggtactgtattagagttatgttagttttgcataagctgctttacatattttgaacttaagcttcctgtgtaacacttaattgtggatactatggaagtggctagatatacattgcttaagcttgttggagagtaatgggctacgggtagagattgagccatcacaataagaggagggattgaaaccatgaggacaaataacatctcctaggaaaaataagtataccacaacaagatcaccgttcctaggtayggtccctcactcttttaagtatctgattgggatgagacgcccagaaaagaatcagaactaggccgggcacggtggcccatgcctgtaatcccagcactttgggaggccaaattgagtggatcacctgaggtcaggagttcgagaccagcctggccaacatggcgaaaccccgtctctactaaaataaaaaaattagccgggagtggtggcatgcacctgtaatcccagctactcaggaggctaatgcaggaaaatctcttg

SEQ ID NO: 710915 - DNA, 1238 bp, Homo sapiens
ccgtgatgcaacctgacatgcctctaagatctacgaattagatgtaacctcacccagtttggaagattttagggaagtgacaagaactcatgtaactttttattttttaatgaagtgatattcacagaagattataacaacagtagatgaatgcatcctaataggaatacataagttatctgccactgatgatcattgatggagaaggggcaatacctaatgtagtagaataatgagaaacacatgatgagacatttaaaatatactgtacatattactatgagtgcagtataagcttgtggctttacttttacttgtgacttcacagtaaaaaattaggtcgtagtgcagatgaaagsctccgtataaattaggaaggaaaaatttaagaaaaattaatttaaaatctcctgaaaaattatgtcttttttaggttgctgcagaagtcaagagctaaccaagaagacaaggaatgtaacatatttaatcaaataagcacatcatctctattataaagacagtggtttgtttaataactatcactgacaagattatttcagattatttaaacaccaagcaaactatcaggtcaagatcaagcaacttttctttaagatcaagctcaaattgatctgccttggaagacgaggatcaccaagtgattaggaatataggttcctcaactcaatctggacaagaaaagcatctgccaggaagaacagagggggactgttagaaattgtaacagaaaaaagcccccaagatgcagaccacagtaggaattaagcctcgtaaagctctctggctactgtctccgtctagctttctgggaagtatgtgttggatttttttgtgcatgaagtataaatgccaccgtttttgaaagcccacccattcatcctgtacctccttataagattcaaagcacatttgcatagcttcttagccaagtatgcatgaagatatcccagcccattttataaatatacatgcaagctcgagaactttgatttgtacccaaagtttaaacttaaacatttttaaaagacactttgtacatacaaatcccactgttataaatagaaattaatatttaacttttggctttgaggattatgcttagctcttcttgaagcaaaactaacattagtgagctaggattaaggttagtgggttaggttagtggtgagaaatataagcataaacaaactctcatgtaacatttgtctcatcaagaa

SEQ ID NO: 710916 - DNA, 1238 bp, Homo sapiens
ccgtgatgcaacctgacatgcctctaagatctacgaattagatgtaacctcacccagtttggaagattttagggaagtgacaagaactcatgtaactttttattttttaatgaagtgatattcacagaagattataacaacagtagatgaatgcatcctaataggaatacataagttatctgccactgatgatcattgatggagaaggggcaatacctaatgtagtagaataatgagaaacacatgatgagacatttaaaatatactgtacatattactatgagtgcagtataagcttgtggctttacttttacttgtgacttcacagtaaaaaattaggtcgtagtgcagatgaaagcctccgtataaattaggaaggaaaaatttaagaaaaattaatttaaaatctcctgaaaaattatgtcttttttaggttgctgcagaagtcaagagctaaccaagaagacaaggaatgtaacatatttaatcaaataagcacatcatctctattataaagacagtggtttgtttaataactatcactgacaagattatttcagattatttaaacaccaagcaaactatcaggtcaagatcaagcaacttttctttaagatcaagctcaaattgatctgccttggaagacgaggatcaccaagtgattaggaatataggttcctcaactcaatctggacaagaaaagcatctgccaggaagaacagagggggactgttagaaattgtaacagaaaaaagcccccaagatgcagaccacagtaggaattaagcctcgtaaagctctctggctactgtctccgtctagctttctgggaagtatgtgttggatttttttgtgcatgaagtataaatgccaccgtttttgaaagcccacccattcatcctgtacctccttataagattcaaagcacatttgcatagcttcttagccaagtatgcatgaagatatcccagcccattttataaatatacatgcaagctcgagaactttgatttgtacccaaagtttaaacttaaacatttttaaaagacactttgtacatacaaatcccactgttataaatagaaattaatatttaacttttggctttgaggattatgcttagctcttcttgaagcraaactaacattagtgagctaggattaaggttagtgggttaggttagtggtgagaaatataagcataaacaaactctcatgtaacatttgtctcatcaagaa

SEQ ID NO: 710917 - DNA, 1238 bp, Homo sapiens
ccgtgatgcaacctgacatgcctctaagatctacgaattagatgtaacctcacccagtttggaagattttagggaagtgacaagaactcatgtaactttttattttttaatgaagtgatattcacagaagattataacaacagtagatgaatgcatcctaataggaatacataagttatctgccactgatgatcattgatggagaaggggcaatacctaatgtagtagaataatgagaaacacatgatgagacatttaaaatatactgtacatattactatgagtgcagtataagcttgtggctttacttttacttgtgacttcacagtaaaaaattaggtcgtagtgcagatgaaagcctccgtataaattaggaaggaaaaatttaagaaaaattaatttaaaatctcctgaaaaattatgtcttttttaggttgctgcagaagtcaagagctaaccaagaagacaaggaatgtaacatatttaatcaaataagcacatcatctctattataaagacagtggtttgtttaataactatcactgacaagattatttcagattatttaaacaccaagcaaactatcaggtcaagatcaagcaacttttctttaagatcaagctcaaattgatctgccttggaagacgaggatcaccaagtgattaggaatataggttcctcaactcaatctggacaagaaaagcatctgccaggaagaacagagggggactgttagaaattgtaacagaaaaaagcccccaagatgcagaccacagtaggaattaagcctcgtaaagctctctggctactgtctccgtctagctttctgggaagtatgtgttggatttttttgtgcatgaagtataaatgccaccgtttttgaaagcccacccattcatcctgtacctccttataagattcaaagcacatttgcatagcttcttagccaagtatgcatgaagatatcccagcccattttataaatatacatgcaagctcgagaactttgatttgtacccaaagtttaaacttaaacatttttaaaagacactttgtacatacaaatcccactgttataaatagaaattaatatttaacttttggctttgaggattatgcttagctcttcttgaagcaaaactaacattagtgagctaggattaaggttagtgggttaggttagtggtgrgaaatataagcataaacaaactctcatgtaacatttgtctcatcaagaa

SEQ ID NO: 710918 - DNA, 1625 bp, Homo sapiens
cagtctttaaatatcatggcttaacacagcaagggtttagttcttgctcagattgacaaggggctgtgttttgcagagccactcaggtacccaagtgctgctatcctggaggcacaccatctgaaacactctgctctgaccttgcctagaaagccatagggtggcacatgagcccttaaatggaactctggaatttagtctggaattcttatgtaattggataagaccgaatttaactgcaaagaggccaggaagtatagcttgccaggtgctcagaaaggagaggagtatgcatataagtgaacatgattagtctgaaacacagatcctagatatggtgttatttttgctggtcatcccattggggttcctgttttgttggtatcagctatgcaatggagaaggtgaagtcagtgagatgtagagtggcaggcaggtaactagccttcctaaggcatcaggactcctatatctcttcgcctatggatggcctatctgtctagctcttctttttattctagaggagaacactcatgtgggacccatgttaattttatcacacatgggttcatgaaaatgtctaggttaaactcttcctagggtcttttgtatggtaacatgcattccaggcttcttttgtaccacgttcaggcatttggtttgtctccatcattgtctctgtcattcttactttctcccttaggtgaaaaagcccagtcccagatcctcctgctgggccttccaagagccctagccctccctcatcctcagctgacccctagattcagaccctcataatttaggagactagccaggtagggaagtgttgctgttgaaagaggagaggaagttcggtgtattaagttccatgttatttcagaatttttctttgtacttaacaaacttaatttcttcaggtggatatatttttctgtcatttgtagtcaaatgatttgtggtttatctttctctcccacagtctagaagcccagttgaatgaagcaggcaaagactgtgatctgaattctctcacttctcccctgttcagaataagagcaggctttggatcgtggatggagattttgaaagagatatttgagtattgtggattawgctcttccagctggtctcacgctcagctcttagactgaggggcttgttcacatcagcagaactgatgcttccatggagatcttattgaaatgttagaaatatctggaagagggctttcaggagtcctgggatcccagaagaggaaaaactatatcagtagccaataacttgaataacatcactaaatacctaaaaaattctttcagaattgtctgatttgttgtaagaatcagcttcagccttctaatatatgacattagggactatttgatacaggaatatgtttctatattcccgtgtttctatattatcattgtgttttttaaaaaattattaaacttatggatagttttcctgtgaatgatgagttttaaaaactattaatagaattagggtgggtgcagtggctcatgcctataatcccagcactttgggaggccgaggtgggcagatcacttgagctcaggagttcaagactagcctgggcaacatagtgaaaccccatctctaca

SEQ ID NO: 710919 - DNA, 1625 bp, Homo sapiens
cagtctttaaatatcatggcttaacacagcaagggtttagttcttgctcagattgacaaggggctgtgttttgcagagccactcaggtacccaagtgctgctatcctggaggcacaccatctgaaacactctgctctgaccttgcctagaaagccatagggtggcacatgagcccttaaatggaactctggaatttagtctggaattcttatgtaattggataagaccgaatttaactgcaaagaggccaggaagtatagcttgccaggtgctcagaaaggagaggagtatgcatataagtgaacatgattagtctgaaacacagatcctagatatggtgttatttttgctggtcatcccattggggttcctgttttgttggtatcagctatgcaatggagaaggtgaagtcagtgagatgtagagtggcaggcaggtaactagccttcctaaggcatcaggactcctatatctcttcgcctatggatggcctatctgtctagctcttctttttattctagaggagaacactcatgtgggacccatgttaattttatcacacatgggttcatgaaaatgtctaggttaaactcttcctagggtcttttgtatggtaacatgcattccaggcttcttttgtaccacgttcaggcatttggtttgtctccatcattgtctctgtcattcttactttctcccttaggtgaaaaagcccagtcccagatcctcctgctgggccttccaagagccctagccctccctcatcctcagctgacccctagattcagaccctcataatttaggagactagccaggtagggaagtgttgctgttgaaagaggagaggaagttcggtgtattaagttccatgttatttcagaatttttctttgtacttaacaaacttaatttcttcaggtggatatatttttctgtcatttgtagtcaaatgatttgtggtttatctttctctcccacagtctagaagcccagttgaatgaagcaggcaaagactgtgatctgaattctctcacttctcccctgttcagaataagagcaggctttggatcgtggatggagattttgaaagagatatttgagtattgtggattatgctcttccagctggtctcacgctcagctcttagactgaggggcttgttcacatcagcagaactgatgcttccatggagatcttattgaaatgttagaaatatctggaagagggctttcaggagtcctgggatcccagaagaggaaaaactatatcagtagccaataacttgaataacatcactaaatacctaaaaaattctttcagaattgtctgatttgttgtaagaatcagcttcagccttctaatatatgacattagggactatttgatacaggaatatgtttctatattccygtgtttctatattatcattgtgttttttaaaaaattattaaacttatggatagttttcctgtgaatgatgagttttaaaaactattaatagaattagggtgggtgcagtggctcatgcctataatcccagcactttgggaggccgaggtgggcagatcacttgagctcaggagttcaagactagcctgggcaacatagtgaaaccccatctctaca

SEQ ID NO: 710920 - DNA, 596 bp, Homo sapiens
cgggaacctcctgagagagcccctacctgtgctgggttaaaaggtcttggttctgaggtagtttctaaggccttctaacgtcctttgttactttggggctctgttctctgagcctcaatatgcctaattactcggttttgattggcagctctggacaatagctttcttatatctgaaatgaaggaattagaccagattatctctaagcttcygtgactctcaaacgctacaaatccataactaagtaggtgctataacttatgcaactgactctaagaattgtcagaatccaaacaacagggaaattactagagcatgaatcatcaagggacgtttcatcttagctgtggtggctagaaagctgtgtgtggattggataaatggagagaagaggaaggcaacagcataagtgaactcatagaaatgactatgcccacttatgggaacggtacacattgagaagtaacaaggaacaaagttggctatttaccaggtgtatgcttaatacttactgtagagggccttcaaaagctgaaatataaacttaattgcaatacaaaatgtcactcttcaaaaataatatcatattgttacca

SEQ ID NO: 710921 - DNA, 1167 bp, Homo sapiens
catccccaccctattccacctgtcagccaccccattattaaaatgcttggcaagcaatcacctgagctccattagtcacagcaggctacttctgtctttgcttcaatctggaggaaaatactttgggctgaatgaaaccatggcctccagagacccaccttaaaaactcctcttccattccttctttattagtactcaccatcatttatggataaatatatggtcagggctcaaccatgtgkctgcttttgagaaggtagccaaggctgtctctgctaagggatctcacactgttagaaggcaccaagtggtgttctgaaacctgtaactcattttgaagtagccaacagctctggctccattgcagatctagtgtcatacgggactgctcactcattcaagatagtcccgagtttagaaagtgcactgcgccatagctgttctgagcagtgttcttttgaaaaggacagaccataaagttcacattcactgagaggctagtgctgtggcccttgcacatgagcacatgccctgcccctccctgctgattgtggcttgggtttgaggacatggatgcaggatatttgtgccaaactatgttgtaagcatcagcagtgatggcagccctcctgctgagctgagtgagatgctggcagccgagggcaggcagccgtcaccagacctggcatgtccaacagctggatcatgcccccagtgtcgagcattcatgtggcacagacacaagcatgcaaacagtggagcagagtgaatggagagaagattcacagcctcgctatgttctcacttctgttccttaccaggcaaggcaagagtaaccacaaatcacccaatggctgctccctgtttcaatcaagccatgccctcggcacctgaaaggaagattaactagatgctaaaaatgcacttttggagtccatttccactgccaggaaaagcttccaggtatctgctacccctcagggagaaaacaggctacaattccaattaaacaccatattgagtactttggtctcagtatactccacttgtttagtttatttgaatatttgataagagaagtgctggggtggcaagaaaattaattaaaataagaaagaacaatcttaagagagaaaggggacaaaaaaaactaagaagctacagaca

SEQ ID NO: 710922 - DNA, 542 bp, Homo sapiens
tttcttgtgacttttcttgatgaaaaaggaactgtttcttgagaaaacatttctttccaggaggccgttctttctctgtttcactctgcagggccctgacatggcaggtgatatccaggccactgttgggtgccatggagttggggagagttggccagaagagttggataaccttgaattgaatattgtccatgactgtcgcgttgcttctgctgttgcaagctgcctccctttactcccagtcccatttacaaaaataacgyttgtgttttaccagttatagttgtagtacccattcattatagaaaatctggaaaagctagacaattctttttcagtttcagggaatagttcaaacaagttatgtgctgtcagtgccctgcagccaaaaagcacgaggagcatacctgtagtcaagcaaagttgggtttatttccttgttgcattggggtggggaagaactgtgggacatctcagagaagggctgtgggcttgtgttgggtgatttgagagacagttcagagaagtggggctttgctctg

SEQ ID NO: 710923 - DNA, 645 bp, Homo sapiens
cgggccgtgtgccgccgggccgagagacggtaagagggctggagagagggagagggcccaagggagagggagaggaacaagggggaggggggagggagagggagaggaggacggagatggggagagggagaggggcctctgcacagcgggcaggaggcaggtacagcagggccatctctgagccatccagccacacatcaacagaccttgtctgggcccctccactgtgccagacggggaccaggacagaccaagtccctgtcctcagagcaccatgttgtgragtggagacagtgacatgtgaccaaatagactatcagacaacacaattgcaccttgtttgtgagccctgtattctgagaacagcaggaagttattgctgggttctcagcctcagccatcttggggacaggggtagacatgaaaggaccctgctggctgctgggtgcataaggctcctgaaaggcctgcatggctgtggggagcccaggtggacgttgtcagcagactagccaccacctcctccaaagctactgacagccttttcaaggaatctttagaagaaaatgagcaaagtctctatctacaccactcagagaccaggctgccagccagctttacagagaagagaaagcaagccctact

SEQ ID NO: 710924 - DNA, 1073 bp, Homo sapiens
tgccaggcaccacgccgggcacaggggaggcagtggtgaacaaggtgggccctgtgcctgtcccgataagatttagatcttattgggagaggctgctgtaaaaaccaggaagaaaaacctaagtgcaaagtggcattgcgggggcaaagggcgttcttagaggctgggtgctcaggggaggcctctcggtggtgactgaccagggagccaggcttcaggccctctctcagccagtttcctgtccccgagagggcctgcggcagcatgaaccaacaagagagccgggccaagctgcgctcaggggaccccatgcaggccccagtgagccaggctagcccagggagggcttcctctgcctcgcggccggcccatgaggctggagccacacctggcccaaagcctgctctgckggttcctgccccagccctggcttctgtggcatcagtgtgggcaaggccagagcctgggggcaggtagagagctgggggagcaggtctgcaccccaggagctgtcctgggtgtctagaaagtgacctcaggcccttgactgtggccactcctcccagagacatggcgctttgacgggtcctgagcagctcctttccttctgggaggggggtttcgccgggagtgaggagcaggtctacttcaccttcaaagcagcaaccctgcggtcccatagcattgcacgggacaggccatttcatctcctcagtgaggcttcacagagccaacaagcaacaggcacaccactgccctccaggagcatgcggcccaggggtaaaataccctgaacaacctccccttcgctcttcctgagagccagccgtggggcccagggggcctgagtcaggggaggactcaggaggatgtggtgtggagctggcctctgagggcaagactggggcagagagagagggaggaacgtggtgcctcgtgctgggagtgaaacagcaaaaggtgcggacagcagaaggcagaagagctgacagcgtaagcgccttctggggcccgtggcgtcgtcctctagttccctccactgctgcccctgcagaaggcctcatgcacagatg

SEQ ID NO: 710925 - DNA, 3602 bp, Homo sapiens
ttctggctgaaaggcactttgcttctgttctgtgctactcagacgattcctcagaggcggcagtgtggatgagggaatgtgactttcctccgatcttgcctaagtgcaacagataactgctctccatccagcatctcctcaccctgctgggatcatcagcagcagcaggagccactctggaagcttaatccgagcctgatctccagggtcatgggcagccctgttttcttaaagtgaaaggtgaggaaatgtaggaagaggactaacggatgcgtacttggtgccaggtgctgcgctgggtgcgtcatatgtaactgcatttaatcctcacgtgctctggaggggacatcaagattcctgtgttctagataaggaacacacagggaggctgccctccacgtggggcaggaagtggagggttggggtttgctcacacatctctgcgattccagagcccacgctctgcttcttggaaaacagcactgaaggaaccacttccacagttctccggccactctggccaatttgataagtttccaggagataagcctgaggcttaagggggtcctggatttactcgccaagcttggcgagaacccagctgtccagaccctatggctttcagcagtgccttgtctgctaacaggctctgctgctgtcagaagagtggaggccagcgcttctcaaactctgttccagctaattattcttaggcacttgcaagttctgtcagcatattacaattatatttccatttaaataattttaaaaactcacttatttttcctggttataaagacatcctttctctttgtagtgataacttgtaagtaaaagccagaatgttggccgggcgcggtggctcacgcctgtaatcccagcactttgggaggccgaggcggggggatcatgaggtcagatcaagaccatcctggctaacacggtgaaaccctgtctctcctaaaaatacaaaaaattagccaggcaaggtggcgggcacctgtagtcccagctatgtgggaggctgcggcaggagaatggtgtgaacctgggagacggagcctgcagtgagctgagatcgcgccactgcactccaacctgggcgacagcgagactccatctcaaaaaaacaaaacaaaacaaaagccagaatgtcacagaataaagctttagttttaggtgggtgtgcctcacactggaggctggcgatgtgtgttttggggaggcaggtggttacactgttttttcttttagttacatgaacgctccttgtgaggacgcctgcgtgcatgaattcttcttgggtgttgagacatctgacttccagagaggccacaagcctctccagggttctttcctgactggatcctaacaagccaagtttgtgctctgatcctcaggggcttcccaggccaggggagcagcgagaagccactgggacttcagagctgccgagggtcaggacagaagcaccaaggcggggcaaacacctggcaggtctgacctgggctcctggtgcggaggaaacctggctggggaatgcagtgagaacggctgcgtgtcctgtggggagacagcaagtgcaatcctcactaagggaacaacgcctggcacacccagaagtagctgtaaaatttcactccagacacttatctgggtttgttcaacatccgttgatcacttttgaaagttactactggctgggcatggtggctcatgccagtaatcttagcactttgggaagccaaggtgggcggatcacttgagcccctgagttcgcgactggtctgggtgacatggcaaaaccccatctcaaaaaaacaaaaaaagaatattactgtgtaaaacatggactgcaaagatatacacccaacctatggtgacagctgcctctgggaagtgggtgagagggatgggcccatagagggtgctcatctgaaatgtgttacttcttgaaacacaattggaagcaaataggacagactgccaacatccctgaactctggctggggagatgaggacatgtgctctgcgcccctccacatcttccctccattgtggaagcctacatgctccctaagcccagatacccaagtgtgaacggtccaggcatatggcggaatgaaatgcagaacgcagccatcatatgctgaagtacaaatttaataaagcctttgatcacatctcaatccataagttagctacaaaaacaaaaaatcctacaactttttagagccatcaagagccatcaaggtgtcagtgaacaccagttacaaaaggagattcagtgtttcagatagtgcaatatttccagctgctgaaaagaatttaaatgaaattacaaactacccctccttgtcaaaaatccacatgaagttgatattggtgcttataaatcactctctcccagtccctcactggttccaaccttcaggtgataaaaattaggatgggatccatcttccctgtgctgacagtctggggtccccgcatgtatgcacgaacccgcccagcgtgcgcacacacgttcagaagaaatcttcaaaggaaccgagcgtttggagaaagtggcaagtccacagaatcagaggttacgaacacaccttcaataatattaatacatycctgtctttaaattccttgccatgtttccatcaaagtagagcacacactcttttccagaagcctgggggctcgacctgggtgggacaccaggatgcagctgaaactctgaaggactgtggagacgggtggcccctgctttgctgccactgtgacagctcttgttggaaaatgttttgcgtctttgaggagagcagaggagggactgggccttcctggcttcgaatccggcatcaaccttggtggtgcaggtgcaggagcatgaggtgggagagggtgggtggctgtcaacacagaccacaaacagggcctctgcctcagttccctggagctaaagttcttacaacaaaggtaaagaatgagggcagaggaacacaatgggttggaagagaaatgaagtttaaaaaaaaaacaaaaaacccagagggtgtgagcctctgtcagtgcaacgggcttccgggttccctgtgctgaggaaggatgggcagcaagacccaagtttcctgggattttgcagactcaggagtgaagccaccgcccagatgggatgtgtaccttaggttagtgtttgttcctcattagataaccagtgagacaaataagcagggtcaaaggcagccgtcctccgcgggacaagcaggctttggggaacaggcagcacattctggaaacggggctgctgctaagggccgttgtttttcttcccccaaaccaggatgccaatgtgaatgcataggacgggaataggtccgggaagactctctggcagctcagcccgctgaggacgcagaaaatgggagggccgcggcgtggagcgcgtggcttcaaggcaggagcagcgccttggactcacggtgtccatagcgtccctagcaggcgcctgcgcttccctgggcagcagatgggcctggctgtctgggaagaggcgctgtggacggcatggaggcagaaactttgtggggtgcatagaggcttggcga

SEQ ID NO: 710926 - DNA, 3602 bp, Homo sapiens
ttctggctgaaaggcactttgcttctgttctgtgctactcagacgattcctcagaggcggcagtgtggatgagggaatgtgactttcctccgatcttgcctaagtgcaacagataactgctctccatccagcatctcctcaccctgctgggatcatcagcagcagcaggagccactctggaagcttaatccgagcctgatctccagggtcatgggcagccctgttttcttaaagtgaaaggtgaggaaatgtaggaagaggactaacggatgcgtacttggtgccaggtgctgcgctgggtgcgtcatatgtaactgcatttaatcctcacgtgctctggaggggacatcaagattcctgtgttctagataaggaacacacagggaggctgccctccacgtggggcaggaagtggagggttggggtttgctcacacatctctgcgattccagagcccacgctctgcttcttggaaaacagcactgaaggaaccacttccacagttctccggccactctggccaatttgataagtttccaggagataagcctgaggcttaagggggtcctggatttactcgccaagcttggcgagaacccagctgtccagaccctatggctttcagcagtgccttgtctgctaacaggctctgctgctgtcagaagagtggaggccagcgcttctcaaactctgttccagctaattattcttaggcacttgcaagttctgtcagcatattacaattatatttccatttaaataattttaaaaactcacttatttttcctggttataaagacatcctttctctttgtagtgataacttgtaagtaaaagccagaatgttggccgggcgcggtggctcacgcctgtaatcccagcactttgggaggccgaggcggggggatcatgaggtcagatcaagaccatcctggctaacacggtgaaaccctgtctctcctaaaaatacaaaaaattagccaggcaaggtggcgggcacctgtagtcccagctatgtgggaggctgcggcaggagaatggtgtgaacctgggagacggagcctgcagtgagctgagatcgcgccactgcactccaacctgggcgacagcgagactccatctcaaaaaaacaaaacaaaacaaaagccagaatgtcacagaataaagctttagttttaggtgggtgtgcctcacactggaggctggcgatgtgtgttttggggaggcaggtggttacactgttttttcttttagttacatgaacgctccttgtgaggacgcctgcgtgcatgaattcttcttgggtgttgagacatctgacttccagagaggccacaagcctctccagggttctttcctgactggatcctaacaagccaagtttgtgctctgatcctcaggggcttcccaggccaggggagcagcgagaagccactgggacttcagagctgccgagggtcaggacagaagcaccaaggcggggcaaacacctggcaggtctgacctgggctcctggtgcggaggaaacctggctggggaatgcagtgagaacggctgcgtgtcctgtggggagacagcaagtgcaatcctcactaagggaacaacgcctggcacacccagaagtagctgtaaaatttcactccagacacttatctgggtttgttcaacatccgttgatcacttttgaaagttactactggctgggcatggtggctcatgccagtaatcttagcactttgggaagccaaggtgggcggatcacttgagcccctgagttcgcgactggtctgggtgacatggcaaaaccccatctcaaaaaaacaaaaaaagaatattactgtgtaaaacatggactgcaaagatatacacccaacctatggtgacagctgcctctgggaagtgggtgagagggatgggcccatagagggtgctcatctgaaatgtgttacttcttgaaacacaattggaagcaaataggacagactgccaacatccctgaactctggctggggagatgaggacatgtgctctgcgcccctccacatcttccctccattgtggaagcctacatgctccctaagcccagatacccaagtgtgaacggtccaggcatatggcggaatgaaatgcagaacgcagccatcatatgctgaagtacaaatttaataaagcctttgatcacatctcaatccataagttagctacaaaaacaaaaaatcctacaactttttagagccatcaagagccatcaaggtgtcagtgaacaccagttacaaaaggagattcagtgtttcagatagtgcaatatttccagctgctgaaaagaatttaaatgaaattacaaactacccctccttgtcaaaaatccacatgaagttgatattggtgcttataaatcactctctcccagtccctcactggttccaaccttcaggtgataaaaattaggatgggatccatcttccctgtgctgacagtctggggtccccgcatgtatgcacgaacccgcccagcgtgcgcacacacgttcagaagaaatcttcaaaggaaccgagcgtttggagaaagtggcaagtccacagaatcagaggttacgaacacaccttcaataatattaatacattcctgtctttaaattccttgccatgtttccatcaaagtagagcacacactsttttccagaagcctgggggctcgacctgggtgggacaccaggatgcagctgaaactctgaaggactgtggagacgggtggcccctgctttgctgccactgtgacagctcttgttggaaaatgttttgcgtctttgaggagagcagaggagggactgggccttcctggcttcgaatccggcatcaaccttggtggtgcaggtgcaggagcatgaggtgggagagggtgggtggctgtcaacacagaccacaaacagggcctctgcctcagttccctggagctaaagttcttacaacaaaggtaaagaatgagggcagaggaacacaatgggttggaagagaaatgaagtttaaaaaaaaaacaaaaaacccagagggtgtgagcctctgtcagtgcaacgggcttccgggttccctgtgctgaggaaggatgggcagcaagacccaagtttcctgggattttgcagactcaggagtgaagccaccgcccagatgggatgtgtaccttaggttagtgtttgttcctcattagataaccagtgagacaaataagcagggtcaaaggcagccgtcctccgcgggacaagcaggctttggggaacaggcagcacattctggaaacggggctgctgctaagggccgttgtttttcttcccccaaaccaggatgccaatgtgaatgcataggacgggaataggtccgggaagactctctggcagctcagcccgctgaggacgcagaaaatgggagggccgcggcgtggagcgcgtggcttcaaggcaggagcagcgccttggactcacggtgtccatagcgtccctagcaggcgcctgcgcttccctgggcagcagatgggcctggctgtctgggaagaggcgctgtggacggcatggaggcagaaactttgtggggtgcatagaggcttggcga

SEQ ID NO: 710927 - DNA, 3602 bp, Homo sapiens
ttctggctgaaaggcactttgcttctgttctgtgctactcagacgattcctcagaggcggcagtgtggatgagggaatgtgactttcctccgatcttgcctaagtgcaacagataactgctctccatccagcatctcctcaccctgctgggatcatcagcagcagcaggagccactctggaagcttaatccgagcctgatctccagggtcatgggcagccctgttttcttaaagtgaaaggtgaggaaatgtaggaagaggactaacggatgcgtacttggtgccaggtgctgcgctgggtgcgtcatatgtaactgcatttaatcctcacgtgctctggaggggacatcaagattcctgtgttctagataaggaacacacagggaggctgccctccacgtggggcaggaagtggagggttggggtttgctcacacatctctgcgattccagagcccacgctctgcttcttggaaaacagcactgaaggaaccacttccacagttctccggccactctggccaatttgataagtttccaggagataagcctgaggcttaagggggtcctggatttactcgccaagcttggcgagaacccagctgtccagaccctatggctttcagcagtgccttgtctgctaacaggctctgctgctgtcagaagagtggaggccagcgcttctcaaactctgttccagctaattattcttaggcacttgcaagttctgtcagcatattacaattatatttccatttaaataattttaaaaactcacttatttttcctggttataaagacatcctttctctttgtagtgataacttgtaagtaaaagccagaatgttggccgggcgcggtggctcacgcctgtaatcccagcactttgggaggccgaggcggggggatcatgaggtcagatcaagaccatcctggctaacacggtgaaaccctgtctctcctaaaaatacaaaaaattagccaggcaaggtggcgggcacctgtagtcccagctatgtgggaggctgcggcaggagaatggtgtgaacctgggagacggagcctgcagtgagctgagatcgcgccactgcactccaacctgggcgacagcgagactccatctcaaaaaaacaaaacaaaacaaaagccagaatgtcacagaataaagctttagttttaggtgggtgtgcctcacactggaggctggcgatgtgtgttttggggaggcaggtggttacactgttttttcttttagttacatgaacgctccttgtgaggacgcctgcgtgcatgaattcttcttgggtgttgagacatctgacttccagagaggccacaagcctctccagggttctttcctgactggatcctaacaagccaagtttgtgctctgatcctcaggggcttcccaggccaggggagcagcgagaagccactgggacttcagagctgccgagggtcaggacagaagcaccaaggcggggcaaacacctggcaggtctgacctgggctcctggtgcggaggaaacctggctggggaatgcagtgagaacggctgcgtgtcctgtggggagacagcaagtgcaatcctcactaagggaacaacgcctggcacacccagaagtagctgtaaaatttcactccagacacttatctgggtttgttcaacatccgttgatcacttttgaaagttactactggctgggcatggtggctcatgccagtaatcttagcactttgggaagccaaggtgggcggatcacttgagcccctgagttcgcgactggtctgggtgacatggcaaaaccccatctcaaaaaaacaaaaaaagaatattactgtgtaaaacatggactgcaaagatatacacccaacctatggtgacagctgcctctgggaagtgggtgagagggatgggcccatagagggtgctcatctgaaatgtgttacttcttgaaacacaattggaagcaaataggacagactgccaacatccctgaactctggctggggagatgaggacatgtgctctgcgcccctccacatcttccctccattgtggaagcctacatgctccctaagcccagatacccaagtgtgaacggtccaggcatatggcggaatgaaatgcagaacgcagccatcatatgctgaagtacaaatttaataaagcctttgatcacatctcaatccataagttagctacaaaaacaaaaaatcctacaactttttagagccatcaagagccatcaaggtgtcagtgaacaccagttacaaaaggagattcagtgtttcagatagtgcaatatttccagctgctgaaaagaatttaaatgaaattacaaactacccctccttgtcaaaaatccacatgaagttgatattggtgcttataaatcactctctcccagtccctcactggttccaaccttcaggtgataaaaattaggatgggatccatcttccctgtgctgacagtctggggtccccgcatgtatgcacgaacccgcccagcgtgcgcacacacgttcagaagaaatcttcaaaggaaccgagcgtttggagaaagtggcaagtccacagaatcagaggttacgaacacaccttcaataatattaatacattcctgtctttaaattccttgccatgtttccatcaaagtagagcacacactcttttccagaagcctgggggctcgacctgggtgggacaccaggatgcagctgaaactctgaaggactgtggagacgggtggcccctgctttgctgccactgtgacagctcttgttggaaaatgttttgcgtctttgaggagagcagaggagggactgggccttcctggcttcgaatccggcatcaaccttggtggtgcaggtgcaggagcatgaggtgggagagggtgggtggctgtcaacacagaccacaaacagggcctctgcctcagttccctggagctaaagttcttacaacaaaggtaaagaatgagggcagaggaacacaatgggttggaagagaaatgaagtttaaaaaaaaaacaaaaaacccagagggtgtgagcctctgtcagtgcaacgggcttccgggttccctgtgctgaggaaggatgggcagcaagacccaagtttcctgggattttgcagactcaggagtgaagccaccgcccagatgggatgtgtaccttaggttagtgtttgttcctcattagataaccagtgagacaaataagcagggtcaaaggcagccgtcctccgcgggacaagcaggctttggggaacaggcagcacattctggaaacggggctgctgctaagggccgttgtttttcttcccccaaaccaggatgccaatgtgaatgcataggacgggaataggtccgggaagrctctctggcagctcagcccgctgaggacgcagaaaatgggagggccgcggcgtggagcgcgtggcttcaaggcaggagcagcgccttggactcacggtgtccatagcgtccctagcaggcgcctgcgcttccctgggcagcagatgggcctggctgtctgggaagaggcgctgtggacggcatggaggcagaaactttgtggggtgcatagaggcttggcga

SEQ ID NO: 710928 - DNA, 518 bp, Homo sapiens
gggggcggaggaggaggaagggagaaagggaggaggaaggagaatagctgagaccctagatcaagctacaacagaatgttttacttatataaggcaaaaaattgttttgttttagccagctcaaggtaagattttgccacttgtagtgaaaagacctgagaccaacagagaatctgattgggccagtatctgggtagttttctcctgtgtgagtgctcactctgggccaatgagctgtggccagagcctgcctctgcgcatgtgtgcggcgtgtgcaggaagagaaggggagtggattgcgacacactccaaaggctacctcctccttggtgctcacagcattgccctttctgggtttaactggccttctaactcatctacacaattcaaagctccttcctgtatccttcgccgtgactgggaattgttggctgggacaacyttgcagccaacaccaagagtataaatacttcctttctccctctagaaacaggaccagtgatagctgtctaacaaca

SEQ ID NO: 710929 - DNA, 529 bp, Homo sapiens
gattgtttttcttgttttgactcagacaattttttagaaactatatcattttattatttggcattttgagcaagtttgggacatatccagagcttataccttgaatctctgaagaaaaaaatgtcaccatgtctgcatttgagccttgatacttggtagaaacgtggtctgtggttaggattgtgtgtgggtggctgggacaaggggcttctgtcttctgcggtgcctgtacctttaggagtcttcaaggacagtgctgttgtctaccctggatgtcatccagcacagatgaggggtcaggaatcctagaaattttgagcgaagggtggttttcacttgtgttttcccaccctgccatcacctcctgtgtcacatgcaagaggagtaagaagagtgggtctgtctgggtgtccggggtatttgcttgggctaccataacaaggggccacagatagggtggcttcaacaacamaaacttattttctcggccgggcacggtggctcatgcctgtaatcctagcacttggga

SEQ ID NO: 710930 - DNA, 581 bp, Homo sapiens
cccccaccctacttctctaataaaatgtgtctgtttattattctagttctgactagaataataatctatcaaaatagaagctagtaaaagtaacagtatattctggtaaaactgactgtatgccatgtatggtgctgaagcatttttatttatgttttctcattgaatcccccagcagccttctgaggtgtaggttatattattctcttttgtataagaaaatgaggcttaggagggtaagtacctgcccaaggcctcatggctagtagaacagatagttactgagcacctactgtgtgccagacatggtgtctagctatagtaagtggtgaatctgtgagagacccaggtgttcttactccaaaacctacactcttgccaattcttttttttttttttttttttgagatggagtctcgctctggctggagggcagtggcgtgatctcggctcastgcaagctccgcctcccgggctcacgccattctcctgcctcagcctcccaagtagctgggactacaggcgcccgccaccacgcctggctaattttttgtaatttttagtagagacgggatttcact

SEQ ID NO: 710931 - DNA, 598 bp, Homo sapiens
caaggggcttttactgtggcttccaaggatagaagaggaaaggcagggcaggcaggctgaggactggcaagttgggatacttcaggggctctggggcacaggggctgttcctaattgttttgtacctagccctggcatgattagggcaggtgggtagtggccagggcatggcaacccgatcaaagaggcagttggggtgtgggctctggggtggctggacgctgggagggacagtttctccaaggtcaacaaggcctcagatgccagagyatcagaatacagaaaacaaaacacatggtacatagaggggtgcagcgaggggcctcgaaatacccccatgccattttatagacagagaaactgagactcacacagggaaatgtacttgcccagggtcaacccgaaaatcatgcctaggtctgtctctgggtcctgaatcctgacagcccagccccgtctgcatcctgtcttccttctggcagcctgacactgcgagagctctggaactgtggggaagggcagagaagagaggaagcctatttggaactgaatgttcctttacctctggttactcctggcaatgccatccatttccttc

SEQ ID NO: 710932 - DNA, 598 bp, Homo sapiens
caaggggcttttactgtggcttccaaggatagaagaggaaaggcagggcaggcaggctgaggactggcaagttgggatacttcaggggctctggggcacaggggctgttcctaattgttttgtacctagccctggcatgattagggcaggtgggtagtggccagggcatggcaacccgatcaaagaggcagttggggtgtgggctctggggtggctggacgctgggagggacagtttctccaaggtcaacaaggcctcagatgccagagtatcagaatacagaaarcaaaacacatggtacatagaggggtgcagcgaggggcctcgaaatacccccatgccattttatagacagagaaactgagactcacacagggaaatgtacttgcccagggtcaacccgaaaatcatgcctaggtctgtctctgggtcctgaatcctgacagcccagccccgtctgcatcctgtcttccttctggcagcctgacactgcgagagctctggaactgtggggaagggcagagaagagaggaagcctatttggaactgaatgttcctttacctctggttactcctggcaatgccatccatttccttc

SEQ ID NO: 710933 - DNA, 598 bp, Homo sapiens
caaggggcttttactgtggcttccaaggatagaagaggaaaggcagggcaggcaggctgaggactggcaagttgggatacttcaggggctctggggcacaggggctgttcctaattgttttgtacctagccctggcatgattagggcaggtgggtagtggccagggcatggcaacccgatcaaagaggcagttggggtgtgggctctggggtggctggacgctgggagggacagtttctccaaggtcaacaaggcctcagatgccagagtatcagaatacagaaaacaaaacacatggtacatagaggggtgcagcgaggggcctcgaaatacccccrtgccattttatagacagagaaactgagactcacacagggaaatgtacttgcccagggtcaacccgaaaatcatgcctaggtctgtctctgggtcctgaatcctgacagcccagccccgtctgcatcctgtcttccttctggcagcctgacactgcgagagctctggaactgtggggaagggcagagaagagaggaagcctatttggaactgaatgttcctttacctctggttactcctggcaatgccatccatttccttc

SEQ ID NO: 710934 - DNA, 598 bp, Homo sapiens
caaggggcttttactgtggcttccaaggatagaagaggaaaggcagggcaggcaggctgaggactggcaagttgggatacttcaggggctctggggcacaggggctgttcctaattgttttgtacctagccctggcatgattagggcaggtgggtagtggccagggcatggcaacccgatcaaagaggcagttggggtgtgggctctggggtggctggacgctgggagggacagtttctccaaggtcaacaaggcctcagatgccagagtatcagaatacagaaaacaaaacacatggtacatagaggggtgcagcgaggggcctcgaaatacccccatgccattttatagacagagaaactgaractcacacagggaaatgtacttgcccagggtcaacccgaaaatcatgcctaggtctgtctctgggtcctgaatcctgacagcccagccccgtctgcatcctgtcttccttctggcagcctgacactgcgagagctctggaactgtggggaagggcagagaagagaggaagcctatttggaactgaatgttcctttacctctggttactcctggcaatgccatccatttccttc

SEQ ID NO: 710935 - DNA, 598 bp, Homo sapiens
caaggggcttttactgtggcttccaaggatagaagaggaaaggcagggcaggcaggctgaggactggcaagttgggatacttcaggggctctggggcacaggggctgttcctaattgttttgtacctagccctggcatgattagggcaggtgggtagtggccagggcatggcaacccgatcaaagaggcagttggggtgtgggctctggggtggctggacgctgggagggacagtttctccaaggtcaacaaggcctcagatgccagagtatcagaatacagaaaacaaaacacatggtacatagaggggtgcagcgaggggcctcgaaatacccccatgccattttatagacagagaaactgagactcacacagggaaatgtacttgcccagggtcaacccgaaaatcaygcctaggtctgtctctgggtcctgaatcctgacagcccagccccgtctgcatcctgtcttccttctggcagcctgacactgcgagagctctggaactgtggggaagggcagagaagagaggaagcctatttggaactgaatgttcctttacctctggttactcctggcaatgccatccatttccttc

SEQ ID NO: 710936 - DNA, 598 bp, Homo sapiens
caaggggcttttactgtggcttccaaggatagaagaggaaaggcagggcaggcaggctgaggactggcaagttgggatacttcaggggctctggggcacaggggctgttcctaattgttttgtacctagccctggcatgattagggcaggtgggtagtggccagggcatggcaacccgatcaaagaggcagttggggtgtgggctctggggtggctggacgctgggagggacagtttctccaaggtcaacaaggcctcagatgccagagtatcagaatacagaaaacaaaacacatggtacatagaggggtgcagcgaggggcctcgaaatacccccatgccattttatagacagagaaactgagactcacacagggaaatgtacttgcccagggtcaacccgaaaatcatgcctaggtctgtctctgggtcctgaatcctgacagcccagccccgtctgcatcctgtcttccttctggcagcctgacactgygagagctctggaactgtggggaagggcagagaagagaggaagcctatttggaactgaatgttcctttacctctggttactcctggcaatgccatccatttccttc

SEQ ID NO: 710937 - DNA, 859 bp, Homo sapiens
tggtctatggggagaggcttggttcatgtgactagaccacctggatgtcttcatcctggctcacctggggcagaaacaaactcctcttatctttaggacaggaagccatgcattagaccgcaggaagaacccactgaagtcaggctctactctttcgacagggactgggaagatcaggagtgagctccctgaatgtttgcattgcaaagagaaggctctcaggtcctcaaggaaatggggttgggtggtagattcacatcccaaagggcagagaaagtgtttatcattgcaggcttctaaagtaactgctctagttgggttcggggacctggctgcttgtctccaggttttggctggagcagagtaaattgtcctggcagggttgagccttcccaggcagttatgttaaggatactggggtcattctagggacacagccttaagctgctagaagcaatgctagagattggtcgagtccctgagtgcagaggtttgggaagagttgttatgtgcgtagagatgtgcagttcgcccctcagaaggatttcagaggttataccaaagaccaaagccacgaagacaggatytaaggatttcagtgtcatctgtgacaggtgggggtactagggaggtctacatcctcttccccagagccctctattccacactggcctggcagacaccttgcatctccatgtcactgaccactgtagggatcccagccacagacacacacacacacacgcgcgcacacacacacactgcaaaacactgccacagcttctctgaaattttgttttttgttttttttttttgtaaactttgcaatgcttgagtttctggatataagcccatttga

SEQ ID NO: 710938 - DNA, 499 bp, Homo sapiens
atcccagaacaccaggcttttggccccatgcagatctggggctgcccagacacccatagctccctggacagcctgggtcttagctcctggcatcccacccctggcaacctggacccatgaagccccaacactgatgcatcttctactctaagaaggagttcagggtgcgctgtgcttctaggaaaaagactgatctatgatgcatattttctcacaygatattttaaagttccttaaattagtatctgttttacaattattaagcacctttcacagcaggatagctctttttctcctctcagctcctacccattccccaacaaaatctgtcactaggtagatgagatcttagtagcaaagaagtagggtataagttttaaaaaactgttctgactgcagaaaatccaaaagaatggaacaaaaattcctcttgaaattaagcaattatagcaaggttgcaggataaaggttattatacaaaagtcagtcactttcctat

SEQ ID NO: 710939 - DNA, 499 bp, Homo sapiens
atcccagaacaccaggcttttggccccatgcagatctggggctgcccagacacccatagctccctggacagcctgggtcttagctcctggcatcccacccctggcaacctggacccatgaagccccaacactgatgcatcttctactctaagaaggagttcagggtgcgctgtgcttctaggaaaaagactgatctatgatgcatattttctcacatgatattttaaagttccttaaattagtatctgttttacaattattaagcacctttcacagcaggatagctctttttctcctctcagctcctacccattccccaacaaaatctrtcactaggtagatgagatcttagtagcaaagaagtagggtataagttttaaaaaactgttctgactgcagaaaatccaaaagaatggaacaaaaattcctcttgaaattaagcaattatagcaaggttgcaggataaaggttattatacaaaagtcagtcactttcctat

SEQ ID NO: 710940 - DNA, 707 bp, Homo sapiens
tcccccctccaccacaaaaatatatctctacagttccttaggtctgaaggaacacaagttctcttyaagtgatccatgatcaaaaggatcatggctttctttaggtcacatgacacagcctcagccagtacagaggccaaggcatggggaatactccctggcgggaaggctggagcagatgcttccgtagttaaaacaggccccgagagaagtgcagctggttgccttggagcgaggacacattcttctgcaactccagtgctcatttcagcatgagcactggctcaaggaggagctgaggaggacgatggcgtgcagtgaacgttaatagagcatgcactgtttggatgcaggtgcccagcacagggacatgaaggaagtgctccaagtgaggaggtgctcaaaagggagcccctgctgtgagactgctcctgggccccaaaccctctccactcccctctccaccatgccctatccaaacctggggctaatccagccacccaagtccatgtgggaccaggccaggattccctgtggcctttcgcagctgaccagagggaccctattcccaacgctgggtgatgagcaggaaagaggaggccctccacaaaggtccactcagttgcagagcagcctctagtgaggctgagccctcccaagactcagggaggttgccaatgtgtccccttctctgggaccgttgtcct

SEQ ID NO: 710941 - DNA, 781 bp, Homo sapiens
tgggaggcgtggagttgggggtggggccggggttcccgccaggagcgacaaaggacacccccattgtctatgcatcgagtatgtgtcgaagggggcggctgggcccggagcggcaagacgcctgtcccgagatatcggggtcccgcgacccacctcgtgtcccttgggcccgatcccctcctccttcccgcctcccccggttccagtcacccgccccccggcccgggtcccaccggctggagtgacctcctcgccgcggcctgggsgggacaagttccaggagcccgggaccccgattctgcggccgagtccactgcagaggcggggatggagctgcgcgctaggcgccaactccctccccgcagctccggccccacctggcagagcgccgctcacggaagcccagcgtcggaggacccctggctgcagccgccaatcccgacgtgtcggccgaaacccctcctccggcgcagttggctcctcctggatcccgcgggactcggcgtcgtttccgggtttgcccgccccaggcacgtgcacagtgagtttgtgtaaatccagttagaccaaaatgagcgaggtggagagcctcttaaccggatgctacgggtgatgactgggaggaggagaaaaattacctctttatcttgcatgaacatcttaattttcaggtattgggcgtcaggcaaagataattaaagctatgtccatgagtcttatcccttgaggccttgtccgcttgatattttctttgcctaactcacttttaaaattttattat

SEQ ID NO: 710942 - DNA, 705 bp, Homo sapiens
cttcctgacctcaggtgatctgcccgcctcagcctcccaaagtgctgggattacaggtgtgagccaccgtgcctggccatgttaaaatacatttttaaggcaatctgggaaaactgaacttagactgcagctgggaaaactgaactcagagtgcaaaccaaaggataataagaaatatccgttaatttggagccttggggtaatggtactggggttaagatttttaaaaatttatttttctgtcagacatgcatactgaactacataataaaatattgatgggtctaatatgatttgctttaaaatactccaggaaacaaaaataaggacccagtgagatgaatgaaaccatgtcacaagaatgacaggacgctaataacctgctgaggcttggcgacggtgcatgcaggctcatagggttatctctgctttggacatggtagcgcacacctgtaatcccagctacttgggaggctgaggtgggaggattgaatccaggagactagcctgggcaacacagtaagaccccgtctcaaaaaacaaagcaacattattatctctgcttttaggaatgtttraaagtctccttagtaaaaagtagcaaaagtggtaaggcacctatgggagatgaagtgcacatggattgctgtgaagggtcaggagggcatgcttgcaaagtctgtaatgaaatgttaaaaaaaaaaa

SEQ ID NO: 710943 - DNA, 959 bp, Homo sapiens
tctacagtgaagattaatggaccagcctctttcccggtcccaagactgcaagaggtggagacaggtggatagtcctgtagtggtatttttgcatatttttgagagagaaacactagcaaaataaatgacaattagtaaaaatgtttgaaatgttggtttggttaactattttctttataagttaacatgaattagttttgggggggtggggttttgacacagtgtcttgttgtgtcatccaggctggagtacagtggcatgcacctgacctatgacttcgtttaaacaaagtgatgggctgggcctgtagtcccagaactttgagaggccgaagtgggcagatcacttgtggccaggagttaaagaccagcctgggaaacatggcaaaacaccatctctactaaaaatacaaaaatttgctgggcatggtggcacacacctgtagtcccagttacttcagaggctgaggaaggagaatctcttgaacccaggaggtggaggttgcagtgagccaagatgagccactgcactctagcctgggcaacagagcgagactctgccaaaaaaaaaaaaagatgatctctgtgtattaatcagctcacaaatagtgattattttcaaaaggtcttttggtaattttttttttatccagggccttgtgagaaatctcatgtttctgtttcctcatatattttcaattgtttttctttattttcttcagtgtctaatcactgtayactatgtaattcctaaaggggaagaaccattccgaagtggttgagactctattttggtatcgttaggactggattggagatgagactaaatgtcccaacataatcttatgttggaacaaagattatccctcttttccccaaacaaaatatggattctgtctccatgcctttgattccataattccctagagattggtcatgtaacattaaacatggaggtca

SEQ ID NO: 710944 - DNA, 635 bp, Homo sapiens
tggttctgtcctcaaggatctcaaggagtaatgaaatctgtacagaactaactagaaccctaaataaccagtttccttaattatggtatcctagataaccaaccccttaagtaaacacttctctcttggttactttcctctcacatcacccagctttcataattcctaaatgaggcaaagtgtaagcccaaatacctataacttaagaagagatctgtaagggattgactacatttgtatttgatcacaaggccttcttgttcatttattggtggcattctttcattcaaaatcattttattgcctaacatgctagacactgtattgatacgcgtgtgagccaggtagacaggattcctgcccgcaaagaggaagggctacagcaggcaacaaacatgcaaataagtaattgatttcaaataagaatagttgtgttaaaatagagatcctggccgggcgcggtggctcacgcctgttaatcccaacactctgggaggctgaggcgcgtggatcacttgaggtcaggagttgagaccagcctgggcaacatgacaamaccctgtttctactgaaaatacaaaaaaattatccagacgtggtggtgcatgcctgtaatcccagctctttgggaggct

SEQ ID NO: 710945 - DNA, 934 bp, Homo sapiens
ccctctatcattatgtaacacaccaactctccctttgctttctgtcatgagtggaagctttctgaggccctcactagaatcagatcctgccaccatgcttcttgtacaacctgcagaaccataagccaaataaaccttttctttgtaaattacccagcctcaggtattcctttatgacagcacaaaatagactaataggcagggttaagattcaaataaagggagtccactcagtagttagagtttgggggtaagaccccaggctgaattaccctgcataacaraagagagggaaattccaagggtgtggtaggatggaagtggacaggaaggaagcagcaacgcagccaagaactgtagtgaagagaaatttctaagacttttttagcttgttcgccacaagactgaatgtaaaccctctcctcccttgcccctgtgagggcttcagtaaagtccagattactttttgatggcacagactgagttctgcatttgagtcggtgcagggtgaaggcaagggcatccgagaatgacagggctgtccacatcatctacactttgttttaacttaaagtcatagtcttcttatatgcaacagtgttttggtcatgtaaatgggattttagaaattttctattcattcttttttaatgtgctttttaagttattactcaatgattacagttcactgtaaaaaatatgggcagaccaaaagggtaaaataaaaaatgtcctttatttcactactcagaggtaatcactgtgagcttttgatatgcattcattcaggctttctctacacaaatattctccctcaagttttaaagtgggatcatagtgtcacgtggtttttaatctactttttaaacttaagcagctttatgggtatcacttcaggtcaataaatactgtccttcaacaacattttaatatc

SEQ ID NO: 710946 - DNA, 605 bp, Homo sapiens
gtctatggtgcagtttaaatctgatgtttctttgttgattttcagtctagatgctctgtccaatgctgatagaggcatattgacatccccaactattacatgtattatggcctatctctccctttagatctaatgatatttgctttatttacctgagtgctccagtattgggtacatatattttctaattgttatattctcttgctaaattgatctctttattattttataatgtcattcatttttttacagaacatgaagtctgatacagaacatgaagttttacagaacatgttttgtctgatattataagtatagctactcctcctcacttttggattctgcttgtataaaatatctttttctatactttcacttttatctacatgtgtctttacaggtgagacgagcttcttgtaggcagcatataatgaggtccttctgtttttwtccattcagtaggtctctatcttttaaaagagggaatttaccaaactattttttgttcttaagttctataatttcattacaatgtgtatttattatagttttcctactcatgactgtatgtacttcttcaattctgtctttgattaattctgaaa

SEQ ID NO: 710947 - DNA, 1745 bp, Homo sapiens
cagacaaataaaaccgcctccccttcccacctccccacccttctgtgacagaggtcattcccccacccaaccccattccactggcctccctcctccaccctgaacaccttcatggggctaccacaattagaccctgaaatgtagaggaaatatttgggaaatcccagagggaagggggctctccaattttcttctctctcttggccacacagaaccagggtaaggttagctacttgacccaaactctttctgaaccaagaatatcctctttataaaaccatagtattttcttaaaaatcgtgactggttcctacaaggaaacacagtaggagccgcttttgtttatttattaacttttttgagacagggtctcgctctgtcrctcaggctggagtgcagtggtgtgatcacagctcactggatccatccacttcttgggctcaatcaatcctcccctgcctcagcctccccagcaagctgagactacaggcacccggctaatttttgcattttttgtagagacggggttttaccatgttgcccagactggtctcaaattcctgggctcaagtaatccgcctgcctaggcctcccatgttgtcgggattacagatgtgagccaccctgcctggcctgtggctttgtagtccagaattccaccctgggaatctaccacatggatgtgcttgttcctgtgcctagatgggatgttcttgctcctgtgcctggatgggatgtcccacatgacctcaatagtgatagccccagcgtggaaacaatgcaaatgactccagaaggagttgaacaaatacctccagaaaaaccactcaataagataactctgcccaatggggccgggtgcagtggctcatgcctgtcatctcagaacttttggggaggccgaggcggacggattgcctgagctcaggagttcgagaccagccaacatagtgaaaccctgtctctaccaaaaatacaaaaaattagctgggtgtggtgacacatgcctgtagtcccagctacttgggaggctgagtcaagaattgcttgagcccgggaggcggaggttacagtgagctgagatcgcaccactgcactccagcctgggtgatagaatgagaccccgtctcaaaaatatataaataataagatattctgccactgttaaggaggaaggaagagccctacgcaggctgttatggaaatgttatggaaagcaggctgctaaattcttcagtgtgagtcccaagctgtaggacagggagtcgtgaacagctggcctcgtgtgtcactgtctacagcaggtgtctgtctgcaggtcacacctgcagtggggcatgaaatcatttgattgggttatgacgagccacctttctttgtaaacaaaatgtaattgaatggaatggaatagactacacaactccagatgggcactccatgccacaagtatggttgagttacacttgtgttttatttctatacgagtgcccgtgtgtaccaggttgtaagatctattgttcactgtggcttgttgcaaaaaaaaaaaaaaaaaaaaattggaaagccttgaaatggaaactatctaaaagaaaggacacaggtgggattcagtgactgactcacgcctataatctcagagctttgagaggccgaggtgggaggattgctcgaggccaggagtcccagaccagcctgggcaacccagcgagaccccatctctacaaaaaaataacaaaaaattagca

SEQ ID NO: 710948 - DNA, 833 bp, Homo sapiens
tcccctcttggatgacattctttttgttcttccaagagcagtgtttcttgaccctatcaagcctcaaatccctttttatagcaaagagtttatattgcctttactatgatcctgaatgaaaattataggtaatataactttcctatacatataatttccaaaatattaatataatgccttcactctaacataaaatctattaaaagcagatgtttccaatatgtaaatactcaggcataactataccagcaggtacatttaattgatgagatcttctcatgcacccacttacaacacatacggctgggttcacaggaaacaagacaatactgaatactgtcaacactttgatttgccattttgaaataaggggtaaatcagtatattaaataagtgtgtgtataaatagccccccacacataaacacacacacatacttacacataygcagaacaaccgtgatgtgacacttacggtgagtgacccacacaccctaaagagcattgccatcaggaatacagttttccaaaatgcgaacctctcttggccaagtttaaataatccaaagtatagttttcctcaatttacacagcagttgtattcctggaaattgtcaggtgtgttaaaaccatgcaaaacaatgtcctgtgttcatttgcaaaatgaaattatgttccgagcccagagactcctaagcagaatcatggatgtgtggcataagcttgagagccatgcagagtgcaaagctgtgattgcagaacatgcctgcactttaagggacaggtctggagctacttaatgctagtggcacccccacagtaccccgacaacta

SEQ ID NO: 710949 - DNA, 581 bp, Homo sapiens
cagagaggttgttgagatgtatgtggcaaggacaaaggacagctcttcaacaattgcccttcctgtttttcctgtaggaatcgtaacatcatttacatgttatatcgaaatgggccatgwgtgtgtagctggccttttttttcctaccatgtacttgtgtgttctggaatcagtcagctagaaaatatttaccaagtgtcttaggctttttcactgtagtgtgcatttaacgtacacagtaaagaatgaaggctggcactaaactgttagctaatcatccggtgttccatgtgaatgacagaacacggaataaacctgatgacaccaccactttattttgagctaaatcctcatttaagtgagaacaggacaggtttcaccactgcctcctttggcaacttgagtggtggtgttcccaccgagtttatggctgcaaagataggtcttttctcgtatttatgtataaacaggtaccagttttgattttatttaatcatttcatacattaacatacatgacacatcaaaatgagaaatgcacagtttaaccgttcaacagctggccttacttcaaaagaacac

SEQ ID NO: 710950 - DNA, 1246 bp, Homo sapiens
cctcaagtgttcccccgaccttggcctcccaaagtgctggcattataggtgcgagccactgcacctagccaagaagcacactcttgatccatcaggatcaagagccactaagggtgacaggagggatctggaaaaacatcacggggctgcattagcaagcgtaggggccacagtgggctaaccctacacaagacaggggaggacaaatcaagtctcctggcttttgctgtcccactcatacrggaaaattaaaacatataaaaacaaaaacaaaacaaaagaaaatattgttaaagagggaggaaggcaaggcaggaaggcaaggagagaggatgagactggaagtctggagttctgtgttcattctttctaattacccaaacaagctctggaagcttcagtttccacatctgtgaaatgggataacacctacctccttggtttgttttgatgatcaaacaacagagtgcatgtaaaaacgcttggtatactataaagccctatatgagtattactaataggaccactgtcactcaaaatgtacccaaccacatcaatctagaaagcgtgattttggttgtaatttcatcacattgcttattgctttcaacagcactctgtcatcattaataactcctgcaggtcagcaggcttgagtggcattgagagctgctgagaattgctaggggaaaggcagtccagatttttcgtcttcttctcccacattatacacatttaggccaggcgcttgtggctaacacctgcaatcccagcactttgggaggccaaggtgggcagatcacttgaggccaggagtttgagaccagcctggccaacatagtgaaaccccatctctactaaaaatatgaaaattagccagatgtgatgtgctcctgtaatcccagctacacgggaagctgaggcacgagtatcacttgaacctgggaggcggaggttgcagtgagctgagattgtcccaccacactccagcctgggcgacagagtgagactcagtctcaaataaataaataaataaataaataaataaataaataaataaatatttaaaccaggtaaagtgagattaaaaagaacaagagcagggcatgtggacagaaaggaatgggaaatatttgttctagactccaaagtatgggttgatatcaagttgatgttaagtcagatcatgctctgcttatgttctttttttttttttttttgagaccgagtctcaccctgttgtcca

SEQ ID NO: 710951 - DNA, 2345 bp, Homo sapiens
tgcggggcttaaaacctagatgacgggttaattggtgcagcaaaccaccatggcacatgtttacctatgtaacaaacctgcacattcggcacatgtatcccagaacttaaagtaaaataaaaaataataattgttattggcataggaaataactcactagtacagaatggaaagtccagaataaggtatatagatataaatatattgtatataatataaagttggcatttcaaccagtagagaaagaatggactattcaattaacagtattggaacaatttgctatccgtttggtaaaacattatatttttacctcagactacacacaagtaaattccagatgaatttaaagagataaatgtaaaaaattcaccaattattttttaaatgctggggtggggaaggctttcctaaacaagacctaaatttatgaccaaaattaagaccccagtgatatactggagaaaaacatgactaacaagcasaatagaaaaaaacacctacagattaatttttaaaagcacaaaacagcaaaagatataaacaggcaagccatcaaagaaaaaagaaatacaatagacaatagaacatgaaaacatactccacctcatgagtaataagaaagtgcaattgtattgtttttggccataaagccgcaaagatttagaagtcctaacctaggtttaagggaaaggaaacgctttaaaaaaaaaaaaagttttaattactttctttttcgctaaatttattcccatgccataagtttttgtttcttcactttcttctgggatatcttttgcttccaggaagcctccttttctggttttggatttgttccttttcagtgagaatcatctcaaagagctcatgtatggcttaatctgaccatgagctctagtaagtcctgtggtgcatcttaggtgctttgttcacttggatatactcagtgaccagagaatctacatctaagctgttaagctcagcattcctctctgtatttttaagcatgtgcagcaaaagttcagcactgttttgggggccaccaaccctgtgtccagccccactacttggcaggggcacacctaccaagtccaccactgtaacctcggaatggaacacactgcttctgtaaagtgacatctttagggttggtggcttttcatatatgcatacccttgatggcctggccagtttcacgagtgttcttagtgaacatgaagatttgaacctcttgatttgcatgattttgtggggtttcctgggtcaagtgactagagaaccattttcacagatcaccccaggccgcttaggggaagagaggaaattttttagttggaagtattaattggcaaaaactattttcaaaggtaattcggcaatgtccaaacaaatttaggaattatataccctttgattcagtaatttcacttttagaaatcttatggaaatgctcatacatatgtaaaaaaaattatgtacaggatcctagtcctttcttatggatgtgtggtgaggatagaaaaatacaccagtatttttaagtgaagatggaaaaaatctaagtgttttccagaaaggaaatgttggagaaatcatggcacacccatactaagcaatacaatgctgtcattaaaaaggatgaggttaaaccatatgtactaacacaggaatatctccaagacatattgttaaaaagcctgttgtctgatcatttattatctatccctagctatatattaacgtgaattatacaaggggcatgctgtagatgtcaatcccctttatcatgctttccttactgtagattctggaaagccaaaaactgttttccagatcccttcagagctgagattccaagcaaaactaaaattcctctaattagatgcactcatgtgagacttagattcagaactgaattacgcagggagagaagcagggcctgaggtatctactgtgcaggcttggatattaccagtgtggtgtggttttagagctggtggtgatggtggatggaggctttctgatgtggtaggtgacttgttgaccatagaagcagcagatgcaccttgtgagttcatgtctgtggtatgggattaggagtcattcctagaactcagcttagactccattttgtcagccttttcagtgagtgattccatgagtgatctatattgctcaaaaaattctttttgcttaaactagctagaggagttgtctgaaaatagtacagacaacagatccttaaggaaatgacatcttgaactacttatctgacctggctggtttcaaggcagtgaggatctagttactgttagaggaggggagacagaattgtacctggcatg

SEQ ID NO: 710952 - DNA, 2345 bp, Homo sapiens
tgcggggcttaaaacctagatgacgggttaattggtgcagcaaaccaccatggcacatgtttacctatgtaacaaacctgcacattcggcacatgtatcccagaacttaaagtaaaataaaaaataataattgttattggcataggaaataactcactagtacagaatggaaagtccagaataaggtatatagatataaatatattgtatataatataaagttggcatttcaaccagtagagaaagaatggactattcaattaacagtattggaacaatttgctatccgtttggtaaaacattatatttttacctcagactacacacaagtaaattccagatgaatttaaagagataaatgtaaaaaattcaccaattattttttaaatgctggggtggggaaggctttcctaaacaagacctaaatttatgaccaaaattaagaccccagtgatatactggagaaaaacatgactaacaagcagaatagaaaaaaacacctacagattaatttttaaaagcacaaaacagcaaaagatataaacaggcaagccatcaaagaaaaaagaaatacaatagacaatagaacatgaaaacatactccacctcatgagtaataagaaagtgcaattgtattgtttttggccataaagccgcaaagatttagaagtcctaacctaggtttaagggaaaggaaacgctttaaaaaaaaaaaaagttttaattactttctttttcgctaaatttattcccatgccataagtttttgtttcttcactttcttctgggatatcttttgcttccaggaagcctccttttctggttttggatttgttccttttcagtgagaatcatctcaaagagctcatgtatggcttaatctgaccatgagctctagtaagtcctgtggtgcatcttaggtgctttgttcacttggatatactcagtgaccagagaatctacatctaagctgttaagctcagcattcctctctgtatttttaagcatgtgcagcaaaagttcagcactgttttgggggccaccaaccctgtgtccagccccactacttggcaggggcacacctaccaagtccaccactgtaacctcsgaatggaacacactgcttctgtaaagtgacatctttagggttggtggcttttcatatatgcatacccttgatggcctggccagtttcacgagtgttcttagtgaacatgaagatttgaacctcttgatttgcatgattttgtggggtttcctgggtcaagtgactagagaaccattttcacagatcaccccaggccgcttaggggaagagaggaaattttttagttggaagtattaattggcaaaaactattttcaaaggtaattcggcaatgtccaaacaaatttaggaattatataccctttgattcagtaatttcacttttagaaatcttatggaaatgctcatacatatgtaaaaaaaattatgtacaggatcctagtcctttcttatggatgtgtggtgaggatagaaaaatacaccagtatttttaagtgaagatggaaaaaatctaagtgttttccagaaaggaaatgttggagaaatcatggcacacccatactaagcaatacaatgctgtcattaaaaaggatgaggttaaaccatatgtactaacacaggaatatctccaagacatattgttaaaaagcctgttgtctgatcatttattatctatccctagctatatattaacgtgaattatacaaggggcatgctgtagatgtcaatcccctttatcatgctttccttactgtagattctggaaagccaaaaactgttttccagatcccttcagagctgagattccaagcaaaactaaaattcctctaattagatgcactcatgtgagacttagattcagaactgaattacgcagggagagaagcagggcctgaggtatctactgtgcaggcttggatattaccagtgtggtgtggttttagagctggtggtgatggtggatggaggctttctgatgtggtaggtgacttgttgaccatagaagcagcagatgcaccttgtgagttcatgtctgtggtatgggattaggagtcattcctagaactcagcttagactccattttgtcagccttttcagtgagtgattccatgagtgatctatattgctcaaaaaattctttttgcttaaactagctagaggagttgtctgaaaatagtacagacaacagatccttaaggaaatgacatcttgaactacttatctgacctggctggtttcaaggcagtgaggatctagttactgttagaggaggggagacagaattgtacctggcatg

SEQ ID NO: 710953 - DNA, 579 bp, Homo sapiens
gaaacgtgtcttttgcagcaacttgggtgggactggmtgccattaacccaagtgaagtaactcaggaatggaaaaccaaatatcacatcttctcacttataagtgggagctaagctgtgggtatgcaaaggcatgtggaatggtctaacggacactggagattcagaaggggaggttagaaggggggtgaggaatgaaaaactacctattgggtacaatgtactctatttgggtgctgggtacactaaaatcccagacttcaccactacacagctcatccatgtaaccaaaaaccacttgtacccctaaagctattgaaattttaaaaatttaaaaaacaaaacaaaacaccaaaaacccccaatagctagcactgctctcaagctcatgtcaaaggctctcacatggcctccaaggcccagagtggatttccctgacttcccggccccatttcctgcttctcccgtcatccccagcatgtgcacacaaaccgcattgatcttcagccagttccctggacctaaaggccacctcttgacaattcctctgcctggagcatttattctttttgtgcactaa

SEQ ID NO: 710954 - DNA, 579 bp, Homo sapiens
gaaacgtgtcttttgcagcaacttgggtgggactggatgccattaacccaagtgaagtaactcaggaatggaaaaccaaatatcacatcttctcacttataagtgggagctaagctgtgggtatgcaaaggcatgtggaatggtctaacggacactggagattcagaagggraggttagaaggggggtgaggaatgaaaaactacctattgggtacaatgtactctatttgggtgctgggtacactaaaatcccagacttcaccactacacagctcatccatgtaaccaaaaaccacttgtacccctaaagctattgaaattttaaaaatttaaaaaacaaaacaaaacaccaaaaacccccaatagctagcactgctctcaagctcatgtcaaaggctctcacatggcctccaaggcccagagtggatttccctgacttcccggccccatttcctgcttctcccgtcatccccagcatgtgcacacaaaccgcattgatcttcagccagttccctggacctaaaggccacctcttgacaattcctctgcctggagcatttattctttttgtgcactaa

SEQ ID NO: 710955 - DNA, 629 bp, Homo sapiens
cctgtaaaggactggccagattccagtgtttctatttcagggcaagcaaccacttatctgcactagttgtgttgctaatttctgtactcatagtagtcttatatatcgatttaggattatttccttatatatgtagaattgatgtcaaaattattctcatcataatttaggtagtccctaactattcatcagaattttatgtaaattgaatgaattcgtcactgtagtttcaagtgaaggaggcttacaagttatagtagagattccatgggttaagatggatggtggcacagtagttatagctaaagattactctaggatatccctctttgtgatttttagttaagtttyttatgtttataaagtcatgttagagacatcatgaagcaggtgcttaagtattaatgatggctaatattaatctatcactcgtcttcaacagttcagcaattgtatatcactagcttttgctacatgtgtgtgcaaatatacacacttatttggtaaactgaccctcaaaattttagttctcacagtttttcttttttttaattatactttaagttctagggtacatgtgcataacatgtaggtttgttacatatgtacacctgtgccatgttggtgtg

SEQ ID NO: 710956 - DNA, 629 bp, Homo sapiens
cctgtaaaggactggccagattccagtgtttctatttcagggcaagcaaccacttatctgcactagttgtgttgctaatttctgtactcatagtagtcttatatatcgatttaggattatttccttatatatgtagaattgatgtcaaaattattctcatcataatttaggtagtccctaactattcatcagaattttatgtaaattgaatgaattcgtcactgtagtttcaagtgaaggaggcttacaagttatagtagagattccatgggttaagatggatggtggcacagtagttatagctaaagattactctaggatatccctctttgtgatttttagttaagttttttatgtttataaagtcatgttagagacatcatgaagcaggtgcttaagtattaatgatggctaatattaatctatcactcgtcttcaacagttcagcaattgtatatcactagcttttgctacaygtgtgtgcaaatatacacacttatttggtaaactgaccctcaaaattttagttctcacagtttttcttttttttaattatactttaagttctagggtacatgtgcataacatgtaggtttgttacatatgtacacctgtgccatgttggtgtg

SEQ ID NO: 710957 - DNA, 587 bp, Homo sapiens
aggctgcagtgatcataatgataatgttgttcacaggcaccctgtaagacctcatttacataggctaatagggctggagaagctcaagcaaaaattaataatgattaactgtgtttttatttgactttcrattgtgattttcttttttaattgccgatgcacttccataaatagagtcaacttttagttctcacctgagtgtaggtaaatgggaggaagtggtgagtggaaggggaaagccaaattgatattaaatattcccataacctttaatcacaaatgcaaattcgtgtttactcagatagggaattgaaagttcttgatgtcatatgggatcacgtattaggatttgagcattatgcagagtaatttgaatttgtattcatcaaaatactgtgaactaaatatatttaattgtatattattccagaaaccttcattttaaatctgtaggtacctaaggacaacatgttaaaatattcttgcattatgataaaaaatggtattctaggaatttctaaatagttttcattgaagcaacttagacttattactgattcttgatatcacagaaaaattaatgtgta

SEQ ID NO: 710958 - DNA, 587 bp, Homo sapiens
aggctgcagtgatcataatgataatgttgttcacaggcaccctgtaagacctcatttacataggctaatagggctggagaagctcaagcaaaaattaataatgattaactgtgtttttatttgactttcaattgtgattttcttttttaattgccgatgcacttccataaatagagtcaacttttagttctcacctgagtgtaggtaaatgggaggaagtggtgagtggaaggggaaagccaaattgatattaaatattcccataacctttaatcacaaatgcaaattcgtgtttactcagatagggaattgaaagttcttgatgtcatatgggatcacgtattaggatttgagcattatgcagagtaatttgaatttgtattcatcaaaatactgtgaactaaatatatttaattgtatattattccagaaaccttcattttaaatctgtaggtacctaaggacaacatgttaaaatattcttgcattrtgataaaaaatggtattctaggaatttctaaatagttttcattgaagcaacttagacttattactgattcttgatatcacagaaaaattaatgtgta

SEQ ID NO: 710959 - DNA, 1536 bp, Homo sapiens
acttcaatgggttgagtttgatcagtgtcctttccctctaaaaagtcatagctgtgaggatagtagctttcagtgagctccgtgagtcctactagcaaattatcaacctgaaggtgtttttggggacccctcttcccaaacatgcagttggtattagaagtgaggaccttcttggagaatgtgcccacaaacatggctatctggctaacttttagcacaaatgaaaaccaaggttcttcactgtaccctctactaggcatgccaaacatttttttaggccaattccacagacttttcttggagaaacttgccaaaggtttagaagggactaataatctcaaataacatgtggcttcagaaccctgatacatctggtacaaacaggtggaagacattttagtgcagtgaaaatggtctaatgtgatttggaatataggcacagagaaaaagagactctgttagttggtgttgggtgcttaaattaggagatcatctggccttgaagctgaagctcaaactgaggcagccataatggtccatgtgcagcagagtgtagaaacagagaacatgaagaagaaaagcaacttgaagggagaaacagaaccagaagccaaggcttggcaggatgagagcagtgcagaattgatcactttacaggacttgcaagacccattatttctccctgtgtttccttatcataattttcctctgtctcttccaaacaccctgtacctaagcataagtgtgagggttttctcatttcttgtaatcaagagagtgttaatgaagacattctgaatgaggcttatgtgatttaaaaattgctacaaaagagaatgtgttaatatttatattcaaattgctaaaacacgtatcaaaatatctatatatatattccaaagatatcagaaataatttagaatgggggattcttttttcttaagtgaaaaatttaacttcagaagtatttaaaagaatgtaagaaatgcatagtaatacagcaagaatatgccattttacatatttttaaataatacattgcattgaaatactggtaatatcctttgttaaagaggttgtggtaaaaacataactctcaggatacaaaatcaatgtgcaaaaatcacaagcattcttatacaccaataagagacaaacagagagccaaatcatgagtgaactcccagtcacagttgcttcaaagagaataaaatacctaggaatccaacttacaagggatgtgaaggacctcttcaaggagaactacaaaccactgctcaatgaaataaaagaggatacaaacaaatggaagaacattccatgctcatgggtaggaagaatcaatatcatgaaaatggccatactgcccaaggtaatttatagattcaatgccatccccatcaagctaccaatgactttcttcacagaattggaaaaaactactttaaagttcatatggaaccaaaaaagagccygcattgccaagtcaatcctgagccagaagaacaaagctggaggcatcacactacctgactt

SEQ ID NO: 710960 - DNA, 594 bp, Homo sapiens
cactgattcattaactatgacaccatgtaaatgtggtatctgtaaatgtaacagtggacttgagctaaagcagtacataaaggaaatttattagcaaatgtatcaataagaggcagaktgtttggttctattgcaaataataattttgctaactcaaatgtgtttgtaagaacgtatttagaattgcatttatatgattatattgacttaatgtatagcaattttaagaagtaaagatgtatacagatcaaatgcactggacatttcaagcatttttaattaactttctttttcactatgtgaacattaaaatagagaaaaactctcatcttgccaaattggattaccttttgcaagtgttttaaattttagaagccaaaaacagttttaaaaagacactctagagtactttttaaaaatcttgattaatttaaagtttatgtgacctttttaaaggtggtgacatttctaatgctcagagaaaaactgaagaagtaaaatttatctaatgcaaaaacttagcacatctgtttgaaaactcttaaattatttttcaatagcaacctgccacattttaactattctgttattcag

SEQ ID NO: 710961 - DNA, 1645 bp, Homo sapiens
tattatgtcctaccttccattattatttctgtccctgtttctttaccctgattaatattaacatcatccatccaatttcctgaacccattaactaatatctcattctagaaattaccatgtccygctgattctctatgttaaataaccacagatcctcagtgacactactgtagccctcatcatatctagcccagacattagaataatatctcaattcactctaatctgccattcagttttctcttctaagtcaaaaacagtgatctctctaaaaacaatggatgtataattgtatattcaaaatgcaggcgtgtctggaaagcacaaccacggtgcttactacagaatggttaccaaagaaatgttaattcaacatatggtggcacatcaaggaattttaattattggagggtttttagaatgatcatcctcatttagttcagaggattatttgaattggatgtgagcaaaaattaagagagaaacagtgagtagttcagaaattaggacattagatcaggacattcataataaatttctgagtctgacacatagaaatgatggaatggagattttcttattctgtttgggctgctataacaaaataccagaaattgtgtatcttataaataacagaaatttatttcagttccggaggctgggatgtctaccatcaaagggccagtagattcagtgcctggtaagggcctgctccctggttcatagatcctgctttctcacttgctgtcccttcacatggtggaaggggtaagccagctctctgggatgtcttttataaggacattaaatcatatttatgaagcctccttcctcatgatctaacctcctccaaaaagccccagtcctaatagcaccttactggtgattagatttcaacagaaaattttacagggatacagacattcagactattgcacaggttaaaaagtgaaagctccttaagaagaagaaaaagaattggagataaaatagcaggtagttaaaaacattactatctttgaaatcacccaaagcaattttgtggggttgaaaaagaaaaattgatgcaagaaccccataaatatcaaaatttaagagaaaagaaaaaaaaagtagtagtaaccagcatatttattaacagctactactttaaaatattatgataatttacctatctacaccatctcacacaatgttagaacaaagtcattgagtatttagaaaagaaaagtaaacttagggtagactaacactcaaataggaaagaagttgcaaaattcaagaaacagggaattcaataaaccaaacactcagagagattaaatggactaaaaatcatttgatttggaagataagaggtcatactactttaagagaaaatattttacagtgtgcaggagattactattatgttgggtttagcacgaaaggagttggcttagaaactggagaaatagctatagatattttattttatgattaaccataaaataaaaggcagtaggttgtttaccagtgaaatctgtaaggttttctttacttttgttttactttctttagtttatcttaagttttttaaaaattaattaatttatttatttttaattatactttaagttctagggtacatgtgctacaataaac

SEQ ID NO: 710962 - DNA, 538 bp, Homo sapiens
atgttcaactttaagaaataaagccaaatgattttccaaagtggttgtacctgtgtgtgcttccactagcaatagaagagtaaccacatgcattcctttagtttatatttggacgttaatcacctgtccaccaaatggatttttaaaaaaaagttacctcagtatggtccatagcagtacaattgcaagttttgcatttgatttgcatttatctgattattaatgaccttcagcatctcttcgtatgtttagtagctgcatatgcttccttggtgtgagatatttattcataggttttgccaattttttattaattatctgtgctttacaaaagttcacttgtaagtattttaaaaatatttttggtatttctgtttcacaaacatctttatatttgtaatttgccttttcattttatctaaagtgtctccaataagcaaagtttcacaattttgtagagtttaaaattagagattgcctatatatttagaacatttttwaaaaagaccttccatattgcaaccatttttttctattt

SEQ ID NO: 710963 - DNA, 2061 bp, Homo sapiens
ctactctgggcacattgcttatgcggtagccctgttctgcaaggagcagtgcctctgctgctgctatgcactgccacttcaagaaaagttgctgtttaataccattggctcacactccaattctttcccgagtgaagccaagaaccctcttgggctaagccccaactttggagcttgcttgtcctgcatcaatacctaaaaatttgcaattctaaaaatctcccaggtgatactaatctgccagtctagaggctgcctcttgagcgctactgttctgtagaaaagtacatgtggaataatctctgtgaggcctctgattcctggtcaaagggtgggatggttttactatctctctttctaattcagaagatgaattatagcttgaccaccattattattctcacaaaaaatagcagtccagcaacattcaaatctcattctaacaaagtcctttcacctcagaactattgccatgcacatcaatcctgaggcagaaggccttggctttgagaatattttgacttagtccagtaatgaaacagtagataaaggatgctctattaggctgtttccttcttttccttattcactgacttcacataaataaattaaataaattaataaattagaatgtttagagattttgaaataaaatatatttcaacatttttcattacttttagacttatttacttttgccaaattaaagaaaacatcaatcattgaaaattcttaacgtgtatttctttccaaacaaaatttgttttgttttatttcttttcggataaaggaagggaaatgcaatttttgaatcgaaaaattatatattcataagacttttttttgctttgatagctcaagtgattctagctaaattgttaaataaaaggacacagtgaacagatatcatcagttactattttttttccaccaagtaaaagcattgtctcttcttcagatctttctagggtaaaggtaactgagagacagtaatgttacccctgacattatctacatatggaccttacacttctaaaatgaattcagagcccatttaggaatcgtaagatactctcagaatagccaaagactacagaatataaatcactttattccttattcttcataattataatttatataaaaactgcttttamaactctctgtaactttgatgaatgaagaatattataaagattatcttgtttgatttttcaggtaaaatttatggctttttttcctgcattttctgtgtgtattagtctgttcaggctgcactagaaaatatcactaaaaaaaaatgctgtatctccaaatgcagtcacatgaggagttagaactccagcatattaagtttttaccaacacaactcagcccataacaatattataactacataacatattttggaataaaaatattttaaaagattgtttaatatataaaaagttcaataatgcacttacattttgctttctaagtgagatgaatgtctttttttttaaaaaaaaaaatcttttcttaccttgaatgtgcaattttttccacaggttaaattctaaataccacatcatattacaagttaggaaaaagcattttcacacagaaaacaatggattttaagaaagcttggagcccacgctagtttcaaaatatatctaacctctgatatatagggctgaaataatagccctatgacaatcaaaccattaaagataaaaatatttcttgagtaaaatgtattcatagatctgccttggattactaagaacccaaagctttgtcaaccacatatctatatgcttttctgcaagttattgaatctcactgagtttcattaattcctttaattcatgttttaaaagaataaaggaaagaaagaaaataaaagaagaaagagagagagaaataatgcaaaccttaagcacaggattgttttaaagaataaaattataaatcaaggactatctctctcttttgttttctatcttattcccaacctcataaacagagttaagcaagtagtaggtgtgcaaaatatatatttagagatttcattaa

SEQ ID NO: 710964 - DNA, 2061 bp, Homo sapiens
ctactctgggcacattgcttatgcggtagccctgttctgcaaggagcagtgcctctgctgctgctatgcactgccacttcaagaaaagttgctgtttaataccattggctcacactccaattctttcccgagtgaagccaagaaccctcttgggctaagccccaactttggagcttgcttgtcctgcatcaatacctaaaaatttgcaattctaaaaatctcccaggtgatactaatctgccagtctagaggctgcctcttgagcgctactgttctgtagaaaagtacatgtggaataatctctgtgaggcctctgattcctggtcaaagggtgggatggttttactatctctctttctaattcagaagatgaattatagcttgaccaccattattattctcacaaaaaatagcagtccagcaacattcaaatctcattctaacaaagtcctttcacctcagaactattgccatgcacatcaatcctgaggcagaaggccttggctttgagaatattttgacttagtccagtaatgaaacagtagataaaggatgctctattaggctgtttccttcttttccttattcactgacttcacataaataaattaaataaattaataaattagaatgtttagagattttgaaataaaatatatttcaacatttttcattacttttagacttatttacttttgccaaattaaagaaaacatcaatcattgaaaattcttaacgtgtatttctttccaaacaaaatttgttttgttttatttcttttcggataaaggaagggaaatgcaatttttgaatcgaaaaattatatattcataagacttttttttgctttgatagctcaagtgattctagctaaattgttaaataaaaggacacagtgaacagatatcatcagttactattttttttccaccaagtaaaagcattgtctcttcttcagatctttctagggtaaaggtaactgagagacagtaatgttacccctgacattatctacatatggaccttacacttctaaaatgaattcagagcccatttaggaatcgtaagatactctcagaatagccaaagactacagaatataaatcactttattccttattcttcataattataatttatataaaaactgcttttaaaactctctgtaactttgatgaatgaagaatattataaagattatcttgtttgatttttcaggtaaaatttatggctttttttcctgcattttctgtgtgtattagtctgttcaggctgcactagaaaatatcactaaaaaaaaatgctgtatctccaaatgcagtcacatgaggagttagaactccagcataytaagtttttaccaacacaactcagcccataacaatattataactacataacatattttggaataaaaatattttaaaagattgtttaatatataaaaagttcaataatgcacttacattttgctttctaagtgagatgaatgtctttttttttaaaaaaaaaaatcttttcttaccttgaatgtgcaattttttccacaggttaaattctaaataccacatcatattacaagttaggaaaaagcattttcacacagaaaacaatggattttaagaaagcttggagcccacgctagtttcaaaatatatctaacctctgatatatagggctgaaataatagccctatgacaatcaaaccattaaagataaaaatatttcttgagtaaaatgtattcatagatctgccttggattactaagaacccaaagctttgtcaaccacatatctatatgcttttctgcaagttattgaatctcactgagtttcattaattcctttaattcatgttttaaaagaataaaggaaagaaagaaaataaaagaagaaagagagagagaaataatgcaaaccttaagcacaggattgttttaaagaataaaattataaatcaaggactatctctctcttttgttttctatcttattcccaacctcataaacagagttaagcaagtagtaggtgtgcaaaatatatatttagagatttcattaa

SEQ ID NO: 710965 - DNA, 2061 bp, Homo sapiens
ctactctgggcacattgcttatgcggtagccctgttctgcaaggagcagtgcctctgctgctgctatgcactgccacttcaagaaaagttgctgtttaataccattggctcacactccaattctttcccgagtgaagccaagaaccctcttgggctaagccccaactttggagcttgcttgtcctgcatcaatacctaaaaatttgcaattctaaaaatctcccaggtgatactaatctgccagtctagaggctgcctcttgagcgctactgttctgtagaaaagtacatgtggaataatctctgtgaggcctctgattcctggtcaaagggtgggatggttttactatctctctttctaattcagaagatgaattatagcttgaccaccattattattctcacaaaaaatagcagtccagcaacattcaaatctcattctaacaaagtcctttcacctcagaactattgccatgcacatcaatcctgaggcagaaggccttggctttgagaatattttgacttagtccagtaatgaaacagtagataaaggatgctctattaggctgtttccttcttttccttattcactgacttcacataaataaattaaataaattaataaattagaatgtttagagattttgaaataaaatatatttcaacatttttcattacttttagacttatttacttttgccaaattaaagaaaacatcaatcattgaaaattcttaacgtgtatttctttccaaacaaaatttgttttgttttatttcttttcggataaaggaagggaaatgcaatttttgaatcgaaaaattatatattcataagacttttttttgctttgatagctcaagtgattctagctaaattgttaaataaaaggacacagtgaacagatatcatcagttactattttttttccaccaagtaaaagcattgtctcttcttcagatctttctagggtaaaggtaactgagagacagtaatgttacccctgacattatctacatatggaccttacacttctaaaatgaattcagagcccatttaggaatcgtaagatactctcagaatagccaaagactacagaatataaatcactttattccttattcttcataattataatttatataaaaactgcttttaaaactctctgtaactttgatgaatgaagaatattataaagattatcttgtttgatttttcaggtaaaatttatggctttttttcctgcattttctgtgtgtattagtctgttcaggctgcactagaaaatatcactaaaaaaaaatgctgtatctccaaatgcagtcacatgaggagttagaactccagcatattaagtttttmccaacacaactcagcccataacaatattataactacataacatattttggaataaaaatattttaaaagattgtttaatatataaaaagttcaataatgcacttacattttgctttctaagtgagatgaatgtctttttttttaaaaaaaaaaatcttttcttaccttgaatgtgcaattttttccacaggttaaattctaaataccacatcatattacaagttaggaaaaagcattttcacacagaaaacaatggattttaagaaagcttggagcccacgctagtttcaaaatatatctaacctctgatatatagggctgaaataatagccctatgacaatcaaaccattaaagataaaaatatttcttgagtaaaatgtattcatagatctgccttggattactaagaacccaaagctttgtcaaccacatatctatatgcttttctgcaagttattgaatctcactgagtttcattaattcctttaattcatgttttaaaagaataaaggaaagaaagaaaataaaagaagaaagagagagagaaataatgcaaaccttaagcacaggattgttttaaagaataaaattataaatcaaggactatctctctcttttgttttctatcttattcccaacctcataaacagagttaagcaagtagtaggtgtgcaaaatatatatttagagatttcattaa

SEQ ID NO: 710966 - DNA, 2061 bp, Homo sapiens
ctactctgggcacattgcttatgcggtagccctgttctgcaaggagcagtgcctctgctgctgctatgcactgccacttcaagaaaagttgctgtttaataccattggctcacactccaattctttcccgagtgaagccaagaaccctcttgggctaagccccaactttggagcttgcttgtcctgcatcaatacctaaaaatttgcaattctaaaaatctcccaggtgatactaatctgccagtctagaggctgcctcttgagcgctactgttctgtagaaaagtacatgtggaataatctctgtgaggcctctgattcctggtcaaagggtgggatggttttactatctctctttctaattcagaagatgaattatagcttgaccaccattattattctcacaaaaaatagcagtccagcaacattcaaatctcattctaacaaagtcctttcacctcagaactattgccatgcacatcaatcctgaggcagaaggccttggctttgagaatattttgacttagtccagtaatgaaacagtagataaaggatgctctattaggctgtttccttcttttccttattcactgacttcacataaataaattaaataaattaataaattagaatgtttagagattttgaaataaaatatatttcaacatttttcattacttttagacttatttacttttgccaaattaaagaaaacatcaatcattgaaaattcttaacgtgtatttctttccaaacaaaatttgttttgttttatttcttttcggataaaggaagggaaatgcaatttttgaatcgaaaaattatatattcataagacttttttttgctttgatagctcaagtgattctagctaaattgttaaataaaaggacacagtgaacagatatcatcagttactattttttttccaccaagtaaaagcattgtctcttcttcagatctttctagggtaaaggtaactgagagacagtaatgttacccctgacattatctacatatggaccttacacttctaaaatgaattcagagcccatttaggaatcgtaagatactctcagaatagccaaagactacagaatataaatcactttattccttattcttcataattataatttatataaaaactgcttttaaaactctctgtaactttgatgaatgaagaatattataaagattatcttgtttgatttttcaggtaaaatttatggctttttttcctgcattttctgtgtgtattagtctgttcaggctgcactagaaaatatcactaaaaaaaaatgctgtatctccaaatgcagtcacatgaggagttagaactccagcatattaagtttttaccaacacaactcagcccataacaatattataactacataacatattttggaataaaaatattttaaaagattgtttaatatataaaaagttcaataatgcacttacattttgctttctaagtgagatgaatgtctttttttwtaaaaaaaaaaatcttttcttaccttgaatgtgcaattttttccacaggttaaattctaaataccacatcatattacaagttaggaaaaagcattttcacacagaaaacaatggattttaagaaagcttggagcccacgctagtttcaaaatatatctaacctctgatatatagggctgaaataatagccctatgacaatcaaaccattaaagataaaaatatttcttgagtaaaatgtattcatagatctgccttggattactaagaacccaaagctttgtcaaccacatatctatatgcttttctgcaagttattgaatctcactgagtttcattaattcctttaattcatgttttaaaagaataaaggaaagaaagaaaataaaagaagaaagagagagagaaataatgcaaaccttaagcacaggattgttttaaagaataaaattataaatcaaggactatctctctcttttgttttctatcttattcccaacctcataaacagagttaagcaagtagtaggtgtgcaaaatatatatttagagatttcattaa

SEQ ID NO: 710967 - DNA, 2061 bp, Homo sapiens
ctactctgggcacattgcttatgcggtagccctgttctgcaaggagcagtgcctctgctgctgctatgcactgccacttcaagaaaagttgctgtttaataccattggctcacactccaattctttcccgagtgaagccaagaaccctcttgggctaagccccaactttggagcttgcttgtcctgcatcaatacctaaaaatttgcaattctaaaaatctcccaggtgatactaatctgccagtctagaggctgcctcttgagcgctactgttctgtagaaaagtacatgtggaataatctctgtgaggcctctgattcctggtcaaagggtgggatggttttactatctctctttctaattcagaagatgaattatagcttgaccaccattattattctcacaaaaaatagcagtccagcaacattcaaatctcattctaacaaagtcctttcacctcagaactattgccatgcacatcaatcctgaggcagaaggccttggctttgagaatattttgacttagtccagtaatgaaacagtagataaaggatgctctattaggctgtttccttcttttccttattcactgacttcacataaataaattaaataaattaataaattagaatgtttagagattttgaaataaaatatatttcaacatttttcattacttttagacttatttacttttgccaaattaaagaaaacatcaatcattgaaaattcttaacgtgtatttctttccaaacaaaatttgttttgttttatttcttttcggataaaggaagggaaatgcaatttttgaatcgaaaaattatatattcataagacttttttttgctttgatagctcaagtgattctagctaaattgttaaataaaaggacacagtgaacagatatcatcagttactattttttttccaccaagtaaaagcattgtctcttcttcagatctttctagggtaaaggtaactgagagacagtaatgttacccctgacattatctacatatggaccttacacttctaaaatgaattcagagcccatttaggaatcgtaagatactctcagaatagccaaagactacagaatataaatcactttattccttattcttcataattataatttatataaaaactgcttttaaaactctctgtaactttgatgaatgaagaatattataaagattatcttgtttgatttttcaggtaaaatttatggctttttttcctgcattttctgtgtgtattagtctgttcaggctgcactagaaaatatcactaaaaaaaaatgctgtatctccaaatgcagtcacatgaggagttagaactccagcatattaagtttttaccaacacaactcagcccataacaatattataactacataacatattttggaataaaaatattttaaaagattgtttaatatataaaaagttcaataatgcacttacattttgctttctaagtgagatgaatgtcttttttttwaaaaaaaaaaatcttttcttaccttgaatgtgcaattttttccacaggttaaattctaaataccacatcatattacaagttaggaaaaagcattttcacacagaaaacaatggattttaagaaagcttggagcccacgctagtttcaaaatatatctaacctctgatatatagggctgaaataatagccctatgacaatcaaaccattaaagataaaaatatttcttgagtaaaatgtattcatagatctgccttggattactaagaacccaaagctttgtcaaccacatatctatatgcttttctgcaagttattgaatctcactgagtttcattaattcctttaattcatgttttaaaagaataaaggaaagaaagaaaataaaagaagaaagagagagagaaataatgcaaaccttaagcacaggattgttttaaagaataaaattataaatcaaggactatctctctcttttgttttctatcttattcccaacctcataaacagagttaagcaagtagtaggtgtgcaaaatatatatttagagatttcattaa

SEQ ID NO: 710968 - DNA, 2061 bp, Homo sapiens
ctactctgggcacattgcttatgcggtagccctgttctgcaaggagcagtgcctctgctgctgctatgcactgccacttcaagaaaagttgctgtttaataccattggctcacactccaattctttcccgagtgaagccaagaaccctcttgggctaagccccaactttggagcttgcttgtcctgcatcaatacctaaaaatttgcaattctaaaaatctcccaggtgatactaatctgccagtctagaggctgcctcttgagcgctactgttctgtagaaaagtacatgtggaataatctctgtgaggcctctgattcctggtcaaagggtgggatggttttactatctctctttctaattcagaagatgaattatagcttgaccaccattattattctcacaaaaaatagcagtccagcaacattcaaatctcattctaacaaagtcctttcacctcagaactattgccatgcacatcaatcctgaggcagaaggccttggctttgagaatattttgacttagtccagtaatgaaacagtagataaaggatgctctattaggctgtttccttcttttccttattcactgacttcacataaataaattaaataaattaataaattagaatgtttagagattttgaaataaaatatatttcaacatttttcattacttttagacttatttacttttgccaaattaaagaaaacatcaatcattgaaaattcttaacgtgtatttctttccaaacaaaatttgttttgttttatttcttttcggataaaggaagggaaatgcaatttttgaatcgaaaaattatatattcataagacttttttttgctttgatagctcaagtgattctagctaaattgttaaataaaaggacacagtgaacagatatcatcagttactattttttttccaccaagtaaaagcattgtctcttcttcagatctttctagggtaaaggtaactgagagacagtaatgttacccctgacattatctacatatggaccttacacttctaaaatgaattcagagcccatttaggaatcgtaagatactctcagaatagccaaagactacagaatataaatcactttattccttattcttcataattataatttatataaaaactgcttttaaaactctctgtaactttgatgaatgaagaatattataaagattatcttgtttgatttttcaggtaaaatttatggctttttttcctgcattttctgtgtgtattagtctgttcaggctgcactagaaaatatcactaaaaaaaaatgctgtatctccaaatgcagtcacatgaggagttagaactccagcatattaagtttttaccaacacaactcagcccataacaatattataactacataacatattttggaataaaaatattttaaaagattgtttaatatataaaaagttcaataatgcacttacattttgctttctaagtgagatgaatgtctttttttttaaaaaaaaaaatcttttcttaccttgaatgtgcaattttttccacaggttaaattctaaataccacatcatattacaagttaggaaaaagcattttcacacagaaaacaatggattttaagaaagyttggagcccacgctagtttcaaaatatatctaacctctgatatatagggctgaaataatagccctatgacaatcaaaccattaaagataaaaatatttcttgagtaaaatgtattcatagatctgccttggattactaagaacccaaagctttgtcaaccacatatctatatgcttttctgcaagttattgaatctcactgagtttcattaattcctttaattcatgttttaaaagaataaaggaaagaaagaaaataaaagaagaaagagagagagaaataatgcaaaccttaagcacaggattgttttaaagaataaaattataaatcaaggactatctctctcttttgttttctatcttattcccaacctcataaacagagttaagcaagtagtaggtgtgcaaaatatatatttagagatttcattaa

SEQ ID NO: 710969 - DNA, 322 bp, Homo sapiens
agattgctggtgccctcccaggttatgccaagacctgatttgctactttttacytaccatgtgagaatgtgcatagaatgcatttagtgtaaactgaagtggaactctcaagggaggataattttgatgtgacttgatggctggatatttctaataacttgctttcagtgatatgccaaagacatctaccaaaagccttatggcacactcagatggacctctaattgagggtggaattcccaatttagtcccttgggcacacatgatttttgcatgtattaattttttctaagttacacaaaaacttaccaatattcaatag

SEQ ID NO: 710970 - DNA, 891 bp, Homo sapiens
tacacatatattcatacacatatgcactcacgcacgttcaaagtaatcattggcaaagcataattaaaacagcaaaaactttacttagtaaggttaatcatgggaaacacagactttgcagtcagccttggattcaaatcaatatttttatttactacaccatttgtaattgctaagcctcaatttattttatttactcaatattttatttacaagccgtttgaggcttgctaagcctcaatttatttgtctttaagtgaaaaaaatctagataataatagtacctacataataagaatctgcatcatttctaatgtgcaatttaaagaaataagaaagcaagtgagctataaagagaaaggaacaatgagcttccaggttgctgacccaasccttgttctccctccttttgactttcccggctcagggtgtttttgttatagacagacacaaggaggtagctgtgcttattgtttcttttttaaaatgaaagttgcatttattagggtgacccatgcggccaagacaagcaggttgccactcagaccagagtgaagtgatgtggctctccctccttatagatactcctcccccaagtaatctctcttcagttcctccccacactatctgctcaaccctaagtctaccctactgctgaggagaggcccagattccataaaaaggaacagggccttagaatttgaggttccttttcacacatcttgacgaaaggccacatcagcgattaggtgctaagctttataaagtgaagaatctctgtccacttctggcagatacagatttgcacattcttatccttgagaaccagttaggtactattgtggtcaaagattaacgacttcacctcaaagtgttatgcaactgcagtgc

SEQ ID NO: 710971 - DNA, 1268 bp, Homo sapiens
aaactagttgttcaccattttgatgatcctggctttgcagcagctcttccagaccttctccttgctgcagaattgtaatggcatggttcgataatggaggaaatccattaaaaggaaaggagcatcgacaaaaatgtgggcctatcaccctgagctcattttgacctactacatcctccctctgcatgagcaagatacttttcaaccaagacatcccaaaaacccatttaataattacctagatatatacacattccaccatttacctctgcgtgtgaccactatcttgaaaccacagagagctattttggattgaaaaatatgcggaaccattccatcaagaatacagcaaattttctccctgtaagaaactagaggaatcactcaaggcctacttttagcagcagtagctgcagacattatctttaaatgagtgcttggtttcagctgaatatgtccaaaggaaaatgacttcaaatcaaataacaacaggggatagaaaatcttgccatctgatagatcttgaggcactgtccttttggaacatgttaacatctacaatcctcttcagaagagtctgttataatcagatgccagatataatttcacatccgaggtttaaaaatttaagaggtcaactaaactttctcagaataaaatggatacaaaattttcccaccccaattgctgggaaatctaatcaatctagatttttttttctcaaatataacttattttcaaatattcattgaacaaatgttagaattataaactttgtttttctttcacactgacgctagccctactacatacttaaaacatagataagacaaaaagaaaatggtgaaaaattatatgagkctgttatttttctgcattagtaataccagtcaatatacttcttgattgatttttgtgtcgatgaaaattctgcagagcattacagtatataaactctttgcaggcctatttaacgtcactattctcttagggcaccagttcaactgaatttctactggggtttatttattccctggcgtttattcacatgcaatctaatctcaaatcctcccaatgctcacctaattcattcgttagtcacttcacagatatgtgaagaggcagaggacccctctaggtggtatattgtaattactctatagatatttgtgaatacatttattcataaatgatttcattattcataaattaaataatctctatcctaagggcagcatgacctgccgacctgatcactgcagcctcct

SEQ ID NO: 710972 - DNA, 1268 bp, Homo sapiens
aaactagttgttcaccattttgatgatcctggctttgcagcagctcttccagaccttctccttgctgcagaattgtaatggcatggttcgataatggaggaaatccattaaaaggaaaggagcatcgacaaaaatgtgggcctatcaccctgagctcattttgacctactacatcctccctctgcatgagcaagatacttttcaaccaagacatcccaaaaacccatttaataattacctagatatatacacattccaccatttacctctgcgtgtgaccactatcttgaaaccacagagagctattttggattgaaaaatatgcggaaccattccatcaagaatacagcaaattttctccctgtaagaaactagaggaatcactcaaggcctacttttagcagcagtagctgcagacattatctttaaatgagtgcttggtttcagctgaatatgtccaaaggaaaatgacttcaaatcaaataacaacaggggatagaaaatcttgccatctgatagatcttgaggcactgtccttttggaacatgttaacatctacaatcctcttcagaagagtctgttataatcagatgccagatataatttcacatccgaggtttaaaaatttaagaggtcaactaaactttctcagaataaaatggatacaaaattttcccaccccaattgctgggaaatctaatcaatctagatttttttttctcaaatataacttattttcaaatattcattgaacaaatgttagaattataaactttgtttttctttcacactgacgctagccctactacatacttaaaacatagataagacaaaaagaaaatggtgaaaaattatatgagtctgttatttttctgcattagtaataccagtcaatatacttcttgattgatttttgtgtcgatgaaaattctgcagagcattacagtatataawctctttgcaggcctatttaacgtcactattctcttagggcaccagttcaactgaatttctactggggtttatttattccctggcgtttattcacatgcaatctaatctcaaatcctcccaatgctcacctaattcattcgttagtcacttcacagatatgtgaagaggcagaggacccctctaggtggtatattgtaattactctatagatatttgtgaatacatttattcataaatgatttcattattcataaattaaataatctctatcctaagggcagcatgacctgccgacctgatcactgcagcctcct

SEQ ID NO: 710973 - DNA, 1268 bp, Homo sapiens
aaactagttgttcaccattttgatgatcctggctttgcagcagctcttccagaccttctccttgctgcagaattgtaatggcatggttcgataatggaggaaatccattaaaaggaaaggagcatcgacaaaaatgtgggcctatcaccctgagctcattttgacctactacatcctccctctgcatgagcaagatacttttcaaccaagacatcccaaaaacccatttaataattacctagatatatacacattccaccatttacctctgcgtgtgaccactatcttgaaaccacagagagctattttggattgaaaaatatgcggaaccattccatcaagaatacagcaaattttctccctgtaagaaactagaggaatcactcaaggcctacttttagcagcagtagctgcagacattatctttaaatgagtgcttggtttcagctgaatatgtccaaaggaaaatgacttcaaatcaaataacaacaggggatagaaaatcttgccatctgatagatcttgaggcactgtccttttggaacatgttaacatctacaatcctcttcagaagagtctgttataatcagatgccagatataatttcacatccgaggtttaaaaatttaagaggtcaactaaactttctcagaataaaatggatacaaaattttcccaccccaattgctgggaaatctaatcaatctagatttttttttctcaaatataacttattttcaaatattcattgaacaaatgttagaattataaactttgtttttctttcacactgacgctagccctactacatacttaaaacatagataagacaaaaagaaaatggtgaaaaattatatgagtctgttatttttctgcattagtaataccagtcaatatacttcttgattgatttttgtgtcgatgaaaattctgcagagcattacagtatataaactctttgcaggcctatttaacgtcactattctcttagggcaccagttcaactgaatttctactggggtttatttattccctggcrtttattcacatgcaatctaatctcaaatcctcccaatgctcacctaattcattcgttagtcacttcacagatatgtgaagaggcagaggacccctctaggtggtatattgtaattactctatagatatttgtgaatacatttattcataaatgatttcattattcataaattaaataatctctatcctaagggcagcatgacctgccgacctgatcactgcagcctcct

SEQ ID NO: 710974 - DNA, 876 bp, Homo sapiens
tcagagaatagttcacagaaatacttacatgtctcaaattatactatatctgtcttttaaccactcagtgacaaaggaaaaattaaagtccagagatttgcaagaaataaatacacttttagtaaagccygtatggttttagcaaataaataaagtacataaaataaataaacttttagtaaaaacctgtaacattttaccatgaaaaaaataatgaggagcaaaacttttctatatcctcacctctatttaaataaactattatgggaaaatgaaagattgataattggtacatgcatataaaaaagttaaagaaaaaaagatcattttggtgtttctggtaacactttattactgtaaccatggaaagtttgggtagaagcctatttttagaggaaaatatgagtggccattttggtttgaagcagaaacaatgagaggtcctggtttagacttgacggaaaagttgaagagaaatggtgttagttgttctacataaagagtagcaatggatatagttttgtatttttttgtaggattaggaagaaaaatagttttcttctctttttgtaaaaatatatatctggaataagaaatagacttgtgaaattgtttctaaaaagcatcagacaataggattcactagagtggctgtgctgatttaaaatcatcagaaagatccattagacaccacagccttgcattcctggtgctctgaagaagagggagctatacctacagtttggatgaagttgcagggaaagaaaccagagcgataaagaggttatgcttcaaaatgagattacagtggaaaagttaattaatatgcaacacttcacaaatagagaaaagtcaaacaacaagggaatgtaagaa

SEQ ID NO: 710975 - DNA, 876 bp, Homo sapiens
tcagagaatagttcacagaaatacttacatgtctcaaattatactatatctgtcttttaaccactcagtgacaaaggaaaaattaaagtccagagatttgcaagaaataaatacacttttagtaaagcctgtatggttttagcaaataaataaagtacataaaataaataaacttttagtawaaacctgtaacattttaccatgaaaaaaataatgaggagcaaaacttttctatatcctcacctctatttaaataaactattatgggaaaatgaaagattgataattggtacatgcatataaaaaagttaaagaaaaaaagatcattttggtgtttctggtaacactttattactgtaaccatggaaagtttgggtagaagcctatttttagaggaaaatatgagtggccattttggtttgaagcagaaacaatgagaggtcctggtttagacttgacggaaaagttgaagagaaatggtgttagttgttctacataaagagtagcaatggatatagttttgtatttttttgtaggattaggaagaaaaatagttttcttctctttttgtaaaaatatatatctggaataagaaatagacttgtgaaattgtttctaaaaagcatcagacaataggattcactagagtggctgtgctgatttaaaatcatcagaaagatccattagacaccacagccttgcattcctggtgctctgaagaagagggagctatacctacagtttggatgaagttgcagggaaagaaaccagagcgataaagaggttatgcttcaaaatgagattacagtggaaaagttaattaatatgcaacacttcacaaatagagaaaagtcaaacaacaagggaatgtaagaa

SEQ ID NO: 710976 - DNA, 1720 bp, Homo sapiens
taacatgttaaatatgaaaaatatacaatttttatttgtcaattaaaatctataaaataaatttaaaaagcctaataaaatttatttcacacaacttgtaaaaattaacaaagaacactttattgaaatacraaagaatactcagtgaattcaaccgtttagtttttcataattttattttattactatttttaataattattgctttttgtaaataatactgtgaataaacacttaactgaggttcaaaattttttattctttgtgtttctgtttcttcttttaaagtaattaaaattagaaacaatatatttagtaagtagtatgtgtagtgtgatctcaatttttggtaaaattatttctcttcatttttttatctgcttatatttgtatcaaaacatggaatgacattttcaaatgttggctgtcgtgatttctgggcaagtgagggtagaatgttgggtattttcactcttttccttctgcttttctgcatggcttgtctcattaaaaaaaaaaactcacttttttttaaaatttgtgttttatgacagaaattgtggttcttcaacataaataattttacaaatgtgcattccttgatatattttagcagaaatataatattaaaaccttagctagataacagtaaatcaataaattcttcatgattatcttatgctagttggaaaattaaaaatataatctgaataataataaaaggtttattttctttaattgtatataattatatgtaaaatatatatatatatctaatatatatatatacacacacacgtgtgagtgtgtgtatatatgtatatcacccagttttccactttgtttgacatcaagcagggagttgagcaaaaatataaacaactaaaatgcttccaataaaatgctctaaagtttggatgcttgacatttttcaccttttatctgtacgttaattaaagtaattttattgctctaacatagaaatgagtcattttgtttttttttattttcatagtaccaaatatctgtctttactatgtatcgtactttttaactaatttttttagtatcattgggacaatagctgatgtgtagctaaacatatggtgggcacttataaagatacacaactcattttgggatttgggcataaacatacaacatttaataatatattcccatattttgtacagtaacataaccatgacgtcagcaaatttattttgtgaagtgcagtggactagatagtgtcctcccaaaattcatatccttcctagaacctcagaaggtgacattatttggaaataggtttgttgcagatgttattagttaagatacagtaataccagagtagggtgcgtccttaatgcaatgtaactggtgttctttcagagagaagaaagggtacacagacaggcatgcagaatgtcgtgtcatgccatcataggggttatatgcctccaagccaaaacaccaagcattgctagcaaacagcaggagcttacaaaaagccatgaaacacactattcctcagagccttccagaaggaattaacctacaaacaccttggtttcagacttccagcgtccagaatagtgagagaaaaaatctccattgttttaagccatctacattgtggtactttgttatggcagccatgggaaacgaatgcagtaagttatgggcctttgtgccatttggtctcagtcataactactca

SEQ ID NO: 710977 - DNA, 1478 bp, Homo sapiens
tcttctcaacctctgatatggtttagctctctgtccccacccaaatctcaccttgaattataataatccccaggtgtcgtgcgagggacccagtgggaggtaattgaatgatgggggcaggtttttcccgtgctattctcgtaatagtgaataagtctcacacgatctgatggttttataaaggggagttcccctgcttatgttctcttgcctgcctccatgtaagatgtgcctttgctctttcttcaccttccgccatgattgtgaggcctccccagccatgtgaaactgtaagtccattaaacctctttcttttataaattacccagtctcaggtatgtctttattagcaacatgagaatggactaatacaacctcttaatctwgggttcatctacaacaagtgtgttaaaatactattttcaatttaccactgacttatttgtttaagtcaatgatgtttttcctttggcacttgagccctgatatggttagactttgtgtccctacccaaatctcatcatgaattgtcattcccatgtatcaagggaggaatctgatggatggtgactggattatggggagtggtttcccctatgctgttctcatgatagtgagtgagtctcatgagatctgatggttttaaaagtggcagctttctgtgcttgcactcttctcactcctgctgccatgtgaagaaagtgccttgcttcctctttgcctttcatcatggttgttaagtttcctgaggcctcccaagccatgtggaactgtgagccaattaaacctctttcctttataaattacccagactcgggtagtatctttatagtgtaagaacagaacaatataagctctttgcagaaggtgacaatcttgtgctttttctccattgtcccacatggttaaagtagaatgctttattctacatgtctttctagagtgattcccacatccatgacttcaactagtactgatatgcccatactcttgtcccaaactttaagctactgtatctattctttctaccaacttggtcaactgaaagtccccaaagtaactgaacctcaaaatgtctacaattcagtcactcttacttctcctgcctctttaaatgtgattccttttattcctaagcttgtggaaatggcattaacatacagaaaatctcctaagccagaaatctgggacaatttcttcttcattatcaccacatcatataccatgaggctctcaggccatagagccttgggtttttcctgtggatgataggatgcccctgtagggttttcaagcaggagaaagacatggccagagttttgtttgaggagaacactcagatggcattgtggaagatggattgcatgggggaagctataaaagaagctataaactaggttggagatggtcccacttgtggaagttactgatgttgggacctgttctagaattttggaagttggaataaagagtaacac

SEQ ID NO: 710978 - DNA, 1640 bp, Homo sapiens
acaaagggagtgtggttgatgccttcagcaaaagtcacagagcatgatgaagaagagaatagaaaagacctgaatcagaataacactaagttaagcactaaagatagctcatagcaaaccataaaagcttaataaatattactgaaaattatttaactatcaagctgatgatattgatgaagaagatgatgataatgaccatgyagtatagaaaaacccaaagaaggagtttgaagtatgccgatattttttttttcagacaaaaattgtaagtgttagacatatggctgggttctgaacatgccaacattgatacgagattttatcttcaagaaattacacagaatctatggaggagacagatattaaatagttataatacagtgtgagatattctgtttggagagatatatattcagcccttaggatagaaaaagaattcagtaataattgcagaatttttacacaagctggattgtgaaggacacataatgattttgtagtgaataaaaaagtctttgtgatttgcttatcaaggtagcttgaaattcacattctaatctactgatttaataactaaaggattgtttcacatgggattgagcataattctcagaagtaattttcataaaatacatgttactaaaataatgttaatcaatcaattaaatgttcatcaaatgctaatttaattggtattaaaaaacagctctggtcattcactccaagattgagttcttaattttaggcttaaagactctggaaagaaacaagaaccaaggacagtcacatgatccagaaaggaaaacattgcttatgggccatatgcttttctaagcctcaggactttattgtggctaaagcaagaacacatcaatatgtgggataagaaacctctgaaagtgcatttcattatctgaaagaatcaaaacagtgaagaagagtgaatttatctacatattgaaagagattcagtgagtaatttgtccagtctctttcttatctaatttaatccaaacaccacccattgatggggagtttcaattttcagtattttagcctaatgctcaggaaggaatgccagtgaacatggacttgtggctttaagtgactaatcatagcaactgctatacaaacatgtaaggaaaagccaacagactatgatgaatgagaaacttccttatatttcattcctttggtgctttttttccttcttcctttctcttctctaaacattttttcttttttttttttttgacagagtctaattctgtcacacaggctggagtgcagtggagcaatctggcctcactgcaacctctgtctccgggttcaagccatcctctcacctcaccctcctgagtagctgggagtacaggtgtgcaccaccatgaccagctattttttttttttttttttttttttgtagagacagggtttcaccatgttgcccaggctggtctcaaactcctgacctcaagtgcctcccaaagtgctgagattacaggtgtaaactactgtgccctgccctctaaacatttttttctaagcgactccaagactgcatgttcaattgagatgacaggcagtggagttctgtgggccacacggatgttatttgtttgggggtagctgacaca

SEQ ID NO: 710979 - DNA, 1640 bp, Homo sapiens
acaaagggagtgtggttgatgccttcagcaaaagtcacagagcatgatgaagaagagaatagaaaagacctgaatcagaataacactaagttaagcactaaagatagctcatagcaaaccataaaagcttaataaatattactgaaaattatttaactatcaagctgatgatattgatgaagaagatgatgataatgaccatgtagtatagaaaaacccaaagaaggagtttgaagtatgccgatattttttttttcagacaaaaattgtaagtgttagacatatggctgggttctgaacatgccaacattgatacgagattttatcttcaagaaattacacagaatctatggaggagacagatattaaatagttataatacagtgtgagatattctgtttggagagatatatattcagcccttaggatagaaaaagaattcagtaataattgcagaatttttacacaagctggattgtgaaggacacataatgattttgtagtgaataaaaaagtctttgtgatttgcttatcaaggtagcttgaaattcacattcwaatctactgatttaataactaaaggattgtttcacatgggattgagcataattctcagaagtaattttcataaaatacatgttactaaaataatgttaatcaatcaattaaatgttcatcaaatgctaatttaattggtattaaaaaacagctctggtcattcactccaagattgagttcttaattttaggcttaaagactctggaaagaaacaagaaccaaggacagtcacatgatccagaaaggaaaacattgcttatgggccatatgcttttctaagcctcaggactttattgtggctaaagcaagaacacatcaatatgtgggataagaaacctctgaaagtgcatttcattatctgaaagaatcaaaacagtgaagaagagtgaatttatctacatattgaaagagattcagtgagtaatttgtccagtctctttcttatctaatttaatccaaacaccacccattgatggggagtttcaattttcagtattttagcctaatgctcaggaaggaatgccagtgaacatggacttgtggctttaagtgactaatcatagcaactgctatacaaacatgtaaggaaaagccaacagactatgatgaatgagaaacttccttatatttcattcctttggtgctttttttccttcttcctttctcttctctaaacattttttcttttttttttttttgacagagtctaattctgtcacacaggctggagtgcagtggagcaatctggcctcactgcaacctctgtctccgggttcaagccatcctctcacctcaccctcctgagtagctgggagtacaggtgtgcaccaccatgaccagctattttttttttttttttttttttttgtagagacagggtttcaccatgttgcccaggctggtctcaaactcctgacctcaagtgcctcccaaagtgctgagattacaggtgtaaactactgtgccctgccctctaaacatttttttctaagcgactccaagactgcatgttcaattgagatgacaggcagtggagttctgtgggccacacggatgttatttgtttgggggtagctgacaca

SEQ ID NO: 710980 - DNA, 1640 bp, Homo sapiens
acaaagggagtgtggttgatgccttcagcaaaagtcacagagcatgatgaagaagagaatagaaaagacctgaatcagaataacactaagttaagcactaaagatagctcatagcaaaccataaaagcttaataaatattactgaaaattatttaactatcaagctgatgatattgatgaagaagatgatgataatgaccatgtagtatagaaaaacccaaagaaggagtttgaagtatgccgatattttttttttcagacaaaaattgtaagtgttagacatatggctgggttctgaacatgccaacattgatacgagattttatcttcaagaaattacacagaatctatggaggagacagatattaaatagttataatacagtgtgagatattctgtttggagagatatatattcagcccttaggatagaaaaagaattcagtaataattgcagaatttttacacaagctggattgtgaaggacacataatgattttgtagtgaataaaaaagtctttgtgatttgcttatcaaggtagcttgaaattcacattctaatctactgatttaataactaaaggattgtttcacatgggattgagcataattctcagaagtaattttcataaaatacatgttactaaaataatgttaatcaatcaattaaatgttcatcaaatgctaatttaattggtattaaaaaacagctctggtcattcactccaagattgagttcttaattttaggcttaaagactctggaaagaaacaagaaccaaggacagtcacatgatccagaaaggaaaacattgcttatgggccatatgcttttstaagcctcaggactttattgtggctaaagcaagaacacatcaatatgtgggataagaaacctctgaaagtgcatttcattatctgaaagaatcaaaacagtgaagaagagtgaatttatctacatattgaaagagattcagtgagtaatttgtccagtctctttcttatctaatttaatccaaacaccacccattgatggggagtttcaattttcagtattttagcctaatgctcaggaaggaatgccagtgaacatggacttgtggctttaagtgactaatcatagcaactgctatacaaacatgtaaggaaaagccaacagactatgatgaatgagaaacttccttatatttcattcctttggtgctttttttccttcttcctttctcttctctaaacattttttcttttttttttttttgacagagtctaattctgtcacacaggctggagtgcagtggagcaatctggcctcactgcaacctctgtctccgggttcaagccatcctctcacctcaccctcctgagtagctgggagtacaggtgtgcaccaccatgaccagctattttttttttttttttttttttttgtagagacagggtttcaccatgttgcccaggctggtctcaaactcctgacctcaagtgcctcccaaagtgctgagattacaggtgtaaactactgtgccctgccctctaaacatttttttctaagcgactccaagactgcatgttcaattgagatgacaggcagtggagttctgtgggccacacggatgttatttgtttgggggtagctgacaca

SEQ ID NO: 710981 - DNA, 605 bp, Homo sapiens
tatccgatctaaaaaagtaaaccatactactatcctatgagtagatagaataatcccattttacagatgaaaacagatgaggattcagaggttgcaataatatgcccaaagtcacaaagctaagaattagcagagtcaggattcaaactttagacatgcctgtctccaaagctagtaagttaatcttatctaccctcacaccaaagaaagactgggtgtgtctctgtttttgctagaatattggttcagctggttttattttttatastgaccaaaattttagtggcttcaatggatagaagttcatttctctcttatgtactaatataaatcagagttgacagtccaggggagtaggcggttctgctctccaaggtccctcagacacctgggtccttctatcttgctgtttcacaatctccatggctgctgcccttcctgcaggattgatgcagctcacccatctacattccagtctatgggattggaaaagtaggaaatgaaatgcaagcaacttccttttaagaatatggtcctgcctttgttcacacttcccttccactacatccattggccccaagataggcacagagccacacctcact

SEQ ID NO: 710982 - DNA, 597 bp, Homo sapiens
actgatcgcatttctaatgaaaaagacttcgaacagttgataaaaaatgatttatcagataatttcagtaataattttcaagacccactttatagtgaacacatgacacacatcacatggagtgttacggtcatcttctgattgttgggctttaattatgtaaatattttcttcaatcatttaattgcttcattcaggtataattggtatgcaacaaactacatatttaaagtgtgcagctgacatatgtacacacttgtgaagccatcaccacaatcaacatattgagcagatcaatcacacccaaaagatttctcatgcctcatgcccctttgtgtccctgcctcctgcctctgcccacttccttcctaccctgaggaaccagtgatctgcattcttttattacagacaagtttgcagtttttggatttttkttttgtttttgacagtgtttcgctctgtcacccaggctggagtgcagtggcacgatcttggcttactgcagccttcacctcctgggttcaagtgattctcctgcctcagcctcctgagtagctgggattacaggcacctaccaccaaacctagctaatttttg

SEQ ID NO: 710983 - DNA, 735 bp, Homo sapiens
gaataatagtcccattagaatttttattacacaatggagaggtttctctctctctctttaaaaccgctatttcttgagtaacataagaacctgaatccaaatcctgacagtaccatttattagctgtttttgccttgagtcaattacttcatatttcagtgaggcagttttcctcctctgtaaaactgggtagaaatgtccacttcattcattcgctatgcagattacataagataacatatgcaaagtgtttcacctactccgaagtacacagtaaataataaataataatgataactaaaattaacaagttaagaaatatatgatgcaaccatgttgcaggctctaaaatgagagagacattaaatctgttatttgaaaatgagagtcaggacagataaaatgatacatattcaagcttacatagtaagaggcagttgacttaaagtataataaaaaaaaaaaaaaatatatatatatatatatataaaaagattccgggtttcctgacacccaggttgtaactcttttcacctctatgaaattatttgtctttttaaagcaatagaagttattcaaccctacagccacaatataactataacacaaacatggattacrtagttttgagtggaataatatgagtaccaggacatgtgtagacacccagtacttgattcatttttttatcgttgtagcagaattccttgcatatttactgaatggattccaaag

SEQ ID NO: 710984 - DNA, 1291 bp, Homo sapiens
tgcttgtgaacacacatggactctcaagtaaggacatgggttcttgtgcatygagcggtatgtgaacaggccccttcgcctgtgactgggtatttctggaagtttcctgttgttattctctgatcttgtaatgggtttttggacccccacttctccagtcccagggctcagaagcccaccaggctttccgatgctctcagtaagtgttggcttcttgagcaagaagggctaggtcagggggtggggtctggttttactcatctctgagtctagcctctaacccactgcttgatgcagaaaaggtacctggtgaaaatctattaaaatcaatgactgatttcacccaatttggagtgagacatgcctgcacagtctcaatgtctggagagctttacaaaccccaggggacaccagaggctgggccagagagcctgtgtgatggcccagtttcctcacctatgaagtgaggatgcttctaccctcccagagaggtggtgaggagtgaagagagaaaacgtgcacatgcttcctaacacagcacgtaggaagagcattgctattttcatttcggcctccctaggataacagagacacccacaattccctcaggggttgctagtcaacgtgtgaatctcctacaagcactggcgtgtgcttctctccacacactggtccaaggtgagactcaaggcggttctgaggaagtgtctgctttggaatgttaaagatgaatctgggtgtgcatatgtattatgttcccacagtatatttttgcaaaaccacatagcatatattgttttatttacaaagatgagaaaggctgacccacaagctaattgaatcatgcaaataactatttagccatgggagcaattcctacaggcaggctgagcaccaagtgagggaggacagctttggagggcaatctattttataaagtttaccctcacagtgtaactgcctggagattaatgggaatggtggccctagaccttgttttgcctggctttaccaactgaaagagtcaaacagttatatctatcatagacaatttgctgcaactaattaacattaatctgatttcctgtgggtcagtttccttgagatatagtaaacaggccaattacctgccattgacctcttttattataaagatttagatattagcgacagatgtatatgtaaacatatggaatttctaacaatttgaagaaaacatgttaaatccagttaaaagatttttaattggtcttagaagattacaaatttagagtttaaaaaggtatgttga

SEQ ID NO: 710985 - DNA, 1291 bp, Homo sapiens
tgcttgtgaacacacatggactctcaagtaaggacatgggttcttgtgcattgagcggtatgtgaacaggccccttcgcctgtgactgggtatttctggaagtttcctgttgttattctctgatcttgtaatgggtttttggacccccacttctccagtcccagggctcagaagcycaccaggctttccgatgctctcagtaagtgttggcttcttgagcaagaagggctaggtcagggggtggggtctggttttactcatctctgagtctagcctctaacccactgcttgatgcagaaaaggtacctggtgaaaatctattaaaatcaatgactgatttcacccaatttggagtgagacatgcctgcacagtctcaatgtctggagagctttacaaaccccaggggacaccagaggctgggccagagagcctgtgtgatggcccagtttcctcacctatgaagtgaggatgcttctaccctcccagagaggtggtgaggagtgaagagagaaaacgtgcacatgcttcctaacacagcacgtaggaagagcattgctattttcatttcggcctccctaggataacagagacacccacaattccctcaggggttgctagtcaacgtgtgaatctcctacaagcactggcgtgtgcttctctccacacactggtccaaggtgagactcaaggcggttctgaggaagtgtctgctttggaatgttaaagatgaatctgggtgtgcatatgtattatgttcccacagtatatttttgcaaaaccacatagcatatattgttttatttacaaagatgagaaaggctgacccacaagctaattgaatcatgcaaataactatttagccatgggagcaattcctacaggcaggctgagcaccaagtgagggaggacagctttggagggcaatctattttataaagtttaccctcacagtgtaactgcctggagattaatgggaatggtggccctagaccttgttttgcctggctttaccaactgaaagagtcaaacagttatatctatcatagacaatttgctgcaactaattaacattaatctgatttcctgtgggtcagtttccttgagatatagtaaacaggccaattacctgccattgacctcttttattataaagatttagatattagcgacagatgtatatgtaaacatatggaatttctaacaatttgaagaaaacatgttaaatccagttaaaagatttttaattggtcttagaagattacaaatttagagtttaaaaaggtatgttga

SEQ ID NO: 710986 - DNA, 1049 bp, Homo sapiens
tttcacacatcaaaatttgtcaaaccatgtactttataacatagctggttcattatatgtcaattatgcctcaatacatctgctataaaaaaaagttctttgtaaatatttgaaatacttcccatttgtcaaactttttctcccaagaccttgggcctctgagggaaggtttccacacaatatctcaaacaaaagacatcaccactctgaccagtctgggcttccctaaaatgcacttctgctgggagtaccccaacacccttacccacctggatascaccctgttttcccagccatccagggttctttcccttgttccaatagggaaatcactgatggcttagaaatggcaagtcctgctcaaagaaataggatactaaaaataaataagccaaaaaatgttcttatttagaattggtttaacctaaagctaattcaggttcctctgaagactgatggaaacagaaaatcataatttggcaaacaccagaggaaataactactgtcagagccaagtgtagtggcacacgccagtggtcccagctacttgggagtctgaggcgggaagactgcttgaatccaggaggtcaaggctataatgagccaagatcatgccactgcactccagcctgagtcacagagcaagaccctgtctcaaaaacataataaccataactgttctctgcaggaatcactgatgaaactaaagtgataaaaatgtcatgagcaagagggtatttgtagagcctcaaatttctttacaagttacttactgattgcaaaggtaaaaatagtggctttactatgcggaaccctataccatttcaagcatcaaaacaagatactgtttttgattggccattatttatgtcctgatacaatgcactgaaaaaggcatcacttctgtagtattcttcccaaaaatacataactttaaagtaatcataaaaatatgggtcaaggccgggcgcggtggctcacgcctgtaatcccagcactttgggaggctgaggcaggtggatcacgaggtcaggagatcgagaccatcc

SEQ ID NO: 710987 - DNA, 642 bp, Homo sapiens
gacagcaccactgcactcaagcctgggcaacagagtgagcccctatctcagaaaaaaaagttaaaaatgttcaaaaggtactgagtggtcagaaaaacagaataaatgcctcctatcttgtatctttttgttttgttttttgagatagagtcttgctctgtcgcccattctggagttccatggcatgatctcggctcactgcaacttctgcctcccaggttcaagcgattctcctgcctcagtctctcgagcagcttggattacaggtgtgctccaccacgcccagctaatcattgtatttgtagtggagacggggtttcaccatgttggtcaggctggtctcgaactcctgacctcatgatwcgcctgcctcggcctcccaaagtgctgggattacaggcatgagccattgcacccggcccttatcttgtatcttttgacatctcatcattaacatacacctttcttccacaattaaatttagcatcatcatctacaacaaaatgttcctgccccatatactgccactactccactaacataaatgcaaagttcttccaagtgtcataagttcctgtgaccattttcaaagccacgatttatggggaatatcagttattgctctttgtataaataaacaaa

SEQ ID NO: 710988 - DNA, 605 bp, Homo sapiens
tgccctttttcaaaattctttcagagcaagaaaatattttcccagagaattttccagctaatgagatgtcctcccacattccgtatctctctttgaagtaaactgtaatagatgtgttgctgtgtatattttattcctttataccttcattttgaaacaaactttaaataacctctaaactggacaaaattacttttcctttgcagaaaccacatctttatgtcttctttataaacttttcttttcttttcttttctttttgagacggagtctcgctctgtcacccaggctggagtgcagtggcgcgatctcggctcactgcaggctccgccccctgggttcacaccattctcctgcctcagcctcccgagtagctgggactacaggcgcctgagaccacgcccggctaattttttgtgtttttagtagagacggggtttcaccgtgttagccaggatggtctcgatctcctgatctcctgatctgcccgcctcggcctcccaaagtgctgggattacaggcgtgagccaccgcgcccggctataaacttttctttaaccaaaatmacattcaattttttttttttgaaatgtgatctcgctcct

SEQ ID NO: 710989 - DNA, 604 bp, Homo sapiens
tggagggaatatcaaagggggcaaaaggcggggcagaagctgaaggaagaatgagtcccagaggagccagtctggagaggtctgcagctccccaaaaagaccaacacaattttacttttttttttttttaagcaaaaattttggctgagtgcagtggctcatgcctgcaatcccaacactttgtgagggcaaggcaggaggattgcttgaagtttgagaccctgtctctgttaaaaaatagaaaaaattaaaaaaatagctgaatatggtggcatggcatgtgcctgtaatcccagctacccaggaggctggggcaggaggggcgcttgagcctgggaattcgaggttacagggagctatgatggtgccattatactgtagcctggacaactttgtctctaaaaaaatgactaaaataaaataaaatgttgccaactaaatagcgttttatttcaaaagctatttaaaccaacacaaaactaatttacgtacacattttttcctgttaatccaaatttagaaatggaagaagacmaagaaagactcttcctcattcaactgggcaccacagagacccaggagaactgacttggtaaaaatttct

SEQ ID NO: 710990 - DNA, 2659 bp, Homo sapiens
tgttaccattttcagattggggtaactgctcacayaggatgccatctttatcaagagagcaaatcattttgtacaaaaaggcaatgcattcctcttagtggcttttcttttcttctgttattttctgagagattctgaaaaaaaatctaaatgctaaaagtaatgcaaccaattaattccccttgggcatatactatgtgtccatttatatagattatttccttcaattatctcagtacagtatgcaggaactatcattattattattcagttttatagatgtgcaaactgaggctaaagaggttaaattgcccaagggtcacacaactaggaaatagtggaatttggaatcaagtggagacactaggactccatagcctcatttcctttttgctctcttctaatttctatttggtaagaaaaaaaattgccatcagactccccattttttccaatactttgtttgctattatgtctgatgttcagaaaaaatattcggatggtttctaccttttttactcctagacattttggggttatggaaaccatgcctcatgctgtagggaacacttgtcttatttgaactgtaaatgaagtgctagctcaagtcagatttcacccactgtgtgaaccctgagccagaccctatgtttttcctcagtgctaaaatttactgtcagcatactgtatgctgcttatcttccttttggcctacctctgaagaactatatcgattcttcatttaggtcagcaggttgattttctcacctcaactgcaagcctctgaatagtgctagataattcaaatcttcctatcctagagttgtactacattcccgtatatacagatttcttgtctatgttttttttttctcttagggaagaattagaaacatgtttaattgtcagaattaaaggatgcttatataggaagaaagaattatgactgtagaattatacatcttgaagagacctaaaatatcatcgaattcaaagaatgtcacccgcaggaatgaaaggcatgtgccaattaggggtattgacatcacttgataattctgtgtaaaaatatactttcacattccacctcccaaaatacacagtctgctataatacctaggagcatattatctcctgcagcctcacactgaaatttacctgaaattcactgactaaatgaggcatcattaagaagaatgtgacataaaccgttattgcaaggtaggagtactgtatcagagttaagtaagaaaaatagagcccatgcatgccagatagaacaatagagaagagttaatagtgggcattcatttacaagatgttgggaaaactgaaatccaagcatgaggaaagtgaggtcacctaggaattagcagtggcaggaagccagtttctttccttgggttggagagaaacagtgagaatcagagcccagaactggaatcacctggagggaactagaaccatgaagggaagaaccagtgaaaaagaaatttccttttccactccctctaattccctgtgtctcctagtggttgaatctatccagaagccagttgacaaggaagcctgaaaatgtaaccttgcagcgcccagttccctacaatatagagcaagaagcagagaatgaagataaaagaaaatcataagtgaccagcagacttagaatcactgttttaatcccttcatcaattgtatacatgattgcttcaattatctccagatgaagaagacttctcaaatttccttaccaacaaatgtcatagtcacactctcatagccaggaagttatctttctgttattaaaaaattattttagaagttatttatttttgtatacaatgggtaattactgtcttgtgtagttttgtcatcattatatttttaaaactgtaggaatacatttgccatacttattttagtgttgatctttgatgttcaaaaaaaaatttattttaatgtttagatttttatgtatttccctgtttcaaaattatctgataagaatatatcatctgtttcctactttttcttaaaattcatggaagagcatttttcctcctccagctatatacaccagaacttaagaatcttcattcaatgtttttaacaaagtcttatgaaggtagaagaaaatacaatgttaaggctttgaaaaggattaaatttctttaataagttactcaataatgtaaaagtagaataatagtatttagtctactttcaaatggtataccaagtgccttttatgttctgactcatgttctcttaggtcatttttatctatcagccacttttgtagcagccagcttcatgaatgtggaactgagaaacaccttatctcagtatcagcctcttccttcctggtacttctttgatcctcaatatgggagtttgaagtaatcttggtcactcatgcatgtacaacctaagtgtggtaaggaggtaatatagatccttggacaagcctacaccaatggaaagcagtagccgaaggataaatattttttcttctttttttagatggagtttcactcttgttgcccaggctggagtgcagaggcacgatctcagctcactgcaacctccgcctcccaggttcaagtgattctcctgccttagcctcctaagtagctgggattataggcatacaccaaca

SEQ ID NO: 710991 - DNA, 2659 bp, Homo sapiens
tgttaccattttcagattggggtaactgctcacataggatgccatctttatcaagagagcaaatcattttgtacaaaaagrcaatgcattcctcttagtggcttttcttttcttctgttattttctgagagattctgaaaaaaaatctaaatgctaaaagtaatgcaaccaattaattccccttgggcatatactatgtgtccatttatatagattatttccttcaattatctcagtacagtatgcaggaactatcattattattattcagttttatagatgtgcaaactgaggctaaagaggttaaattgcccaagggtcacacaactaggaaatagtggaatttggaatcaagtggagacactaggactccatagcctcatttcctttttgctctcttctaatttctatttggtaagaaaaaaaattgccatcagactccccattttttccaatactttgtttgctattatgtctgatgttcagaaaaaatattcggatggtttctaccttttttactcctagacattttggggttatggaaaccatgcctcatgctgtagggaacacttgtcttatttgaactgtaaatgaagtgctagctcaagtcagatttcacccactgtgtgaaccctgagccagaccctatgtttttcctcagtgctaaaatttactgtcagcatactgtatgctgcttatcttccttttggcctacctctgaagaactatatcgattcttcatttaggtcagcaggttgattttctcacctcaactgcaagcctctgaatagtgctagataattcaaatcttcctatcctagagttgtactacattcccgtatatacagatttcttgtctatgttttttttttctcttagggaagaattagaaacatgtttaattgtcagaattaaaggatgcttatataggaagaaagaattatgactgtagaattatacatcttgaagagacctaaaatatcatcgaattcaaagaatgtcacccgcaggaatgaaaggcatgtgccaattaggggtattgacatcacttgataattctgtgtaaaaatatactttcacattccacctcccaaaatacacagtctgctataatacctaggagcatattatctcctgcagcctcacactgaaatttacctgaaattcactgactaaatgaggcatcattaagaagaatgtgacataaaccgttattgcaaggtaggagtactgtatcagagttaagtaagaaaaatagagcccatgcatgccagatagaacaatagagaagagttaatagtgggcattcatttacaagatgttgggaaaactgaaatccaagcatgaggaaagtgaggtcacctaggaattagcagtggcaggaagccagtttctttccttgggttggagagaaacagtgagaatcagagcccagaactggaatcacctggagggaactagaaccatgaagggaagaaccagtgaaaaagaaatttccttttccactccctctaattccctgtgtctcctagtggttgaatctatccagaagccagttgacaaggaagcctgaaaatgtaaccttgcagcgcccagttccctacaatatagagcaagaagcagagaatgaagataaaagaaaatcataagtgaccagcagacttagaatcactgttttaatcccttcatcaattgtatacatgattgcttcaattatctccagatgaagaagacttctcaaatttccttaccaacaaatgtcatagtcacactctcatagccaggaagttatctttctgttattaaaaaattattttagaagttatttatttttgtatacaatgggtaattactgtcttgtgtagttttgtcatcattatatttttaaaactgtaggaatacatttgccatacttattttagtgttgatctttgatgttcaaaaaaaaatttattttaatgtttagatttttatgtatttccctgtttcaaaattatctgataagaatatatcatctgtttcctactttttcttaaaattcatggaagagcatttttcctcctccagctatatacaccagaacttaagaatcttcattcaatgtttttaacaaagtcttatgaaggtagaagaaaatacaatgttaaggctttgaaaaggattaaatttctttaataagttactcaataatgtaaaagtagaataatagtatttagtctactttcaaatggtataccaagtgccttttatgttctgactcatgttctcttaggtcatttttatctatcagccacttttgtagcagccagcttcatgaatgtggaactgagaaacaccttatctcagtatcagcctcttccttcctggtacttctttgatcctcaatatgggagtttgaagtaatcttggtcactcatgcatgtacaacctaagtgtggtaaggaggtaatatagatccttggacaagcctacaccaatggaaagcagtagccgaaggataaatattttttcttctttttttagatggagtttcactcttgttgcccaggctggagtgcagaggcacgatctcagctcactgcaacctccgcctcccaggttcaagtgattctcctgccttagcctcctaagtagctgggattataggcatacaccaaca

SEQ ID NO: 710992 - DNA, 2659 bp, Homo sapiens
tgttaccattttcagattggggtaactgctcacataggatgccatctttatcaagagagcaaatcattttgtacaaaaaggcaatgcattcctcttagtggcttttcttttcttctgttattttctgagagattctgaaaaaaaatctaaatgctaaaagtaatgcaaccaattaattccccttgggcatatactatgtgtccatttatatagattatttccttcaattatctcagtacagtatgcaggaactatcattattattattcagttttatagatgtgcaaactgaggctaaagaggttaaattgcccaagggtcacacaactaggaaatagtggaatttggaatcaagtggagacactaggactccatagcctcatttcctttttgctctcttctaatttctatttggtaagaaaaaaaattgccatcakactccccattttttccaatactttgtttgctattatgtctgatgttcagaaaaaatattcggatggtttctaccttttttactcctagacattttggggttatggaaaccatgcctcatgctgtagggaacacttgtcttatttgaactgtaaatgaagtgctagctcaagtcagatttcacccactgtgtgaaccctgagccagaccctatgtttttcctcagtgctaaaatttactgtcagcatactgtatgctgcttatcttccttttggcctacctctgaagaactatatcgattcttcatttaggtcagcaggttgattttctcacctcaactgcaagcctctgaatagtgctagataattcaaatcttcctatcctagagttgtactacattcccgtatatacagatttcttgtctatgttttttttttctcttagggaagaattagaaacatgtttaattgtcagaattaaaggatgcttatataggaagaaagaattatgactgtagaattatacatcttgaagagacctaaaatatcatcgaattcaaagaatgtcacccgcaggaatgaaaggcatgtgccaattaggggtattgacatcacttgataattctgtgtaaaaatatactttcacattccacctcccaaaatacacagtctgctataatacctaggagcatattatctcctgcagcctcacactgaaatttacctgaaattcactgactaaatgaggcatcattaagaagaatgtgacataaaccgttattgcaaggtaggagtactgtatcagagttaagtaagaaaaatagagcccatgcatgccagatagaacaatagagaagagttaatagtgggcattcatttacaagatgttgggaaaactgaaatccaagcatgaggaaagtgaggtcacctaggaattagcagtggcaggaagccagtttctttccttgggttggagagaaacagtgagaatcagagcccagaactggaatcacctggagggaactagaaccatgaagggaagaaccagtgaaaaagaaatttccttttccactccctctaattccctgtgtctcctagtggttgaatctatccagaagccagttgacaaggaagcctgaaaatgtaaccttgcagcgcccagttccctacaatatagagcaagaagcagagaatgaagataaaagaaaatcataagtgaccagcagacttagaatcactgttttaatcccttcatcaattgtatacatgattgcttcaattatctccagatgaagaagacttctcaaatttccttaccaacaaatgtcatagtcacactctcatagccaggaagttatctttctgttattaaaaaattattttagaagttatttatttttgtatacaatgggtaattactgtcttgtgtagttttgtcatcattatatttttaaaactgtaggaatacatttgccatacttattttagtgttgatctttgatgttcaaaaaaaaatttattttaatgtttagatttttatgtatttccctgtttcaaaattatctgataagaatatatcatctgtttcctactttttcttaaaattcatggaagagcatttttcctcctccagctatatacaccagaacttaagaatcttcattcaatgtttttaacaaagtcttatgaaggtagaagaaaatacaatgttaaggctttgaaaaggattaaatttctttaataagttactcaataatgtaaaagtagaataatagtatttagtctactttcaaatggtataccaagtgccttttatgttctgactcatgttctcttaggtcatttttatctatcagccacttttgtagcagccagcttcatgaatgtggaactgagaaacaccttatctcagtatcagcctcttccttcctggtacttctttgatcctcaatatgggagtttgaagtaatcttggtcactcatgcatgtacaacctaagtgtggtaaggaggtaatatagatccttggacaagcctacaccaatggaaagcagtagccgaaggataaatattttttcttctttttttagatggagtttcactcttgttgcccaggctggagtgcagaggcacgatctcagctcactgcaacctccgcctcccaggttcaagtgattctcctgccttagcctcctaagtagctgggattataggcatacaccaaca

SEQ ID NO: 710993 - DNA, 2659 bp, Homo sapiens
tgttaccattttcagattggggtaactgctcacataggatgccatctttatcaagagagcaaatcattttgtacaaaaaggcaatgcattcctcttagtggcttttcttttcttctgttattttctgagagattctgaaaaaaaatctaaatgctaaaagtaatgcaaccaattaattccccttgggcatatactatgtgtccatttatatagattatttccttcaattatctcagtacagtatgcaggaactatcattattattattcagttttatagatgtgcaaactgaggctaaagaggttaaattgcccaagggtcacacaactaggaaatagtggaatttggaatcaagtggagacactaggactccatagcctcatttcctttttgctctcttctaatttctatttggtaagaaaaaaaattgccatcagactccccattttttccaatactttgtttgctattatgtctgatgttcagaaaaaatattcggatggtttctaccttttttactcctagacattttggggttatggaaaccatgcctcatgctgtagggaacacttgtcttatttgaactgtaaatgaagtgctagctcaagtcagatttcacccactgtgtgaaccctgagccagaccctatgtttttcctcagtgctaaaatttactgtcagcatactgtatgctgcttatcttccttttggcctacctctgaagaactatatcgattcttcatttaggtcagcaggttgattttctcacctcaactgcaagcctctgaatagtgctagataattcaaatcttcctatcctagagttgtactacattcccgtatatacagatttcttgtctatgttttttttttctcttagggaagaattagaaacatgtttaattgtcagaattaaaggatgctyatataggaagaaagaattatgactgtagaattatacatcttgaagagacctaaaatatcatcgaattcaaagaatgtcacccgcaggaatgaaaggcatgtgccaattaggggtattgacatcacttgataattctgtgtaaaaatatactttcacattccacctcccaaaatacacagtctgctataatacctaggagcatattatctcctgcagcctcacactgaaatttacctgaaattcactgactaaatgaggcatcattaagaagaatgtgacataaaccgttattgcaaggtaggagtactgtatcagagttaagtaagaaaaatagagcccatgcatgccagatagaacaatagagaagagttaatagtgggcattcatttacaagatgttgggaaaactgaaatccaagcatgaggaaagtgaggtcacctaggaattagcagtggcaggaagccagtttctttccttgggttggagagaaacagtgagaatcagagcccagaactggaatcacctggagggaactagaaccatgaagggaagaaccagtgaaaaagaaatttccttttccactccctctaattccctgtgtctcctagtggttgaatctatccagaagccagttgacaaggaagcctgaaaatgtaaccttgcagcgcccagttccctacaatatagagcaagaagcagagaatgaagataaaagaaaatcataagtgaccagcagacttagaatcactgttttaatcccttcatcaattgtatacatgattgcttcaattatctccagatgaagaagacttctcaaatttccttaccaacaaatgtcatagtcacactctcatagccaggaagttatctttctgttattaaaaaattattttagaagttatttatttttgtatacaatgggtaattactgtcttgtgtagttttgtcatcattatatttttaaaactgtaggaatacatttgccatacttattttagtgttgatctttgatgttcaaaaaaaaatttattttaatgtttagatttttatgtatttccctgtttcaaaattatctgataagaatatatcatctgtttcctactttttcttaaaattcatggaagagcatttttcctcctccagctatatacaccagaacttaagaatcttcattcaatgtttttaacaaagtcttatgaaggtagaagaaaatacaatgttaaggctttgaaaaggattaaatttctttaataagttactcaataatgtaaaagtagaataatagtatttagtctactttcaaatggtataccaagtgccttttatgttctgactcatgttctcttaggtcatttttatctatcagccacttttgtagcagccagcttcatgaatgtggaactgagaaacaccttatctcagtatcagcctcttccttcctggtacttctttgatcctcaatatgggagtttgaagtaatcttggtcactcatgcatgtacaacctaagtgtggtaaggaggtaatatagatccttggacaagcctacaccaatggaaagcagtagccgaaggataaatattttttcttctttttttagatggagtttcactcttgttgcccaggctggagtgcagaggcacgatctcagctcactgcaacctccgcctcccaggttcaagtgattctcctgccttagcctcctaagtagctgggattataggcatacaccaaca

SEQ ID NO: 710994 - DNA, 2659 bp, Homo sapiens
tgttaccattttcagattggggtaactgctcacataggatgccatctttatcaagagagcaaatcattttgtacaaaaaggcaatgcattcctcttagtggcttttcttttcttctgttattttctgagagattctgaaaaaaaatctaaatgctaaaagtaatgcaaccaattaattccccttgggcatatactatgtgtccatttatatagattatttccttcaattatctcagtacagtatgcaggaactatcattattattattcagttttatagatgtgcaaactgaggctaaagaggttaaattgcccaagggtcacacaactaggaaatagtggaatttggaatcaagtggagacactaggactccatagcctcatttcctttttgctctcttctaatttctatttggtaagaaaaaaaattgccatcagactccccattttttccaatactttgtttgctattatgtctgatgttcagaaaaaatattcggatggtttctaccttttttactcctagacattttggggttatggaaaccatgcctcatgctgtagggaacacttgtcttatttgaactgtaaatgaagtgctagctcaagtcagatttcacccactgtgtgaaccctgagccagaccctatgtttttcctcagtgctaaaatttactgtcagcatactgtatgctgcttatcttccttttggcctacctctgaagaactatatcgattcttcatttaggtcagcaggttgattttctcacctcaactgcaagcctctgaatagtgctagataattcaaatcttcctatcctagagttgtactacattcccgtatatacagatttcttgtctatgttttttttttctcttagggaagaattagaaacatgtttaattgtcagaattaaaggatgcttatataggaagaaagmattatgactgtagaattatacatcttgaagagacctaaaatatcatcgaattcaaagaatgtcacccgcaggaatgaaaggcatgtgccaattaggggtattgacatcacttgataattctgtgtaaaaatatactttcacattccacctcccaaaatacacagtctgctataatacctaggagcatattatctcctgcagcctcacactgaaatttacctgaaattcactgactaaatgaggcatcattaagaagaatgtgacataaaccgttattgcaaggtaggagtactgtatcagagttaagtaagaaaaatagagcccatgcatgccagatagaacaatagagaagagttaatagtgggcattcatttacaagatgttgggaaaactgaaatccaagcatgaggaaagtgaggtcacctaggaattagcagtggcaggaagccagtttctttccttgggttggagagaaacagtgagaatcagagcccagaactggaatcacctggagggaactagaaccatgaagggaagaaccagtgaaaaagaaatttccttttccactccctctaattccctgtgtctcctagtggttgaatctatccagaagccagttgacaaggaagcctgaaaatgtaaccttgcagcgcccagttccctacaatatagagcaagaagcagagaatgaagataaaagaaaatcataagtgaccagcagacttagaatcactgttttaatcccttcatcaattgtatacatgattgcttcaattatctccagatgaagaagacttctcaaatttccttaccaacaaatgtcatagtcacactctcatagccaggaagttatctttctgttattaaaaaattattttagaagttatttatttttgtatacaatgggtaattactgtcttgtgtagttttgtcatcattatatttttaaaactgtaggaatacatttgccatacttattttagtgttgatctttgatgttcaaaaaaaaatttattttaatgtttagatttttatgtatttccctgtttcaaaattatctgataagaatatatcatctgtttcctactttttcttaaaattcatggaagagcatttttcctcctccagctatatacaccagaacttaagaatcttcattcaatgtttttaacaaagtcttatgaaggtagaagaaaatacaatgttaaggctttgaaaaggattaaatttctttaataagttactcaataatgtaaaagtagaataatagtatttagtctactttcaaatggtataccaagtgccttttatgttctgactcatgttctcttaggtcatttttatctatcagccacttttgtagcagccagcttcatgaatgtggaactgagaaacaccttatctcagtatcagcctcttccttcctggtacttctttgatcctcaatatgggagtttgaagtaatcttggtcactcatgcatgtacaacctaagtgtggtaaggaggtaatatagatccttggacaagcctacaccaatggaaagcagtagccgaaggataaatattttttcttctttttttagatggagtttcactcttgttgcccaggctggagtgcagaggcacgatctcagctcactgcaacctccgcctcccaggttcaagtgattctcctgccttagcctcctaagtagctgggattataggcatacaccaaca

SEQ ID NO: 710995 - DNA, 633 bp, Homo sapiens
tatttatattgtacaaaataaaaataatagaaaaataattatgactaaatgaattatcttgtaagaattaaagacattatctaaaaagrtataacaataatgaaaattgaacgcagtacgtgaaatagataattttctggcaaaatacaaatgacccagtccaactgaagcataaactgataatctaaaaaggacaatagtcttggaagaaaatgaaaaataatctgttgaattactttgggctcaggcagtttgaaaggtaaacttaaaaaaaaaattatgtgataactattcctgtacaaagaaaagtaggtaaaagcactgaattgatttcatgaagcagagttaattttctatgactgtagttacactggctccgagtgctcctggaaggctctgtcatttgggctcctgtctcaccatgcccactgctaattggtctagctcaagccttaacttggcctctgcagaggttgctaacaatgctcagtcccaagttccattaacactttatgaaaataattagttataagaagccatagatagagcaaagtcaaggcatgaagttggatccatgaccatgtgacactgaacttgtcccaatccttctcctgaattttatgattcatccta

SEQ ID NO: 710996 - DNA, 600 bp, Homo sapiens
tggactaatgcatgcagatattttgattgttttctctttcttgtgctaaattattgaaaataatgccttttctaattcatcagaagagtgctctcctcattttgtgctatagaatctttcttacaaacccyattgttttcttgaatggagaaccagccaaactgggtttgacaaacaggggccattgaacatttgataactggcagaatcctttctagcatctaaatctggaaggcaccctgaacagccccatcccaagtttttgaacctagaaagtgttaattttgtgtacttttgctgaactgaggtggaaattactctttttgcaaatgcctgtttctctgtaagaaagaatagtcacataattctttaatctgagaaggaatatgagaaaaaaagttccttggacacttttcttttcgggctgtcccccgtctaggcagcccccttccatgtcttccctaaggggcctgaacacacatctcagatgcctgagatgtgtgttccctgtcccttccctgtcttctccttgctctgcagtaccctagaagttgtagctccccaggacaagaggctcttaagtgggaaagagaatggaac

SEQ ID NO: 710997 - DNA, 600 bp, Homo sapiens
tggactaatgcatgcagatattttgattgttttctctttcttgtgctaaattattgaaaataatgccttttctaattcatcagaagagtgctctcctcattttgtgctatagaatctttcttacaaaccccattgttttcttgaatggagaaccagccaaactgggtttgacaaacaggggccattgaacatttgataactggcagaatcctttctagcatctaaatctggaaggcaccctgaacagccccatcccaagtttttgaacctagaaagtgttaattttgtgtacttttgctgaactgaggtggaaattactctttttgcaaatgcctgtttctctgtaagaaagaatagtcacataattctttaatctgagaaggaatatgagaaaaaaagttccttggacacttttcttttygggctgtcccccgtctaggcagcccccttccatgtcttccctaaggggcctgaacacacatctcagatgcctgagatgtgtgttccctgtcccttccctgtcttctccttgctctgcagtaccctagaagttgtagctccccaggacaagaggctcttaagtgggaaagagaatggaac

SEQ ID NO: 710998 - DNA, 2004 bp, Homo sapiens
ttttaaaaaaactttaggataactatttatataacgaaataaaacatatgtatctttgaaattaccaaagataatagtcaacaaaccatctataaaggaaaaatagaaaaaagaggaaacaaaaaccagaaagtattaaaccaaatgatgaaagaagaccaactataacaatatatatagataaagacaatgagtgtggaaatgttcaactagcctattaaaagaaaaaagaatcttaagttatgaaccgatatcaaaatatactgtatgtaagaggaattctcacaacaaaatgatagaggaaaactaaatatatggaaaaaactaaaataaaatgatgaaaaagtataagtaaacaaatcagaggtgttactattaatactacaggaagtagtgttaatggcaaaaaagcactaaatagagatataaatatattttctgttactaaatgtatawtctatagtgaaaacaaacatatcttcagcacatgtaaggcaaagcttttaaaaatataaagagaatttagcaaaaggacaattacaatgaaagattttaaggtatcactctcactctatgattggataagttatcaaaaatccataacagcaacaaattgaacaaaacaataagatgattcactaaccaactttgaatcctcatctgtctccatatttcaggccaaaaagagcattctaataagtcccaaaaggtaacctttgatatatgccatagtctgttttgcataagaaaggaaggaaagggaatggaggcaaggatgaaagaaggaagggggaatggaggaagcaaggaaagaagaaaggaaggaagaaaggaaggagaaaagaaagaaagaaaacttgaaatacattggacttaaaatttttctaaatacctattgagtcaataaaaaaatttaggtagtggtagattgtttaaaaagtaaagaatacgagagcactatatatcagcatttatggaatggagacaaaatgaattttattggtagatgttttcactatttgacaattgaaaataaatgaactgagtattaaaataaaaaatccagaaaatgtgcatttaaacgaacttaggtagggggagaaaaataaagataaaagatacattaaagaatgaaaggcaatagaattggtaaataaactattttggcaagtattttggaaaaaatagaggaagtagaaattaaaaatgtgaaaagatgatgtataattgtatgttattaaattaaaaagtcactatgaaatagatttttttcttaaaaatataaattaacaaattgaaaaagcagaaaaactataagtggcagtgatgaaataaaatgtattatagagtttctttcataaagggctcaagggcgagctggttttatgggtaagttcctttgctaattccaatgctattttggaaaacaaagacagtttttaaaagcatccctagccttgataccaaaatctgacaaagacagcacacagaaaaccaaacaaatattactttttgatattgatataaaaatcctatgtaatataactagtcagtatattaaaagcataacttaccatgaccaactaagatttattcaagagacacagggaatagaattaaaatgatttgcatacatggggtacattaaaaatatacttttctcaacagatgctgatatatttttacaaaactctgtcgtactaggaatagtataatgcttcttaaaataataaaatgtgtgactattgataaacagtcttctcagcagttcattgaacattgaacttaattgtgaaaccaataacccaaaacttacttaatggtgaagtattgtaggtgtttccagaaaagtaagaaagttaacaaaattattattacttaatactgtgaaagttatggtcttacaatacaacatgaagcagaaataagaggcataaccactagaaagatggagacaaaatcattatttatagatgatatgattgtattcctagaaaaaaacag

SEQ ID NO: 710999 - DNA, 2338 bp, Homo sapiens
tcggctcactgcaacctccacttcccgggttcaagagattctcctgcctcagcttcccaagtagctaggacgataggcacacgccaccacacacagctaaattatttatttatttatttattttttgagatggaatctcagtctgtcacccaggctggagtgcagtggcgcgatctcagctcactgcaagctccacctcccgggttcaagccattctcctgcctcaccttccgagtagctgggactacaggctcctgccaccacacccggctaatttttttgtatttttagtagagacggggtttcacagtgttagccaggatgatctcgatctcctgacctcgtgatccacccacctcagcctcccaaagtgctgggattacacgcgtgagccactgtgcctggcctttttttgtatttttagtagagacggtgtttcaccatgttagccaggatggtggctaacctgttattccaggataaccccactcatttatgtggcacccttggtatggtaaaatgagcatgatctttttgccagagacaaatcgtatctttggtagttaagaggttaagttctggagacagattgtctggtctgagacctggttctatcacttattaatcaattatttaaccagtttgtgcctctgtttcctcatctataaaacagatgataataatatctacatgacaggataggtgtgagtacttcctgggtaactacgtgtgaaatactaagaacagtgcttagaatgtaataaatgctcaataggtatttgccgctgctactactactattgctgctgctgctgctgctgctgctgctgctactactactacttcttaactttttaaaagtatcattattttagtgcctcatttggtctttcagcaacctggatagcagtatagctgtggtagaaattatttccattttacaaataagattcttgagagaatttaacatctaagttttttattttatgattttgcttcattccaaatacaaaaagcaaaattacccagaaaccaaagtaaaacagacaaaagtaggatcatttttttcagtaaaactatgttctttttagtgttgtacaatctaatattaagaaacactgatttaaatatattattttattctgtaaatgggtatagctgatcaaagtgatttgaaggtaaatggtagtataatgtaggatagcaattaattttatctctctcttgctcttttcttctgtagagattcttcccttattccctaattgaagttcaggctcagccaaggttggagtagggaatcctaatgattagacttgtaggatgttagagytgtaaggggctaagagatgttgtcatatagcccattcttggttatagatgagaaaatgaagtggggtataaatgacttacttagtctatccaacgtctcattagtggcactgggatttaatcctggctttacaagtagctagtctgatgtcttttttggcatactgtattgcttagcccagaaaggccagatttagtctcagagggaacgtgatttcttgaattctttctcattactgaatgactttacaaaggaggatcttgtttgaacttgatagaaaccccgtaaaatatatactgttcattgcaacattcttccttctatgttgttgctattacaacctgtataacaaatttagacaaaaagttaagaaaactgagcaaatgtagtttgaccattgataaatttccccctcagagaatcagatttaccctatgaattttcttagtagatgactagcatataattaagtttcagaagtccattttatatcagggtagctgtgctcgcttatgaagaaatactgaaactgagcttctataaagcagaatacctggcattcttcttaacaagacctttcctactccactgttcaatatcattaatatacctacaataaaagtagatagacaaagcattaacatttaaaaattttaaatagtcccggtttggtatgtatttgtatctgaatatatatgtttgtgtatttataaaacaacagaattaaatcattatagacttattctttacaattcttttggagcttaactattacttcttttaaactaaagatgagtttaaattaatttcaggttccttctaagcattccttagcccagcatatcacttaagaataagttaagaaaatggagacattcctctcaagcttgaactcaataaagcttagggggaaaaacaataaatgctcatttatttattttttttgatacagagtctggctctgtcgcccaggctgctgtgcagtggcaggaccttggctcactg

SEQ ID NO: 711000 - DNA, 2825 bp, Homo sapiens
tttttaaggctgaataatactccattgcatgtaaataccacattttgtttatacattcatccattgatggacagtgagttgcttctaccttttggctattgtgaataatgctgctataaacatggatatacaaatatctgtttgagtccctgctttcgattcttttgatatgtaactagaaatggacttgtagttctatctttaattttttgagaaactgccatactattttccacagcagctgcaacattttacattcccaccagcgatgcacatgacttctactttctccacatcctcatcagcatttgttattatcctctgttttgttttgtttttgactttcgataatagctatcctaatgggtataaagtagccatagttatttctgtgttctaattttatcaattctaaaatcttggcactgtgaacaagatttcatctcttacaaatgcttgtggctggccactaaaagcctgaggaatccagaatgtctggccctcatcttagctggcagttggcaccaaggtaaaaaccctaaatccctttgggaccagaagaaacatttacccctttaaagaccttgctacataaacattccatattacctgtgatttctggttgttttaaatgccaactgtttttattttgtgattttgtaagtgaatttagaatgttgtatttaaacttttgtgctatccaaaagtgctctctcaaaaaaaaaaaaaaaatcagataattaatatatgaagccagaagaatagggcttgattttttagaattgacagtatgagaatttttgaaagatgcctgagtttaaaacaaaaactcactgtaagttaattaaaagagttttgcccataaccataaaaatcagtttgtctgatctgcaaaatgctatctgcagattaaaagattatattacacatccgtcttaactgatgctatttttttctaatttgcatagttttactggctatttaagcccatgtaccaattaaaaacaaaaaattgaaagttaattctgtataaaagactatgttgacccggcgtggtagctcacgcctataatcccagcactttcggaggccaaggcgggtggatcacttgaggtcaggagttcgagaccagcctggccaatgtggcaaccgcatctctattgaaaatacagaaattagctgggcatggtggtgcacgtctktaatcccagctacttggaaggctgaggcaggagaatctcttgaacccagaaggcagaggttgcagggagccgagatcgtgccactgcactccagcttgggtgacagatcaagactgcatctcaaaaacaaacaaaaacccaaaaaacactatgttaatgactatgtaggggcataaataaatagtaacataatcattgctctgaagaagtatatagtatgcctcacctgccaatattcatttccgagcctgcagtacaaaagtcatattattccattttcaggctccttaatctgcttttattagtcagaaacctaacttgatcagttaatattctgactctacttgcttttctgactttttaagaaataaaaaatatttgaattatcctggattcaacacctctctatttctataaatcatctactgcgttaaaaagtgtctcactaacaaccttatttgtgccataattttctcatttttgatgggaaaatatttctcctgttctctttcttggtcaagatatattgctcaagtatttttttcttttgtgtttttgtagtgaactgtatcaattctattgacttcctgctgctttctcatcaggtatagacttaaatctcccaaggggattttttttaaaactacaataagatgtttttggtcatatgcttttccttttccggtgctccatgttacatcctttgttcattttcagttctttctcacactttgtgttcttagaaattccatctgaaatttagaaatagtctcccattcgctaaaatgaactgctgaaattaggactttgcaacccaaaaagatattttaattgggctaggataacgatcttgaacttttaatctatactaggttattgcatgttttcagctcctgttacttatttgactctactgtgtaaacactgtcattcattaacaagttgatgcctgattagtgctactaactttttttatgctggcatactcaagtgtttcttgtttagcttgtaaagaatggccataagataccatcatcttgggatagtttgagcgcctttccaagcattattttggtagcatttttctgatatggaataacttccaaatcctttttgaaaagcattttatatcagtctttcttagactgccccaacgacatataatgaactactaactttgccctggtttcacttttgttcctttcctttttatttcttgtcattttccctatccgattttctgtatgaattcctgtcagataataggtgcttggtaaacaatggttgtattaaatgagattagaaactttttagaaggatttaaagtaatattttacttatggtattcctagcacattgttttgttccatggttgctataacataatttaaggagaagaaattgttaaagaatgagcccctttgaatttcacctttcctggtaagacttgggacatgacccatttaatcgtcggacttggatgtatctacaacttctttcctggcctgaatgttattctctatatgagcctatgctcaattttctattaatatattactttagttattttagatacttttcttacctttctaaatatactgctgaactcagtttattttcttt

SEQ ID NO: 711001 - DNA, 1379 bp, Homo sapiens
ctggtgagttactgattaatgtgttgatgaattcattgattgctgaggctagtatgtacagtaagtgttagatcttgaacatacttctcatatccattgtgataaaccctcttatcttctattgcttttgaacttttatagacttgatgtcaggggcagagtccctcaggtaactggaatcattgaacygatgcattggtttctaattttctaagctcagatttgaaatcacctgtggtcactaaactcgtcctatcccacagcccctgcacatgatgacttaagttttgtgaatgttttttggagatagtaaagtcagtatctctttcaacattttgttccttatctttagtgatacccagctctgtacaaattctgtccacgtaagcaaagtctttttttttttttccagatagggtctggctctgtcactgaggctggagtgcagaggttcagtcatagcttcaactcctgggctcaggctgtcctgctgcctcagcctcttaagtacctgggactacaggcctgcacaaccacacctagctaatctttttattttttgcagagacagagtctccctattttgcccaggctagtctcaaactcttggtctcaagtgatcctcctgcctcagtttcccaaagtgctgggattacaggtgtgagccaccacactcgcctgcaaagtcttactgataaaagatttgaaggaaggatgtgtcagagaacttcttttttcttataatatttacttaatcttattggtttggggaagggcaagagaatcccagttatctagatttttctttttcttaaaggagtatgtttttacttgctaactctctttgtaaactgttacttcttaaagatgctgaagggtgatcccgcattagtgtataggtaaaaatgatgtctccatttcatatatactgataaggtgactttattaagccttgtggtttgttgatgttgattttactgagacacttgtggaacagatgtattttcatacaaccttacacatctcagtagttttccccactcgtgcagtaactttttctcccctgctttctctcctcctctccccacctcttcttccttcccctcctctcctcgtcccttccctcctcttctcatttgatacaaagccctaactctcttcctctacagatcatcctacccatggttgaaattgcaacttcccctgcaagccaagtgaccgaacctgagatgtttgtattgtcagggcttgcgtattctacatgcctgtgtaatcctcaaagttctttcattccttgcttctaacctacccaaatccttctaatctcccaccatggttaattatctctgatgctcctgaaaggtgacctgctgctacat

SEQ ID NO: 711002 - DNA, 616 bp, Homo sapiens
ggctctggtgagggtggaggagtcactgtacagagagagtagagcgggggtggattttattgttagaagtggacactggtgattgggttgtataagtgggaaatctctcctgagaaaacacacagcctcacctgtacagaaacacacacattcacaccacacgatgcagcctcacacaagacaccaccaatcctcaagcacccaactcagcaccacccaaaagggagcacagctgcttcctcaaaatttggccataatttttccctggggaattcaggttttaaaaaaacacttcccctatacttattcctatcacaatcccaggatcagggaggctcttcacattgaaaccaggcraggatgccacacctttcttggcatccagattgttttcttggcaagtgattccagaatacttactagattcaagcctcagaggggccacctgcaccacctgcaatacagaaacaaagctttttgaggggtatgtcatgttgtggattgtttgcacaaggctctgtttctctcaatgaatactgaaaacttgatcagaaagtgtagtcaacttcaaggcctccaaaacaagggtaggatacacactggaaaagacatcagc

SEQ ID NO: 711003 - DNA, 616 bp, Homo sapiens
ggctctggtgagggtggaggagtcactgtacagagagagtagagcgggggtggattttattgttagaagtggacactggtgattgggttgtataagtgggaaatctctcctgagaaaacacacagcctcacctgtacagaaacacacacattcacaccacacgatgcagcctcacacaagacaccaccaatcctcaagcacccaactcagcaccacccaaaagggagcacagctgcttcctcaaaatttggccataatttttccctggggaattcaggttttaaaaaaacacttcccctatacttattcctatcacaatcccaggatcagggaggctcttcacattgaaaccaggcaaggatgccacacctttcttggcatccagattgttttcttggcaagtgattccagaatacttactagattcamgcctcagaggggccacctgcaccacctgcaatacagaaacaaagctttttgaggggtatgtcatgttgtggattgtttgcacaaggctctgtttctctcaatgaatactgaaaacttgatcagaaagtgtagtcaacttcaaggcctccaaaacaagggtaggatacacactggaaaagacatcagc

SEQ ID NO: 711004 - DNA, 616 bp, Homo sapiens
ggctctggtgagggtggaggagtcactgtacagagagagtagagcgggggtggattttattgttagaagtggacactggtgattgggttgtataagtgggaaatctctcctgagaaaacacacagcctcacctgtacagaaacacacacattcacaccacacgatgcagcctcacacaagacaccaccaatcctcaagcacccaactcagcaccacccaaaagggagcacagctgcttcctcaaaatttggccataatttttccctggggaattcaggttttaaaaaaacacttcccctatacttattcctatcacaatcccaggatcagggaggctcttcacattgaaaccaggcaaggatgccacacctttcttggcatccagattgttttcttggcaagtgattccagaatacttactagattcaagcctcagaggggccacctgcaccacctgcaatacagaaacaaagctttttgaggggtatgtcatgttgtggattgtttgcacaaggctctgtttctctcaatgaatactgaaaacttgatcagaaagtgtagtcaacttcaaggcctccaaaacaagggtagratacacactggaaaagacatcagc

SEQ ID NO: 711005 - DNA, 668 bp, Homo sapiens
cttgtacccacctgctaacacagaaagggtccactcagaaggcaggcacagctccagcactgaggctgtccacaccagcttcacaagagggttgccacaaggacgacggatacccggatarcaaccaaatggtaatttgagtacttaatggtcatgatccctaaagtgtgtagctcagagggcttgtggtgataactccatcaagactctaaagcatctccccaattcttactggacttgatccatgtcttgaggagacccagctatgacacgcaggcaccacgttgtcctacttagtgcctcccttagtgtttcagaacctgtgatttgatcagaaacatgggctttctatgttggtttcacactaaggactatgtgacacctgcaggaagatgtctacatagctacctggattatgagctgtcttatgtgagggatggcgtttgggatctctgcaggtgtgggtaattccaggcatagagggtgctggaactcccttgcatggtgaatagtgatctcttcactggctgataaatagaggttgtagttcaggccttcaacattagcaccgtttgagtaaacattttgactcttcactatgcagcaagtgaaccagggcacatttatttatgtggcttagtttctccatctggcatgtgggctcaata

SEQ ID NO: 711006 - DNA, 640 bp, Homo sapiens
gaatgctgtgttccccagccccacaccggctttgccaccacacaggctgttgaggcaggaggcgggtaagacgtagctgtagacccaaagcaaccaccagccctgggaccctgcgggagaggagcacttttagaacatggaaaagtgtggtcatcccatcattagacagcacacatcctacataaataaaaagtcgtatggggaaggaggttggggagggaataaaaaactggcacagacattgatagactggtttccagtttcaaggtaayagatgcacatcatgagaccagaggaggcagagacaaggctggatttggcttttctaagcaacatgtgttcctgcgcagggctgaatggtcgctgagacagagatggaagccaggacaagggagcccaccgggcccagataggtacagagagcagaggctcctgttctgtcctcgccacccacgagggtgacactgcttgtaaatggtggctgtgctctcccagcaagaaaaaagcacaactaaatccacactgcacacagacgcagacagaaagccttcaagtggctctgttttctgctccctgccttgccaggtccacaagcagagaggagtgtcaggcacatggccccgctgtcaggctccccagt

SEQ ID NO: 711007 - DNA, 1371 bp, Homo sapiens
gaactgaaagtgaaaaacacaatggttgcatgagtactcaaagtactgtttctactgaaagcatatcacttttacattatcataaagttgaaaaattggaagttgaaccgtcttaagttggggactgtctgtaaaccacttttctgaaatgttgaacaaggaagataatcttttttaagcttttaagattcattaatacagaggtgatacatgttttattccttgatctagatttattatgctcttttaattttataaaaaattaactttaaaaaagcaaccttaaatcctgaatgaattattcttaaaaaatcgctgcaattgggtatacctaattacgagaactcaggtcatgaacacacctttctagtgttaaataagaggggtgagctaaaataggagtacaatggggacaagagaggaattgaactcatagtctagaaatttcagccaggaagtgacttcggaggtttatcatctaatcaggtcccttgtctctctctctttttttttttcaaaagacttatgccctggcatttaggtcccttgtctctaaacaaagtgaaagctacatgaacgagacaggcattacctacgcatgctgaaaattttcagaacttgaatttataggctatcacatgaatctcttccaacagaagagaaatacacagccttataatcagcaaaaatgaccatgggaaagcgcgctggagaaaaatgtttaagaagctgatggacattcataacatagtttttctttttatattcaagcaaaaaataactgtgccccatatagtgtagtcaatctgtacctgtgataatatatttggtaaagaaaagaataacaatgcagtttgtacattctgactttccccctccatcttagggaagaatatagagttattctacctggctagatccatgcagctatcagtgaggttggtagaagaattgaagtactctctgctggcagccaaaaccaagtcaatactcttttcgtagctgaccctgtagtggggtttccctttatgggctataccagctggaggattttctgaacaagcactgcagtgcatcatctgtccagccaggtggatgttttcaaggcgactagagcacagaaggctttctgtaaatatctggaaaaaaggagaaactggaattagttatagagakggaagattcagttctcagtgaaatgaaggctctgaaatccaaatgaaagaaattaaaaacacatccaccctagaggtggtggctgcacagcactgtaaatgtactaaatgacaatgaactgtatactttgaaatggttaattttacattatgtgactttctcctcaattaaaaaaagtcaatcttttagaaagaa

SEQ ID NO: 711008 - DNA, 1371 bp, Homo sapiens
gaactgaaagtgaaaaacacaatggttgcatgagtactcaaagtactgtttctactgaaagcatatcacttttacattatcataaagttgaaaaattggaagttgaaccgtcttaagttggggactgtctgtaaaccacttttctgaaatgttgaacaaggaagataatcttttttaagcttttaagattcattaatacagaggtgatacatgttttattccttgatctagatttattatgctcttttaattttataaaaaattaactttaaaaaagcaaccttaaatcctgaatgaattattcttaaaaaatcgctgcaattgggtatacctaattacgagaactcaggtcatgaacacacctttctagtgttaaataagaggggtgagctaaaataggagtacaatggggacaagagaggaattgaactcatagtctagaaatttcagccaggaagtgacttcggaggtttatcatctaatcaggtcccttgtctctctctctttttttttttcaaaagacttatgccctggcatttaggtcccttgtctctaaacaaagtgaaagctacatgaacgagacaggcattacctacgcatgctgaaaattttcagaacttgaatttataggctatcacatgaatctcttccaacagaagagaaatacacagccttataatcagcaaaaatgaccatgggaaagcgcgctggagaaaaatgtttaagaagctgatggacattcataacatagtttttctttttatattcaagcaaaaaataactgtgccccatatagtgtagtcaatctgtacctgtgataatatatttggtaaagaaaagaataacaatgcagtttgtacattctgactttccccctccatcttagggaagaatatagagttattctacctggctagatccatgcagctatcagtgaggttggtagaagaattgaagtactctctgctggcagccaaaaccaagtcaatactcttttcgtagctgaccctgtagtggggtttccctttatgggctataccagctggaggattttctgaacaagcactgcagtgcatcatctgtccagccaggtggatgttttcaaggcgactagagcacagaaggctttctgtaaatatctggaaaaaaggagaaactggaattagttatagagagggaagattcagttctcagtgaaatgaaggctctgaaatccaaatgaaagaaattaaaaacacatccaccctagaggtggtggctgcacagcactgtaaatgtactaaatgacaatgaactgtatactttgaaatggttaattttacattatgtgactttcycctcaattaaaaaaagtcaatcttttagaaagaa

SEQ ID NO: 711009 - DNA, 718 bp, Homo sapiens
caagtacctatacatacatgacattgaaaaaactatgttttcaatttaagctatgtacataccggggaaatgacaaagagttcacttcccatgagatcaaacaccctcacagttcctgtgctttcggcataggccagtagggtacaatcgtaactccatgctacccgtctccactggggtttcgggtctttcggaactagaacaaaagaaaacaagaggtgcttctaacaatatattacaaagatagttaatgcttttagtaactgcaactaaagtaagtattcaagtacaataattacgtcatctcctaaggatctctaataawgcttccctcaataaaaaagagcagtttccagaaacacacttcaagtaagagtgggaaatacaaaccactgcaactatgccctatttattttagaagcaaagtctactgatgcatggtctgatgaatgctgagcatcccctggtctggtaaaggcccaggaataatacacctcaaaatatctgtaatactcagagagatctaaagcatacagaatgggtagacaataattctaatccaatgagttccactcctctaaaagcaaaaaataaaaattgcaacttgatcttttaaatacatcaaatatagaagccaagatacaaattgggactatgctaacattgtattagaaaggggggaaatatatatatatatacacacacacacacactcaca

SEQ ID NO: 711010 - DNA, 718 bp, Homo sapiens
caagtacctatacatacatgacattgaaaaaactatgttttcaatttaagctatgtacataccggggaaatgacaaagagttcacttcccatgagatcaaacaccctcacagttcctgtgctttcggcataggccagtagggtacaatcgtaactccatgctacccgtctccactggggtttcgggtctttcggaactagaacaaaagaaaacaagaggtgcttctaacaatatattacaaagatagttaatgcttttagtaactgcaactaaagtaagtattcaagtacaataattacgtcatctcctaaggatctctaataaagcttccctcaataaaaaagagcagtttccagaaacacacttcaagtaagagtgggaaatacaaaccactgcaactatgccctatttatttyagaagcaaagtctactgatgcatggtctgatgaatgctgagcatcccctggtctggtaaaggcccaggaataatacacctcaaaatatctgtaatactcagagagatctaaagcatacagaatgggtagacaataattctaatccaatgagttccactcctctaaaagcaaaaaataaaaattgcaacttgatcttttaaatacatcaaatatagaagccaagatacaaattgggactatgctaacattgtattagaaaggggggaaatatatatatatatacacacacacacacactcaca

SEQ ID NO: 711011 - DNA, 1064 bp, Homo sapiens
ttttcattgagtgcactgactactgcatggagcactaaacataagcattgggaatctgaaataggagtgaaaaccagataaatacaaatgaatacaaagattcaaagggaagtgaatgccttatgttttggagtaccattgaataaatkactgtgcacacaaaatttgttcaattagtgttagtaaactgactaattacactctagctgttaataaacatttaaattgggccaaaaaatttcatcaataaacagtatatttatgcaataaatatttgaatgttccagatgctgaaatataatgaagaataaataaacaggtaataatagataagaaacaagaaaataaacaaaaatatctttaaatgtgttaagtgcactgaaggaatgactggatgatcagactaggcctctctgagaaatgacaatttaagttgttaaccaatgaatgaatgaaagccagtcgtggttagaggatgagcattctacactgaagcaacagctcatgcacagtccctgcagtgtggatgagcttagcacgatgaaggaactgaaaaacagccttcctcattagggtctagcctatgaaacaagcagagaaaagtcacgcagagtgtcacaggccatcgatggaaggacagcaaagtattttttaaatagagaacacaataagaaagaagaatattaagcattaagtcttatatatgtctcaaaccagctgagtgatcaaggtcatgtgattccttctcgctctaaaattctattaagtctctgtaggaagtgatgtattgataggcacagataagacaaattatattggctttaacatcttggactgactacacaaaaatgctaaaagaaggtgtttgagtagatgaaatgcatagcagacatcagcctttactacaagaataaagaagatggattggattttggatactctgtggtaatctggttagtcaaggagagagtgaagcgatcataggtaatcccccaacttcatacataaaggctcctacttgagaatggaggtggtgtggatagagaaaatgggaactggagatt

SEQ ID NO: 711012 - DNA, 1064 bp, Homo sapiens
ttttcattgagtgcactgactactgcatggagcactaaacataagcattgggaatctgaaataggagtgaaaaccagataaatacaaatgaatacaaagattcaaagggaagtgaatgccttatgttttggagtaccattgaataaattactgtgcacacaaaatttgttcaattagtgttagtaaactgactaattacactctagctgttaataaacatttaaattgggccaaaaaatttcatcaataaacagtatatttatgcaataaatatttgaatgttccagatgctgaaatataatgaagaataaataaacwggtaataatagataagaaacaagaaaataaacaaaaatatctttaaatgtgttaagtgcactgaaggaatgactggatgatcagactaggcctctctgagaaatgacaatttaagttgttaaccaatgaatgaatgaaagccagtcgtggttagaggatgagcattctacactgaagcaacagctcatgcacagtccctgcagtgtggatgagcttagcacgatgaaggaactgaaaaacagccttcctcattagggtctagcctatgaaacaagcagagaaaagtcacgcagagtgtcacaggccatcgatggaaggacagcaaagtattttttaaatagagaacacaataagaaagaagaatattaagcattaagtcttatatatgtctcaaaccagctgagtgatcaaggtcatgtgattccttctcgctctaaaattctattaagtctctgtaggaagtgatgtattgataggcacagataagacaaattatattggctttaacatcttggactgactacacaaaaatgctaaaagaaggtgtttgagtagatgaaatgcatagcagacatcagcctttactacaagaataaagaagatggattggattttggatactctgtggtaatctggttagtcaaggagagagtgaagcgatcataggtaatcccccaacttcatacataaaggctcctacttgagaatggaggtggtgtggatagagaaaatgggaactggagatt

SEQ ID NO: 711013 - DNA, 681 bp, Homo sapiens
gtgcagaaaaccaccatggcatgtgtatacctatgtaacaaacctgcacgttctgcacatgtgtcccagaacttaaagtataatagaaagaaaaagaaagaaagaaagaaagaaagagagaaagaaagaaagaaagaaagaaagaaagaaagaaagaaagaaagaaagaaagaaagaaaagaaagaaggaaggaaggaaagaaggaaaggcaagcaagctcgattccatgttagttctcatttttcacttcaatcctagtagatatattgttttaaggtataaaatcttgattaagacatttatcaaacttctattagttcaccctaagagatcactcagctttaagcagcccaaaatgtttttcagcctttcttttaagcttgtcttcactgaacttttctcgaggcaatagaaggaacttaatacatttgaagacacttgaacacataaataaaaaggtaatttgcattctgtgtgtgtgtgtgtgtgtgtgtgtgtgttttttaattttcaacacaaagactctatttttttgatacgattctaatgcttttctgttcagcacatttttggctgcatgagtagcagtgaactctggatgacatctgaaaattctcatcctggggaaaggctggcttcagactcaggarggagtgggggcagcagaatgcagggggcaa

SEQ ID NO: 711014 - DNA, 848 bp, Homo sapiens
aatggtgtttgcaaatctgtaacagcagacacgcttgtgtctgctaagctaacgcttttatgtagtttcttttcctgatccctgataattgttttggtcatagaaagttaatgtttattttttaatctgtgttaatttttgagttaattagaataaggaatttattgtctgcacatgcaaatgtagcccccaaagttcatcattcaaaagactttgagactgcaaatttaactatcaaatgacaaaataaaggacaattaaggatcatggagattctaagttttcttggtcacaacgcccatcctcaatctttcatgtgcctctttcattattctctcatttatataccctgatctctcctgtccccaaccaccaatcaatactcatctatctaattacttsgccctttgaggagtgtatgggtattgtttctatgcttgtatatttctacgtgggtaagaagaatattcattgaaaatgaatattgagggacagaaatggtctttggtcactacttcctgcctatgctttttgaaaagagttgagtgggttacaaaaggtaagtaactgccgatctaactttttaatagatggaacttggcaaatcctttacaattgcattgtatatatagattatacatacatatacatatatcattagaataatggaatccttgttgtggcttttaaaaatagctgtataacagcagacaaatcacataataaatgcgagcctggctgggcatagtagctcatgcctgtaatcccagcattttgggaggccaaggtgggcagatcacatgaggtcaggggttcgaggccaagccctggccaacatggtgaaaccc

SEQ ID NO: 711015 - DNA, 848 bp, Homo sapiens
aatggtgtttgcaaatctgtaacagcagacacgcttgtgtctgctaagctaacgcttttatgtagtttcttttcctgatccctgataattgttttggtcatagaaagttaatgtttattttttaatctgtgttaatttttgagttaattagaataaggaatttattgtctgcacatgcaaatgtagcccccaaagttcatcattcaaaagactttgagactgcaaatttaactatcaaatgacaaaataaaggacaattaaggatcatggagattctaagttttcttggtcacaacgcccatcctcaatctttcatgtgcctctttcattattctctcatttatataccctgatctctcctgtccccaaccaccaatcaatactcatctatctaattacttcgccctttgaggagtgtatgggtattgtttctatgcttgtatatttctaygtgggtaagaagaatattcattgaaaatgaatattgagggacagaaatggtctttggtcactacttcctgcctatgctttttgaaaagagttgagtgggttacaaaaggtaagtaactgccgatctaactttttaatagatggaacttggcaaatcctttacaattgcattgtatatatagattatacatacatatacatatatcattagaataatggaatccttgttgtggcttttaaaaatagctgtataacagcagacaaatcacataataaatgcgagcctggctgggcatagtagctcatgcctgtaatcccagcattttgggaggccaaggtgggcagatcacatgaggtcaggggttcgaggccaagccctggccaacatggtgaaaccc

SEQ ID NO: 711016 - DNA, 727 bp, Homo sapiens
gagaaaagaaaaataatgtaattaatgttgttgttgttgttcttaatttgcatggacaaaagctagtatttgctcagttaacatcaattcatagcctctgtggttatttgaatgagtaggagtttggacattctagaaacgagtgataccaggttggttttaagttctcaaaagcaatagagcacgttttctcaaagataaaaaatgagtggattaaagtaactacccagaagagttgcctttactgctatgaaagatacaacacaaatcactagcaatgaaagtttaaaaagctgtatcattatgtagtagcctttttataacgcaagtgtgttattgaaattaaattttaggcccaggcactgtggcttctgtctgtaatcccagcactttgggaggccacggcaggaggatcacttaagctcaggagttcaagaccagcctgggcaacatggcaaaaccctacctctacaaaaaatacagaaattaggtggacatagtggcatgtgcctgtaatcccagctacttggaagccgagaggatcacttgaccctgacacgcaaaggctacgatgagccgtgatcatgccaccgtactcagcctgggtgacagagtgagaccctgtctccaaaaaaaaataaataaatttcagaacctgatgggccttttttwaaatgcttgatttccccaggataaattggttttctgtgaaaggaagttcaatata

SEQ ID NO: 711017 - DNA, 1232 bp, Homo sapiens
agccaagactgcgcaactgcagtccagcctgggcgacagagagactccgtctcaaaataaataatgaattaattaattaatatattagctaggacaaaagctcagcccttctgtctcaccggccatgtcctgagtgtttgctaggcacacacgactcacgccacccctctgaatagcccaggtcacagaatatttctgccttcccagaaagccccattgctttctgggtgtggctggcagggaatggagggctggtgctcagtaggtgcactccgagagggaggcagacaggcagcgggagaggaaacagagtttcaataaagggcccaagtcagacttgcttgggacgatgaagaatcatgtaagtttctgaatgtttgactgagtagtggacactggccaggacccaaagcctcttctcttctggggagcccccacccctgttayggatccaaaagtcagacgttctgtcttcgctcctgacaggcaggctgtgaacacaaacaaggcatggcctgccaaagccgctaactctaggaagaagcaaaggacgatgtgcatggtggtggggggtgctgcagccagcctctctgccggcggcccatgcctggaactgcttcttcagcatgcctgcgaatgcaccacccacctgacgtttctgcagttggctgcttagctgcacgagctgctccggcacctgtcctcctgctgagatacggctgagcacgagtggtcacactgggaatggcagaggcagacagaaaacagacatttgaagagaaccttagctgggctggcagtgaggcaggtgtgggagtcagagagggagaccctgggtgtggctggcagggaatggagggctagtgctctgtaggtgcactccgagagggaggcagacaggcagcgggagaggaaacatacgcatttaacagatggcagaacttctagctggaaggccctgagaactcagcaaagatgcaggctgcaggacaggagagggcagggctggggacaaaggtcaggaatgctccacacaccgtcacctggctcactcctcaccactcggcctccacttgctcccctgctcagagtaccccttgccagcccaccagaagagctcccctccaccccgacaccctcccctgccctgctttgagtcgtagcgctcctcatcgcagaactgcgctctccaaagtgccttcctgacacacaggaagcgccacattcacgtg

SEQ ID NO: 711018 - DNA, 647 bp, Homo sapiens
acatattaagcagttttttaaccaacaaatctgattgactcataaacttgcagaaaaaaagtgctaggaaaaatgtagtactgtttagaatttgagattttagagaaactttaatgtattaggactgtgattcaagtgttttatgattctcctgtaaatagaaaaacacttaaatatatagatattgatgtgcacacacacacacacacacacacacaaatatatatggacagtggcatgtttyttgaaagtggcccatttatttagcttaacattcatttctttaattggcacctaataagtaaaggtgtcaagttaatattttaggtgatgaaatgcaaggcacatatttttttccaagaaaatagagtgtttttgctggaagttttgcttttatattcgcatctattctaagattcctgctagcatattgtttctatttttaggctgttgccaggcagatttaaaatttcttctcttatggctgtctaatttctatcttcctgattggttacatgatgctgcttttattagccaaccacagtgactatgtaaattgtatttcagtttctgttgctgtgaaagaactgataagatggctgcagggggctccctttggggtatgttttttattttaaagagggttt

SEQ ID NO: 711019 - DNA, 647 bp, Homo sapiens
acatattaagcagttttttaaccaacaaatctgattgactcataaacttgcagaaaaaaagtgctaggaaaaatgtagtactgtttagaatttgagattttagagaaactttaatgtattaggactgtgattcaagtgttttatgattctcctgtaaatagaaaaacacttaaatatatagatattgatgtgcacacacacacacacacacacacacaaatatatatggacagtggcatgtttcttgaaagtggcccatttatttagcttaacattcatttctttaattggcacctaataagtaaaggtgtcaagttaatattttaggtgatgaaatgcaaggcacatatttttttccaagaaaatagagtgtttttgctggaagttttgcttttatattcgcatctattctaagattcctgctagcatattgtttctatttttaggctgttgccaggcagatttaaaatttcttctcttatggctgtctaatttctatcttcctgattggttacatgatgctgcttttattagccaaccacagtgactatgyaaattgtatttcagtttctgttgctgtgaaagaactgataagatggctgcagggggctccctttggggtatgttttttattttaaagagggttt

SEQ ID NO: 711020 - DNA, 2182 bp, Homo sapiens
taatgatagttaatatgtaggcgttataattccatttctgtattccctggttttggggggaaaggctgaaataagttgttactgaagcttagatttgtgacattttattaaataatttaagtcacatagtggtaggtagtatttttttaaaaaacaacttaaaaataattttgatttgtgacattggataccacttatttgttgaattgstggtgctaatatgatgcctgctacatagtaggcattcactagctatttgttaaatgagtgagtctggttattctttagatttatattgttaatgttttttaaactcttacagcatgtgagccattctggtgtttttaatttattcttcataagaacactgagatgcaggaattattatattaatctctcaaatgataagcagttgtcttcagcaaagtaaatgatttgcttaagatacaatgaacaagtgataatgccaagattcaaattattgtctcagctggcaatgtttcccattatattagaacagtgacagataatatattgacaggcatctacaggtctaatttttttttaaagattccctgtgtgttgagttttatttttaccttgatttttttttctcccccagcatccacccaacccaccagtatcaccaggaaaaactgtaaatgatgtcaacagcaataataacatgtcttacaggtgagaattcatagtctgtctagtttttaaaaacagaacaaagttctactttctttatttggtcaaagaatcttgcagtgtaatcatggtatttatgtagaaataagtgtttggtgtacttggttagtatattttctttttctgcttcattatattgttcatctgtgaataatacttttgctaacttattataaggcattctttggtcactatatatttctttaaccacttgtcttaaatagtattctttcaagtaattgagaaatgcttctgttaagggtgagaaagactaatgtctgtatatattaggacctacttttggtattcaggttaagtactgataacagacattagaatacaagagttaagagttaagagttaatgccacagaccccagcatttagaagtctttgtgccagctatgcctcactgtttttgcttgcagtttaggattgtgaaacccaagtctagccaccctttttcccctgtgggccactgcttattctagatatcagttggtattccctgagtggcatatctattgactattggtgtgtatatgtatttcatagaaatgcaggcacagtgagacagatgctggagtccaaaagaaatgtaagcgagagtgcaccaccatcctttcaaactcctgtgaatacaggtaactttttttttaaataccaaaatacattttcttaggaattaaaggctttggttctcttttcttacattcttttgaggttgaaatggattaagaaattgggcacattggtctaagtacaaaaattttgttaaaaattcaggatcaaactgggtatggtggcacatgcttatagtctcagctacttaggaggctgaggaggattacccaaacccaggagttcaagtcagcttgggcaacataatggaatccagttggtctcttaaaacaaaaaaatttagggtcatagataagtatatgtgaaaatacagtatagatattcaaatctctattgtagtagttcacaaactttctggtctctagatccctttacaatcttaaaaaattattaagaaccccagaacttttgtttatgtgggttacatccattgatatttattatcagtcgaaatgaagtagaaattaaacagaaatttaaaaatgtttttaaaatgtttattcatttaaaataatagtaggctgggcttggtcgctcatgcctgtaatcccaggactttgagaggctgaggcaggcggatcacttgaggttaggagtttgagaccagcctgtccaacatggtgaaaccccatctctaccaaaatacaaaaattatccaggcatgatggctggtgcctgtaatcccagctactcaggaggctgaggcaggagaattgagcttgaacccgggaagtggagtttgcggtgagccgagatcacgccactgcaccccagcctgggcaacagagtgggacttcctctcaaaaaaaaaaataataaataataaa

SEQ ID NO: 711021 - DNA, 575 bp, Homo sapiens
aatcactgataattcaccccatgggaggactatgtcacattcccttaaagaccattctctagtgcagcagtcttagaaccwgatgactaacctacagctgtgctcaattttgacgttaaggacccatcccagtctctggtgtctttgctaagtttgggcatagtgtttcttagcctctacttgccttctcctatcaaagctctgtgggtactctggaacatttacaatcttccctcagttgtatagcacaatcacattcattttcatctcccagcctcttcttcactgacagtgtttgttaaacttagtttaactgacattatccaaactcctgaccatttttatcactctttgctaaagtggcttcatagttattaatgtctctcctgattattttctgcatgcacaaatttacttaaatttggttattaaccacggtttaaatctccattaattgtctaaactgtcaccccttggggcttccatatagtatcaacatctctgaactcacaagcacagaaattatgagacaaatgaacatggcatccttgttcagcatactgttacagtgaaaa

SEQ ID NO: 711022 - DNA, 965 bp, Homo sapiens
acagaaagttgagaggagagtaagttggaagaggtagtgattagagattttgcrcattgacagtggttgacttggcttctggggtaggccctggaacaaagtcctctgatcctcggttgtttgggaatagtcaattatgtaagggtattctggtgctaccagttttgtgcaatggtgggcatttactgctataaacttccctcttagacctgcttttgctttttcctacagattttggtatgttgtgtttccattttgtttgtctcaagaaatttttaaatttcccttttaatttcttcactgacccaatgattggtcaggaacatgttgtttaattcccatgtctttgtactgtttctgaagttcctcctgttacggatttctagtattataccattgagttagaaaagatacttgatatgatttcagtcttcttaaatttgttaagacttgttttgtggcatacatatgatatatcctggagaatgctcatgtgcagttgagaagaatgtgtattctgcagctgttggatgaactgttttgtataaatctattaagttcatttggtctagagtatagtttgaatctgatgtttctttattgattttgttttgtctggttgatctgtccattgctgaaagtggggtgttgaagtcccctactattactgcattgctctctctctttactattactgcatctgtctctctcttcagatatattaatatgttaggccattcctacattgccataaagaaatagctgagactggataatttatataaaaaaagagctttcattgactcacaattatgcaagctgtacaggaagcatggtgccaacatctgcttctgaggaggcctcaggaagcttacaatcatggcagaaggcacagtgggagcagaagctagagagagagtgtgtgtgggaggtgtcacacacttttaaaaaaccagatcttacaa

SEQ ID NO: 711023 - DNA, 965 bp, Homo sapiens
acagaaagttgagaggagagtaagttggaagaggtagtgattagagattttgcgcattgacagtggttgacttggcttctggggtaggccctggaacaaagtcctctgatcctcggttgtttgggaatagtcaattatgtragggtattctggtgctaccagttttgtgcaatggtgggcatttactgctataaacttccctcttagacctgcttttgctttttcctacagattttggtatgttgtgtttccattttgtttgtctcaagaaatttttaaatttcccttttaatttcttcactgacccaatgattggtcaggaacatgttgtttaattcccatgtctttgtactgtttctgaagttcctcctgttacggatttctagtattataccattgagttagaaaagatacttgatatgatttcagtcttcttaaatttgttaagacttgttttgtggcatacatatgatatatcctggagaatgctcatgtgcagttgagaagaatgtgtattctgcagctgttggatgaactgttttgtataaatctattaagttcatttggtctagagtatagtttgaatctgatgtttctttattgattttgttttgtctggttgatctgtccattgctgaaagtggggtgttgaagtcccctactattactgcattgctctctctctttactattactgcatctgtctctctcttcagatatattaatatgttaggccattcctacattgccataaagaaatagctgagactggataatttatataaaaaaagagctttcattgactcacaattatgcaagctgtacaggaagcatggtgccaacatctgcttctgaggaggcctcaggaagcttacaatcatggcagaaggcacagtgggagcagaagctagagagagagtgtgtgtgggaggtgtcacacacttttaaaaaaccagatcttacaa

SEQ ID NO: 711024 - DNA, 965 bp, Homo sapiens
acagaaagttgagaggagagtaagttggaagaggtagtgattagagattttgcgcattgacagtggttgacttggcttctggggtaggccctggaacaaagtcctctgatcctcggttgtttgggaatagtcaattatgtaagggtattctggtgctaccagttttgtgcaatggtgggcatttactgctataaacttccctcttagacctgcttttgctttttcctacagattttggtatgttgtgtttccattttgtttgtctcaagaaatttttaaatttcccttttaatttcttcactgacccaatgattggtcaggaacatgttgtttaattcccatgtctttgtactgtttctgaagttcctcctgttacggatttctagtattataccattgagttagaaaagatacttgatatgatttcagtcttcttaaatttgttaagacttgttttgtggcatacatatgatatatcctggagaatgctcatgtgcagttgagaagaatgtgtattctgcagctgttggatgaactgttttgtataaatctattaagttcatttggtctagagtatagtttgaatctgatgtttctttattgattttgttttgtctggttgatctgtccattgctgaaagtggggtgttgaagtcccctactattactgcattgctctctctctttactattactgcatctgtctctctcttcagrtatattaatatgttaggccattcctacattgccataaagaaatagctgagactggataatttatataaaaaaagagctttcattgactcacaattatgcaagctgtacaggaagcatggtgccaacatctgcttctgaggaggcctcaggaagcttacaatcatggcagaaggcacagtgggagcagaagctagagagagagtgtgtgtgggaggtgtcacacacttttaaaaaaccagatcttacaa

SEQ ID NO: 711025 - DNA, 965 bp, Homo sapiens
acagaaagttgagaggagagtaagttggaagaggtagtgattagagattttgcgcattgacagtggttgacttggcttctggggtaggccctggaacaaagtcctctgatcctcggttgtttgggaatagtcaattatgtaagggtattctggtgctaccagttttgtgcaatggtgggcatttactgctataaacttccctcttagacctgcttttgctttttcctacagattttggtatgttgtgtttccattttgtttgtctcaagaaatttttaaatttcccttttaatttcttcactgacccaatgattggtcaggaacatgttgtttaattcccatgtctttgtactgtttctgaagttcctcctgttacggatttctagtattataccattgagttagaaaagatacttgatatgatttcagtcttcttaaatttgttaagacttgttttgtggcatacatatgatatatcctggagaatgctcatgtgcagttgagaagaatgtgtattctgcagctgttggatgaactgttttgtataaatctattaagttcatttggtctagagtatagtttgaatctgatgtttctttattgattttgttttgtctggttgatctgtccattgctgaaagtggggtgttgaagtcccctactattactgcattgctctctctctttactattactgcatctgtctctctcttcagatatattaatatgttaggccattcctacattgccrtaaagaaatagctgagactggataatttatataaaaaaagagctttcattgactcacaattatgcaagctgtacaggaagcatggtgccaacatctgcttctgaggaggcctcaggaagcttacaatcatggcagaaggcacagtgggagcagaagctagagagagagtgtgtgtgggaggtgtcacacacttttaaaaaaccagatcttacaa

SEQ ID NO: 711026 - DNA, 641 bp, Homo sapiens
agtgccctctaaccctttgtggttattgarcacttgaaatgttgccaatgcacctgaggaactgaatttttaaatttaatagaattttaatttaagcagtaacatatggctagcgtattggtcagaaaaattttatacattttcacaggttgctttatggagaatagtatgtggaagcaaagaggcaaaagcagggagaagccttaggaatgcagatcaaggcttagcaaaaattttttttcttataaagggctagctagtaactatattagggtttacatttcctttttcttgtttgtttgttttgagatcgagtttcactcttatcacccaggctggagtacaatggcgcgatctcagctcactgaaacctccgcctcctgggttcaagtgattctcctgcctcagcctcccgagtagctgggactacaagcccccaccaccacatccagctaatttttgtatttttagtagagacagagtttcatcatgttggccagactggtatcaaactgcagacctcaggttatccagccacctcagccgtccaaagtgctgggattacaggcgtgaaccactgtgtctggccagggttgacatttcatagggactctatgacaactactgaagtatactattga

SEQ ID NO: 711027 - DNA, 641 bp, Homo sapiens
agtgccctctaaccctttgtggttattgaacacttgaaatgttgccaatgcacctgaggaactgaatttttaaatttaatagaattttaatttaagcagtaacatatggctarcgtattggtcagaaaaattttatacattttcacaggttgctttatggagaatagtatgtggaagcaaagaggcaaaagcagggagaagccttaggaatgcagatcaaggcttagcaaaaattttttttcttataaagggctagctagtaactatattagggtttacatttcctttttcttgtttgtttgttttgagatcgagtttcactcttatcacccaggctggagtacaatggcgcgatctcagctcactgaaacctccgcctcctgggttcaagtgattctcctgcctcagcctcccgagtagctgggactacaagcccccaccaccacatccagctaatttttgtatttttagtagagacagagtttcatcatgttggccagactggtatcaaactgcagacctcaggttatccagccacctcagccgtccaaagtgctgggattacaggcgtgaaccactgtgtctggccagggttgacatttcatagggactctatgacaactactgaagtatactattga

SEQ ID NO: 711028 - DNA, 816 bp, Homo sapiens
taacatgatgtaaaattcatctattctgtaaacttcttttgggctcttaccccatttcattattagttggccaatagcattaacaagaaggacttctatgtacaagtcattatactgagaccttgaaggttttctagcccagacactccaacacatgatcttttctctagcatcccttcatcttgaattttgtccaccctaacatactgttagtaatacagaactctccaccttttgaggaaacccattccatctctcaatgaaattagctattagaaagccttcctttaatgcaaaacgcagtctcctcccaggaggattatttctgtgacagtatatactgggggaaatttccattgcacttctagcctttgggtttctatggaaatagtctaatctctcttccacaaaacagttcttcaaatatttgaatgacagatccatagttctattctgtagactctgttggttctcagataatgttrgttattgatgaattttcttccattatatttccttagaattagtttcaagaagacctaaaaagaacaaatacaaaaatttagttgcgaactaaaaacttgaggcaagttgtgagaagaaatgtgggaatgattgacagctggcttggttaccttctattgagtaaatatataattatgccattttttaaaaatgttatttttttgagaagacagtaattgcactagtctattgtataattgttaaagcaatgctatttgcttatttgtctttaatcaatgggtttggactcacattgacctaatatacaaatcttgcaaactgctttttgag

SEQ ID NO: 711029 - DNA, 640 bp, Homo sapiens
ctgggtgacagagtgagactctgtctaaaaaaaaaagaaaaaaagagtatgagtggattattagtaacacaaagataaatgcttgaagggatggatatcccatttcctctgatgtgattattatgcattgcatgcctgtatcaaaatatctcatgtaccccataaatatatacacctactatttacccacaacaattaaaaattaaaatataaattttttaaagtttcccaggtatttctaacagacaaccgaggtggaaaatcccctcttcyacaggcatgcagcaaggaggcggctggcccatgtccaaagggtgggatgaagaggaattctaaaagcattaatccatcagctgcagagaaagaaatgtcctctccccatgatttcagacctgtgtagaggtggccatctatgagtgcagtgggggaacgaaggaaggggagcccattggtctgggttccagagggagcactcggccataactgtgctctaatctccagctccatcacaggccagaggagcctcgaatctgctgctaggaaagctcatcagagctgaggaggagaaagagacagctatagaacctgcagctgacaagaagccaggacagtaggaagtggcagggcagggggcagctgg

SEQ ID NO: 711030 - DNA, 612 bp, Homo sapiens
ccgtggcttcacagaggaccccaaattgtgtttatgtggcttaagctgaggattgctctactggaaggacacgcagaactcagagtccagccctgcagaccactgagactgaggaagtggtgtgcttaagtatcggggggattgcctgtgacatgcaggttctgggcccactctctgcagagtgatttggtagccctgggcaagagcctggaagcctctataacaaggctgctctccccaagcacatcattctgatgcaggtggttctggggyccttctacaacaaggtttggcaaactttttctgtaaaaggccaaatagactgtatggaccatacagtctctgttaaaactacagtagtcacttctgctagagtgaaagcagccttacatatgtaatgagtaaatgaatgggtgtggctatgcatataatatgtaaatgagtcaggtatggctaggttccaataaattataactacaaaaacaagcagtgggatatatttgagccatgggctatagtttgccagcccttgttctacaatagtgtgcctgacctcctctgccctgatcatttctcaaacactagttcatgtaaaattgatgaaaattagtt

SEQ ID NO: 711031 - DNA, 1137 bp, Homo sapiens
gatcgtgccactgygctccagcctgggcgacagagcgagactccgtctcaaaaaaaaaaaaaagaaattcttacatctgtcaaagtttgaaaggcactgtgctaaataaagaggccacttcataaggaattaatcaagtaaaggctccagaagacaggatcaggaggaacctaaccctgagcaagtcacctctctcctggtttcatttcctcctctccatagagtgagagagaactatgtgactcgcaaggcccttgctggccccaaatctagaaaaagtacactttttaaaaagctaaaacaagaaagcaagcatgtttataggatatgcgtgtcatcatctttcagggtccaccaggctcttacagcaaatcccatcgttcccaaagagagaatcagttaagaacatgtccaaagagaagactgaaatacttaccctaaaggaaaattcgaggttttctcctccccaaacttccattcctgtatcataagaccccagatattcaaaatatttcttactcacagcaaacagcccaccagccattgttggagacctaaaaaagtatgatatccttatttcactgtagacagcagaaaaccatcacagttatccaactaccttcccaccacgagccctttcatctgttcatctgtcatctctaagcatatcccgccttcacctctgtgccccacactaggctgggcctggaggcatagatgtaccctacggtccctgccttgaggtggctcccaggcttctcagcaggtaagtactatgtgtgtgctaaatatgttaactaaggtcagccagggccctgggagaacactgaggagggcaggggcaaaagggcaggactaggttccctggaggaagcaaggtctgcaggacaaaggacagttagccaagaagaagaagggaaatggaatggttctccagcatgagcaaaggcttaagggtgggagaaatccagggacatttagaagcatagagagcaaggagaagagagaagcaagagaccacgttccgagaagaaggcaggctccaggccatggtcatctgaggaggtgtgatctcacaaggcaggcactcacagatgccactcagaggccagtatgcagaaggccctaaaggcaact

SEQ ID NO: 711032 - DNA, 1291 bp, Homo sapiens
aaaaactcccttcgccaaccacagggaggcctctttttctatttctttctcataacacataatggtaccaaaaaatcataatgaaaataaggtcaatatacttaatccataatataataatctcaactaattttagtcatctctctttctaacaacacttaaacgatcaggccacactatgcaaatcaaattaaaatttatttttttgcttttttcttccagtcccaaaggaaaactccaaataccactcatcttgctgaaaaccacagtaaagttatttaattccagttaaaccaaatatttcacccacacactcttaaactttaatcttaaacatatccatgaaatgtgatgtttgaagagctttccttatttactcaccagatcatcaatatacagagagctcttcctaagcacaggcccccatctatgttttcagtcgatactaaatatttagagaaatactctgttacagtaacttttaaaaaaattctacactatcatttgaatttttaaaaaaatttagttaagcttagtttccataattctcattaggcaatccaggatgtgggtgttttttaatttccttttcatggagaaaaaggaagctttgtatcaggacatcagatgtatatgggaaaatacatatttcaatgcacatataagtaaatacatattttgtttgtttaaagatccttttgcctactccactcacaatgtaaatacaccacagtcaaattccataaattcagttttaaatgtatgtatgaaaactaggttttctactaaagttgaccagagcccaaaacactctgtctaatacacagtcaaaggaaacagcaatcagcccttagatgccccgaaagaaacyattctttgtttacctagaaactgaaagattttacactgagaatcacagctgctacagcaatggaggtatgctctgaatccagatagccatattagactctcattgatttgttaaaaatttaacattgtaaatgaaaccaaagcaaccaccaacaccaaccaggtaattaaattcctggttggaagaagtttcaaaatccaagcccaatgtcaacatctggcaagtctccatttaccacctaccaatacttgctcaaattacactgaaaatttagatagagggtaaagtactaagatttttaaaacctattaattagtttgtaccctccgtttaaatcacacataaaagctaactccaattgcaattataatcttagtgtttgtgctgttgtcacagaagggcaagggctgacaagagtta

SEQ ID NO: 711033 - DNA, 605 bp, Homo sapiens
acatttttcttttaatggatcacttctcaatgagtaatgttttaacaggaggggggttctgtaagagatagaaaaaaaatctaatggctttgtcccaagatcatttgtcaataaaagctactgaccatttaatattattttaaattcataattccttaatcggcatggttttagagctcacaaaagatgttttgaatcacaggaagaaagctgtattttcttcatgagattaataatctaatttggaaggacgaggaaggcagtgggtgaaacgtagaaagaacacgacaggaaggtacaggacaaagggtctcccctgacagggccatggtgggaaatgaagatgtgggtttccagactcttctcagatggatctgagcattcctcayggggctgcctggatggatgtgtggctgccaggtaacacttgctttgaacaaaggttctgagcccagaggtttgaaaaccactggccttacaatgccagacactgagcttcgaggatgttgaggaagagttgctcctcccttcccgcaacaccgccaagagggaagggtgaggggaagggccaggctgccttcctcttttctgttctttatgagata

SEQ ID NO: 711034 - DNA, 1538 bp, Homo sapiens
tgatgattctctcctatattttctctctctctttttcaccactttgtggactacatttctcctgttcctgggtctgttctcttgcaacatataagtttggtaaggtagtcaatagaaaacatttggttactgaaaagtggaattgattgatactcttttctttgagctaatgctgaaacactggattccccaacaacaactaaattttgtgttcagagtttcttccctcactcaaagaggaaagcatggcactgttattattttgtatcttttctttgggataaccatttctgaaccagtgttgcatggatttggctgctgtcttgggaacacagtactgatgttgctcctggtgagcgtgcactgaagatttgcrctgcactgtacctgaggttctcagccgagtcttcctgtgtatgtttgaagatctggttctgttttgtggggctatggacaaaatccaccctccacagtaggttgtaaagaatgcatccttttggtaattcaccacccactgagtggatttcattccttttttttttttttttttttttttttttggcttttaacttttaagttcaggggtacatttgcaggatgtacaggtttgttacataggtaaatgtgtgccatggtggtttgctgcacagatcatccaatcacctagatattaacccagtacccattagctattcttcctgatgctctccctccctgcatcccccacaggcttcagtgtgtgttgtttccctccctgtgtccgtgtgttctcatcactcagctcccacttacaagtgagaacatgcagtgtttggttttctgttcctgtgttagtttgctgaggataatggcctctagctccatccatgtccctgcagaggacatgatctcattcctttttatggctgcatagtattccatgttgtatatgtaccacattttctttatccaatctatcattgatgggcatttgggttgattccatgtctttgctattgtgaatagtgctgcagtgaacatacccatacgtgtatctttataatagaacaatttgtatgggggggttatatagtaatgagattgctggggatttcattctaatgtagtttgttggtatgggttatcctcactatctctgaaatgacgaaaaaattcttagtatcacccaaaccttattctgttttaattaggcatttcacacaatttaaattagttttacaaagaatgtagaatgaagaacacttctcatcacaaagagtacacatctcagcacaaaataatgtcccctcgcccctccttttacattgcttttatgacgtgccttctagagcctcagcaatgcacttgtacaactcgtagcagagcaccaaaagaaaccatgatcagtgttaatgtttttccacattttgttatgaaaaatttcaaatatatggaaaagtgggggaaaaaagtatcatgaatacccatctgtctgttacccagatccacaatgaacattttttttatctttccctctgtcacgccatcttcattacttt

SEQ ID NO: 711035 - DNA, 704 bp, Homo sapiens
ctgtagaacatcagcgtcactgaatgaatggagttggttacctgaccagctttcctactcaacatggagctctgtctgtctcatctctctcgattcttcagtgcataacccagttcctagcttgtgatggatccttcctaaggatgtattgggtaaattaatgaatagtgattcgacctaaccaattaaatccctgggagttttaaactcttgtccaacatcagttttatttcacgtcttattataaaacagtacatacctcttccagaaaaagtgaaaaacccttatatcacttagatgtaactaattaaacaaactgatgcatgtgtgtgtgtgtgtgtgtgtgtgtgtgtgtgtatagttgtatggtggtatatatattagtttgtaaatagctcttctactaaatacatgataaatatactttgacatcatcatgtgtacttctactacatcaccatttgactgcttggacaccagmcttcaccgttgttcagacctaagtggcaaaaccctttgtatttttctaagtgtctaggcagacatttaggaaatgaattcaactttggcactattataaacagtgttggtatgaatattcctaaagctaaatctttgtgaatatgttttcctactttatgaggacatattcccataaactagaatggctgaaacaagggctggttaggctattgaggttgcgg

SEQ ID NO: 711036 - DNA, 1097 bp, Homo sapiens
tattttttattctgtattctaaggtgagcagggtttaagattagactcacattaactagatttgtaagaggcagaagtataatgcatattttattcactcaatcactcatatagtcaatcattcatatagtcttccattccttcggagcacactgttaggcacacactgattgaccactactgtgtgccaggcacaaaatacatgctaggatcagtggtctctgaatagtagttgaagacataatcccggatctctgggaactgatggtggtttacagtggtcctcagcttcccttttcwcccatgacacatgcatgaccatgatatttactctagggaaatccattttacttccacccattcctgcattagctcacttccatatagaaattttaatctcagaagagctttggaggaagcttctatcctagtctgctcttccccatgaaagaatggctttcagagtcacaggtgttctctcagcttctacctcttctgtaaggtcagtcccctgggacagccctttccctgagtcagggtgataggaggggtgggaaagagaaggagggaggaaacgaaagagagaagcttgaagttttctagctgtaactgagtaagtcatctctatcagaagaggcaggagtgggaaacctgtttttgactcatttctaagccatgtgttctaattcatatttaccagcatgggaaaacagttcatccctacctaactctcaggtctgtggctcatttgagggggaaaagtataattatcaccaaacattttacactttcctatggccatgtccaggttctccatgtccttactacaactccacaattttttttccccaatgcaagaatggcattattaagtccataattcactttaatggatctttattcaacaaatctgtattaagcactgggctagacgctaaggattgaagcaggaataacatcaaggaggaagtgctgctctcctggagcttacattctggaggagagacactggttacaaacaagtaaaccaagatatggatgagattctgaaaagttctttagaaaaaataggccacaggctggagagagaataacca

SEQ ID NO: 711037 - DNA, 650 bp, Homo sapiens
gggcagtgtgaaaagactagggaggtaagagaacctgaaaatacagcactgtaggtagaaggctgtaaagctggaatgatgctaacaaatactgtattattaccttagctgatagcggtgacatagtggcccacacagaatcattgaatagcatcgggtgtggtaattcagggagagccagtggggcaatgtagaaactctaagctggcaaagttctgtggtttttgtaaagtgcctatccagagtacatggttcattcatgccagatcagcaaaagcagctgctgatgtgatgatgatttcccttttgagctaaacctctacagagttccttttttctctagggcttttggctrtgactgatgacgtagccttaggctcaggattctaacaccccacaaaagcaaaaattgacaaatgggatctaattaaactcaagaacttctgcacagtaaaataaactattaacagagtaaacagacaacctacagaacaagagaaaatatttgcaaattgtgtatccaacaaatgtctagtatccagtatctataaagaacttaaacaaatttacaagaaaaaaaaacccaaacaacgccattaaaaatgggcaaaggacatgaacagacacttcaaaagaaaacatatatgagg

SEQ ID NO: 711038 - DNA, 1201 bp, Homo sapiens
atggagtcaggttacatgagatacaatactctttcagagggacaaagcaagattcagaggatggtgatggtgaggtctagaggagcaagagacttttgctcaatagtcatatagcagctcagaaaccacactcatggccaggcatggtggctcatgcctgtaatcccagcactctgggagggcaaagcagggcagatcatgaggtcaggggattgagaccattctagctaacatggggaagccctgtctctattaaaaatacaaaaaattatccaggcatggtggcacactcctgtagtcccagctactcaggagtctgaggcaggaggatcgcttgattctcctgggaggcagagcttgcagtgagccgagatcgcaccaccgcactccagactgggcgacagagcgagaatccatctcaaaataaataaataaataaataaataaayaaataaacaaacaaacaaataaataaacacactcacctctaacccccttaaatgatggcctgaagttggcattgaaatccccattgaatttaaaaggggaacccaaactccaacaatttactggaggtcacatggcagagagagacagcactggggcaggaagcaaatcttctgtccttccattgtctttgttttatatgatgtgcttctctggccacaacccggtgggaccattaaatcttttgggcactcagtgctgggaaaaaatctcttgctggactctttcatatttgaaatgaatcccaatggataagaagtttcatgttttggggcatttgtaagtgaagatattctaggctgatggcaaagttaagttgtcattcaacctctaagttaatgcttagaagttttacttgatgaaccaacgtatggtcattaaaaactacaaagttttcctcctcaaatgtggcacttaagtgctgtgtgacctgatgtgtccatggttcaattttccagctgtaaagcggggttcataatacttcccaactttgtagggttgttgagagagttacacaaatatgtgtaaggtacctggcattgtacaaatatatgtgagccacattgtcaggcacactcaggctttacgattcttgtttattttgtatctgttatttttgttttcctacaattcaccattctgaatgttaattatctagccctaacagactaacaggtcttggagggcagggagc

SEQ ID NO: 711039 - DNA, 2268 bp, Homo sapiens
tcttacggagtgagggtcagaaaaggctttgcgagagggacaggaggaggtgagaaggcactggggcagaagggtgcggaggctggtggacaaggagcaggatgtgattgttggagtacaaaacacaagggaccaagagaggtggggtggggacagcgtgcaagtcttaggctggatcggggaaccctgggcagcacgggatgcccccctttcgtattgtcactcagccttacaacatctccaagagctggatagaagacaggagactattctacagatgggaaactggggcatgctgaaaagttgattcttccttaaataagagctgacttacgcacttgtcttctctccagcaagtcctcctaactaacccatttctccgtgtgggtttctgtgaggttaacaaggtcatagtggagaggcttcaggctggcaccaacattcctggcccgaaactatgggaagagagcctatactggcaaaactcctttttaagagagaagatatgtgctttgggcatggacctaccactgccagcttgtgccttagtcaagcttcctattctttctattcctgtttcctcatctttagagtgggtgtactaacccatgggccatgtagacgaggaaggggaagggtgagcatgggtgtttgacacatagtatgtttgattccatcttttccctcttatttctttattgagacaggatcctgctgtgccgcccaggctggagtgcagtgatacgatcacagctcactgcagccttcaaccctccaggctcaagcaatcctcccacctcagcctcctgggtagctggcactacaggcacgtgccaacacacctgggtaatttttttgttttttttttttttgtaaagacgaggttttgccatgttgcccaggctggtctcgaacctctgggctcaagcaatcctctcaccttggcctcttaaagtgctgggattacaggcatcacccacagtgcccagccttatcttttccctcttaaaccaagaaaaattctaactctgatgagaacgaaaagagaggggatccatcaaaactgcaagacagcagctcaggaggtgccaagggatgatagttcagtaagggcatctcttccaggcaatcagtgccataaggggctccttggggctattgatctgcggaggaaccacaagatcttctcagctagccagtgtcagcttccatcatcttgtgctaaataaggcctgtcactttcctggagagcctccagagaaaactgcagggcaaacagatgttgcaataggcccaaggagctcagataccgccmgtcctgtttcctgagcttctctgtagaaaggcaaggctggggatagtcttttccatccccactctctgcctccaggtctttgctccacgtggatgctttgtgcccctagggctgttccaatgacaacaacagcttttattgactgagcactcactgtgtgcaaaggagcatgtaagtgcgtgtaaccagcactgttccatttcctcctcccacagccttttggcatggggactcttaccctgctttacagctgaagcttggtgggattgaaaactttatccaaggtcacacagctagtgaatggaagagctggatcccaacccagatctgcctgaatccaaagcctgtatgcttcctccctgcacgagggtgtcttgggccacttggattttccagcctcagtccaaaggcctgtggacaacgaacctttgttgtgcgggctgtatctctttgattcagttcacccaaactgtgacactttggatcttccctctttgatacctctcctgtgtctcatcttattaattcatgcatgcatctaatcaacagatttccactggggtcctttccaggccaggtgtcgagtacctcggaggctgtgtgctcccttcccactataccagtgtgcaactagaaaaaaaaaaaaagtggtttaagctgggtctagaacggagtttagctgatcccttctgggaaaggtgagtagagtagctgcccaggcaatttaaatatccatgggccacctgggcacggtggcgcacatctataatcccagcagattgcctgagctcaggagttcgagaccagcctgggcatcatggtgaaacccccgtctctactgaaacacaaaaaattagccaggcatggcagcatgcgcctgtagtcctggcaacccgggaggcggaggttgcagtgagctgagatcatgcctctgcactccagcctgggcaaca

SEQ ID NO: 711040 - DNA, 1030 bp, Homo sapiens
tggtataattttttcatcgcagagtgaggctctcaccttcaggaactgtatttttgctgactctctcyggtattcactgttttgggccctctcaacaatttcatgtttttattcttttcatatcttcccaatctaaactgttttgggtagttcatatacatgtctctgggttacatttatatcttagcttcattgtaaatggagtttgcagacatttttaaaaatgtctgtcttcttgttgctgtcgtatgatttctaagaggaggtgaaaaaatgctaacatagggagacgttttcatatggaggttttaacctgcatttattgaatgcctagtgttccaatctttcattttcatacttcagaagaatcaaaagaagatacatattgtaagatgagacaataaggaacaagttgatagggtttattcaggagtaacaattttcaattggctatttagccttcatcaaaatacgttctagagaattcacggaaaatttcctttgagttaactaagcgttgtctccagttcgtccttcaactagttggtgattttgggtaaagtgttttcaaaatttccacttgagacatttatgatatgctggaatgaagttataaatgccatatacactaattgctattacttcccatgaactctaacataatgcttatgttgtaaggcagaactggtatgcttattttagagtttgttttataaggaaagaatcattgtacacatacattggtgctatgtaatttgattgaatccatcagacaccttgtcatagaatgtttttttataggtccttctgtgacaaaatgggactttggcacagagcaagaggtgtcacttatttttcactattgattctaggatttcaacttcacgacctctttcagtaggcaaaataggagcatttacatacttttctcatccagagccaggctctgagttcagcccactattaaagatttgaaaggtatagaaaattatagatggcaaataaagaccacctacaaatttagcaccca

SEQ ID NO: 711041 - DNA, 1030 bp, Homo sapiens
tggtataattttttcatcgcagagtgaggctctcaccttcaggaactgtatttttgctgactctctctggtattcactgttttgggccctctcaacaatttcatgtttttattcttttcatatcttcccaatctaaactgttttgggtagttcatatacatgtctctgggttacatttatatcttagcttcattgtaaatggagtttgcagacatttttaaaaatgtctgtcttcttgttgctgtcgtatgatttctaagaggaggtgaaaaaatgctaacatagggagacgttttcatatggaggttttaacctgcatttattgaatrcctagtgttccaatctttcattttcatacttcagaagaatcaaaagaagatacatattgtaagatgagacaataaggaacaagttgatagggtttattcaggagtaacaattttcaattggctatttagccttcatcaaaatacgttctagagaattcacggaaaatttcctttgagttaactaagcgttgtctccagttcgtccttcaactagttggtgattttgggtaaagtgttttcaaaatttccacttgagacatttatgatatgctggaatgaagttataaatgccatatacactaattgctattacttcccatgaactctaacataatgcttatgttgtaaggcagaactggtatgcttattttagagtttgttttataaggaaagaatcattgtacacatacattggtgctatgtaatttgattgaatccatcagacaccttgtcatagaatgtttttttataggtccttctgtgacaaaatgggactttggcacagagcaagaggtgtcacttatttttcactattgattctaggatttcaacttcacgacctctttcagtaggcaaaataggagcatttacatacttttctcatccagagccaggctctgagttcagcccactattaaagatttgaaaggtatagaaaattatagatggcaaataaagaccacctacaaatttagcaccca

SEQ ID NO: 711042 - DNA, 1030 bp, Homo sapiens
tggtataattttttcatcgcagagtgaggctctcaccttcaggaactgtatttttgctgactctctctggtattcactgttttgggccctctcaacaatttcatgtttttattcttttcatatcttcccaatctaaactgttttgggtagttcatatacatgtctctgggttacatttatatcttagcttcattgtaaatggagtttgcagacatttttaaaaatgtctgtcttcttgttgctgtcgtatgatttctaagaggaggtgaaaaaatgctaacatagggagacgttttcatatggaggttttaacctgcatttattgaatgcctagtgttccaatctttcattttcatactkcagaagaatcaaaagaagatacatattgtaagatgagacaataaggaacaagttgatagggtttattcaggagtaacaattttcaattggctatttagccttcatcaaaatacgttctagagaattcacggaaaatttcctttgagttaactaagcgttgtctccagttcgtccttcaactagttggtgattttgggtaaagtgttttcaaaatttccacttgagacatttatgatatgctggaatgaagttataaatgccatatacactaattgctattacttcccatgaactctaacataatgcttatgttgtaaggcagaactggtatgcttattttagagtttgttttataaggaaagaatcattgtacacatacattggtgctatgtaatttgattgaatccatcagacaccttgtcatagaatgtttttttataggtccttctgtgacaaaatgggactttggcacagagcaagaggtgtcacttatttttcactattgattctaggatttcaacttcacgacctctttcagtaggcaaaataggagcatttacatacttttctcatccagagccaggctctgagttcagcccactattaaagatttgaaaggtatagaaaattatagatggcaaataaagaccacctacaaatttagcaccca

SEQ ID NO: 711043 - DNA, 1030 bp, Homo sapiens
tggtataattttttcatcgcagagtgaggctctcaccttcaggaactgtatttttgctgactctctctggtattcactgttttgggccctctcaacaatttcatgtttttattcttttcatatcttcccaatctaaactgttttgggtagttcatatacatgtctctgggttacatttatatcttagcttcattgtaaatggagtttgcagacatttttaaaaatgtctgtcttcttgttgctgtcgtatgatttctaagaggaggtgaaaaaatgctaacatagggagacgttttcatatggaggttttaacctgcatttattgaatgcctagtgttccaatctttcattttcatacttcagaagaatcaaaagaagatacatattgtaagatgagacaataaggaacaagttgatagggtttattcaggartaacaattttcaattggctatttagccttcatcaaaatacgttctagagaattcacggaaaatttcctttgagttaactaagcgttgtctccagttcgtccttcaactagttggtgattttgggtaaagtgttttcaaaatttccacttgagacatttatgatatgctggaatgaagttataaatgccatatacactaattgctattacttcccatgaactctaacataatgcttatgttgtaaggcagaactggtatgcttattttagagtttgttttataaggaaagaatcattgtacacatacattggtgctatgtaatttgattgaatccatcagacaccttgtcatagaatgtttttttataggtccttctgtgacaaaatgggactttggcacagagcaagaggtgtcacttatttttcactattgattctaggatttcaacttcacgacctctttcagtaggcaaaataggagcatttacatacttttctcatccagagccaggctctgagttcagcccactattaaagatttgaaaggtatagaaaattatagatggcaaataaagaccacctacaaatttagcaccca

SEQ ID NO: 711044 - DNA, 1435 bp, Homo sapiens
ttaataagtactggtggagtacatgaaggagaatacgctcatacattgatggtgggattgtttattggtatacacgttaaaaaggtaatatggaaatatgtatttcaaatgaaaaagtacatcccttctttcccagcaattccccttcagagaatcttttctatcaaagtaaaagcactagtatttagttatatataatttatatataatttagttatatatataagtgtttattttaacatagaatagcacaaaactgcaatcactctgaatgctaataaataggaatacagttaaataatgtctcacccatattaggaaatatcacaccactaataaaaaagagtgatttcaggttttatgaggtgacccataacaatgtctatgatgtgtaatgttgagtgggaaaagctagctgtagagaaatgtctatagaatgattgtacttatataaaaataagcaatgataaaaatgtcctctgcatgggaatttacacttatcaattataggaagaaggatgaggaagggtaaaaacctgtgggtaaataggcttattttagtgagatgaacatgaggtaataaataccagaaaggtagcaaaatggaaatattttgatggtataatgttttgttatatataaactatagaattctattttattataacagtacagttgtatatacttgcagaaccattgaagggttcytgatataaatgaaaacataaatgggcaatatctatcaaaattacttatgcatttacctttaatctggccatctcttttgtaagaatctaccccaaaacacattggtacaagtatgaaatgacatacacataagattatttattgtgacatcatatgcaatgacaaaaatagtaaataacccacttgtagattcttataatgaacagtgaagagaaatgaaggaatgatatatacataaacgcagagtgttctgtaggatattccattaagtgaatgttgtgttctttaggataagtataagtatgttccaaacattgcaggggtatacttacacttttatttatttatttatttatttatttatttatttatttatttattttaagacggagtctcactctgtcgcccaggctggagtgcagcggcacgatctcagctcactgcaacctccacctcccaggttcaagccattcttctgcctcagcctcctgagtagctgggattacaggcacgcaccaccacatctggctaatttttgtatttttagtagagaaggtgtttcaccaggttggccaggctggtctcaagcgcctgacctcgtgatccgtctgcctcggcctcccgaagtgtacttacacttttaaaaaaataattgtttaactgaaatccaaattagtaggtatcctgcatttgtatttgctaaatctaacagccttgtttggggaga

SEQ ID NO: 711045 - DNA, 3224 bp, Homo sapiens
gatccacagatttgcagcttgaagaagagtcacaccaattggttccagaccaataaaagtaaatgattgcctctaagttttggggtagctggttgcccaatatcattgcaaaaatagctaactgacatacatataaaaagataatgaactttattattaaagagggaaatacagatgaaggcgcggcgattaaccatttcctatccattcgatcggcattatataacattgctgtacaacactttggagagtaatttgacaataatgtgtaatgttaaagtattataacttctaagtacataaccaggaaattcttgcacttgtgcacaggtaaagacatacaaagaatgtttattacacccttatttgtaataacaattttttaaagaaatctatccatcaataggaaaataaatacattgtaatatgtttacgatatggaaagcagtaaaaatgaataaactatagctatgcattctaacattttaaaaaatcttggaaaaaacattgagcaacaaaagcaagtttcagaagaatacatacagtatgactctacatatatactgccctaagtcattcggacatgactgtatttacagatagatactggttttgcatcttcacataacagtagcaaacttggaggcagtgtgaagagtgttatcagtaaaaattattcaaagaactttattaaatcttttatttctgaaaaaaaataagagaggcatgcataataaaatggtaagatttgacaaagctgagtggtggataccacagctgttagtcatgttattctttggacatctcccatatgccttaatgttttattattttattttatttattttatttatttatttattttgagacggagtctcactctgtcacccaggctggagtgcagtggcaccatcttggctcactgcaagctctgcctcccgggttcacgccattctcctgcctcagcctcctgagtagctgggactacaggtgcccgccaccacgcccggctaattttttgtatttttactggagacagggtttcactgtgttagccaggatggtcttgatctcctgacctcgtgatccacccgcctcggcctcccaaagtgctaggattacaggcgttagccaccgtgcctggcctgctttatcattttaaaaagaaagctttgaattatgaggcaaaaaccctgtttggatatcacctctgccatttactgactatgcaaccctcaccaaactctaagagctctctgcacctttgttttctcatttgtaaaataaatatgtggaactgagacctttaaattcccttgcaccattaaaatttcagattatattaattttttaaaacttaaattaattgcttatatggatccattactccaggcagaattcagaatacccacttggacaggcaaagccatcaatagagtcctctaacctcagatggttagctcagctcaaggaatacaaactaaattgtgggtagagcagtgcctcattccaacatcatgaaagctccgaaagtaakagtggtctaaaaggttttcatgacaataaaatcatttatattttctgccaaagttgaagatacacacacacacacacacacacacacacagagagagagagagagagagagagagagagagagagagagagagagagaaaatgaatcgttatcctacggaaaaaaaataagagatccatatccttattaatgttttaaagaaatctgtatatatccttaacaggatccaacccacagcccaattacctattttgccttgatacaattgaaggacaaccatgataattcgaaaaatgtgacaagcagggattggccatgtacaaaattaaattggtatcatttttctactgtgtacacaaagaaaagccttattctcaataataaggacacattaaacctaaagattaaaatgagtttctctaatagattcatgaattcagctgcaataaagtagcattcttttttccctctaggtatattccctgttcttaacttctttgtttcaaattcttaggagaaaatagagtctttggctatagaatgtattatgtctgaatgtttccacatacagtatatgactaacaaaactatttatactaaactttctggtttttcagatcttccaacatataggactcctgttctaaaatgtgctttatgctccaatttcctgcaaatttatctatgaagccagggaaactgagttacttggaattaacttttggtggtttccaggatacagccatctgcaagtacttatacatgggtagttgatgaaaacagctaagtatgttgtagccatgtgataaattttttcatggttaagacatttttttcaaggtgtcagacttaaaatatcattcaatgagggaataatttatcctcattttggttccattggctgaaaatgttgagagttatctgaagagtgtactgtccctgtgcatgtttaagtcttgtatgctctaagagaagcatacatgatgcaagttggaactttacttatgagagggaacacaactgtggagaggaccactgtcttctcccctgcatggtggtgccatcttgttccactaatcatttacttagtgggcagtgaaaacacacaacatcacacagcacctcacaagagtgtgagaaaaaaaaaaacaaaacagggggaacatctaatgtgcctaaattcttccaattgctaatagccatttataattgtctgcacaatattccacatgttcaaagcaaagcagttatagcaaaggtgttgaaagcatgggttgtacagttgttaccctgccttaaattatacctttaccacttagtagttctgtggttgatcttgtataacttacctaacctctttaagccatagtattctcagtagtttcccaaccctaaattctcactgcacaattgctattataaattttttctacagctgatgatatagtttaaatatgttcgtattttgcttttatattgacctctaaaattgaccatacttattataatacttctactgatattccatagataatctctactttctctccaaaattttgactccttcccaggacaaattcatcacacctctcctatggaaaggatcaaaaggaaaatctctcactgctatatcacagttggtagcattctcaaagagagagttttagggaagagaaatgccaaaggt

SEQ ID NO: 711046 - DNA, 3224 bp, Homo sapiens
gatccacagatttgcagcttgaagaagagtcacaccaattggttccagaccaataaaagtaaatgattgcctctaagttttggggtagctggttgcccaatatcattgcaaaaatagctaactgacatacatataaaaagataatgaactttattattaaagagggaaatacagatgaaggcgcggcgattaaccatttcctatccattcgatcggcattatataacattgctgtacaacactttggagagtaatttgacaataatgtgtaatgttaaagtattataacttctaagtacataaccaggaaattcttgcacttgtgcacaggtaaagacatacaaagaatgtttattacacccttatttgtaataacaattttttaaagaaatctatccatcaataggaaaataaatacattgtaatatgtttacgatatggaaagcagtaaaaatgaataaactatagctatgcattctaacattttaaaaaatcttggaaaaaacattgagcaacaaaagcaagtttcagaagaatacatacagtatgactctacatatatactgccctaagtcattcggacatgactgtatttacagatagatactggttttgcatcttcacataacagtagcaaacttggaggcagtgtgaagagtgttatcagtaaaaattattcaaagaactttattaaatcttttatttctgaaaaaaaataagagaggcatgcataataaaatggtaagatttgacaaagctgagtggtggataccacagctgttagtcatgttattctttggacatctcccatatgccttaatgttttattattttattttatttattttatttatttatttattttgagacggagtctcactctgtcacccaggctggagtgcagtggcaccatcttggctcactgcaagctctgcctcccgggttcacgccattctcctgcctcagcctcctgagtagctgggactacaggtgcccgccaccacgcccggctaattttttgtatttttactggagacagggtttcactgtgttagccaggatggtcttgatctcctgacctcgtgatccacccgcctcggcctcccaaagtgctaggattacaggcgttagccaccgtgcctggcctgctttatcattttaaaaagaaagctttgaattatgaggcaaaaaccctgtttggatatcacctctgccatttactgactatgcaaccctcaccaaactctaagagctctctgcacctttgttttctcatttgtaaaataaatatgtggaactgagacctttaaattcccttgcaccattaaaatttcagattatattaattttttaaaacttaaattaattgcttatatggatccattactccaggcagaattcagaatacccacttggacaggcaaagccatcaatagagtcctctaacctcagatggttagctcagctcaaggaatacaaactaaattgtgggtagagcagtgcctcattccaacatcatgaaagctccgaaagtaagagtggtctaaaaggttttcatgacaataaaatcatttatattttctgccaaagttgaagatacacacacacacacacacacacacacacasagagagagagagagagagagagagagagagagagagagagagagagaaaatgaatcgttatcctacggaaaaaaaataagagatccatatccttattaatgttttaaagaaatctgtatatatccttaacaggatccaacccacagcccaattacctattttgccttgatacaattgaaggacaaccatgataattcgaaaaatgtgacaagcagggattggccatgtacaaaattaaattggtatcatttttctactgtgtacacaaagaaaagccttattctcaataataaggacacattaaacctaaagattaaaatgagtttctctaatagattcatgaattcagctgcaataaagtagcattcttttttccctctaggtatattccctgttcttaacttctttgtttcaaattcttaggagaaaatagagtctttggctatagaatgtattatgtctgaatgtttccacatacagtatatgactaacaaaactatttatactaaactttctggtttttcagatcttccaacatataggactcctgttctaaaatgtgctttatgctccaatttcctgcaaatttatctatgaagccagggaaactgagttacttggaattaacttttggtggtttccaggatacagccatctgcaagtacttatacatgggtagttgatgaaaacagctaagtatgttgtagccatgtgataaattttttcatggttaagacatttttttcaaggtgtcagacttaaaatatcattcaatgagggaataatttatcctcattttggttccattggctgaaaatgttgagagttatctgaagagtgtactgtccctgtgcatgtttaagtcttgtatgctctaagagaagcatacatgatgcaagttggaactttacttatgagagggaacacaactgtggagaggaccactgtcttctcccctgcatggtggtgccatcttgttccactaatcatttacttagtgggcagtgaaaacacacaacatcacacagcacctcacaagagtgtgagaaaaaaaaaaacaaaacagggggaacatctaatgtgcctaaattcttccaattgctaatagccatttataattgtctgcacaatattccacatgttcaaagcaaagcagttatagcaaaggtgttgaaagcatgggttgtacagttgttaccctgccttaaattatacctttaccacttagtagttctgtggttgatcttgtataacttacctaacctctttaagccatagtattctcagtagtttcccaaccctaaattctcactgcacaattgctattataaattttttctacagctgatgatatagtttaaatatgttcgtattttgcttttatattgacctctaaaattgaccatacttattataatacttctactgatattccatagataatctctactttctctccaaaattttgactccttcccaggacaaattcatcacacctctcctatggaaaggatcaaaaggaaaatctctcactgctatatcacagttggtagcattctcaaagagagagttttagggaagagaaatgccaaaggt

SEQ ID NO: 711047 - DNA, 2126 bp, Homo sapiens
cgctctagtaaattactccggtaggaaagttgcatcctaaaagagaattcttgaacctccatatgaccttccctggttaccctgggtgacctgtcttcgtttgttatctctattagagcactttaaaataacatttttctatcttacattataaaatttttaagcatgtcaatctttactcttagattatatgagagggcagccacaactgatcttgtgtccctgaaacacaaagcagtgactccattcaattgtgtcaataaagctcgcttgagaaagctaaggctggggcggaagtcagtttttcagagctctcaagccatactacataggatgcctcctattctagctttgcataaaatccactctggaattaggcagtaggttggtttgagagttggcctcccttgcccctttctttcctccacaatcagtattcacaaatacagatgtgaagcttctcttctccacccagtaagtaacatattcaatgttctatgatacaaaggaagacagtgagggagagagaaagcaataaggtcctaaaagcaatagaagataatagggaaaagaagagaagaaagtgaagacagaatataccttacaacttttctacttctagggagtagacataaagtgacataaagtgaaaacattgaaaatgacataaagtgaaaaaataaatgctataaaaattaccaaatcattcctcactactttaacgttgtttggcaagatgatgtccaagaggctattgagtcatggtttttctgggtatgaaaaatgatgtggtaagaaattgttcccaaagagccagtcacttaactcaggaaaataaaattcacaagatgctaacagcatgagatatcatatcatgttaatatgcagaagagagtgctgaaacaatatggtgtgctgattaaattttagaaaatcccattgttaagagattttttttccattcagacaagtgttttggaggcaaatattcacattctaaaattaaagctatcagatcaaatgacaagataaaggctatgtattggtagttaactgattaaacaagaagtgggagattgaggaagaggaagagagaagaagaaaaggggagaggaggagatggaagaggagaaggaaagaaagatcctagagtatcttgaagtaattaaaatattttcagcggcagtaattcttgatttaggtgtgtctgacatattaataattgttttgaactgatttagttctttctagcaaatagtacaaacttttataatataatctacatctggggtgaaggcaaacctcctgctctgaaaatgctgaaaatgtgatcagttttcatacatggctatgaggtacaagaaacattgagaagatttctggaatgtccataaagatcaagcattccagaaaacttggaaacagcagatgaaaaagaagaaaagatgttaggaaagttctgtggttagaaggcaatgaatacaacttgatgttctaaataaactatctagtcagatcaaagtagaagagagagaattaacaggaaattcattcgttcatcctttcattcatcaatagataaacatcggtgtgtttatctattcactaattcaacatgtatttgtcaaaagccctctgcatacaaagtcctggaagtacagtgttgaataaagcaaacacagccacagaatgcacatttttcatagaatactagggttctgcttttgctycaagagagattatggaaaaatcatatattttcatcttgtcattaaatgacaaagtgtagcagacacttattgaacccctcagggatgttaattggacttcatgtcactaggaatgcaataaattgatgttgtagcagagtgtactgccattaattataactggcctttctcataaatatttcagaaaccatttgttatctgaaaaaaaatacggaaagggaattttagaaaacatttttaagtgaaagatatataaaggggatttatttcctgttcagtctcaagatcattcacatgaattttgatggtgacaaagaattatcaacccttattttctgtctctaaggattccacattttaaatgttgagtttcagaataaatggaaaactgagaaa

SEQ ID NO: 711048 - DNA, 635 bp, Homo sapiens
aagccaccctcctacctcagcctcccgagtatctgggactacaggcgtgcaccaccatgcccagctaattttttgtgttttttgtagaaatggggttttgccatgttgtccaggctggtcttgaacttttgggctcaagtgatctgcccaccttgaccttccaaagtgctgggattacaggtgtgaaccactgtgcccagcctgtgcctgttatttttttggtgttgtttgttttgtttttgttctttgagatggggttttgccatgttgcccaggctggtctcgaactcccgagctcaggtgatttgccccccctcagcctcccaaagtagtgggactacaggtgtgaaccaccatgtccggcctgtgttcctgttgttttaatttgtatttttttcaatttcaaatttataatctctgatatcataactgcttgtgttgtattacattactaaaaataatgcttaattctatttctggcatttgagttttttaaatcttgatcgcttcaattatttatgtcactggcktggctcctgtagatatttgaatttgtgattcttgtcataggcagaaggtacaacctgactatatccttgggcaagatgcctatgaaaatatggttatcatcttgt

SEQ ID NO: 711049 - DNA, 635 bp, Homo sapiens
aagccaccctcctacctcagcctcccgagtatctgggactacaggcgtgcaccaccatgcccagctaattttttgtgttttttgtagaaatggggttttgccatgttgtccaggctggtcttgaacttttgggctcaagtgatctgcccaccttgaccttccaaagtgctgggattacaggtgtgaaccactgtgcccagcctgtgcctgttatttttttggtgttgtttgttttgtttttgttctttgagatggggttttgccatgttgcccaggctggtctcgaactcccgagctcaggtgatttgccccccctcagcctcccaaagtagtgggactacaggtgtgaaccaccatgtccggcctgtgttcctgttgttttaatttgtatttttttcaatttcaaatttataatctctgatatcataactgcttgtgttgtattacattactaaaaataatgcttaattctatttctggcatttgagttttttaaatcttgatcgcttcaattatttatgtcactggcgtggctcctgtagayatttgaatttgtgattcttgtcataggcagaaggtacaacctgactatatccttgggcaagatgcctatgaaaatatggttatcatcttgt

SEQ ID NO: 711050 - DNA, 635 bp, Homo sapiens
aagccaccctcctacctcagcctcccgagtatctgggactacaggcgtgcaccaccatgcccagctaattttttgtgttttttgtagaaatggggttttgccatgttgtccaggctggtcttgaacttttgggctcaagtgatctgcccaccttgaccttccaaagtgctgggattacaggtgtgaaccactgtgcccagcctgtgcctgttatttttttggtgttgtttgttttgtttttgttctttgagatggggttttgccatgttgcccaggctggtctcgaactcccgagctcaggtgatttgccccccctcagcctcccaaagtagtgggactacaggtgtgaaccaccatgtccggcctgtgttcctgttgttttaatttgtatttttttcaatttcaaatttataatctctgatatcataactgcttgtgttgtattacattactaaaaataatgcttaattctatttctggcatttgagttttttaaatcttgatcgcttcaattatttatgtcactggcgtggctcctgtagatatttgaatttgtgawtcttgtcataggcagaaggtacaacctgactatatccttgggcaagatgcctatgaaaatatggttatcatcttgt

SEQ ID NO: 711051 - DNA, 628 bp, Homo sapiens
agctactcaggaggctgaggcaggataacagcttgaacccgggaggcggaggttgcggtgagccgagattgcgccattgcactctccagcctgggcaacgggagcaaaactccgtctcaaaacaaaaaacaaaacaaaaaagttccaggtgggttgtggttttaaatgtgagcagcaaaacaatgaagttcctagaagataatatatgagaatatcttcataaccttggtataagaagacttttaataggatgcaaataatactaactataaagagaaagaaaagctaaattggactacatcaaaattctttcctcactgcctccctcccatcctttcttccttccattaagattttacccctggccaggcatggtggctcacacctgtaatcccagaactttgggaggccaaggcaggaggattgcttgagcccaggagttcaagactagcctggacaacrtagcgagacttagcctctattttatatttttttttaaaaaaaatttcaccctactggggaattattagagatcaacagtaaaaataagtcattgcttatcaagaatactgtggtaatgtcctgtcactggggtcctcacataaactgttgaaaacctttaagccat

SEQ ID NO: 711052 - DNA, 1304 bp, Homo sapiens
tgttggaagtatattttagggagatctgactgaagtatgcagggtaaatagaaatgagatgatgtggagtaggacttccacttggaagcttctttaattgttcaagtataagatggtaaaaacctgggttaataggataaaagtaaaaatttgagaggaaaggaaatcatttagtcatcattagagctcacctagatagattgccattaaaaaacagacacaccttttaacagcacaacagaatggggctcatctaagtaatgaatttttcactactaagtgrccaaatgatagggatttgtgaagatggatttcgatggtacacactgcctctcgtttctgtgatatattttgcagcctcgtaagtgttcctgtgtgtgtatatatgacataaatatgaagccaataaatgtaaattaccaattgtaaactttttcctattgagtaaatctgacaatatgtatattccccaccttcgagtctttgaaactatagctgtgaagatgtactttgagaacgtgaaatgtatttgcttgttaaattggggttcagattttaaaggagaaacttcccttggtttaggagctgtgtcataatgactgaaataattcagtttgagaaagtaccgacaataaaaaattgttgagaatagtgagtgagccctgatacgagtagttatatattttcagtttcattctgagcctgcctaattctgtgcagtccttgcagcatctcctgctagtaggtaattatcactttttctctggggaggcagtgctgcttttggactataatgtggaaactattactagagagtctagaagttggggtgggatgggtgtgtttactgagcttaaagcaagtaatgtcaatttgtgaagcaagcctaagaatgtgtgtatgtgtgttgaactgagaagagtatatcttaaatagggcagccatcatcttcaggtgatagttgctgtaagaatgatatcctgtattactgtatcttcctattttttcaagaaaagctggaaatctggacttgcgggtaaaaatctctggattattaaatgttggcaacgtattcagataaaacactttatggttcaaataaatcatgcccaacccactgcctgcaccagtgtgtctgtttgatgtaaacagtgtccaattaatattaaaaatatgggttttagtactactagagactcttcttctagctttctatttgtattattaaacaggatgtacaaacatttcttttttgtagtccacaatcagttccatggcttaatgaaatagtttaggatttgtca

SEQ ID NO: 711053 - DNA, 976 bp, Homo sapiens
tatggatttgtacaactcttgtcagaaactaggtaacttagtctttaataataaccttgtaacctagtctttaataataataatttaataataacctcgacatccattcttagcagtgattcttaagtctttttgagctactccttgccccaccgttaccagtaatccgatgaaagcaaacattctttttttcccagggaaagggccatattctcatacttcgaaagttttctttaaagtatcaggagcccagtgcagtggctcatgcctgtaatcccagcactttgggaggccgaggcaggatgattgcttgagcccaggagtttgagactagcccaggcaatatagtgagctcttatctctwcaaaaaattaaaaaattgacctagtgtggtggcacgcacccagctgctgggtagggtgcggtgggaggatcgcttgagcctgggaggcggaggttggctgggtgacggagtgagaccctatctcaacaaaagggagctgggggatgatcaggagcccttgatgtggaaaaaagtaggatcagatttctaataaaacgctttcagccatgacatactactgcatttcaaccttgtgcaaaaaaaacaatttttaaaacttcaattcagtgttttcagcaagattcatggggacattacaattaaaactggagcaagtagtcaactaggaattgcatggatatgaaaaataatgctgggcgttagtgaatatttgagcattacagaaaatctaatgaattaacaaggagataaaagcgaaaatacgcaatcagaatttggatgagaggttttcattttaattctgaaactatttcttattagttaagcatctgttatgcctctgttgtgtcaggcattgtaatatctacagaagatgcagtggtgagcaagagaggtgtgatcctactcttggtgtgaaagttaaaagagtgaaaaatgattagaggaaaggca

SEQ ID NO: 711054 - DNA, 1139 bp, Homo sapiens
tttgagataatctagaaattcatatttttgtgaaatctcttaattttttaaaatattggcccaacgtagatggtctggccaggcaaaaagcagccatgagccagattcaaccagtgggacaccagtctacaaaccatgatttggaaacctctctgacaagcctggttctaatgcagtgatttgcaaaagtaatcagcttcatggctcccatgatcctgaaatgcccccttaatggcactagtatcaaacaaggccaaggggctgagactgtaaactcctttcatgtgcagccattttgctaagtggctcttaccagctgtaggctgtagagttcctcaccctgttccaagcatggtctggtccttcttggggattggaaattgtgctctcactcctcttccagctaattgctttaatgcatcctgaatgtatctaggctgccgcccctaaccactgggtcatcatttattcacaggcctgaagtcccttaagcagcctcctgctggcccwcacgctgcaggggattaatgtagtctggttggtgagtcaaaaagaaagatgacatcattttcatgtcaggaatgaggatgtgtgtttgtctatgtacgggttatagagtgcaaagacaggaaaactgaggctacttcttttataaggtagcacaatagccccctccctctttgtcttttgctttcaatccaatctggcttctcccaagtgagttattaatatgggacacagcctgacttcttcccttctgtctcctcatataaatccaactaattaatttactttaacaagaggaatctttttctatctctttccatcttcgtcgttcaagctcagtttctctgaattcaaatccaagatacacagctacttcaataattacactttgaactttatctctgaggctcagtgtgcagagatctcttattttgcgtcatcagatccactgtcataagctaagggaaaaagaaatcttaagtaaaagggttattaaatgagaagaagagttagagagggcaggtaaagaccagactcatattctgtctggttcaattaatgaagggaaaatggaaagaatactgcaggtgctgcaaactggacaacctaaagatatttacacattttttttt

SEQ ID NO: 711055 - DNA, 613 bp, Homo sapiens
gtctaagattgttgctccggttgtcctcttcttggtcacagctggctaccagcaccatattggagttccaacctgtaggaaagagaatatggagggcaagaaacttaatgctatggactgaatgtcttccacccaatgcccattcttatgttgaaatcttaatccctaaggtgatagtattaggaagcgkggcctttgagaggtgattaggtcacagggtagaaccgtcgtgcatgggattaatacccttataaaagaggccagagagaaaccctttgccccttccaccatgtgaggacaaatgagacacagaatctgctggtgccttgatcttggacttcccagcttctagaaccacacacacacacaaattctgttgttaaggctaccattcaacttaggaatcctattactgaggaaatatactccaaggaaaataaattgttctaccaaaagggcacacgtacttgtatgttcattgtagctactattcacaccgtatctctgttgcaaaagccctatatagtcactggctggcttgacaccgcaagcagaaactctgtggtcacactgccttctcttctgtctgtgtaatgcccctccacttttatct

SEQ ID NO: 711056 - DNA, 613 bp, Homo sapiens
gtctaagattgttgctccggttgtcctcttcttggtcacagctggctaccagcaccatattggagttccaacctgtaggaaagagaatatggagggcaagaaacttaatgctatggactgaatgtcttccacccaatgcccattcttatgttgaaatcttaatccctaaggtgatagtattaggaagcgtggcctttgagaggtgattaggtcacagggtagaaccgtcgtgcatgggattaatacccttataaaagaggccagagagaaaccctttgccccttccaccatgtgaggacaaatgagacacagaatctgctggtgccttgatcttggacttcccagcttctagaaccacacacacacacaaattctgttgttaaggctaccattcaacttaggaatcctattactgaggaaatatactccaaggaaaataaattgttctaccaaaagggcacacgtacttgtatgttcattgtagctactattcacacygtatctctgttgcaaaagccctatatagtcactggctggcttgacaccgcaagcagaaactctgtggtcacactgccttctcttctgtctgtgtaatgcccctccacttttatct

SEQ ID NO: 711057 - DNA, 854 bp, Homo sapiens
ttaattgacacaaagtatttcttagcccttagaatttttattttacagttctgaaagagctcttttagatttccttcaacagagatggttactgcataccactcttgtgcatagataatagggaaaatacaagtgaaatgaacaggtgaagatactccccaaacttcctctgatctagggcccactcttgggatcaccatggcccagtccttgagatccgagttttacccacagtgctgtcctttgtggmaagagtgttggtacggtggcattgcctcaaagaggctccactcttgtctctggggttctctatctggcagctgacatcccatctgcgagttctaatgtgtatgtccaggtgagaatgactacattcacaactcctgccagccccacaaacaccttaaaacacatctctatttcagagatgttaagatgtgaaaagggtatatcttagagtccttgaaataaattagcagtcacttaaattattcccattttagagatgaggcttaggaaactttaataacttgccctttaataagttcatcctcgctaacaattggcagaaccaggattgaacccaatccacctgagtccctctgacagtgtcctcggtgaggaggaggtctccaggccagggcccagtggtgagaacagaagaagcagaaccacaaactgtcttatgctggcctaacatagagaacctccatggtttatcacaaacagcaaaggcaaaagaatgcctattttcctagttacaagacagatttcaccacaatgcaatactacttactacttcaccacaatgcgattcatacccttaggatggctataattaaaaaaaaaaaaaa

SEQ ID NO: 711058 - DNA, 854 bp, Homo sapiens
ttaattgacacaaagtatttcttagcccttagaatttttattttacagttctgaaagagctcttttagatttccttcaacagagatggttactgcataccactcttgtgcatagataatagggaaaatacaagtgaaatgaacaggtgaagatactccccaaacttcctctgatctagggcccactcttgggatcaccatggcccagtccttgagatccgagttttacccacagtgctgtcctttgtggcaagagtgttggtacggtggcattgcctcraagaggctccactcttgtctctggggttctctatctggcagctgacatcccatctgcgagttctaatgtgtatgtccaggtgagaatgactacattcacaactcctgccagccccacaaacaccttaaaacacatctctatttcagagatgttaagatgtgaaaagggtatatcttagagtccttgaaataaattagcagtcacttaaattattcccattttagagatgaggcttaggaaactttaataacttgccctttaataagttcatcctcgctaacaattggcagaaccaggattgaacccaatccacctgagtccctctgacagtgtcctcggtgaggaggaggtctccaggccagggcccagtggtgagaacagaagaagcagaaccacaaactgtcttatgctggcctaacatagagaacctccatggtttatcacaaacagcaaaggcaaaagaatgcctattttcctagttacaagacagatttcaccacaatgcaatactacttactacttcaccacaatgcgattcatacccttaggatggctataattaaaaaaaaaaaaaa

SEQ ID NO: 711059 - DNA, 854 bp, Homo sapiens
ttaattgacacaaagtatttcttagcccttagaatttttattttacagttctgaaagagctcttttagatttccttcaacagagatggttactgcataccactcttgtgcatagataatagggaaaatacaagtgaaatgaacaggtgaagatactccccaaacttcctctgatctagggcccactcttgggatcaccatggcccagtccttgagatccgagttttacccacagtgctgtcctttgtggcaagagtgttggtacggtggcattgcctcaaagaggctccactcttgtctctggggttctctmtctggcagctgacatcccatctgcgagttctaatgtgtatgtccaggtgagaatgactacattcacaactcctgccagccccacaaacaccttaaaacacatctctatttcagagatgttaagatgtgaaaagggtatatcttagagtccttgaaataaattagcagtcacttaaattattcccattttagagatgaggcttaggaaactttaataacttgccctttaataagttcatcctcgctaacaattggcagaaccaggattgaacccaatccacctgagtccctctgacagtgtcctcggtgaggaggaggtctccaggccagggcccagtggtgagaacagaagaagcagaaccacaaactgtcttatgctggcctaacatagagaacctccatggtttatcacaaacagcaaaggcaaaagaatgcctattttcctagttacaagacagatttcaccacaatgcaatactacttactacttcaccacaatgcgattcatacccttaggatggctataattaaaaaaaaaaaaaa

SEQ ID NO: 711060 - DNA, 854 bp, Homo sapiens
ttaattgacacaaagtatttcttagcccttagaatttttattttacagttctgaaagagctcttttagatttccttcaacagagatggttactgcataccactcttgtgcatagataatagggaaaatacaagtgaaatgaacaggtgaagatactccccaaacttcctctgatctagggcccactcttgggatcaccatggcccagtccttgagatccgagttttacccacagtgctgtcctttgtggcaagagtgttggtacggtggcattgcctcaaagaggctccactcttgtctctggggttctctatctggcagctgacatcccatctgygagttctaatgtgtatgtccaggtgagaatgactacattcacaactcctgccagccccacaaacaccttaaaacacatctctatttcagagatgttaagatgtgaaaagggtatatcttagagtccttgaaataaattagcagtcacttaaattattcccattttagagatgaggcttaggaaactttaataacttgccctttaataagttcatcctcgctaacaattggcagaaccaggattgaacccaatccacctgagtccctctgacagtgtcctcggtgaggaggaggtctccaggccagggcccagtggtgagaacagaagaagcagaaccacaaactgtcttatgctggcctaacatagagaacctccatggtttatcacaaacagcaaaggcaaaagaatgcctattttcctagttacaagacagatttcaccacaatgcaatactacttactacttcaccacaatgcgattcatacccttaggatggctataattaaaaaaaaaaaaaa

SEQ ID NO: 711061 - DNA, 854 bp, Homo sapiens
ttaattgacacaaagtatttcttagcccttagaatttttattttacagttctgaaagagctcttttagatttccttcaacagagatggttactgcataccactcttgtgcatagataatagggaaaatacaagtgaaatgaacaggtgaagatactccccaaacttcctctgatctagggcccactcttgggatcaccatggcccagtccttgagatccgagttttacccacagtgctgtcctttgtggcaagagtgttggtacggtggcattgcctcaaagaggctccactcttgtctctggggttctctatctggcagctgacatcccatctgcgagttctaatgtgtatgtccaggtgagaatgactacattcacaactcctgccagccccacaaacaccttaaaacacatctctatytcagagatgttaagatgtgaaaagggtatatcttagagtccttgaaataaattagcagtcacttaaattattcccattttagagatgaggcttaggaaactttaataacttgccctttaataagttcatcctcgctaacaattggcagaaccaggattgaacccaatccacctgagtccctctgacagtgtcctcggtgaggaggaggtctccaggccagggcccagtggtgagaacagaagaagcagaaccacaaactgtcttatgctggcctaacatagagaacctccatggtttatcacaaacagcaaaggcaaaagaatgcctattttcctagttacaagacagatttcaccacaatgcaatactacttactacttcaccacaatgcgattcatacccttaggatggctataattaaaaaaaaaaaaaa

SEQ ID NO: 711062 - DNA, 881 bp, Homo sapiens
taactgtattccttttaagtcacccagcttcagatattctgttataagtaacagaaaaaagactaggacatatatactgaataatttaccacaccagatactgtgcctaagccaagggttctgggtgcaaccatcacaggtcagccaccagcttcactgagcaccgcccaaaaggtcagcaagactcacgagaaaggataatggcttcttgctcctctcaggcacaatactcgtctttcctggatactactgaagagcagtacctcacacaacaaaagctgactaggtagcctagatttaaggtttgtgaacactaagtgaaaataaaaagcaatagtcctactctcaaagtactctcacattatttctaaaaatcttggtgacattttgattaagttaaatttaattcttactgacctgatctcttatcctctgtttaatgatatcttccagttgaagggtggtttcctctgtaatcacaggtgctaaaggatatacaacgtttattcattaggtagatatccactagaccaytgattcagtgcagtccttggacccacagcatcagcaacacgtgggaacttgttagaaatgcaaattcctgggccacccccatacttcctgaatcagaaagtggggaagagggacagctatctgtgctttaacaagccttgtgatgctccctgaagtttgaaaaccacaaaactaggatacatatggtagtaagtgctaatactttacccaaggtacccagggactcttcccctcttttccattctctcttccattgaaataaaatgaaaactcattttgatgtaatgggtacaagaaagaagtcaatgagatgaccacagtttcaggttgaagttcaaaatttaatc

SEQ ID NO: 711063 - DNA, 931 bp, Homo sapiens
tggtcaggtcaggagaaatgacttcctccttcctccttacgtgccgtatatagatttattagcactgccttttaatatgttatgtgttcaacagagagggaactaagatcttgttaatcatcatttgaaaacaattttgtgaatggaaatgtagcagggcttttgccttttttccttgttcatgaaaaacaagtcgcgcttggggagcaagtattcccgttcaactgctgtcactcattcttagctctgtttagaagaaataagcacagatggttggtctactacttccccaacgaaaaatttgcctgttggctgggcgcggtggctcacgcctgtaatcccagcactttgggagaccaaggcaggcggatcacaaggtcagaagatcgagatcatcctggctaacacggtgaaacctcgtctccactaaaaatacagaaacttagctgggcgtggtggcagacgcctgtagtcccagctaytttggaggctgaggcaagagaatagcttgaacccgggaggcggagcttgcagtgagccgagatcgcgccactgcactccgggctgggcgacagagcaagactccatcttaaaaacaaaacaaaacaaaacaaaacaaaactgcctatcttttttatgttttattccatccttctcattgtaatgtgaacaatatttcaagtgaagaaacatctgtagggatctttgaaatgttttatccattgcttgtgcattaaagagaaaaagaagaaattaatgatttattaaaatttcatgaggggaactcaaaaactctttgttacaaaaaaatttaatttagaaacagtgtattttgcatgcaaaattaaagtcttcagggaagtaagtttttatgtcagacttggatccgaaagtactcatttaatgatgacagaaccacttcatccacgtc

SEQ ID NO: 711064 - DNA, 1232 bp, Homo sapiens
aaagctgctattacaacaaaaacaacttctttggctttctttctgatctttttccctgaatcgtttctgacctcttcccctactcttcttctctttctttttaacccacycagactggcccctattttgttcctctaacagggcaagtgcttcctgccatgggcctttgtattttctcttctctctttttgtagaactttcttcccccaggtatctgcgtggctggttcacttgcttcctttagctctctatttaaacatcctattctcaggagactttctctgattacccgaaaatagtactccctacttcatggcctgctggcgttctctgtttctttcatcctgttttatttttctctgtatcatcaacatgtgatacactgttttcttgtttgttttttatctgtcttccaacattaaaatgtaaactccatgaggcagtaactaggctttgtttgtgactgtatctgcagtaatacataccacacctcttttcactagaccattagcttgaggaagacatggatttccttggcactggtgttgaattgggactaactgtatttgcaggaggaatattcagtgtgtctattagatgctacattagaaatcatcagcttggaagcagtctccatgggaaaagtaattttgattcaaagggtagaatggaactactcaggttacatggtcttttattgtcatataaatctttgtacagagttcctactttttaaaccattagcattatgctaatatacaaagtttgctacttttcatatttgtcttacagattcaaagcctttagttcttttcagtcttaatttaccacctgtctgctctctccttttctcccttggaatgttcttaagatttaattttgaaggaactttctgtcagatgattattggtaaagtaaaatgtatttctgggaagcagctgattacttgggcctttgatttatttatttatttttttttttgaggagttcatattgcgatatacctatttggtggttatttagaaaggccaaggtagggagaaaaaggaaagaataaaatatatgtatgctttaaaaaaaagcaagcatttagtttggggagccctccaaatgtgatttcttctactcctgttttcctgcttccaagcataggtggaagatattgtcagtttctctgaactcctaagttgaaatgtgcaagtcactaggtggcactgaagtatcattctcca

SEQ ID NO: 711065 - DNA, 2181 bp, Homo sapiens
tattctgagtacagtataacaatgagccagctagcatggccagatgagaaagaggcatattctgcagacatacaggtgtgacaagactaaaaaggacacatgatacacacacacgcatgtgcatgtacacacgcaagcacacatgcaaacatgttcatgtatatgygtgtgtatctccagagcctaaacaactcgggtcatattattacatacagggctgctttttccaagagcagactgtaccttcacagctataactgtacactgccaccgctgacctgtccaccagattttcatcatgatgccagctcactgccattttccccatgccaaaataaggttcctctttcaggtatggcattttctgaggatccatgaaattcagcaaagttacgttgtatgctgctctgctcttaatgtccacttcatcttgtccgttgtaggatgaacccatcccaaccctggggaaatctgcagacatacacaatggcacagcatcctcattagccttctctttggcagcaagttcttccaaagcctggatggtttctatctgcaggtagtcattgagcttgaggaaggtctcacaagcagcggctatttcagcctcggtgtgttttatattagaccctttcactggccaggggaccgtaaagagcctggtgttcaggtacttgtaggtgcagcctggattaccaatgaggatgcgagataccggagtgagcagatctttgccttggatcctaaccaggtcccgaaataagcagccatgcttgtgcagtgtgagaaaggcttcttgaacctctttatggagctcctcagatacactgctggcttctcggagaattagtttaggatatttcagctgccactaaaacaaaaccaaagcaaaaacagacgttgatatatagctacaattgtattatttccaaaggtgtgtttctttgtaagcatttggggagttgtggggggactacctggtggctatttctaaataggagtcacatcttcctagcccaaaacagaaaaccaaataaaacaaatgtcatcaaactctaaagtcaagattttcaagttcaagctcaaattactaacaatctttaataaaaaacaaaaaataataatgtgtgtcctgatacaccaggattattctgtgaccactttttctcaccctaaatctcaacaccattttattaactgcttattatctaaaatatttattaagtgcttactacgtaccaggtactgttgtaagttacttgtgtgcattagctcattttaactctaggcatagtattattatctccagtttatagatgagaccactgaaacacagagacattaatctgaccaaagacattaatttgcccaaagtcacacagctggcaaatactggagctggaatttaaagcccctggacaccaacccctggcttccagggcacgagttcttaaccatgagaatgcattgtctcaataaatgacaaactggtttctgcttaacactttcacaaaaagagaactcacttctcttcaggagttagacattaagttccatgaacacaaaagccatggcaattttgctcatgactataatatgagtgcccagaatttactcagtaaatggtaaaggaatgaataaatggatttgtgcatggatgaatgaggtattattacattgtaattctacaaaattctaataattctactggtgtcactggaggagagtaatattggtcaattcccttccctaatacagaaatacatggaatgattaatgtaggttagggctgcattagcttttcggctaccactttccttaggacttggcatgtgaatcggtgtcagactggagtttcctgattctgtaaaatgcaactgatttatttgtaaccaaatcacaggattttacatttacctctgtaacgtttgatctgatttgttcctccctagttttaggctgtcttaaagaaagagtcagacatgatcaacacattaacctgtcctccctgtattgtgttgcccaccattgttaagataccttccttctctgtcttcatttagtaattaccattcacatgataggcagggcaagaccagtattcttccaaacgttttttttttcatgcagcatctgtttattgagcacctaccaccagatggaaacaaggtccctgttctc

SEQ ID NO: 711066 - DNA, 673 bp, Homo sapiens
ccatggtctgtaattaaaagcagggatggtgtagacctgtgaagcgtggtccagcaactctggcgtcaactgatagctcattagaaatgcaaaatgtggagccccagcccaggtttactgaattagaatatgcagtctcacaaaatctccagatgattttaatatacgataaagttagagcagcactgacgtagatatttaaaatccacagataactctgcatttcactctaatcaatggcatggtgtacaaagcactggtgctaaagaagttatacaaccttaggaaaatcacttaatgtccctggatctcartttctttattaaatgagaagttcagagtagatgctttctaaagtatcacatagctctgatattcttgatctcatctaacaacaaaattttaacccttcctaaacccaacagaacaaacaggtagcatcatcaactaattaatatctcacttcctttctctgttcatttatttaacattttctgataatctattatgtgctagtcactacgctaagtacaaatgattctaagatgaataaaacatctctccctgcccttgaggagtgcacaaacttcttagggaaacagggcatataaacaaagtcaggataaactaagaagcatgagcacatgctggtgaagaccagaaaggaaggcaa

SEQ ID NO: 711067 - DNA, 622 bp, Homo sapiens
aaagcatttagcttgctaggatgtgctcaataaattcttgctattattgtttcttatatttgactccttgcctatctaaaaattactggcctagggttctcatttgccagatcacaatgaacaatgaagaaataaacaaaaggagtgctgagatgcctcagattcctgcacgacagtaaatgccctttgctctctgagcctactctcatgcctctgactcatgctttgggcacaattccttaaaaagrgtttccacttcaagcttatggagaaaaataagttttaggtaaaatattactttggtaaagcagttcaaccaagggccagaattttaatacctccagaatccctatcagaaataaattcaacatggaatgacaggcctagccacctacaacatagaaaaaagctaagtttgaccagggaagagaaaaatgaaggacaaaatctccaatccagaagtggtgcttctagagataaaaatttcttacacctcccactcccttgtgaacattccaagaagagcaaggccaagagagagtagtgatatggcctgccagataaaatacaggacacccaattgaatttgaacttcaatgataaatatcaaatatttttagta

SEQ ID NO: 711068 - DNA, 906 bp, Homo sapiens
ggtctcacaaaccaaatgataaatctacaggaattttgcaagtcagtttgtcagaggtatgtgacccagagcatctctgtcttgaataggggctgggtaaaatgaggctgagacctactgggctgcattctcagatggttaaggcattctaagtcacaggatgagacaggaggtcagcacaaaacacaggtcatagagaccttgctgataaaacaggttgcagtaaagtagccggataaaacccatcaaaaccaagatggcaatgagagtgacctctggtggtcctcactgctacactcccaccagcaccatgacagtttacaaatgccaccgcaacatcaggaagttaccctgtataatctaaaaggggaggcatgaataatctacccttgtttagcgcataagaaataaccataaaaatgggcacctgctcaggttccagacctttggtggatcgccatctggctagggatttttcctgtacctgtccttcttcccttatttcttttactcagaattatttttgtagaggaaaccttttgtcccacatgagggcatgcatggacctaaagggttctatgtggagcacagtggcaccctctacacatagcaaagtattggacggaattattaagccaacctgtaaagcacaaaataagtaggcaatagtagggttctctcattagattgcacaattataaaatttccaattgtttcctcaaatatccaggaatttcatgacaagctacaaagcaaacctaaggagaaccttactgccactmcataacaaaatctagctcagagaaataaaagagctcacagacggatttaacactctaaccctgtcaccctaaaacatttggtttttttcctcccagaaaacctctagggctgcagttcagtctc

SEQ ID NO: 711069 - DNA, 1370 bp, Homo sapiens
taactacagtctgacttgcctgtggaggagtcatgaaggcacagttgctgtctcatacatatataactccttgtatctccacagactaatgacaaatgcaatgcaagtgttagaaacctaataaacatttgtacttgctctagtgtcttgatgataattatgtcaccaggaaatctcaagtcaaccaccacatacttccacaaaaccagctttatttcatttaagaattttggacattcttaaagccaggactgtacaccagtacatctgtatcatttattttgcctttgttcattctgattatctggtgcctgggttatctagttattagatatttttgatatctctactgcatatggtatgttttctaatgcaaaatctttatgaattactttacatacttagatttagttcctcttagaaaaagaattcagaactgtaacttttattacctggcttggggaaaaaaatacatgatttttgatgaattgtgtgctattttgtgagaatttctccactgacacgtcttttgaacagaagggatttgctccccaagttcttactcatgagctttcaatagacttcagatgtggggaagcatggccctcctcaaataagatttgcaactgcatttgattcactttcctcccttttatgaaattgagatggacggctgagccaactgaaaaaaaaagtatatgtgaattacattttattctaataatattagattgtcctacaaaagtatgcttgcatgctatagggcaaaatcacatatcttatgtgtatatatatatgtatgtattttttttaagcatggtaaaaattaaaatacagtagagagtaatattgactctgagcaacacaaatgtggtctgtttcaaagtgaggtagctatctggaagagattttcaactttagaatatgttgatgctaatggttaaacctgcccaccttgtctttgatgttctgtctgagctcatrtgaagtaataggattaaaaataaagtgtacacctttcttttgatctaagtagccaaaaaggagggaaaaataataacctgtctcctgctccaatttagcaaataccactgctctaacaaaaccgatatgatactgtggctgggttcacagatgtaacacatagggtacactaaggttttcacagccattttccttttttctgaagcagcataattccagatattgctgcataaatgtggctttttaccatctacaaaaatcaaggcaagttcagttaattttaagcaacctctctcaaatgacttgcttttctgttcactaataacttaatagattatttaggactgttggtcagttagccaaaagtgacagtgaaaagatgttgg

SEQ ID NO: 711070 - DNA, 586 bp, Homo sapiens
aagcaacttggatgatctgatagaaaaaagaatgaaatgtgtggatgtttgtttgtttttaaacagacgcaattttgtcttttacaaaagacgagggaacaacaaacatcaaagatctgttgttttaagaagctgtcagtgtcctcaactgaacgctgaatctcaggcctccttccttttgtgttggtaatatactgcagatgatcatttcagaagaaaagcacacttagaacactacataaacttagaatgctaagaggaaaatttaggacaagaaacatgaataagagtttaaaaccacatctgtatatatcgtggtccaagcactacacattatttcttgaaaatgcaatactgacctagcataacatagaatggtatcagcaattatccacgcaatgaagaagtaaatgtaataacaaatacactgattacagtgttttatacttctatacagtattcatytttaaagcacttttcacaacttagctcacaagacccaagattcaacttgagttatgccagtggaactcttggaactggaaagacaccttctccataattttcaaataaaagaagaaagtga

SEQ ID NO: 711071 - DNA, 653 bp, Homo sapiens
tcagctggcacttaaaagggaggaaggtagaacataaataaaaaaaggaaaagggaagatactgtccacaagagggatctccagaagaacaaaaacaaaaaaatgaggcatattctctctcaatgagaatggtggttatgataatgacatgcaatatcctaaaaaataaaagcaatcattttcttaggcttttccttgaacaaacgtgaatatatgccattgaaagaaaaatgggagtaactggcattcatgaagatatattttctactacactggcagaataaacataaacatcaatacatgaactatgtaacatggcttgcttagaaacctcaacacacaagtggcaggcacagagaaaatctagatctgaaaaggaccactacatctacctgcctactacaaaacagctaatattaggtccaaaaaaataacaccgcaaaacagcaaccaacttgccagagaaatggagctgctaggtgaaaatcagtcaggcctagcaccaacagtcctctgggaaaagtattaaaatgatttaagacctaaaagatgtaaatccrtttgagaacaccaagattagcatctggatttcacctcactactaccagagatgagaaaagtggcatctcctaaacttcaaataaacgttaaga

SEQ ID NO: 711072 - DNA, 638 bp, Homo sapiens
aatacaattaaatcgctgtgtgctataacaagtttgccattgttttcttgctgttggtaagattctgaggaaactaactgttaaagaaaattttaagaattatcttaatggaatggaattatattcaaggccctttaaaaatgtagattatatattttaatatctttatacattgtattttaggggcatattttattaactagaaatgggaattgaattggttttatttcgctatggtctgctaaagtatatgtcgtttcatggtggaattggaattaaatggaaaatcttgaaccttggggagtatacactwtgatggagtcttcttggccgattgccaggcttttgtgtgaagttgtacagagctgcaagtgtgtggacacccagagctgctgaattcaggaagggagctgcagctggtcacattgtcggctcacttgtgggttttagaataaaatgctagggaatcaccccgtagcattacactgatggcctaaaagaaatctgtgatagttgtaaattgacgaagatgcagtttaaattaacattcctcccacacctcactgtgatgaagaaacagatttcctatttctgtgtggagtgtgtgcatgtgttgtttcctcgtgcccgttagtaat

SEQ ID NO: 711073 - DNA, 638 bp, Homo sapiens
aatacaattaaatcgctgtgtgctataacaagtttgccattgttttcttgctgttggtaagattctgaggaaactaactgttaaagaaaattttaagaattatcttaatggaatggaattatattcaaggccctttaaaaatgtagattatatattttaatatctttatacattgtattttaggggcatattttattaactagaaatgggaattgaattggttttatttcgctatggtctgctaaagtatatgtcgtttcatggtggaattggaattaaatggaaaatcttgaaccttggggagtatacactatgatggagtcttcttggccgattgccaggcttttgtgtgaagttgtacagagctgcaagtgtgtggacacccagagctgctgaattcaggaagggagctgcagctggtcacattrtcggctcacttgtgggttttagaataaaatgctagggaatcaccccgtagcattacactgatggcctaaaagaaatctgtgatagttgtaaattgacgaagatgcagtttaaattaacattcctcccacacctcactgtgatgaagaaacagatttcctatttctgtgtggagtgtgtgcatgtgttgtttcctcgtgcccgttagtaat

SEQ ID NO: 711074 - DNA, 2109 bp, Homo sapiens
aaagactgaattttgttaactgtctttcagaaatggggaaggttacatcagatctataatactgtgtcccctgatcatcttgaaggactaaagagccacgtaacatttttcctgcagacaacttaaatcatgatataggtgaactacttcatttccctcccaagatggacacccttgtagagcagtgcccctccaccttgatgtaaacaggagcccagagaggaagcatgcattaaccaggcagaacaatataaatcaggttactgttcattaagagagaaagcagtgcgaaaaggaatgattctgatttgacacaaacccacttcttaaggagataagcasattaacttgaaaatgaaaggtaaattaagatttcgatgaaaataaaaatcttcccaagatttcacacaagagctagtgtttagtttactgtttgttaggtaatatttcatttgctcccatcccaatttccctcccttaaccaatacaaatggaattgtatgtggtgtacattattgtgattgagaagaaacaaagattaaaattaggaactttggtttttttatggaggtagacctttgtatttaatagatttaaaatactgaaccaataatttttgacatctgacatagtcttgtcaacttcgatatccttatcaataatagctgaatttttgagaatgaagaattatgaaaggaatattaaaagtatattccttcagggcaggtaatgttttaaagcatcctttcaaatgaagaaatattgtgaaatatgaatcagttgtctagaaaagaggcttgaatttcagattttaaacacttgtaataaatggcaattttaattaaaatgaacataaagctttatttgtgagtttaaatagataatgaatcatttcctacagcagttgtgattaaaaattttaaaaaaggaaaatattttgttgatgttcttataaacgatttggacgcaaattttcaatgtaaaaaattagacaacagggagagttttgtttatttaaaaacaatattttgaagtttaagaagaaactttctaatagagataatcttaaaacataaaaggctcttccttaagataagctggtacttgtctgcttttaacaaaggatatgggtttgctctgcaggtattcttctaattttccataattggcttatttgatggcaatacatcagagtttagtaagagaatttaaaaatgctcttgcttcctaagcaaattcttttagattttaacctttctcagtttgaaataggtgaagtcactagaatatcagcttgctttttcttttcagtattactgtcatttataataaaaccagatgtcaaatttgcccgtaaatatcaaaatgtcttagaagtgaatgaaaaggagctggtgaaacttaatgaaggatctgtcatgtgtcaggggtgtttgttgcataagaggttttatttatttatttatttttggtattagtgttatgcatggcttactgtataaagatagctttgttgccagtaaattaaaggacttgtttctttactgttgcataaaaaatgttttatttgtatgattattcctccttgtttcagatgagtgaagaatggtttgctttgggaatattttcttagttcttcaaggacatgatgtggaagtcatgacttgagtaacttcaatagcactaacaacaggaattgaaaaaaacttagaattttaaagctgagaaagaggtagagatttttctctgtcttgggtatgacatatatgttattcagtatggtagcaattgagcaattgaatgtggctagtgtgaagaattaagtgttttttattttaattaatatttaaatagcaccatgtgactgctagctactattggacagtgcagcctcaaactattaaaatttaacattaagtatattaatgttataaactttcaaaaccttaagatagaaatctaacagaaactccaaaaacaaaataagccaattttactaaataaaatactgtagttggaaataactataacttaaagcaaatctaacccagtaagctatcaaaaagaaaaattatataattaccaagtagagttaatttcacctgagtt

SEQ ID NO: 711075 - DNA, 1193 bp, Homo sapiens
gttttttttctgtaaagaagtttttcttccttcatttatattaatataggctcatggtttcatattttagccagtggattataatccattactattacatttattttgatgcttaaaawgcccctgattaggccagtggggtctccttcaagctgtctccttatccttttgacatggacccatcattctatgaacacaccctgaccttctggccaataatagaagaatcgcttgaacctgggagatggaagttgcagtgagccgagatcgcaccattgcactctagcctgggtgacacatcaagactccatctcaaaaaaaaaaaaaaaaatagttgagagggaagaagagaagatgacagctgcccgccgcccactctggagtccctgagccaaccaggcaggatggagctggccctggctcacccagctccattccagggcttctccacgctgccctctactcaaagacccctgccttctggctgcccccgaccccaagggtgacaggatgttataaggcccctctttccggctctgttgcagctgaggtttcaaagcctcagaatgatgcaatggaggggttgggatcggcccccgcctcagttctgaggtgcttctagccatatgaggggaggaggacttccccttatgaagctgaatgggtgtcccctggggcggtgggacagatgccgggtttatttttatgtgttttagaagtatttattctctgccaagtcctttacaaagaggtaagtgaccaatagttggtaggtggcagggctggggttcaaacccaggcaggcctgagggccaaaccatgcctacaactccttcgccgcatggcctcaacccgaaggattcctgcccaaggtggctcgggccagagctgggagcctgggctgcctactgtacagtgagctcaaggagtgcagtgaggtaagcagcaaagctttgttggagggtaaatctgccctgattccgggagaccagagaggaccccacaaatgggacttgactgagaggacccttgaagaatgcagcaccccaaatgaggcagacgctggggcctggaacgaggggccatcggaaactggaggcttgggccaggcgcggtggctcatgcctgtaatcccagcactttgggaggtcaaggcaggcagatcacttgaggccaggagttcgagaccagcc

SEQ ID NO: 711076 - DNA, 651 bp, Homo sapiens
gatcacccaggcaacatgaatttgagctccaagttcatgtgaggatcaaatggtagttccaacttctcaggaactaaggacagttcaccacccaacccccaacacttagctgggtcctaaagtggacctgggcataagtggatagggcagatttacccttaccccaagcctttgggggttccaaatatggggaaggataacttaataaatttaccactttgggtgagcctaggtttgactttaaaacctcttctctcaagagacagccaaaagtcaagattgtgggatcaaagcaaaagtggcttcagtgtctcacttatttctctggrttcctcatttcacttaggctttggcctggtaactctttaatatcttgtcagcctttttatgctcttaagaagtctttatattattccagcatttttagtcattttcagtgagaacactggttaaataagctagcttgccatattctcagaaacagactcctacgtctttctaaaggcagccacttaagaagaagctttgggagctgggtgtgatggctcatgcctgtaatagcaaccatttgggaggctgaagcgggaggatcgcttgagcccaggactctgaggccagcctgggtaacatagtgagactctgtctcaaaaa

SEQ ID NO: 711077 - DNA, 643 bp, Homo sapiens
cttccctagcaccccctagtgtctgagaatcctgaccttctctgaggttctctgggcaagccagccttcttttgattttatccctttctgccatcagtactctaaactggtttcttcctgctctgtaagttaccactcatatttgttctttgtctttcagaatgtacaaacaagattttcatyttctgattacctcctctctctgtttattatgggtttgtgtatttttgagttccttgcaatgggtttgtaaaaggtcaacttggctgagctaaactccatttcccaaaattccctttctctctcttttttttttgagacaaagtctcactttgtcacccaggctggagtgcagtggcaccacctcaggctcactgcattctccacctcttgggttcaagtgattctcctacctctgccttccgagtagctgggattataggcacacgccaccatgcccagcttaagttttctattagtagagacagggtttcaccatgttggccaggctggtctctaactcctgacctcaagtgatccactcgcctccgcgtcccaaagtgctgggattacaggcgtgagccaccgtgcctggcagtctttcccatatgtttctgattaggttgggtcacagggagatttt

SEQ ID NO: 711078 - DNA, 665 bp, Homo sapiens
cagcctacccaacatatgcataattgtctcttctttgctacaagatctccaaatttgagtttctgtcaacagaggcagaagaacttattgaatggggaggcagagggttgccactggctgctagatttgttcttctgcattttatcctaagtgacggggaaaaattaaatgactgtgtaggcaatggattttgctcaggctgattagaggcttacatagtgtgagtttaaagtttctgtgtacctaatgtaaaatgctttcgatcacacctctgtagagatgtttgcctttccctgtcattcaagaatatgcgacctatagagttacgttgacttttcagtgtttrctgaagtacagagattagcaatgccttggaatagtgttgctttttaaatccagaatattactcggtttatttaatacttgagcccttgctaaagttgctcctcatattcttttgaaaatgtacaaaatgagaactctgattcctaccccctagagtatacagaatctccagggagtggtcccatcgaacccgtgtgtgatatagaggactcttgataaaaactgtgtttatataaagatggtgtcaacctctacattccaagatttcaaatgtggattaaaaaataagttttaaagttaatggcatttgagtctcagta

SEQ ID NO: 711079 - DNA, 1175 bp, Homo sapiens
cagactgaactaacaaatttcaggaaatggtatttaaaaccgtgggactgaatgatcttgcccaaggaaaaagtataaatggaaaaggtaataggacgccagacctccaaaatttagttcagatagaggtgtttcaagaaggaaagagtatagtcagtttttaaatgatgcagaaaagacaagtaagtttggaacagataaatggctgctagatgttggcaacatggaggtcactgatgattgtagtttgtcatcagtctacagtgatgaggcagcagaaaccagtttggagcagattaaagaatgaataagaaatgatgaagtacagtacagcatatataggcaactttttgaagttttgctgtgaaagggaatagagaaatgaagctaggatattagataggtctttacataaatgttgaattcgatagtgatagatgtgtatatcctttaaaacaaaataaagcaaagggatcgtattatatatactgttgtgtagaagtctttttcagctaatccatcttgatctttctatataagcatatacagaactaccattctttttaaagggctacttggtgtcccattgtttggttgtacaatcagttatttaactagtccctttgtgttagtccgtttgcgttgctataaaggaatacgtgagattgggtaattcatgaagataaaaggtttattttggctcactgtcctgcaggctgtacaagaagcatggtgctagcatcagctcctggtgaggcctcagaaagtcttcaattatggtggaagacaaggggggagccagcatgtgacgtggcgagagaggaaccaaggggagggggtcccaactccttttaacaaccagatctcacatgaactcagagtgtgaactcgctcattaccgtcaggagggcaccaagacattcacgaggatcctcctccatgacccaaacaccttcagtatcggggattacaattcaacatgagatttgaaggggacaaacatccaaaccataatgtctttactgatggatgcttacagtgtttccatttattgccagtacagatgtgaaggttgtggtgtgtatgtctctctytacacgcttacatgcaaataattgcctgtttttctacagcagtgctgtaatcaaactctttaacttttgacaatctgatag

SEQ ID NO: 711080 - DNA, 2036 bp, Homo sapiens
catgctctaaaggatgatgacaagtctgaaagacagttatggcaaagaagatatttgtaagaaaggaaacatcaggttttattacatataaatattttgagcagcacctttttactagtattttggaaaagcatttctgtcttcattgagcsaagtggcaatacatatgtaatatactgatgctgaatttgcggtgggttgatttttgtccattgttggctttcacatggaagcatgaatattgtctccccgctaccccttttgagtgacatccttccagtacctccatttctcaagttgcaggtaagcaccttgtgtatatacagttaaatagtgggcacacatctatcccaggaaaagaagacagtgagaattccctttggttaagtggagcagttgaatggccactatacctggatgcaaatttgatccgaattttctgctctaaaccctccactgctttctgctgtttccactgaggaaagaggatgtgtgtcattaaagctttgttgggacctgtcacagtcaaggtgggtataattatgtttaatttattgaagtgtttctgggcatcgtctttttcaaattcatatattctatccagaagatgtgaattcattttcattattaaaaaaataaaatattacagataaagctcaacactcccccctcccccttaagcacaaataccttgaatcttagaggtaattactattattttggagtgtggcttttccaaacctttttgtgtgtatttgtatacatatgtacttgcctataaaaatacagttttactgttttttacatgactgatattctttacatactgttctgcagacctactatgtcttggatacacacatgcatgtatatatgtatatataggtaaatatatatataggtagatataaatacatgcattcatgtttgtgtatattccatgatatgtgtataatggcttactttttcctttttttgtgagtttttcactgtcataccagtgttgcattgaacatccttgtaaatgccttttgcaggcttattttcaaaaatcttccctggggaagatacagaagaattgaattactgggctacagggaaaccatttctctttttattttctcctaataattatctacatgtgtgttttagaaacagtcttaatttaatattgggggtttcaaaattttttttctcattttaaaattccagttttatatgctgtactcatttgaattctgccttttgaatctagatttggaattgatatggataagcaaaataggttctaagtggtagtgatagttcataaccagtttgcttttggaataggtgctgtttcaatcttggggaaggtaaaatgtcaattgaggaaataatctttaatcatgaagttcttttttccaagtcattctctgctccctttggaattatgacaacttggatccagaggtgctgtgaaaatattttcttacatcatacctcttcttttcatacaagtttgaatgatcccggaaaatacagtttttgtattttcaaaaaaaaaaatgaagtctggaacacccacttttcttaataggatctagtttatttgtttaggtagtaaagcttttattaaaagaacatactttgaggattttctgtttctcacctgagccttctgtattcactagatatgaaactgagtgcattggcagggcctctactagacctgaaaggcagcattcccagtgtttattttcaggggccagagggaaggctattgactgacattggaggccttaacccctggattggtaaggttctggtggaatgattgcttagattccataaacactcgaatagatgattactcctttctgtatgtatgcatttttggaagaatgataaaatatgaaaagtgtgaagagttgtgcactcaagtggtggttttgacctggggagcttttaaaactcccaaagctcaggctacacctcatagcaattaaatcagaatctaggagtgggacccaggccttggtaattttttaaaaggc

SEQ ID NO: 711081 - DNA, 2036 bp, Homo sapiens
catgctctaaaggatgatgacaagtctgaaagacagttatggcaaagaagatatttgtaagaaaggaaacatcaggttttattacatataaatattttgagcagcacctttttactagtattttggaaaagcatttctgtcttcattgagcgaagtggcaatacatatgtaatatactgatgctgaatttgcggtgggttgatttttgtccattgttggctttcacatggaagcatgaatattgtctccccgctaccccttttgagtgacatccttccagtacctccatttctcaagttgcaggtaagcaccttgtgtatatacagttaaatagtgggcacacatctatcccaggaaaagaagacagtgagaattccctttggttaagtggagcagttgaatggccactatacctggatgcaaatttgatccgaattttctgctctaaaccctccactgctttctgctgtttccactgaggaaagaggatgtgtgtcattaaagctttgttgggacctgtcacagtcaaggtgggtataattatgtttaatttattgaagtgtttctgggcatcgtctttttcaaattcatatattctatccagaagatgtgaattcattttcattattaaaaaaataaaatattacagataaagctcaacactccccyctcccccttaagcacaaataccttgaatcttagaggtaattactattattttggagtgtggcttttccaaacctttttgtgtgtatttgtatacatatgtacttgcctataaaaatacagttttactgttttttacatgactgatattctttacatactgttctgcagacctactatgtcttggatacacacatgcatgtatatatgtatatataggtaaatatatatataggtagatataaatacatgcattcatgtttgtgtatattccatgatatgtgtataatggcttactttttcctttttttgtgagtttttcactgtcataccagtgttgcattgaacatccttgtaaatgccttttgcaggcttattttcaaaaatcttccctggggaagatacagaagaattgaattactgggctacagggaaaccatttctctttttattttctcctaataattatctacatgtgtgttttagaaacagtcttaatttaatattgggggtttcaaaattttttttctcattttaaaattccagttttatatgctgtactcatttgaattctgccttttgaatctagatttggaattgatatggataagcaaaataggttctaagtggtagtgatagttcataaccagtttgcttttggaataggtgctgtttcaatcttggggaaggtaaaatgtcaattgaggaaataatctttaatcatgaagttcttttttccaagtcattctctgctccctttggaattatgacaacttggatccagaggtgctgtgaaaatattttcttacatcatacctcttcttttcatacaagtttgaatgatcccggaaaatacagtttttgtattttcaaaaaaaaaaatgaagtctggaacacccacttttcttaataggatctagtttatttgtttaggtagtaaagcttttattaaaagaacatactttgaggattttctgtttctcacctgagccttctgtattcactagatatgaaactgagtgcattggcagggcctctactagacctgaaaggcagcattcccagtgtttattttcaggggccagagggaaggctattgactgacattggaggccttaacccctggattggtaaggttctggtggaatgattgcttagattccataaacactcgaatagatgattactcctttctgtatgtatgcatttttggaagaatgataaaatatgaaaagtgtgaagagttgtgcactcaagtggtggttttgacctggggagcttttaaaactcccaaagctcaggctacacctcatagcaattaaatcagaatctaggagtgggacccaggccttggtaattttttaaaaggc

SEQ ID NO: 711082 - DNA, 613 bp, Homo sapiens
agttgaagacttagaactcttcatgccggaagaggctgcaggcagaggccgcacccggtctgggccgtggccccctgctctgatggctgggttccagggcttggctgcactccgcatgcttgacttcgtgggtctgtcctgcaaaagagcagaaaagaaaaacatgtctccatcacttgaacctgctgcatgacatcatcacactttacaccccacataccacgtcaccatgaactatcacagagtaggagcacctatgatttggctggaaatagaatattcctaagatgggtttataggctttatactaggctaatttttacaactccataacagcttttaccaaactactgaaacatatccacattactgatgtcctgacatcacttttcagcagaatgacctgagacagcattccaccaaatacccatayactatgtatctgtatctcacacccagataaaacaggtcagccagagtcaaccaataaaatgcccataagctttgtggctttagggttgacaaaggaacaatatacttatttttaaaataaacataaatgaattacttgaaagaattcacagaagcacaaaatgacttttttcttcttttg

SEQ ID NO: 711083 - DNA, 1267 bp, Homo sapiens
attttcctaaactcatcatagagtctctatgatggctctagcgtgatgtacaaatttctgtttctccaacttcctcctcaccatcctccgcccacacttgctccagtgacatggcctgaaccattttgcaggagacaaaagctaaattgtgcgacaccatacacacttctcaaaattcctcccatactttgaaccaagtgggagagttaataaatatctacaatttaaaaatagcattacatataaaagccctgtgctatacaatctgttcctgcaccttcgccaacgctcccaaagctgtgtcatggaggacagcagagcccagaggctgcagaccacaccagacaggctgctcctttacataataaaagtatgccacaatagcctgcctctggaaaatatttaatactttatcatgaatattctgcattaagtttgctttgcgttgtaaaatatattacattacaatatttatcttcatcattgagtttttttttagcattcgtttgaatgttgctcctgaggcaagtgtcttcatctcctcattcatgtcacatccttggtcttggtattccatgcatattccatattcatgttctatattccatattcaatcccacttcaagaacattgcacttcttttcaaactcatacccagaacttctcataaaagactcctcttcattcagggatcagcaaagatgtgctaggcatctgtcccatttgattcccttctgtagctacactgtgtatttatcaactatgtgtttattatcatcctgtacatcattatctccactagaaagccaatttccatcagttctgtactctggtcattcatcatttttcccggcacagaatgggcattcaatgactatgttttgaatgaatgattgtatgagatttttttggcacggggcatgtccttttattttaaaaaataagggtaaatttagttattattttcctggggtaacaaaggtcattctaggtatttaatcaaagagagaaaaaatggaagtgacatttgtcttgatcactcaccagctctgttggttgttttgataaaagagcggaggaaaaaaatttcatgtgggaaatggcctaagcaaacaaagcacccactggacactgtaaactgtwgagggacccactgtgacttaggtagaggttttgttttgtagtcatgatagttgaggcagagaagtaggtacagtcctctgtgaaatatgttatctgtcatgatcagcattttattatataggca

SEQ ID NO: 711084 - DNA, 1370 bp, Homo sapiens
tgacaaaactcatatgtatctaacacagaaaagctagtcttttaaaaaatatttggaacaaccaagtattaattaaaaaaatactcaatctttacctctcatcacatataaaattgacttgaaggtgwtctaaaccttaaacttaaatctataaataaaaaaagtctacaaaaatgtgggataaaaatttttgtctttggtatagccaaatatttctttgctagaatataaaatgcattggtaacttaaaaattatgaattgtactttatagaactaaagcaaaaatactcccaaaatgcccattgtcatacactgataatattacactgatgattttgaaaacatagacaaaatggatgacattttctgggaaaactaattaataaaaataatacaccaaaagcagaaacctgtataaactatgaaacaaattgggctaattaatggcaaaaattttaaactaaggcaattcccatattattctgagaaaactttaaagagactataaagttctcaggttataagcaaaatgttctgtattattgaaaaagtgagaaaacctcctgatttattaaggaataccagaataaccttgacaccaaaaactgacaggatgaacaatgaaactctagatatatcttactgctgaatatagtcgccaacattttaatttaattctaacaaatcaaattgagcagtatattaaaattatggcaaagtgcaatttattctaagaataaaagtctgattccatgttaattttttctttttgtaatttacagctgcacctttcagcactttctaaagtttttggcctcctaagataggatttgtattagtgagaggtatacatcaactgaatttccttattttaaacattcataaagtagaagagggctaagaataaaagcaaagtagataagccttttcatttctttctgctcttccttcatctcttttgcatgtgcagctacacctcacatgaatgcctatccattcctaggcaaagattaccttacaacttctcctgtgcagttcaccatttccagagtccctccaattaaagaaatgctagtctagctgcagttcccctgggtaaactaaaaaatatcctatatgattacattgttccctatctgttctgtacaaatgataatggtttcactgtttaatacactcatttttttatgttcccaggagaatgcaggtcagggattatgggcattaatattatttcagttatttcctagtcgatatatcctaggtgcatcatgttctctaataatcttctttaaaaatacaatcttattttagtgcagaaaccatttttaatagtttgcttattgtattgttaaactatatcttttca

SEQ ID NO: 711085 - DNA, 1442 bp, Homo sapiens
ttccaaattttccttgcaaccaagattaaaaaataaaacatgcctttcaaagaacagcagtctatttctaagtatatgacccctactcagtcaatttaataaacatttatttagtaccaactaaatgcaagtcactgcatacagcattaggaaagatataaaatgagaaaggcacggtccttgcccttcaggagctcaaaatccaaaaacatacattaacaattctgaatggaggcagatggtgataagtgctgtaatggaggcacttacaacgtgctaaggaagcataaagcagggagagattgattccaaccatggcgtaataaaacaccttagtaaatgtatatttcattctgcacccaagaaaatcttttatgacccaagccaaaggatgcatttctttgtaaaataccagagcttattcaagaaactaatagacaggacttttgttagcaagaatagaatttagttacaatggaagcagacctacctatacgcgtttttgatagcaattggaggaaactcacgggtctatttatttaaagggccctcagtctctttagaacagactgtacatggttctacctacaaattcaggttcattcatagtatttcttttcagttcaattatactcttaaaatgagactaaatagtcattcttgatgtaggaaatgtaggagatttcaaaggaggcagctcatatctaaccagtgaaagatgaaggtaartaattttattttctttttaaattttaacaagaagcaactatagcatcttagctagttgaaacttcaattcaaagttcttaaataactgtgaatgaggccaagaatgctaaatgacttcctctatgtgtcaagtcaatttattaggtgctggcaccactgtaccagctaaaattggttagactagaaataaaagtgaaagcacagaaaattcatacaattccattactataggatcaaattatggaattcaccctgttgtttagaagtcagaagtattctctatacacaaaggaaaatagatcatacaaagtaataatattttaaaataaggaggttcttgcataatgtaaaagtgcatcatagaataagcttctttgttaaaaaaagttttcttaaggtaaatatattcatcaaaaaatgtacattaataaaaggtcattgtgttattatttctaaaagctgtctccctggtagaatattcataccatatagcaaagaacaagtaggaatttgccaaatgccaatggatcaattaaaggttttggttgtgtgaaatcttgaatttgctttagacaaaaaaggaaattgatgggaatttctatgttttgaatatgggttgtccccggtactcatgtagaggcttgctcctcaatggaacagtgttaagaggtggtgggacctttaagaggcattcaggtcataagagatctccc

SEQ ID NO: 711086 - DNA, 1442 bp, Homo sapiens
ttccaaattttccttgcaaccaagattaaaaaataaaacatgcctttcaaagaacagcagtctatttctaagtatatgacccctactcagtcaatttaataaacatttatttagtaccaactaaatgcaagtcactgcatacagcattaggaaagatataaaatgagaaaggcacggtccttgcccttcaggagctcaaaatccaaaaacatacattaacaattctgaatggaggcagatggtgataagtgctgtaatggaggcacttacaacgtgctaaggaagcataaagcagggagagattgattccaaccatggcgtaataaaacaccttagtaaatgtatatttcattctgcacccaagaaaatcttttatgacccaagccaaaggatgcatttctttgtaaaataccagagcttattcaagaaactaatagacaggacttttgttagcaagaatagaatttagttacaatggaagcagacctacctatacgcgtttttgatagcaattggaggaaactcacgggtctatttatttaaagggccctcagtctctttagaacagactgtacatggttctacctacaaattcaggttcattcatagtatttcttttcagttcaattatactcttaaaatgagactaaatagtcattcttgatgtaggaaatgtaggagatttcaaaggaggcagctcatatctaaccagtgaaagatgaaggtaagtaattttattttctttttaaattttaacaagaagcaactatagcatcttagctagttgaaacttcaattcaaagttcttaaataactgtgaatgaggccaagaatgctaaatgacttcctctatgtgtcaagtcaatttattaggtgctggcaccactgtaccagctaaaattggttagactagaaataaaagtgaaagcacagaaamttcatacaattccattactataggatcaaattatggaattcaccctgttgtttagaagtcagaagtattctctatacacaaaggaaaatagatcatacaaagtaataatattttaaaataaggaggttcttgcataatgtaaaagtgcatcatagaataagcttctttgttaaaaaaagttttcttaaggtaaatatattcatcaaaaaatgtacattaataaaaggtcattgtgttattatttctaaaagctgtctccctggtagaatattcataccatatagcaaagaacaagtaggaatttgccaaatgccaatggatcaattaaaggttttggttgtgtgaaatcttgaatttgctttagacaaaaaaggaaattgatgggaatttctatgttttgaatatgggttgtccccggtactcatgtagaggcttgctcctcaatggaacagtgttaagaggtggtgggacctttaagaggcattcaggtcataagagatctccc

SEQ ID NO: 711087 - DNA, 1261 bp, Homo sapiens
ctatgcctagcctaatggaaattttttatgaaggcaargaagagttagtccccatttcacattatagatgaaaacaattctaggtggattgtagctctaaatgtaaaagataaggctcaggaagagagataatatggtttgggtgtttgtcccctccaaatctcatgttgaaatgtgattcccaatgttggaggtgaagcgtggtgaaaggccattaggtcatgggggcccatccctcatgaatggttttgcaccatccccttggtgataagtgagttcttgctcagttaattcacacaagatgtggttgtttaaaagcatgtggcacctccccctccactcttactcccctcttaccctgtgatgtgcctgctccttcttcaccttctgccatgactggaagcttcctgaggcctcaccagaagctgagcaatgctggcaccatgcttgtacagcctgcagaaccatgagccattacaccttttttctttataaattacccagcctcagatatttctttatagtaatgcaagaacaaacctagagagttcagaaacagaccgagaaagaggatgagagggtgatttacttttcatttttgaacattttgaattttgtaattgcaaatgaacttgtgtgtgtatgtgtgtgtgtgtgttgtgtgtgtgtgttgtgtgtgtgtgtgtgtgtgtgtgtgtattttctttgccagtgaccatacagcaaattaactttgaggtaccctgctacagtacatctaagtgacactgggacaaggtggttcacagtaattcttgagtctttgttttttttgttttgttttgtttttttgagacagagtctcgctctgttgcccaggctggagtgcagtggcaccatctcggctcactgcaacctctgcctcccaggttcaagcaattcttctgcctcagcctaccaagtagctgagattacaggtgtgtgccaccacgccaggctaatttttttgtattttttgtagagacggggtttcaccattgtggccaggttggttccctgacctcaagtgatccagccacctcggactcccacattgctgggattacaggcgtgagccactgtgcctgtccaggttctttgaagagatctagacctctttcctgagatacaggcccaactttaggaattatgctgtcagaaaccatttcaaaccaggttccttcctttgtgatgctgatcgtgaggccaaggagctccaccgaactgtgatccccaggtttcc

SEQ ID NO: 711088 - DNA, 1261 bp, Homo sapiens
ctatgcctagcctaatggaaattttttatgaaggcaaagaagagttagtccccatttcacattatagatgaaaacaattctaggtggattgtagctctaaatgtaaaagataaggctcaggaagagagataatatggtttgggtgtttgtcccctccaaatctcatgttgaaatgtgattcccaatgttggaggtgaagcgtggtgaaaggccattaggtcatgggggcccatccctcatgaatggttttgcaccatccccttggtgataagtgagttcttgctcagttaattcacacaagatgtggttgtttaaaagcatgtggcacctccccctccactcttactcccctcttaccctgtgatgtgcctgctccttcttcaccttctgccatgactggaagcttcctgaggcctcaccagaagctgagcaatgctggcaccatgcttgtacagcctgcagaaccatgagccattacaccttttttctttataaattacccagcctcagatatttctttatagtaatgcaagaacaaacctagagagttcagaaacagaccgagaaagaggatgagagggtgatttacttttcatttttgaacattttgaattttgtaattgcaaatgaacttgtgtgtgtatgtgtgtgtgtgtgttgtgtgtgtgtgttgtgtgtgtgtgtgtgtgtgtgtgtgtattttctttgccagtgaccatacagcaaattaactttgaggtaccctgctacagtacatctaagtgacactgggacaaggtggttcacagtaattcttgagtctttgttttttttgttttgttttgtttttttgagacagagtctcgcwctgttgcccaggctggagtgcagtggcaccatctcggctcactgcaacctctgcctcccaggttcaagcaattcttctgcctcagcctaccaagtagctgagattacaggtgtgtgccaccacgccaggctaatttttttgtattttttgtagagacggggtttcaccattgtggccaggttggttccctgacctcaagtgatccagccacctcggactcccacattgctgggattacaggcgtgagccactgtgcctgtccaggttctttgaagagatctagacctctttcctgagatacaggcccaactttaggaattatgctgtcagaaaccatttcaaaccaggttccttcctttgtgatgctgatcgtgaggccaaggagctccaccgaactgtgatccccaggtttcc

SEQ ID NO: 711089 - DNA, 1900 bp, Homo sapiens
tcaccaaagtacctaatcagactcaataacctgtcagcaatgctgttgggtgattcctgatgtagcaggtgggggagagcattgaagaagatggccttcctaaaaacctagaagctggccgggcgcagtggctcacgcctgtaatcccagcactttgggaggccaaggcgggcagatcttgaggtcaggagatcgagaccatcctggctaacacggtgaaaccctgtctctactaaaaatacaaaaaattggccagrcgtggtggcaggcacctgtagtcccagctactcgggaggctgaggcaggagaatggcgtgaaccagggaggcggagcttgcagtgagacgagatcacgccactgcactccagcctgggcgacagagcgagactctgtctcaaaaaaaaaaaaaaaaaaaaaaaaacaaacaaaaaaaacacctagatgctagaaacatgctcatgcagaattttttgtccctcacacagatgtagaatgtagagtaagaagacatgttgtgagggttgtggaaagaaaatccaaatcccacccatcaggagatgaggcactgggagccctagatgccatctgtcttttgaacttccacaaaataatgttgcatttcttctggtgcatacagaagtccagtatgctgctcttctgaggatccggcaagatggcagaagtagagcagaagaagaagcggaccttccgcaagttcacctaccgcggcgtggacctggaccagctgctggacatgtcctacgagcagctggagcagccgatgcagctgtacagtgcgcgccagcggcggcggctgaaccggggcctgcggcggaagcagcactccctgctgaagcgcctgcgcaaggccaagaaggaggcgccgcccatggagaagcaggaagtggtgaagacgcacctgcgggacatgatcatcctacccgagatggtgggcagcatggtgggcgtctacaacggcaagaccttcaaccaggtggagatcaagcccgagatgatcggccactacctgggcgagttctccatcacctacaagcccgtaaagcacggccggcccggcatcggggccacccactcctcccgcttcatccctctcaagtaatggctcagctaataaaggcgcacatgactccaaaaaaaaaaaaaaaaagaagtccagtatgctaacagaaagtcgtaataagctgcacacagtggtttgctttgtgggataagccgaacatttttcacttctgattgttgactgtgtgttggttcctctctgttttcccctccactctccaccctttgccttggcttgtgctctgggaggctgacgcctacaactgtgtcatctgactctccttgtcctctggcttccaattgggtttggctgatggctggtgctgactggggattagaaggcaggaagccaggtcagcctatttatcccactgtgactccttgttgggacatggttttgcagtggctgcattcctctttgccacgggactttcaagtgttcccttctccacagctgtggctctcacaggggtccagtaacaccatcaccacttgcttctacgcgtctatgagtggcattggcttcctgctgtgcttgtccctggttcttcaccactctttgccgagttcccttaaggctgttgcacctctgttaatagtccatttattaaactcacttcaattaaatcctttgtgcaaaccagctatttcttgcaagaccagatacaagtggggaaatattctgacctgatactactgttctcctagccttttgttcatgccttctgaagacatatgatgaatggaggaacggacgcagtgtgagaaaatcacaggcaggagggatgaactcacatgctttcccttcccactttctct

SEQ ID NO: 711090 - DNA, 1900 bp, Homo sapiens
tcaccaaagtacctaatcagactcaataacctgtcagcaatgctgttgggtgattcctgatgtagcaggtgggggagagcattgaagaagatggccttcctaaaaacctagaagctggccgggcgcagtggctcacgcctgtaatcccagcactttgggaggccaaggcgggcagatcttgaggtcaggagatcgagaccatcctggctaacacggtgaaaccctgtctctactaaaaatacaaaaaattggccagacgtggtggcaggcacctgtagtcccagctactcgggaggctgaggcaggagaatggcgtgaaccagggaggcggagcttgcagtgagacgagatcacgccactgcactccagcctgggcgacagagcgagactctgtctcaaaaaaaaaaaaaaaaamaaaaaaacaaacaaaaaaaacacctagatgctagaaacatgctcatgcagaattttttgtccctcacacagatgtagaatgtagagtaagaagacatgttgtgagggttgtggaaagaaaatccaaatcccacccatcaggagatgaggcactgggagccctagatgccatctgtcttttgaacttccacaaaataatgttgcatttcttctggtgcatacagaagtccagtatgctgctcttctgaggatccggcaagatggcagaagtagagcagaagaagaagcggaccttccgcaagttcacctaccgcggcgtggacctggaccagctgctggacatgtcctacgagcagctggagcagccgatgcagctgtacagtgcgcgccagcggcggcggctgaaccggggcctgcggcggaagcagcactccctgctgaagcgcctgcgcaaggccaagaaggaggcgccgcccatggagaagcaggaagtggtgaagacgcacctgcgggacatgatcatcctacccgagatggtgggcagcatggtgggcgtctacaacggcaagaccttcaaccaggtggagatcaagcccgagatgatcggccactacctgggcgagttctccatcacctacaagcccgtaaagcacggccggcccggcatcggggccacccactcctcccgcttcatccctctcaagtaatggctcagctaataaaggcgcacatgactccaaaaaaaaaaaaaaaaagaagtccagtatgctaacagaaagtcgtaataagctgcacacagtggtttgctttgtgggataagccgaacatttttcacttctgattgttgactgtgtgttggttcctctctgttttcccctccactctccaccctttgccttggcttgtgctctgggaggctgacgcctacaactgtgtcatctgactctccttgtcctctggcttccaattgggtttggctgatggctggtgctgactggggattagaaggcaggaagccaggtcagcctatttatcccactgtgactccttgttgggacatggttttgcagtggctgcattcctctttgccacgggactttcaagtgttcccttctccacagctgtggctctcacaggggtccagtaacaccatcaccacttgcttctacgcgtctatgagtggcattggcttcctgctgtgcttgtccctggttcttcaccactctttgccgagttcccttaaggctgttgcacctctgttaatagtccatttattaaactcacttcaattaaatcctttgtgcaaaccagctatttcttgcaagaccagatacaagtggggaaatattctgacctgatactactgttctcctagccttttgttcatgccttctgaagacatatgatgaatggaggaacggacgcagtgtgagaaaatcacaggcaggagggatgaactcacatgctttcccttcccactttctct

SEQ ID NO: 711091 - DNA, 2426 bp, Homo sapiens
ggaaccactgttgcagagctatgaaaacccaaagagccagaagcaagcaacgtttatccatcagtaactagagaggagaccaggaatctggtggtcattgatgtagtcaaaggatagttttaatctgtgtgggtcaggtgtaatcaattaagttaccaatgttgtcatctctctttgcctaatattcaagccttcaatttactaattcaatatactaaataaattgtaatcgtaagaacgttttgtcatgttttcacatgagtactgtagttaaatgaaagtcatattattgattacaaaataaacctgaatagcctgattcaataaacttgattaacctgattcatcaaccctatgcctgtcaacaacagaactctataaaaccagagagcctaacccttggtaataacaagtctatcatgaaaatgccactttgggggccactctggaggcggacgttggattttctcctgcttagtcctgaaggggaggaggaatttcaggtccttcatcccatccctatctcaggtctctcaccctttcttaggtgtcctatcacaggtcggattctccgagaagaagaataagagataaataaattgaaaaactaatactaattagtaaattatttatactatgtgggcatttttatgatgatgatgattattattattactataggtttttctaattgttggttgagcacaacttgcctattttgctctttgttttcatgcataagcatgagaggactatgaaatacactaaaaagtggcatatttgatcagttttgtcatttactttctgtattagccacaagaccaggttattaatctttagcaacaaatcaaaacaaattaatttgctctggtaggtacactatgcatccaggtatactggaatattatgcatccaaaaagaagaacaagatcatgttttttgcagcaacatggctggagccagaggccattatccttagraaactaacacaggaacagaaaaccaaatatcgcatgttttcacttataaatgggacttatgagaacacatggacacatagaagggaacagcagacactggggcctgctggaggctggagggtaggaggaaggagacggtcataaaaaataactaaagggtactaggcttaatgcctgggtgatgaaataatctatacaacaaacccccataacaaaagtttgcctatgtaacaaacttgcacttatatccctacacttagaataaaaccttaaaaaaaaagagccttctttggccgtccttccatgtttcctatggacacatcccacagcaatgatgggcctctaaaaccctattgcaattttgttttcatttttcttcactttttttctctttcttgacatctactatgaagtctcatttcccctgcttattgccatagattgcttgtctataatgaagctctgccttagaaatgccaaatataatgaaaaaaggtggagaaaacatagcaaagttggccactgaaatttgtgagggtcacacatttataaagcacacaggttttgcaaattcatcaactaaactttgaaataagtgtacgatcctttgctcttttctcggggcaactttaagttttctactctttactacattgagatcatatcactgtaaaatgtaaaaatgaacatttggagagtttagcatatgtctataggccaaacttaatccaaatcaagctctaacttttaaaacttcagctagacagtagaaaatgaatcattgctttgcataaatattttgtttgtattgacatattatgaaatttccaagaaaagattttacctcataaaaaattggttaactatcctgagcacctattatatatgtctcttgtcaaaatttaaatggaataaacatttaagtacttaatatgataatctaaactttcctttccctccaattctatcttattagagggtaaaatgaataatattcttagttccagactttgctagaggaacaaatacacagagatagaatatatttgataaaacaaagtttaatgataataatctgaaggaaacagttctactactgtacatttttatccatgcataaagacactcttctgtttttcagaaacactagaaaacaaaaccaaaaccaaaataaacaacaataaaaagcattctgagtgattttgcagcttgtaaatgacttgagaaaaatacgtgctttattaaccacgtgcttgtgagagttactagattttcaaatatatgtatgttgtcccatgtaatcctatgataagtgaatggttataatcttccttttaaagatgagaacgtgtagataagagatattcaataaattcccccttcttgtgcagctgagccccatgcccagaaacatttgtttccagaatccagctgttttctctatat

SEQ ID NO: 711092 - DNA, 862 bp, Homo sapiens
tgaagatgtcaaaatgagagataattgtagcttggactaaggtggtgagaaattgatggattggaaaagtgttgatggagtagaatccacaggacttggtaactccaaggtggatgtcacccttttgttaagtccttccatttatctgattgctcttgaggtttcttttaagtggttgattatttattatttcatccagaatttgtataaagaaagatcaataaatttgtttcttcatgtttgtttagtaaagggtgagtatttaagggtgctttcagtgcttctgggccaaggtgaaaaaaatgatggtcatcatgtgcatttcagcactcagaaacactattggcacaggcaaccaaaatgcaaaagcaagacatatgaattacaagtctgcacctcagcggctgaatagcaaagactaattcggaagaggccttatgacccaggaagacatactttaattaatatctttattgtcctgtcaggtaggttaaccctctggatcccatcagtatttggcartgttggtctttattcttggaatagaaactagattgtgtgtgtgtgtgtgtgtgtgtacatgtatgtgtgagcatgtgtgcatgtacacaatatcctcatgtgcatttcatatatatgttacctaccagatgtattacatatggataatcataaatagaaaacattaagctatttatcaaaacctctcaaatgcctactctgcatgctgtcagaccacagtgattctggagaggaagtgtgctctgagatgaatgatggggttaattaaaggcaactggaaggtggcttgtgaattggtgtttggttcattaaatgttcagtatattttactttctgtcca

SEQ ID NO: 711093 - DNA, 862 bp, Homo sapiens
tgaagatgtcaaaatgagagataattgtagcttggactaaggtggtgagaaattgatggattggaaaagtgttgatggagtagaatccacaggacttggtaactccaaggtggatgtcacccttttgttaagtccttccatttatctgattgctcttgaggtttcttttaagtggttgattatttattatttcatccagaatttgtataaagaaagatcaataaatttgtttcttcatgtttgtttagtaaagggtgagtatttaagggtgctttcagtgcttctgggccaaggtgaaaaaaatgatggtcatcatgtgcatttcagcactcagaaacactattggcacaggcaaccaaaatgcaaaagcaagacatatgaattacaagtctgcacctcagcggctgaatagcaaagactaattcggaagaggccttatgacccaggaagacatactttaattaatatctttattgtcctgtcaggtaggttaaccctctggatcccatcagtatttggcagtgttgrtctttattcttggaatagaaactagattgtgtgtgtgtgtgtgtgtgtgtacatgtatgtgtgagcatgtgtgcatgtacacaatatcctcatgtgcatttcatatatatgttacctaccagatgtattacatatggataatcataaatagaaaacattaagctatttatcaaaacctctcaaatgcctactctgcatgctgtcagaccacagtgattctggagaggaagtgtgctctgagatgaatgatggggttaattaaaggcaactggaaggtggcttgtgaattggtgtttggttcattaaatgttcagtatattttactttctgtcca

SEQ ID NO: 711094 - DNA, 594 bp, Homo sapiens
ctctgtatttagaaaaggggttacgtgactgtttgaactcttatcaactacagtgcttggaaggtttgcaattgtaaggacaaacactttcctacagtgactggtaatactctttatgaatccatagtaaatgaagttcctacagtatgctaatcacaacttttttatctttcttaaaaaaagacaaacaatatttataaccctcacaaaacacaataaactacatattctaatactaatacttgcaatcttgagttttacagatttgaatggtatgtattcaatcagggatgatcttggatgagcataaagagagattagcatagagttttttttcagtctctaagtagaattttcattatgagattgtggtttttaaagtctgttaattaaytattggattcaatttatcagtatttaaagattacctggcacttgactgggcactgcaaagtcagcatatacttaaagccatgtgttcataatttctataactacttataatacaacaacttccttctgcttggagaatgaaaggtcttatcaattcgatttcacaaacatctagtgagtccttacaatgtaccaggaact

SEQ ID NO: 711095 - DNA, 1108 bp, Homo sapiens
cagtagagtgaaaacactctggtcaatgataactcttaattctaccatgagaataaagaagagggaaaagaaaaggcaatagcattttaaggatttaagcggagatttactctcagtttctcatttaggccaaaacctatgtagaactatgaaatgaaatgaaaaaaaaaaagactctaggaattgcactgttcataatttgatcaggaaaaataacattgagcacatttagatatgtgttgaataatttaacagaggcatgcatatgatacaaaagcaaaataataataaatgtttattttttagagaggggagtctcactttgtcgcccaggctggagcacagtagcatgatcatagctcacttcaaattcctgggctcaagggatcttcccacttcagactcccaagtatgtggaactacaggtgtgcaccaccatactcggctaattttctaattttttgtagaaacggggtcttgccatcttgcccagattggtctcaaactcccagcttcaaatgaccctccagcatcagccccccaaagtgctgggattataggcatgagccactgcatccagctaataaatctttaaaaaaatatatttttctgtcatatagaaaaaattaaaaattatttkatataaaaaagtaacataactctgttatgttgctacagtggtactggtctcttggtgctgatggaagctcacagaaatccaaatgaagctaatagagccaaggttaaggattttgacaccctaagtaaagaggattaaagaatttagaataatttgaaaacaataaaaactgtgtatttcagccacacattccatctgtaaagcctacaccaatgattctttgtcttttcatcttcctggacacacatctcattgataatctgattttaaaaatctatatgctgataaataattttggatataacatcaaagaatggagtcttgcaggccatccttggattactagagtccatgcatgaaactccgccctcctgagttcaggaactgcatcttaatcttcctatgccagcaccaagcacaatgcctgcatccaggtgatgggagagctgatgaatgagaatgtgcacc

SEQ ID NO: 711096 - DNA, 1108 bp, Homo sapiens
cagtagagtgaaaacactctggtcaatgataactcttaattctaccatgagaataaagaagagggaaaagaaaaggcaatagcattttaaggatttaagcggagatttactctcagtttctcatttaggccaaaacctatgtagaactatgaaatgaaatgaaaaaaaaaaagactctaggaattgcactgttcataatttgatcaggaaaaataacattgagcacatttagatatgtgttgaataatttaacagaggcatgcatatgatacaaaagcaaaataataataaatgtttattttttagagaggggagtctcactttgtcgcccaggctggagcacagtagcatgatcatagctcacttcaaattcctgggctcaagggatcttcccacttcagactcccaagtatgtggaactacaggtgtgcaccaccatactcggctaattttctaattttttgtagaaacggggtcttgccatcttgcccagattggtctcaaactcccagcttcaaatgaccctccagcatcagccccccaaagtgctgggattataggcatgagccactgcatccagctaataaatctttaaaaaaatatatttttctgtcatatagaaaaaattaaaaattattttatataaaaaagtaacataactctgttatgttgctacagtggtactggtctcttggtgctgatggaagctcacagaaatccaaatgaagctaataragccaaggttaaggattttgacaccctaagtaaagaggattaaagaatttagaataatttgaaaacaataaaaactgtgtatttcagccacacattccatctgtaaagcctacaccaatgattctttgtcttttcatcttcctggacacacatctcattgataatctgattttaaaaatctatatgctgataaataattttggatataacatcaaagaatggagtcttgcaggccatccttggattactagagtccatgcatgaaactccgccctcctgagttcaggaactgcatcttaatcttcctatgccagcaccaagcacaatgcctgcatccaggtgatgggagagctgatgaatgagaatgtgcacc

SEQ ID NO: 711097 - DNA, 1478 bp, Homo sapiens
taagcatccaatgactggttccttctggctatccagcaaagaggccttctacaataaaccaatccaatccaacagacccatcaccttacttattttaattatctccatgacatgcatcactaattattagctaaatggtttatttcctgtctttatctactagaatgaaatatccatgagatggtgcactctgtctygatctctgctctgtccccatgactttggacattgcttagcacgtcatcaacactctaaatagcgtgtttactgtgtgaatataacaaatatattttaaatatacactaaacctgtatgaattttatggcaatattttttcctttttatagaaagctatcacatatattaaaagatcccaattacatctattcattttagacaatgttcatagagattctagcggtaaaaatattaaaagatcttattacaacgtttaaaatactccagaacttcatattacctataaatcctacatagagttaattatacattctgaattgttgtattttcggtgattaagagaaatgcagatagccaacatttcaatgtctttttaagttgtcttgagtaacatattttatgttactccagatttaaggaatttaatctgtattttaccagcaatgtgcaatatatcatcaatgactaccacagctttgtctccaaattttctgggccccttcccttttgtaccaatctagatcagatttttcactgcattatgatcaaaattactgcaaaaagtaatccttcctccttctgactttcctgactcatttttttttttccaaacactgaagtacggtttcttcttttgttatttttattttactttttttggagacagggtctttctctttcacccaggctgaagtgcagtggagccatcataactcattacaggttcaaattctcaaattcctaggcttaagtgatcctctcatataagcctcctgaatcactaggactacaggcacacactgccacgcccggctaatttttctctacgttttggagagacggggttttgccatgttacccaggctggtattgaactcctagcctcaagcaatccttccatctcagtctcccaaactgctgggattataggcgtaagccaccatgcctggcctataagtacaatttctcaaacatcattttatttatatcactcccttattcccctcccctaaaaaaactgtacccattaatattatttcaataactccccttacaaagactttgtgatctagttaagcaacccttcctgcaatccccaatacctgtgggccagggggttgggggttataagaaacaatcaatgaaaccaccatacactccagaagcattatctatatactgaataatttatatattttgaaaatgtatatgcgtgtgtgcatacacacacacatatttgcaattgcaagtataattttaaaatgtatctgattaatcaa

SEQ ID NO: 711098 - DNA, 1478 bp, Homo sapiens
taagcatccaatgactggttccttctggctatccagcaaagaggccttctacaataaaccaatccaatccaacagacccatcaccttacttattttaattatctccatgacatgcatcactaattattagctaaatggtttatttcctgtctttatctactagaatgaaatatccatgagatggtgcactctgtctcgatctctgctctgtccccatgactttggacattgcttagcacgtcatcaacactctaaatagcgtgtttactgtgtgaatataacaaatatattttaaatatacactaaacctgtatgaattttatggcaatattttttcctttttatagaaagctatcacatatattaaaagatcccaattacatctattcattttagacaatgttcatagagattctagcggtaaaaatattaaaagatcttattacaacgtttaaaatactccagaacttyatattacctataaatcctacatagagttaattatacattctgaattgttgtattttcggtgattaagagaaatgcagatagccaacatttcaatgtctttttaagttgtcttgagtaacatattttatgttactccagatttaaggaatttaatctgtattttaccagcaatgtgcaatatatcatcaatgactaccacagctttgtctccaaattttctgggccccttcccttttgtaccaatctagatcagatttttcactgcattatgatcaaaattactgcaaaaagtaatccttcctccttctgactttcctgactcatttttttttttccaaacactgaagtacggtttcttcttttgttatttttattttactttttttggagacagggtctttctctttcacccaggctgaagtgcagtggagccatcataactcattacaggttcaaattctcaaattcctaggcttaagtgatcctctcatataagcctcctgaatcactaggactacaggcacacactgccacgcccggctaatttttctctacgttttggagagacggggttttgccatgttacccaggctggtattgaactcctagcctcaagcaatccttccatctcagtctcccaaactgctgggattataggcgtaagccaccatgcctggcctataagtacaatttctcaaacatcattttatttatatcactcccttattcccctcccctaaaaaaactgtacccattaatattatttcaataactccccttacaaagactttgtgatctagttaagcaacccttcctgcaatccccaatacctgtgggccagggggttgggggttataagaaacaatcaatgaaaccaccatacactccagaagcattatctatatactgaataatttatatattttgaaaatgtatatgcgtgtgtgcatacacacacacatatttgcaattgcaagtataattttaaaatgtatctgattaatcaa

SEQ ID NO: 711099 - DNA, 1253 bp, Homo sapiens
aacagcatttcccctgcccccagccttcaatgccacttcaggcctcatttcctccaggaatcttcctgccctgccctctctgtttacctccccaacactgttttttttttttgacacggagtcttgctcttgtcacccaggctggagtgcaatggtgccatctcggctcactgcaacatctgcctcccaggttcaagcaattctcctgcctcagtctcccaagtagctgggattacaggcacctaccaccatrcccggctaattttttgtattttcagtacagatggggtttcatcacgttggccaggctgttctcaaactgtattatgtagcttggtttagtttctatttcagcaagaaagaaggcttcctctttgagaaaaatttggagcggcaatgataggatttgctgttgcagacactggagacaggaagggagaaatactgaactctcccctgcgtgtcttcaggaggccctggaggcagatggagttcccagggcagagagaagtggaggcagagcccaggctccaaattagtggagtgagcccccactgggtcctgagttggctcagagtgggtgagacaaggggcccaaggtatgtgtgtacatgtcacagctatccccagcccaagggtttctccagggcataggtcctggcatctgggggcagctaccccccaatctatcccttcctctgctgctgccatttaattttggaataagacattggcctaagagctgggccaggctctggccagtggcgggttgggattggggggtctgcaaacagggatgaagccaggctggaaccacgtggacctgggtttagtcttgacccttcctgactcccatgtaaccttagacagcctcagctacctcactgggccttggttttctcatctgataagggtgaagagtaattcctgcctccctcacaaagtagcaaagaggcatttgtaagatgatctgtgagtaaggttctgaagcgcagggctaggtgagggacggctgccagcttgctgcaggaccacagccagtttcttcccctttctgaactttcgtgtcctcactttcaaaaaaagccatcctggccaggtgcaacggctcacagctataatcccagcactttaggaggctgaggtgtgtagatgcttgagcccatctctccaagaaataaaaaaaaaaaatagcaggccatggtggcacacacttttggtcccagctccttgggaagctgagatggcaggat

SEQ ID NO: 711100 - DNA, 648 bp, Homo sapiens
caccatctcacacaatggagctgggctgtgggggaaactgctgggatacttgagaaatacaataagcttgatctctcatgtgggaaaatccatggtgtttaatagcttcgtaaagtggcacgcttttgtctgtgtatataaagtccccagtaaattcttacattaccacygttataaaatgcagcaacggaaacgttgagctgtgctatttgatccccagtggcaaaggttaggaagaaccaaaattcataacgacttccaaggaaatactattagggtgtaatttaaagaggttttgtggccataatttttagtgtggtgcagaacgtgctttcgtgacatacacacccccaccaacacggtaatgcttcacaatgaaaattgacaagaataaaaaagatgaaaggtcagtagggaaatgaagagtataatcatttgcgccaactggctccgccacacgagttcaagaaaggagaccacatgttgttagatacgattctcatgcagaaggttccattctccattctgaaagaacactgttttctgtgtaactgtaatttcagtgtatatcttcagcctgtgatttgaggctgagacaagcatttccatttaatcatcatggctactgctcacccgcagtggaaattt

SEQ ID NO: 711101 - DNA, 1588 bp, Homo sapiens
ttgtttattagaggagatgaatttggagttttgacccagtttaggataatagtacattcagaaaatggcatataaatctgtgtgttagattgtggcccccgttcttcactggtttagtgcctgaactatttatgtatgaaaaaatgtaaaaactacactgactgtaacacataaaacaacacacacaaaaggtaaagcttgaagactcagatgaaggagtataatcagatcaccatcaaccaggtaaaataatacccctcatggccataaaaccggagactgaggtgcaggggcagtgatgtatctatgggttattttctcctaagagtacaaaagccaagattatattatgtgctattgggcctcaatcctaatatctcattgtccaatattgtgtgacaaccatatcataagaggagctaagagtacacatgatggaaaaaaaaatagataggagcagaccagcctcagaaagtgaactaaaaaccacctcctgaatattctttttgatggctaaaattataccataaagataaagcatgaaacacaagaatcctccacgagttatttaaagtgaaatcacagggcacatggactcatgtggaaggagaggacatgamctgattcttttggtgaattttatttaggactaatttgactccctaaaagatcctcttaccttctgtacagataaggaaactctgggtcctttccttttcaataccttcaggctgtcaaagaataacacaaacaagcacagaagaatgagtctagatcctctgtccatgaaggaaaagtgattaagcaccagctcacttaagcatggctggtgcaagtttatccctgagagaagatccaactcatcttccccttttgttcatatctggaaggcacgggacatcaccggtacccattttagcctctgcgttctgtagcttggacaggcattatcttgatgtcactgtgggacactctcagctcctctgatcctgtatagcatctccagtaaacaactaaaagtgctttgtggagcagggattgccaagaggcaaatcaagagtgttcctctgacaagtgctgattcttgttgaggatgacgggaactgcatgggagtgtaggacaagtagatttgtctcttgaatttgagaatcagaaaaagagaaggaagagaaataggtgtacaggaaacatcttgactcagaaacaaacaaaaaattgtcaagtctatttcaaatgttaagttttactatcctgggtgaggtattaattaaagaaaggatgaactttatgctgttttaattcatttaaaatggcatgtcttgtgtcaaaagtaaatgttgtcaactaattaagtctcttcaatgagaagatcttttaatacaaaacctcttagatgtctgtttcttttcaggaaaagcttgactgtttgcatatccatacctctactaagaagcttttgaccacagtgtctttccagtttagcttttgctgctccattccttcatttgggcaagcactgctttgtttggactcagcaactacagtgatattcactttacctggaagacattcccaaatataaattaa

SEQ ID NO: 711102 - DNA, 1588 bp, Homo sapiens
ttgtttattagaggagatgaatttggagttttgacccagtttaggataatagtacattcagaaaatggcatataaatctgtgtgttagattgtggcccccgttcttcactggtttagtgcctgaactatttatgtatgaaaaaatgtaaaaactacactgactgtaacacataaaacaacacacacaaaaggtaaagcttgaagactcagatgaaggagtataatcagatcaccatcaaccaggtaaaataatacccctcatggccataaaaccggagactgaggtgcaggggcagtgatgtatctatgggttattttctcctaagagtacaaaagccaagattatattatgtgctattgggcctcaatcctaatatctcattgtccaatattgtgtgacaaccatatcataagaggagctaagagtacacatgatggaaaaaaaaatagataggagcagaccagcctcagaaagtgaactaaaaaccacctcctgaatattctttttgatggctaaaattataccataaagataaagcatgaaacacaagaatcctccacgagttatttaaagtgaaatcacagggcacatggactcatgtggaaggagaggacatgaactgattcttttggtgaattttatttaggactaatttgactccctaaaagatcctcttaccttctgtacagataaggaaactctgggtcctttccttttcaataccttcaggctgtcaaagaataacacaaacaagcacagaagaatgagtctagatcctctgtccatgaaggaaaagtgattaagcaccagctcactyaagcatggctggtgcaagtttatccctgagagaagatccaactcatcttccccttttgttcatatctggaaggcacgggacatcaccggtacccattttagcctctgcgttctgtagcttggacaggcattatcttgatgtcactgtgggacactctcagctcctctgatcctgtatagcatctccagtaaacaactaaaagtgctttgtggagcagggattgccaagaggcaaatcaagagtgttcctctgacaagtgctgattcttgttgaggatgacgggaactgcatgggagtgtaggacaagtagatttgtctcttgaatttgagaatcagaaaaagagaaggaagagaaataggtgtacaggaaacatcttgactcagaaacaaacaaaaaattgtcaagtctatttcaaatgttaagttttactatcctgggtgaggtattaattaaagaaaggatgaactttatgctgttttaattcatttaaaatggcatgtcttgtgtcaaaagtaaatgttgtcaactaattaagtctcttcaatgagaagatcttttaatacaaaacctcttagatgtctgtttcttttcaggaaaagcttgactgtttgcatatccatacctctactaagaagcttttgaccacagtgtctttccagtttagcttttgctgctccattccttcatttgggcaagcactgctttgtttggactcagcaactacagtgatattcactttacctggaagacattcccaaatataaattaa

SEQ ID NO: 711103 - DNA, 1588 bp, Homo sapiens
ttgtttattagaggagatgaatttggagttttgacccagtttaggataatagtacattcagaaaatggcatataaatctgtgtgttagattgtggcccccgttcttcactggtttagtgcctgaactatttatgtatgaaaaaatgtaaaaactacactgactgtaacacataaaacaacacacacaaaaggtaaagcttgaagactcagatgaaggagtataatcagatcaccatcaaccaggtaaaataatacccctcatggccataaaaccggagactgaggtgcaggggcagtgatgtatctatgggttattttctcctaagagtacaaaagccaagattatattatgtgctattgggcctcaatcctaatatctcattgtccaatattgtgtgacaaccatatcataagaggagctaagagtacacatgatggaaaaaaaaatagataggagcagaccagcctcagaaagtgaactaaaaaccacctcctgaatattctttttgatggctaaaattataccataaagataaagcatgaaacacaagaatcctccacgagttatttaaagtgaaatcacagggcacatggactcatgtggaaggagaggacatgaactgattcttttggtgaattttatttaggactaatttgactccctaaaagatcctcttaccttctgtacagataaggaaactctgggtcctttccttttcaataccttcaggctgtcaaagaataacacaaacaagcacagaagaatgagtctagatcctctgtccatgaaggaaaagtgattaagcaccagctcacttaagcatggctggtgcaagtttatccctgagagaagatccaactcatcttccccttttgttcatatctggaaggcacgggacatcaccggtacccattttagcctctgcgttctgtagcttggacaggcattatcttgatgtcactgtgggacactctcagctcctctgatcctgtatagcatctccagtaaacaactaaaagtgctttgtggagcagggattgccaagaggcaaatcaagagtgttcctctgacaagtgctgattcttgttgaggatgacgggaactgcaygggagtgtaggacaagtagatttgtctcttgaatttgagaatcagaaaaagagaaggaagagaaataggtgtacaggaaacatcttgactcagaaacaaacaaaaaattgtcaagtctatttcaaatgttaagttttactatcctgggtgaggtattaattaaagaaaggatgaactttatgctgttttaattcatttaaaatggcatgtcttgtgtcaaaagtaaatgttgtcaactaattaagtctcttcaatgagaagatcttttaatacaaaacctcttagatgtctgtttcttttcaggaaaagcttgactgtttgcatatccatacctctactaagaagcttttgaccacagtgtctttccagtttagcttttgctgctccattccttcatttgggcaagcactgctttgtttggactcagcaactacagtgatattcactttacctggaagacattcccaaatataaattaa

SEQ ID NO: 711104 - DNA, 1588 bp, Homo sapiens
ttgtttattagaggagatgaatttggagttttgacccagtttaggataatagtacattcagaaaatggcatataaatctgtgtgttagattgtggcccccgttcttcactggtttagtgcctgaactatttatgtatgaaaaaatgtaaaaactacactgactgtaacacataaaacaacacacacaaaaggtaaagcttgaagactcagatgaaggagtataatcagatcaccatcaaccaggtaaaataatacccctcatggccataaaaccggagactgaggtgcaggggcagtgatgtatctatgggttattttctcctaagagtacaaaagccaagattatattatgtgctattgggcctcaatcctaatatctcattgtccaatattgtgtgacaaccatatcataagaggagctaagagtacacatgatggaaaaaaaaatagataggagcagaccagcctcagaaagtgaactaaaaaccacctcctgaatattctttttgatggctaaaattataccataaagataaagcatgaaacacaagaatcctccacgagttatttaaagtgaaatcacagggcacatggactcatgtggaaggagaggacatgaactgattcttttggtgaattttatttaggactaatttgactccctaaaagatcctcttaccttctgtacagataaggaaactctgggtcctttccttttcaataccttcaggctgtcaaagaataacacaaacaagcacagaagaatgagtctagatcctctgtccatgaaggaaaagtgattaagcaccagctcacttaagcatggctggtgcaagtttatccctgagagaagatccaactcatcttccccttttgttcatatctggaaggcacgggacatcaccggtacccattttagcctctgcgttctgtagcttggacaggcattatcttgatgtcactgtgggacactctcagctcctctgatcctgtatagcatctccagtaaacaactaaaagtgctttgtggagcagggattgccaagaggcaaatcaagagtgttcctctgacaagtgctgattcttgttgaggatgacgggaactgcatgggagtgtaggacaagtagatttgtctcttgaatttgagaatcrgaaaaagagaaggaagagaaataggtgtacaggaaacatcttgactcagaaacaaacaaaaaattgtcaagtctatttcaaatgttaagttttactatcctgggtgaggtattaattaaagaaaggatgaactttatgctgttttaattcatttaaaatggcatgtcttgtgtcaaaagtaaatgttgtcaactaattaagtctcttcaatgagaagatcttttaatacaaaacctcttagatgtctgtttcttttcaggaaaagcttgactgtttgcatatccatacctctactaagaagcttttgaccacagtgtctttccagtttagcttttgctgctccattccttcatttgggcaagcactgctttgtttggactcagcaactacagtgatattcactttacctggaagacattcccaaatataaattaa

SEQ ID NO: 711105 - DNA, 634 bp, Homo sapiens
ccctcctcggcctgccaaagtgctgagattagaggagtgagccactgcacccagtcccccatgattttactttttaaaaaattatattttattagcagttatcttccacttgataggtccactctttttctctaaaccatgtgtgtttcagggataggagagttaatgcaaccttccagtccacaaagtgggaaatgacccaaacttggtcagagaactccattatccttaaccataatgatggttcagggatgagcacgtaatcaaattagccaatcagaattttccctagacttttctgctgagcataatgagaatgatcatcctgtttccttcacaatcttgaattgtatgaaaaatgttggcatttttcttgttcatcgtctccccagctggttgaaggaggctgtccaggataasagggaaagaagctgagttacaaagaaaagcagagacgagagaggaaaagataaccctgacaccatggcttatgccctggatccaccttgttttagtcagttcatgctcccataacaaacgaccatatactgagtggctgaaacaatacgtatctatttcttacagttctggaggctgggaagtctgaaaccagggtgccagcatatttggattc

SEQ ID NO: 711106 - DNA, 1167 bp, Homo sapiens
atttggtttagaattcaggtggggaaaacaattgtttactttatcggactcctaaccatgtgcttggcagacacaggtgaataaatacagtctctattctcaggaaattcatagagcaatggtgggaggtgggtagatggaaatggaagcaaaaaaaacaatgtgaattactgtaactagggaagtggtgtagtggagttcaagagcttcagttctggtctcattcaatcttagatgcattcccaaatgtgccayttaatagatgagtgaccctggggaagtaattttacctcagtgcctcagttttctcatctataaaatgggaattataatacccacctcacagattgtaaagattcaatgagataatacatctaaattgttcagcacagtgccaagcatgaagaaaaatcacccttttgaccattgttattattagaagtgtgacatatatgctgtgtaatctacaggagggcacctgtctcttcacgtgagtgctattatccaaagagaggtagaaaagaattctgtctatatcatagagcaatgataagcaaagcaaccccagactgtagctaatatatattttggggcatcactctgtaggttctagtttgcttttcagtctgtcagttgggtggtagctactctccagcctggcatcaggcacccagcagagagggaccggcaatcaccaggctagtgcagcacgaatgtatattggtttatgaaagcagctacctcccacatgcaagagaagagtaaaagagaagaatagaagaggaaagagaagaaaaaaaggaggaggcgaggaaaaggaggaaaggggaggggaggggaggaaagggaagaaaaatgtataattcagttccttccaataaatatggctgtgcaatagtttacattaatattaccaaagtgaccaaattaatgtatgaactcacagaataataattcaaaattgatacaaggaagtcacatgtaaattaggatggacagaagacacatggaaagagggatgtgcataaaagatgcaggggaaagccttcatgaaaaaatatggaaaggaaatagagaactgtactactatcctcctctatctgtcaatttctactaagaagttttatacccttaaaaaatcataaagttcacatatacactttctca

SEQ ID NO: 711107 - DNA, 1086 bp, Homo sapiens
acagaggtcctgtcaggacctgaggtatctcctcctgtggagttcaggtgagagccaccaccctttcccaagggggctgagctgttcccttcctataagccacttcagaccaagcatctgagcttgcctgggtgcaggtggcagggttcctgtggtcccagggcagcctggccatcccgggactctacttaacacttccaacttcttcctgagccagctgcaggggcagggagacaggtttgagggcaggagaccccaatttccacctactagttcctaagcagactctgtgagacctgtgttggatcagggctcacctccctcctggggtggtctcatttggcattctgtttctcccaatcccaatcccattgatcacccactgtgcctgccaagccctttcctgccacagggactttgcacttccttcagcctggatgcactgcccctgatcttcamaggcacctttagttggagcacagatcttgccacctcagagagagattctctgacctcttaatttaaatgagccacctcccagctccaactccttaccctttattttgtcatcatggttatctcctcatggcacctaccacaactgtaattacccctttgtttacttggctattgtctactcgttactaaagccctgtgagcacaagaactgaagtcctgtctgtcctgccctctcttgtgctcccagcccctagaattgtgtctggcacatactaggtaggtgctcaataagtatctgtcggaggaatgaactgaaaaggcttagaaaatagagttattgttgttctactttataggtaaggacgtcagtgagaataacaaatttacaatgacttcataagtaggaaatagctatgccagggacgctaccccaggtctctggactagaaatctgtacccccacagtcatagtccatttgtgttgctataaaggaatacctgaggctgggtaatttattaaaaaaagaggtttcccttgactgaagcagtgataaaagagaaagaaaaaaaagaggtttatttggctcacagttctgcaggctgtacaggcagcatggtgccaggatc

SEQ ID NO: 711108 - DNA, 921 bp, Homo sapiens
tggtgccaatttatgactcaccgggagggtatgaaggaacccagattttcatagtaaattacaaaggttactgtatttttattcaaaaggtaggctgaatattgattggtgtaggtgaccttaccctcagccattgtggtgtttaaacacaaatgttggttgggcgcggtggctcacgcctgtaatcccagcactttgggaggcccaggtgggcggatcacttgaggtcaggagtttgagaccagcctggccaacatggtgaaaccctgtctctactaaaaatacaaaaattagctgtgcgtggtggtgggcgcctataatcccagctactcaggaggctaaggcaggagaatcgcttgaacccaggaggcggaggttccagtgagctgaggtcgcrccactgcactccagcctgggtgacagagtgagatttcatctcaaaaaatagaaaataaaaaataaaataaatgcaaatgttgagtgaatgtgttcttttgacttctctttccttgtagacttcctctgctaaattacctcgctgccgacagggaggctgggcaggtgattccgtgaaggcttcgaagtgagtaccagcagctcataagagtatgggtgggggtgcacacggttggggggactttgctcctgtgttgttttattttttacaatagctttattgagaaaaaatttatataccatacaattcacccacttaaaatgcacaatttaatcattcttaatatattcacagagttgtgcaaccattaacacaatcaattttacaacattttcatcacctccccaccaaaagaaaccctgtatctattagcagccacttcccatgtccccccaacctctctagatctaggtggttaccagtcaactttctctctctctgatttgcatattctggacatttca

SEQ ID NO: 711109 - DNA, 1509 bp, Homo sapiens
caagtttgtccttgtttggatttctctttgtggagcagaatacaaagtgaagatcaagggttttagcacagaactcccaagatttagacttactggccagggtcagcaggtagtatttggccatgatagcatgacaatagtagtggttttgaagtgaatatattttaacacttctttaactttagaaccagatgggattagctctagcaatggctataagttttacctagaacacccgagtttgttgggtggtgatctaaatgggcagtcatttcctattagtatatgcatacacagcaattgttctaaattggcccatattttgccatttaatatttttagatggaggctccacaaagagtaattcctgtaattcttcagaactgcctgtcatattcattcatggctagacttgctccagcctggaatagaactggtcatctcttgatacaaggtaactttatctttttagtcattggggctttctgaactagattacgtctgttatgtgtgtattagtctattctcmtgctgctaataaagacatactggagactggaaaatttataaaggaaaggtttagtggattcacagttccacatggctggagaggcctcacaatcatggcggaagatgaaggaaaagcaaagggacatcttacttggcagcaggcaagagagcatgctcatgggaactcccctttataaaaccatcagatctcatgagacttattcaccatcatgaaaacagcacatggaagccccacccccatgattcagtgatctcccaccgggtccttcccacaacatgtgggaattatgggagctacaattcaagattcagatggggacacagccaaaccatatgaatgtgcatctgttcttaattttaagatatacaatttttagaaaataactcttaaaactgacccaattaagcaatctcaagcaagcccacaacaacataaatgtcatttctttactttgggattatatacagaggcctgatgtttctttaaaaaaatcagtatgtaatacttgatacttaggaataaatgtaagttacaaagcagtatgataaaatgagcacaatactgttaaaactgagaagctatcctgaatttttcttgaagtctgactgttttctaaatattttatagcaggaaatagacatttgggggaagaattgggtatttccattcttttaattgaagagataccttttgaatgattatattttttcagctgtcatcaggtattactttatataacaactgcattttaaagtattttctttagctttgataatctcacatcaagcatagttataaatatcaagcatgattatttatgagttgtaataacatggcatattctatgaattttttaaggaagagattttctttctcagatgggaaaacaaagtgctgttggtaagtaaaaatgcataagtcaatagataaaacaatataattcatagttgctaaagaaaacagtatcatatgctggg

SEQ ID NO: 711110 - DNA, 610 bp, Homo sapiens
agggatcatcagtggtatacgataagacttttcctatattctttaagagtttctcagtttgctcacttagaatgaggctatttgcctctccatttttttcttacgagagcagagcgggctcctagcaggtctttgtccccttctggcgggctgctaaccatgcaccacaagtgggaaggcaggacggagccaggcactcccagaggtggacagggcagctgagtgtgcggccccaggatccactccagaagctcagagcgctcggcaacttctttccaagttttcagcgattttcctgataacttaggttgacagactagtaacatttaacatggtcatttacaactgccacagaggggtctaaaaccgtaacacagcacagtgtttatagaaaagccaaattaggactaggtgcggtgactcacacctgtaatcctagcactctgggaggcctaggtaggtggattacctgaggtcaggagtacaaggccaacctggccaacatggcgaaaccccatctctactaaaaatacaaaacaattggccaggcatggtggcctgtgcctgtaatcccagatacttgggaggctraggcaggagaattgcttga

SEQ ID NO: 711111 - DNA, 1371 bp, Homo sapiens
tgggctgctgggagaattaaataagagagtttgggtaaagccctggcacagtgcgtgacacatttgtgaaacactcagatacaatcgagaccagtaagtgaaaaacaattaaaaagatatgtatgtacttcacaataaagttgcaataacatatctaagtaacaaattatttcccaattgtctcayatgagtatcagcccttttcctccagtatggttctgctgagttctctgcagattatctacattttcaactgttttctttaaaggtcagtgagaactaaaagacttaaaagactcaatctgagtgcagaacccttctagatttccccctaatcctccacagtcctcttgcctatacctaattcaagagcaagtttttaagtagatcacctttacaagtcttcccaaagcattcctcttatttttcatagaaacagctacagctgacatggcacttaataaaattatgtaatagaaactactggcaaataggtgaataagcaagcacaactgacttggtaagcagctgacttaacagataagaaacgcacaggagtgtcagaaagtctaccagtgatgagcatcaatgtgccatggacactgcaaagcaagtcttatgagggaatgggaagctgttttctccacgaggtagattctgtgaaggtcagataagagcttatactgtatctgaatcatcatcatcattaattttactctaatcctatatagttgggtttattcttttttttttttttttttttttttttgagacggagtcttgctctgtcgcccaggctggagtgcagtggcgcgatctcggctcactgcaagctccgcctcccgggttcacaccattctcctgcctcagcttcccaagtagctgggactacaggcgcccgccagcatgcctggctaattttttgtatttttgttagtagagacggggtttcatcgtgttaaccaggatggtctcaatctcctgacctcgtgatccgcccgcctcggcctcccaaagtgctgggattacaggcgtgagccactgtgcccggccatagttgggtttattcttagaagaccccacataaattgtctgcctttccttgaccaaatagtaatctacgacaagttgatctaactccctcaccaaaatattataaaatatactttcaacttggctaaatccagtcaaatgttttcaacatctgtagtaattctaacttgcaagagatagagacaggaaaagatctaagaatatgaaacacaaggcatactgctgttgggctcagtttagtcacacgcctctataaacaacaaatgagagtctttcgtgcacactaagctttgagtggcccatgatacactactggat

SEQ ID NO: 711112 - DNA, 1303 bp, Homo sapiens
cagcttccccagctaaagcaattcttccaaaggggaaagttttgatctgatcctattttaaaacttcaacaacagggccatcatgactttgcccttcaaagagcttcaataaagctagctgctaaaacaactgtgggaagaaaaagcctggactcacatctaaggagacagaaacctaaatgtcagctgttagtgagccagaaagatgtggggggtgtggggtaaggggtgggaatcgttttatttcacagtcccaacatcacatcagctcccgtgctttcaccctcgctctcctgaaagacaactttttaattacttcacatgtgtgaaacacaatctttactttcctgcagactgcaacatttgagttctaaataaagaggaacgaagcaatgcttggccattactcaaagagtcccacatattagaattaagaatggcagcaataggggccctccaaaatagcaggagcaatgctaacctttctggggtgactcccacatcaattatgggttctgaagatgcccacctctccagctggggatcaaggaactaacaaacaacagcaggcttgcgatcactgtccacaccgcacagtactggtttggagggtggtgggatacataatctgagaccctaaagcatgtataaaatatatacatatggggaagggagaaagaactttatacctctaaacattaatgatagatgacagaattataacaatactgattttctttgtaattttttgttttccaagtgttctataatattcttgtattaatttagtaattagtggaaaactcagtgaaacacaaccattaaaatgtgaccacacaaaaacgtatttatcagtataaaaacttttaccacatggcctaaatgttttaatgtgaaggttattgtaacagttatacaaaagagtgtatactattatctatgtttggagaaataccgttatacacataaaatcaaatgttttataccaactcagtgggaagtaaaaaggaatataaacacaacaaaccaaaatgttaacagtaactatctctgaattgtagtacattgagtgattttagtatcyctttgtatttattttctaatcttgatccaatgaatatgtatgtcttccataataataaataacaacaataaagggagaaatctggtaaataaattgggaactgcccaataactaaatgtcactggcagccatgttgctgtggccatggcagaccatgcaaatgtctgacaacactctgggaaggaagggactctctcaatcagctgtcatcctatggca

SEQ ID NO: 711113 - DNA, 1413 bp, Homo sapiens
tatttaatgagttttttgagtttttgaatcttgctggtctccataaactaagagagtaagacagtatgtccaaattcaggcaaaaagaggtggagaaagagtgcttcaaagataagattcaaaagagtaaaagctgggaggcaaagagaaatgccaaccaaggtattcttctgcccgctggaaactaagagttttgctctcgtaccttcctcaaacatgagcactattaacctcctccactamatccttagcttccaaatttggagactttaatatacatagaaatgacttttcaacccactgacctgatattttttcagcttcctcaaaaaatccttcagcttagacgtacaacaaatttaattttcagttgagttactcaaaacttactgtctttaattctgaaattattcccctttcacaatgactgactttgcttccacctctcttattccctttgttccactcaacacatgtactgttcttagggcagctgccagtcagtccactgacatttctttcttggtctaccacctctattctggcttcactatttgcccatgcaaccgggaccccagatttgtcactgaagaaactgattcattacgcatggacttcctttcatgttctctgtttgcagctggtcatgggttggtctttcagagaagtgactaaggtaaagaatgggagagactagaaatgagccttcttcttagaaagttttagtgtttcccaattgcctagtgaactaggaaaatccccctcactcttcagttcaaagttctccattccatggtcccattttccctgtccagtgagttcccaactgtgctccaatgaggactaaaggttccgaggagtaacatctgggtttctaggaaggccgaagtggaggctaagcagtcaacactccaggtttcacccagagcagctccacttttatctatcaaataacaataagaaattgcttaataaattatgttgaatacaaaaggcagaacattattcagccattaaaaactacatttcagaaaaatgttcagtgacataggaaaatgttcatgaggcttaacaccatctatagcattatctaaatgtttcaatatgttaaaaagcctagaaaaaaataatctcgaggaaaacacacactggtgtaaaccatggttatatcagaaagacagattgatgggtgtcttttaaaccttcttctgtctgttagtaatacttttaaagacaacaacaaaaacatgtctatgtaatcttttaaaagattaaaaaatattttctttttaaaaaaattatcttagaaaagactgttccccaaggccctggctctacattttctcttccctaaaccccaggcagtgattgatcaaaccttactcacctttgccagagtcttccagactaaca

SEQ ID NO: 711114 - DNA, 875 bp, Homo sapiens
tgaccagtgctcaggctggggctgggcaggcagcatctaccaaaggactagtcccttagcctggctatcaggccaggattcacaacctctagttcaccacaccctgccctctctcagaggaaagctcccatgtagttctagaaatcacagagacctgaccccttgccagtgctaggcaaacaagctgggctatgcatcagccaaaggcctgcagtgttctcttagagaacaacagagctcagtcactctgtgacctaggtacactcaacatacgtttctattctcactacatgtgcttagcacaatgagatgagccaacagttattgagttcttattgttctaagagcttgatatatattaactcatttaaaccttgtgagggagatgttcagctttattactcccatgttacagcttgaagaaactgaagcacaaagtcttaaaataactccctccaggtccctgaatggcagaggctaaatttgaactcagatagtctggctgcagagctctcactgggtacctctgtgcagttctgccaattgatatcaccctgaaatcaagaggaaaatgttggactagaggcaggtaggtgaaggcaggaccaggcacaaagcattttgcttctcttttatgcagagaaggattgaaaattcatgcatctgaccacatctggtaaaggctgggccttcagcctttttctcctctttctgactcctttgatcgctcttgtaaacattctgactctagttcagcgtggtcyattcacaagcttccacatgcatcatttcttcccatgtcattctcccagccatcacaggatttttatacatgttgttcaggttcctctcgttccgtccctccttccctcccc

SEQ ID NO: 711115 - DNA, 594 bp, Homo sapiens
gtttttccttttcttattaatttgtaagagctgattttatattctgggtrttaaccttttattgattctgtgtatgccaaatatcttctccttgtcttggccatattttctatttatttattgttgtatggaagattttttatttttatatatgaaattaatcaatattttcttttatggtttgtgctttctaatgttttctttaagcagccttttcctacaccaaggttttaaatattaaatgtaatctacattgtctttccaaagtcttgaagtgttgctttttacctttagcaccttaagctttccagaataaatttctgtaaactaaggtaaaggccttatatttttccatatgaggaaagtatatgtttatgtatatataaaattagctcttacaaataataagaaaaggacaatcagttgaatcagccccatttactaagtagtcatccttttccctttgatctgtaatgcaccactgtcgtttaccaagtttccatttatggagggctctctttctgggctctcttctgtccaattgatcagtttgtctagccctgctctagtaatgtctgactatcactccagagg

SEQ ID NO: 711116 - DNA, 1365 bp, Homo sapiens
gatctctgtcagccccaggagctgcagcgttgccccccaccagacgattggctgctgccctcagtggctcccggaagccaaaggcagtctgcagccggcctcagtgagccttcgggggtcctctagtaaccgggttcctgagctcttcctgtgtgcagactgtgctgtgttcattgctgcccagcagcggggcaggtggsgcaggtgggccagggttgctgtagcttcctcccttcccagagaaggggaagaacaaagcctcaggaaggaaatgagctgctcaaggtcatgggtggcggtgaggcgagcccctggaacctgaggccatgccacgtcctctggggtcagatgggagcgggtagggaggggcaggcagccctgacccaaaccttggaaagtgtgtctcttgtgtgctgtgaagaagcgtagttccccattttacagtggagaggacagatcatttgtcggggggtcaccaggtggcagggcatggagccagaatttaaatccaggtttcctgatgccaaagctggccaatcctcaacttctatgctgaagtcaaccttcaggccaggttggtgctgccctggctaagaggcactggccatggagcctcttctcctcctagacacaagccagatcctccatacgtagaggggctcccagagcacgacaggcatgggtgccacatcccagcaaggcagccccaggtggacgcgctggggttgggggggcggggcttgcttcccaggaacatggaccaggtacaagcgtccaagctgggaggatgcttggagagcagctgcctagtgggagaagatcaggaaagatgcccctgaaagggattcggagtcagggcccatctgtcccctggaaccacacagtatgcaccaccaactctggaaagattcaggtgaaatgctcaatttctgccttctttagaggactgggctgtatgaatggtcatatattaagtgggaggtggcagtgacgggctggcacagatgaagctgtcactgcttacatcagctgctgaaattatgtgctctttgaactaagcaagggagagccaaactctctcatttatctctgtgaagtcctccggtcatgtttataccatgaaataggacgggaaatctgagcagaagcaccttggcctaaagcttaggaatccgcttgttgagtgcccatggccatcagcacttcccggcttcatgggagccacagccagagattcagagatgcgtggacagaggcaccaacatgcttctcactcaaaccacagctcaactcactgcattatgtgccaagggcaaggagggttctcatcaatgttggtgaccaaagacattcacatccaaacaa

SEQ ID NO: 711117 - DNA, 1365 bp, Homo sapiens
gatctctgtcagccccaggagctgcagcgttgccccccaccagacgattggctgctgccctcagtggctcccggaagccaaaggcagtctgcagccggcctcagtgagccttcgggggtcctctagtaaccgggttcctgagctcttcctgtgtgcagactgtgctgtgttcattgctgcccagcagcggggcaggtggggcaggtgggccagggttgctgtagcttcctcccttcccagagaaggggaagaacaaagcctcaggaaggaaatgagctgctcaaggtcatgggtggcggtgaggcgagcccctggaacctgaggccatgccacgtcctctggggtcagatgggagcgggtagggaggggcaggcagccctgacccaaaccttggaaagtgtgtctcttgtgtgctgtgaagaagcgtagttccccattttacagtggagaggacagatcatttgtsggggggtcaccaggtggcagggcatggagccagaatttaaatccaggtttcctgatgccaaagctggccaatcctcaacttctatgctgaagtcaaccttcaggccaggttggtgctgccctggctaagaggcactggccatggagcctcttctcctcctagacacaagccagatcctccatacgtagaggggctcccagagcacgacaggcatgggtgccacatcccagcaaggcagccccaggtggacgcgctggggttgggggggcggggcttgcttcccaggaacatggaccaggtacaagcgtccaagctgggaggatgcttggagagcagctgcctagtgggagaagatcaggaaagatgcccctgaaagggattcggagtcagggcccatctgtcccctggaaccacacagtatgcaccaccaactctggaaagattcaggtgaaatgctcaatttctgccttctttagaggactgggctgtatgaatggtcatatattaagtgggaggtggcagtgacgggctggcacagatgaagctgtcactgcttacatcagctgctgaaattatgtgctctttgaactaagcaagggagagccaaactctctcatttatctctgtgaagtcctccggtcatgtttataccatgaaataggacgggaaatctgagcagaagcaccttggcctaaagcttaggaatccgcttgttgagtgcccatggccatcagcacttcccggcttcatgggagccacagccagagattcagagatgcgtggacagaggcaccaacatgcttctcactcaaaccacagctcaactcactgcattatgtgccaagggcaaggagggttctcatcaatgttggtgaccaaagacattcacatccaaacaa

SEQ ID NO: 711118 - DNA, 1365 bp, Homo sapiens
gatctctgtcagccccaggagctgcagcgttgccccccaccagacgattggctgctgccctcagtggctcccggaagccaaaggcagtctgcagccggcctcagtgagccttcgggggtcctctagtaaccgggttcctgagctcttcctgtgtgcagactgtgctgtgttcattgctgcccagcagcggggcaggtggggcaggtgggccagggttgctgtagcttcctcccttcccagagaaggggaagaacaaagcctcaggaaggaaatgagctgctcaaggtcatgggtggcggtgaggcgagcccctggaacctgaggccatgccacgtcctctggggtcagatgggagcgggtagggaggggcaggcagccctgacccaaaccttggaaagtgtgtctcttgtgtgctgtgaagaagcgtagttccccattttacagtggagaggacagatcatttgtcggggggtcaccaggtggcagggcatggagccagaatttaaatccaggtttcctgatgccaaagctggccaatcctcaacttctatgctgaagtcaaccttcaggccaggttggtgctgccctggctaagaggcactggccatggagcctcttctcctcctagacacaagccagatcctccatacgtagaggggctcccagagcacgacaggcatgggtgccacatcccagcaaggcagccccaggtggacgcgctggggttgggggggcggggcttgcttcccaggaacatggaccaggtacaagcgtccaagctgggaggatgcttggagagcagctgcctagtgggagaagatcaggaaagatgcccctgaaagggattcggagtcagggcccatctgtmccctggaaccacacagtatgcaccaccaactctggaaagattcaggtgaaatgctcaatttctgccttctttagaggactgggctgtatgaatggtcatatattaagtgggaggtggcagtgacgggctggcacagatgaagctgtcactgcttacatcagctgctgaaattatgtgctctttgaactaagcaagggagagccaaactctctcatttatctctgtgaagtcctccggtcatgtttataccatgaaataggacgggaaatctgagcagaagcaccttggcctaaagcttaggaatccgcttgttgagtgcccatggccatcagcacttcccggcttcatgggagccacagccagagattcagagatgcgtggacagaggcaccaacatgcttctcactcaaaccacagctcaactcactgcattatgtgccaagggcaaggagggttctcatcaatgttggtgaccaaagacattcacatccaaacaa

SEQ ID NO: 711119 - DNA, 1365 bp, Homo sapiens
gatctctgtcagccccaggagctgcagcgttgccccccaccagacgattggctgctgccctcagtggctcccggaagccaaaggcagtctgcagccggcctcagtgagccttcgggggtcctctagtaaccgggttcctgagctcttcctgtgtgcagactgtgctgtgttcattgctgcccagcagcggggcaggtggggcaggtgggccagggttgctgtagcttcctcccttcccagagaaggggaagaacaaagcctcaggaaggaaatgagctgctcaaggtcatgggtggcggtgaggcgagcccctggaacctgaggccatgccacgtcctctggggtcagatgggagcgggtagggaggggcaggcagccctgacccaaaccttggaaagtgtgtctcttgtgtgctgtgaagaagcgtagttccccattttacagtggagaggacagatcatttgtcggggggtcaccaggtggcagggcatggagccagaatttaaatccaggtttcctgatgccaaagctggccaatcctcaacttctatgctgaagtcaaccttcaggccaggttggtgctgccctggctaagaggcactggccatggagcctcttctcctcctagacacaagccagatcctccatacgtagaggggctcccagagcacgacaggcatgggtgccacatcccagcaaggcagccccaggtggacgcgctggggttgggggggcggggcttgcttcccaggaacatggaccaggtacaagcgtccaagctgggaggatgcttggagagcagctgcctagtgggagaagatcaggaaagatgcccctgaaagggattcggagtcagggcccatctgtcccctggaaccacacagtatgcaccaccaactctggaaagattcaggtgaaatgctcaatttctgccttctttagaggactgggctgtatgaatggtcatatattaagtgggaggtggcagtgacgggctggcacagatgaagctgtcactgcttacatcagctgctgaaattatgtgctctttgaactaagcaagggagagccaaactctctcatttatctctgtgaagtcctccggtcatgtttataccatgaaataggacgggaaatctgagcagaagcaccttggcctaaagcttaggaatccgcttgttgagtgcccatggccatcagcacttcccrgcttcatgggagccacagccagagattcagagatgcgtggacagaggcaccaacatgcttctcactcaaaccacagctcaactcactgcattatgtgccaagggcaaggagggttctcatcaatgttggtgaccaaagacattcacatccaaacaa

SEQ ID NO: 711120 - DNA, 3391 bp, Homo sapiens
cattatctttccctggagttataaattcattttcactgatttttaagctctagacagccttgctagtatgtttacattgtggtgtttattttcagaggtagaactgcaataaatgaaaaatattttcccttcagtagaaagggaaatattatacttagatatttataagtggttattttttaaatgctaagacaaaaatattataattattatacattgctgacaattttctgagtgtttctagtttaaagacaaagtaatattcatgacatgaactatacttcaaactgaatatggaataaaaatgtatttaaataacgagagaaaactgcatatctaagtgtacatgcaaatcagcttaactgttttatattagagttactatgatgggaaatcaccataataaaaataataaagctactattttttgagtacctatcttatgccaagtgctgtgatggatattttatatgtgctctcttatttaatactcacaataaccccaagaaggaggtaatattaaccctattttgcagatgatgaaatcaaagtacagagagattaagtcatctgcccaaggttacactgctagtaagtggccaaactaggatttagacctgtatctccccccacaagtctatatttgtttcctgtttctacactgcctcctccatctcaacctttggggagatgacatccaggtgcttattctgggtacaaggctttgcccagtcaaatgccatcatctttagaaccttccagagaatatggatgtgaaaactctagacagttatgttctctcaccaggaagtaagcagactgtactcactcatgtgaaatgcaagacagactcaagtgggtttccgagggtttcttttcagacataagacctcagcaagagccttctaggacaccaccaatgtctgcagagcctggttcagcccggggcttcagatagttttggatgttcccctcagcagactgcaagctctgtaaagacagttgtatatggcatagaatggaccagtcactgaggacacaataaatgctgattatctgcttagggtttctcccacagaacactgcagaagggctgcatcctacaatggctcacaccattttccctaatcctctgttcccataatttcccttagaagtaaaagcatctcggccgggcgcggtgactcacgcctgtaatcccagcactttgggaggccaaggcgggcggatcacraggtcaggagatggagactatcctggctaacgtggtgaaaccccgtctctactaaaaatacaaaaaaaaaaaaaatagccgggcgtggtggtggcacctgtagtcccagctactcgggaggctgaggcaggagaatggcgtgaacccgggaggtggagcttgcagtgagccgagatcgcgctgctgcactccagcctgggcgacagagcgagactccgtctcaaaaaataaataaataaataaaaaataaagaagtaaaagtatctcccaccctcttccctggaggtaccttcctgcattcaaataagtgcttcaaggcacaagtctgtttcattacgttcctcctccactggcaggaaagagcggttgaggagagttctcctccatcacatcctgcctaaattctgcagcagcagcccaggtgtcctttagtaaggaagcaaaatggactcctaaaatgggcgaaaaagtattcattcttagaccaagaagacactttgcgtcataaatattcaatgttaattagctagtaattcgtgtttccttggatttggaacctacatacattttttaatggacactgtcttctctcaggagtagccagctctagattttttggcacaattatatgatatgtgaactaatgatgatttcttgtactagtataaaattttaatggggggaggggagaaacaaaatagagaccagtcttcaaatttaacataaatggaacaataaacagtcatgaaggaaatttttatgatacagtaactgttattagcttgatgtgctgactgagaaaagatacagtatgcactttttaaagtgacttttaaggaagaataatttgtttgcataaaatgtgattacttaccctcataaatgtttatttgaatttattgcactataaccaaagccaactgcatcagccacagcagggaaaccaaattttgaattgcaaagcaaaccaaaggtgtgactgggaacacatcagcatccaatgctgactcggagaaattgaggcagttaaaattctgctgatttttcaggatgtgagactctaatgaagctgaattgtttagaaacagaaaaaaactgtaactcagactgggacccacctcttctgaaaaaacaacacctagatgacaccagtaagcacctttctcagcttcacctgactttccacctgctgtccacactagagtctatcaactggctatttgaggctgaatccagctgcagatgccatttttataagtccacatttaaatgcatttagaagagtttagaataaagcccaggtgggctctgctttcccaactgaccagtgtccatcatgccctctcttcttaggctcctaccttcattcacgtacctgccccacccagtgggccctggaacccttgatccacacacatgccttccaaggactcatgaaatactgctgtctatagacaaacgataaaaccaaaagccatcgaggacaagggctcacattgtctccatcattggctagaaggagaagaatgagaaaaggaggaggaagagatcttgatccttaaaagtgcctttacactaattttctcaactgaggctgcccaaggaaccacagtaagtcagaggtagaggaggctccaaggcttctactccccatttcccagtgcccagctcttccaaagatcccaaaactacttctactccaaaccgagtggattctttgcaagcaatcactgataaaagatacaagagatggctaaggaacatcttggaggtcatgaggaaggacaggcaagcctctacggaacagaccaggacatcttgaaatctttccaccatgtggaaataaaatttattttttagtggtgattctccataatcaaaggactccatttttttgtattatccaggaaaatatctttaatattgtgatttttgtttttagattaacaggaagtcttggtttctgatgttaccttgttactccttttaactttgtcacactaagacaacacgaagagggacaagaaagggggtggaaaggaaagagtaaaaatgttgaaccttacaatgtgccaagcaccaggcttggtgaattaacatgtggtatgtcataagatcctcacacaactacattttagaaagcaggaagcagggctg

SEQ ID NO: 711121 - DNA, 617 bp, Homo sapiens
gatatacctaccataatgaagtgattactacagtcaaacaaacattaatatacccatcatctcatatagttaccttgctggtgtgtgtgtgtgtgtgtgcatgtgtgtgcctamaatttactatcttggtaaattaccagtacacaacacagtatttttaactatagttctcatgatctctagaacttcctcatcctacaaaactgcagctttataccctttgacctacatcttttcatttccccacaaccatcccgccttcaacccggtaacccaggtggtcatcatttttatcacataacatgcctggtaaataacaagagaatgcagctctacgatgattatgttggttcacttgtgcttgcacttttaatattatctacagaaaatactacttctttacagaaatcgttttaagccacttgaccaatttgtgagaagtggttaaattaaaactacaaaatatcattataggtgcactaagcaatcacatatgaacaaaaattcactatagcacaccacaaatgtggtggcacagtcaaccccatgcacccgactttgggaaatcctgatgtaacccctacggatatgtaggtacaaggcactgggccatgtat

SEQ ID NO: 711122 - DNA, 1826 bp, Homo sapiens
agcctcccaagtagctgggactacaggcgcctgccactacgcccggctaattttttgtatttttagtagagacggggtttcaccgttttagccgggatggtctcgatctcctgacctcgtgatccgcccgcctcggcctcccaaagtgctgggattacaggcgtgagccaccgcgcccggcctccaaatcacttttaagggagttctgaggacagacacaaggtttacagccttccaaaatctgagagtagcagcatttgttttaaggttgcatagaaaaaaaatgagctgacctcttctgggcagggtgtatcattcattcatttattcattcactaatttcattcagctcaataaataatgagcatctattatgtgccagactctgtcttaggtcatggagatactctattaaatgaagatatttaaaattgatagtgatgctgagagggggatgtaaaaagaaggaaagaaaatgaggaagaagcctagattgttattggcccgggttaatagggataatggtcaaattagaaacaaacaaagaaatatacaaacaaactagagaacatgttaagrttagtaggattgcatcggaaaaaaaaaagaaatctgtactggaagatgaaaaagaatagctatgtaaaagggaagtagtaagggagagagaagagcttgcaaaagctgtgtttgcctgaaactatttgtgaagatcttgaagatggacagctgagagctttcatgccaacttctgtgagtgtagaattagaaaaagaaggcataagaagggaaaaaagaataaacatattttgtttgaataagtgactcactcttttggaattttctttttggtcaaatttattttgaattgataatacttggtttcagaaaaaagtaagtgtgtatacagtaaaaaatgtctctttcctagtctaacacacagttactctttcctaaggcaccagttgtgtttgtttcttgtatgtcctcccatggatattgtattagtccattttgcactgctgtaaaaaatacccaagaggcactttataaagaaaagaggtttaattggctcatggtcctgcaggttgtacaggaagcatgacagcatctgcttccggggagtcctcaggaaacttacaatcatggcagaaggtgaacgggcagcaggcacggccgacgtggccagagcggaggaagagagagagtggggggcggtgctacacacttttaaacaatcagatctcatgagaactccatcatgagaacagcaccaaagggatggtgctaaaccattcatgaaagacccacccccacgatccaatcatctcccaccaggacctacctccaacactggggattacgattcaacatgagatttgggtgagaacacagatccaaatcatatcagatattatgcaaatacaagtacatgcagtaatattttttaaaatgcaagttctaaagcaaatacaagtacaggcagtaatattttttctctttttatgtaaatggtaccatactaaatatggaggggaaagtattgaagttcttctgtgatcagaattgcaatttggaagaaaatgcactgtttggtactaaatataatcagataaaggactaaagtgtgtgtatttgtcatagataagctccttgaggaaaaggttctgggtctctgaggcatgtgtgtgaattgttctagccacttggtcttgtagtgcctcttccttggttgatgttctctggtggataacatgtcttgactactccagtctttctgtctacaaacctcttcctcagattttctttttcccagtgttccagtc

SEQ ID NO: 711123 - DNA, 615 bp, Homo sapiens
tatgaccaagacacttcacttaagatatgtgtaaaatgtgtttaatatagccttggttgacactgtaagaatctgtgaacaatgcaatgcccattattaggggattatttaaataaatgttgatgccttcatacgatggaattataaaatactaaaaagaattttactcatgtctacacacagaaagataccaagttattttaaatataagaaatagaccgggtgtggtggcttatgcctataatcccagcactttgggaggtcaaagtgggcggactgcttaagcccaggagttcaagatcaggatgggcaatatggtgaaaccccgtttctacaagagaaaaaaaatattagctgggcatggtggcatgtgcctgtagttccagctactcaggaggctgaggtgggaggattgtttgagccccagaggtcaaggttgcagtgatctgtgatcatgccactgcacttcagccaatgtgaaagagtgagaccctgtctcaaaataaatamataaataaataaataaataaataaataaataaataaataatttgcttgctgctggagatatacaatggtacagccactgtagacaacagtttgacagttattcca

SEQ ID NO: 711124 - DNA, 1511 bp, Homo sapiens
tgggttcctagataattgttcctcttacatttgtcttctggtcatgatgatatcacctagggagggagaagggtagaaatagagggatcaaaggtagtgatgctctgctagctggctctcctatcggtaaggcaaaaaggaggcttagctccttgcataattatttatgagacataaaccttgggtggtcaagacatgctgatgcacagaatcagagacaagatcaacagttaatgccttatgtattcatgtgacataaggactgtctgcccaagaatatttcccaattatggggggggtgcctgaaagcccattggctcttctctttgttgcataattcctcatgatttttttgttacatggaaaccaataacttagaggaggtctctggcaggagatcctgaagggttgggataagcgagggtgctgaaaggaaggcaaggaaagagtaagtataggaaaagaaggtggggactacctggataaacaggtggccctgttccgaactttccaagggccaacctgtcagtactcccacttatctttgagatttccatgttagaaagaatgccttgtttcgggttgagcaaaaactgtttcacctttattggtgagaaaaaaaatggctctaagccatatttaggaaatttgttgactataattaagatttcatgggcgtccccaaggtttacttacccataattgaaaaaatgcaaatgaagacagttaatcagtggactggccgactatgaagcactactacctatgtaaatgaattaaaaatgaagacacaaaatatgtccagttgagaaagttaccaaagagccaagtggtaaattcctcagcaaggctgtggagaattttttcttagcctgacagcctgcagtgccttcctgccaaggtctttgccaatttaatcttgagccattccatacagatttcctcacaactggccttcagcactggctggttctctggcattacttaaggaagccctgaagaaaagataacagacctcttgtcctcttttctgtgtaattgatccactacttagagctgtaaaatatttgctttacaagatcctgttatcaaatggaatttgaaactctttaggagttatcgcacagaatttcacttatcagggatcagtatgtgttgtaatattaactcttttaatgtggttttgtttgttttgagacacagtctgtttctgtcacccagggtggagtgcagtggctccatctcagctcactacaacctccgcctcctgggttcaagtgattctcctgcctcagcctccccagtagttgggattacaggcacctgccaccacgccaggctaatttttgtatttttggtagagatggggtttcaccatgttggccagactggtctcgatctcctgacctcaagtgatccgcccacctcggcctcctaaaatgctgggattataggcatgaaccaccatgcccagccttgatgtgtgtgtgtgtgtgtgtgtgtgtgtstgt

SEQ ID NO: 711125 - DNA, 614 bp, Homo sapiens
tcttttaagaaccatgtacgtttgtcagcccaaatttctgtatgtgagacgctaccataaaacaaaatcaaaacatctctttatccgagaacttccaatttgaatctgctgctatccacatttattggagcccctcttattgagatatttctcttcaattataacattttgatcaacttacatgaaaaaaatgcctgaccttgtcttccatgatgaatgcatctgcagattgttcttttggaatgcacatgttattccacctgacttttctcaatcttttgtgctaagaagctaaacaactttttattaacctcaaagatttgagaccagccctacatctgtctggtcagaatgaaattactaccgtgactataataatggagtcttgactactgaaatcttgcaaacacttcatatcttgtcttaaagggctacttacccatttctgaaatatcatgggaagtatacagctaatctacagttggagtagagcttagttttcatgaaaaatgtcaagaggctagatcctgagatttggaaattatctgatcctggcattgcatcctgtatcaaaggcagttttattattytaactaatatcatatataaaggca

SEQ ID NO: 711126 - DNA, 611 bp, Homo sapiens
tggacatttaggtcatttccagatcttggttattgtgaataatgttgcaatgaacatcaacttgcaaatatctctttgggattctgtttcaattattttggatagaagtgggattgctaaattatatggtaattatatttttacttttttgagaatgcttcatattgttttccatagtggctgcatcatttacattctcatcaacagttcacaagggttccaatttctctacatccttgacaacatttgttattttgtttcattttcattattttttatgtccatcttaagaggtgtgargtgatgtctcattgtagttttgatttacattttcctgatgattagtgatgttgagcattatttttacattcctgttggccactcgtatgtcttctttggacaaataatttattcaagtcctttgtctattttttaattactcattatatgtgtgtgtgtatgtgtgtgttgtgcactcatgcatgacgatgtaggagttccttggatattttggatattgggatacccaaattcagtaatataagaatatattacatatcccaaaggatacattgatctctcttatcagatatatggctcacaaatatttt

SEQ ID NO: 711127 - DNA, 1093 bp, Homo sapiens
tccttgatcaaaacagctaatgatgatctcagtggagatcgtcatctttcctctcccctgagctctgtgcgccacccccttttttatttatttatttatttatttatttatttatttatttatttattttttgagacagtctctcactctgtcgcccaggctggtgttgagtggcacagtcttgactcactgcaacctccgcctscagggttcaagcaattctcctgtgtcagcctcccaagtagctgggactacagctgtgtgctaccaagcccagctaatttttgtacttttggttgagatggggtttcaccatgttagccaggctggtgtcaaactcctggcctcaagtgatccgccctcattggcctcccaaagtgctgggattacaggcgtgagccactgtgctcagccctgcaccactattctgacaaccctatggccgtccccacctagatgtccccaagacactcctgcaattaaacatgtgtaccacaaaggcttgtgctcacagccttccagccctccacccgaccccaccatgcccctggccttaggatcacccttgctccatttgccacacttcaggttcactctcagcctgctccccttccttacccctcatcctattggcctgaaatcctgtcagtgacacctcctaagtatccattgcctctctcttcaagccttcatcatctttacatgattattgtaacagcctcacactgaccttcctctgcccgtcccacctccaatttaaccttccactatgccaatggaatgctcttttcctgttgagcatccttcatggtacccccttactctctggacagtcagctccttggcaggttccacagcactgggatcgtcctctctgcatggaggctcccacctggcctaccagctccttgctagttaccaaatgcccactgagggctggcccacgctcatcgtctcttaggaaaagcctttctcaccagccagccagcctcatttcctcagggagcctttctgggccacctccacagacagagctggctctccagcctctgcgattgcttggcaaatctctgtgatcatgtaatgctcatca

SEQ ID NO: 711128 - DNA, 1210 bp, Homo sapiens
tctcctcaataagctcattcactcacttggcttccaataccatgacatggcacagctgtcaactctctatctccagcccttacatttccccgatgttcagccttgtttccaccatctgcctactccatatctccactcacatgcctaatgggcatccccagtttaacaggtcaagagcttttgatttcttttcccaaatatgctcctctccagcctcctcttttcagtaactgatactaccatccacccagtagcataagccagagatacctgggggtcacccttgatttcatcttcttccctactcttcatgtttaattcatctgtcacttcttcctcagaagtatatctcaggtccacctatatctcttcatctctgagcatctctctgcatcctaatattctcttcttacagggagaccagtcatactgcattagggccaaccctgatatcctcacttacctttttaaaggccctatatctccaaatacagtcacattctgaggtactgggggttagaacttcaacatataaattttaagacccattacacttgaaccactacaagtgtaaaggggatgtgaaagccttgtaactgatctccccacttccatctcatacattccctctccttacagaatcaagagcaaatttttaaaaacacaaatcctatcttggcactcttctgtcttgaaccctttagtgccttcctattgcacttagaataaaacccgaagtcttgccctatagcatcttgcttcagtctaccttgtcaatgtcatctcacattcctctccccatcagtcaccaygctgttatcacactcaacttctttcagcacctggaccagcccaagcctttttactgctcagaggctttgaacacatgatttgtttgcctgaaagttccctcctgctgcacgtagcatcgctgtctctttctcaatcttcatgtctcaggttaagtatcccccacccctgccgttctttatgataacagcctatacatgacctacatagcactcattgcatatacacagccattcatctctttgcctggttatctgttttctatttctccttctagaatgtaggcttcatgaagacagggactttgtcatcttttcacagcaatatcactggcatccagaagagtgcctggaatactataggtgctctgtaaatactagctgaatgaaggaatggtcat

SEQ ID NO: 711129 - DNA, 2276 bp, Homo sapiens
attaggctcaatatatgggtgatgcaataatctgtacaacaaactctcatgacacacatttatatatgtagcaaacctgcacatcctgcacatgtacccctgaactgaaaagttaaataaaaaaaagggatctgtgagctgagccaaacacctggggatctttgtgcttttgacacactgatgactatgccggtccgtggggagatgagcctataactgccctgggttgtgtgaccacggaggccactttatgatgatgggcagtgtctggggcctcttgggctcgttgctttagggcttatacatgaatgctggactccctgtgtggtggtgaacaccccatgactaagtgcatgtcagcgtcagcactggcccacactcctgggttcgtgttttcactgtttcattcaggaactcgggagctggggccactcccttggcccttcaggttctccacctgagcagtggggataataaggcagacccggggatggctctggtgagggtggaggagtcactgtacagagagagtagagcgggggtggattttattgttagaagtggacactggtgattgggttgtataagtgggaaatctctcctgagaaaacacacagcctcacctgtacagaaacacacacattcacaccacacgatgcagcctcacacaagacaccaccaatcctcaagcacccaactcagcaccacccaaaagggagcacagctgcttcctcaaaatttggccataatttttccctggggaattcaggttttaaaaaaacacttcccctatacttattcctatcacaatcccaggatcagggaggctcttcacattgaaaccaggcaaggatgccacacctttcttggcatccagattgttttcttggcaagtgattccagaatacttactagattcaagcctcagaggggccacctgcaccacctgcaatacagaaacaaagctttttgaggggtatgtcatgttgtggattgtttgcacaaggctctgtttctctcaatgaatactgaaaacttgatcagaaagtgtagtcaacttcaaggcctccaaaacaagagtaggatacacactggaaaagacatcagcttctggatggtggatctctcaggtccacgtaggttggcaagtgcaaaatactgaatccaaggagaagacatygcttccaaggacaaggaccccaaggatacagtctacaacctgaagccgtcatagctaaatgccattttggattacatatcagttgctaagagtcacttcttcctccccctcagaaaactgcatttaatacctgtcatggacattgtcattttttcacatgtaaagtcagttgaaaaagaaagacaccaagaaaggaacatttctatttcagagaaagcaaggcaaccttaccctcgcgttgactggcctctctccatctcctctgtccttgtgaactagagactcctcagaggctaggaggacacagagcaacagttagtcatagatgcttttgttcatgagttattcagggagctctgcttaatgtggacaacaggacagtgtgtgtggatgtgtttcattaaaagcacagcttgagctcctgctagaaaatcttccctcgtggaaagacaggcaagaacgaggagctaaggagcgagaaatagagtccctggcattttgctgatggcaacttaagaaaatgggaatgagtcagtctacaaatggtactgaagcacatgctatagtttgatgagagtcccactgctcacactgtgaggtttgaaacccagctaaatggttttctaaacctgtaaaaacaatattagcttgcaggatttatgtcccaagactacttttacctctgaggatccacagtggctgtcactgcagttatgtgttttagcattttgcacttgaataaaagcaaagtttaatagatagattggattcaattctaggcaaaacagtctatggtatttattcactaatcctttgttataactgctgatgggagaattagaagtactgaaattatatcctttaaaattaattaaagcataattattaatcacacaatattttttcatccaggcctccttttctttgtcatgcatgcatattaattgaggatggagaatatctacgcttgttcaggccagccaacatacgacagtttacttcaagagaggagacatgggttgaatgctggtgtgttttaactctgcagtgcaaacagctgcaacaagtgtggtgaactaaacaccagatggccctt

SEQ ID NO: 711130 - DNA, 642 bp, Homo sapiens
tctcgctatgttgccaggcttgtctcaaactgctgggctcaagccatccatccatttcagcctgccaaagtgcttggattataggcatgaacactgcgcctggccatcacactgtttktttgtttgtttgtttgtttgttttgagatggagtcttgctctgtcacccaggctggagtgcagtagcaggatctcagctcattgcaagctctgcctcgtgggttcatgccattctcctgcctcagcctcctgagtagctgggattacaggcgcccgccaccacgcctggctaattttttgtatttttagtagagatggggtttcaccgtgttagccaggatggtctcgatctcctgacctcgtgatccgcccacctcggcctctcaaagtgctgggattacaggcatgagccaataaatatttttataatcattaactaccgaggagaagctggagagaaaaaaggtggatgaagttaaggcagagagactttgtaagtttcttagctgagcttttggagactgtatatcagagatcctatttgaggtgattttcagctacagagataggcctggtcatttgaaaaataatggattaggtgaagcttgcgtttgaaatcctccttctacttttcatctttctct

SEQ ID NO: 711131 - DNA, 1356 bp, Homo sapiens
tacgatttttgactttatgatggtgggaacataaggtgaagtcggtaaaaacagtgttttgggtaccattctgtttttcaccttcagtacagtatttaataaattacttgagatattcaacactttcttataaaaaggtctttgtgtgagatgattttgccaaactctaggctaatgtaagtgctcsgagcacgtttaaggcaggctaggctaagctatggtaaaattccatttttaaagtgagggataggggctaatcatttttataccattcagagtccttcaaaatgacgatagagaacagaggagcaaattctctatactatgccatcctccctgggcaagggacatgaaccacgctctccccagaagcatgtctcacattgatgcaatgccatcgcctctgtaatagtttggggtggaattatccatttcggttattatacctaatagaaatcacaatggtaagaaagtggttcgcttaccatagaaatcactttcaagcaactaacccatccaccatcctctctgttctgggactatgtcatcttttcctcttctatccaacttcagcagcttcctcccatggtcacatcctgatccttgtcagttccgggaacttctccatagaaaacaaacatcccactcttgaacttagcctcttctcctctccagccgtctattcaacaccccttccatcttcaattgctcttagaattaattgggacctttgaccagctccccatatatacattttctcattatccatcacctgcctcctgtctttattgttcagttcagatttcataaaactaatcttttacatattaaattcctatgcatctctgtccttccaaaatggaattagcaagactccaaccctggatcaatccatcctctaccttctcctggcgtctgaaaatcgccggaggaaatctgcacaactgtgtcaatttttaacatcataaattctgaaataacaatgctaactgggatcccgatggagtacagcaaacttacttcatttttccagagagctcactcttccctccttcaccaagatgcctccattccctgtactctctctaaaagttggttccactggaaccctccctcagtttcagcctcatagtggagctgccagatggagcctgttgctgagcccaggctctcacttgcccctacgctcatccgccacttcttgctcctaaccacactggaggaactgtgctcagatccctctctgctgccttcttggggcctccttcaggtaggaaggccctctcctccttcatcttagcttctcccctttattacgtccctttcaggattcaaacacaccctcaagtcttaaaa

SEQ ID NO: 711132 - DNA, 1940 bp, Homo sapiens
tacaaacccttgctgaatattttttgtaaggtttaaggcaaatgggtttccaattcactttcagaacacagcaggtctaataatcaataactcccacattggttaactacagatttacctctgctgcactgcccttttttttttttttttttttttttgagatggagtcttgctctatcacccaggctggagtgcagtggcgcaatcttggctcactgaaaactctgtctccgggttcatgccattctcctgtctcagccccctgagtagctgggactataggcgcccgccaccgtgcctggctaattttttgtgtttttagtagagatggggtttcactgtgttaatcaggatggtctcgatctcctgacctggtgatccgcctgcctcggcctcccagagtgctgggattacaggcgtgagccaccgtgcctggcctgcactacccattttaagtgatctgagtgacccctcaagagaagttgccaatactgtatttcattataaagggatttttaaaaagtaggctgtcttttccatcaaagcattctaacaaatgctcttccaacaaaattatgtatagtaattaaatttctaaggtctaaatcctgacccagttacttcaaggaatatttgatagagtaatagggtagaataattaaacaactctggtctctttagagttctttttaacaggatttgagctttagtataaataatttcttctttcatttgcctaccaccatcctggatttcccatttctgacaggtccaagctgtgagcttaagtaacactttaaatttgaatttcctaagaagtcttttgtgcctttattttttcttaaaacaattttggcttgcttggcctgggacactggctttggggctttgggagagataagacacttcagtgttttcctgacagctgaactaaagaaaacctcttacacacacgtcatctgatttgtttcatgtcattttgatcactccttctgacagttccgatctaatttttctttcaaaaaagggtatcaatttcaaggtttagagttcttaggatttagaatccgtgattgaaagagtgaaatttaatcttgaatcaaggttagggaatatgagcaaggttcgcaggtttcttctcgatagaagactcttgtgaccactatttattatggtaatgctttgttattataaacctcccatgaataatattttggggaactaccacacaacaaggcacacattataacccctggtttgggggttgggtgatatcaacgaactgagaagcacaattatctcatggttatgcatgtctatgaagtgtgttaatacttttgttttttacaacttgtagaatattttcattgtaggtgaagcatcagacacatttttattcaaaggaagagaaataaaatgaaagttgtgtctgctgtgtgttctgaatgataccctggtggccccaatcctctamgctgggggctaattccccactgcgcgtctcatgggcgccaggacaggatactttcatgtttgtgtcgtggtacatgacatccatgatatccatggcacaaaaggagtccttatttggaaatagtgatcagccagtttgaaaaggagggtttgatggtgtgcctgtagtagatattgtttcaggtcaatttagtcaaacatttcagtaaagtgtaatgtttgtttggtgccctagaaagtgagttgtcgtgccgctggcatttgcttctttgccagaggtgttaaggccatgtagacatggctctagcgtagacatctaggatgacactggggaaagcaagcaaaactagcaatgattaagtacttaataagtgccaggtggtttacttaaggtatctcttttaattttcacgacagcctatcaggctgatattactgtccgtgttttgcagaggtgagggaacttc

SEQ ID NO: 711133 - DNA, 1940 bp, Homo sapiens
tacaaacccttgctgaatattttttgtaaggtttaaggcaaatgggtttccaattcactttcagaacacagcaggtctaataatcaataactcccacattggttaactacagatttacctctgctgcactgcccttttttttttttttttttttttttgagatggagtcttgctctatcacccaggctggagtgcagtggcgcaatcttggctcactgaaaactctgtctccgggttcatgccattctcctgtctcagccccctgagtagctgggactataggcgcccgccaccgtgcctggctaattttttgtgtttttagtagagatggggtttcactgtgttaatcaggatggtctcgatctcctgacctggtgatccgcctgcctcggcctcccagagtgctgggattacaggcgtgagccaccgtgcctggcctgcactacccattttaagtgatctgagtgacccctcaagagaagttgccaatactgtatttcattataaagggatttttaaaaagtaggctgtcttttccatcaaagcattctaacaaatgctcttccaacaaaattatgtatagtaattaaatttctaaggtctaaatcctgacccagttacttcaaggaatatttgatagagtaatagggtagaataattaaacaactctggtctctttagagttctttttaacaggatttgagctttagtataaataatttcttctttcatttgcctaccaccatcctggatttcccatttctgacaggtccaagctgtgagcttaagtaacactttaaatttgaatttcctaagaagtcttttgtgcctttattttttcttaaaacaattttggcttgcttggcctgggacactggctttggggctttgggagagataagacacttcagtgttttcctgacagctgaactaaagaaaacctcttacacacacgtcatctgatttgtttcatgtcattttgatcactccttctgacagttccgatctaatttttctttcaaaaaagggtatcaatttcaaggtttagagttcttaggatttagaatccgtgattgaaagagtgaaatttaatcttgaatcaaggttagggaatatgagcaaggttcgcaggtttcttctcgatagaagactcttgtgaccactatttattatggtaatgctttgttattataaacctcccatgaataatattttggggaactaccacacaacaaggcacacattataacccctggtttgggggttgggtgatatcaacgaactgagaagcacaattatctcatggttatgcatgtctatgaagtgtgttaatacttttgttttttacaacttgtagaatattttcattgtaggtgaagcatcagacacatttttattcaaaggaagagaaataaaatgaaagttgtgtctgctgtgtgttctgaatgataccctggtggccccaatcctctaagctgggggctaattccccactgcgcgtctcatgggcgccaggacaggatactttcatgtttgtgtcrtggtacatgacatccatgatatccatggcacaaaaggagtccttatttggaaatagtgatcagccagtttgaaaaggagggtttgatggtgtgcctgtagtagatattgtttcaggtcaatttagtcaaacatttcagtaaagtgtaatgtttgtttggtgccctagaaagtgagttgtcgtgccgctggcatttgcttctttgccagaggtgttaaggccatgtagacatggctctagcgtagacatctaggatgacactggggaaagcaagcaaaactagcaatgattaagtacttaataagtgccaggtggtttacttaaggtatctcttttaattttcacgacagcctatcaggctgatattactgtccgtgttttgcagaggtgagggaacttc

SEQ ID NO: 711134 - DNA, 1941 bp, Homo sapiens
ccagcagtggctggaacatgaagtaaggggcagagagtggtgagagctcaggctgctgagatggatggaggtcaggccagccttgtaaaaccttgtatgctattgaagaaatgagatttatcctgtagtataatggatgacttggtggggtttgaaagaaacacatgttggggccagatctgggttttgacaagttcactctgaaaaagacacagcccatctctaggcacaaccccagrtacaaggacgccagttctgaagcaggcaaggtaagagaagctgtcacccgcactaaggtggtgccagtggtgatggagggaagaaacaaatttgtttcatatctctaagaacaaatcatgatgggggattgagtggatttgaggaatggagaagagagagaacaattacttcagctagagctagactggaaatgaggggcacgcctgtccatgttgatcttttgtattaaaaggtctgagatgattccaaatatgaagtgcctttgctcatattcttagagtcttgatcatttgcttcctgctgaggcctggagaaagttgcctgggcagcctgggacgaggtctgaagttggacctgcatgctaaatagtcaacaactcaacttgggatgcagaaaagccactgagtatgatgtaagacctggtcccaatttccacttgaaccatgtcctggcattgctaccttaaactagctttgcaagttttaatgtcctcatctgccgaactggagctagcctctgctctgaagcacacgtgtgagggtcatctgcattcagaatttctctctccgtgttgaccaggattgatgcagctgatctgtttaccgccacgtgactctcctctgtggaccagagctcccagttcctgcttgtctgagagggagatgggataggagccaaactcagggcagcacccagaagagtcacatttgggtttcctaagcttggcagactattggttcacaatcaatccagactttcttgaaaacaaaggcccctttgcccccaaccagaagtaaataacaggttgtggcagaaattctctctccttggctgatggttctatcatctcaaatttgtatccattatctcctaggagagcttgctaaaggctgagccatatggggcctacgatgtcctcggtaagatttctaaatgaatctttaatgccaggagaacctggagtgacctgttgtttctacaacatgtaagcactcctctctaatgaagttgaacatttccctttcgggcttgctaaattgtggaaaataaatatgaaagagcttttaagatgcctcctaatcctagggtgcacaaccgcccttttgtttaccttaatgtaataggatcattatctaggtgccccatttggatgaagccttgaaaaacatactaacctgttgactttgttaatagtaatttaggaaaacctcttgggctccaaacccagctttttacagccaagtgtacccttgttttctatgttgactgtcattgcagatttgtgtaaacatagctgaatggtgactatgctgctttttggggccagcagtgtttgttggtggagattgttttttatctgcagggtctgtaaaaggtggagttttgggtgtctgttgaccttgatttgcaaaagggaaggacttacctctatattttatggtccaataacagactgcagtgctcaattacatggggggattaatagcgggttaattgatatccctttccaagtgtgtgttgctggtgaaacagaataatcagtggctctccaccccaactctgacagtctcactccccagagcccccacaaccgccaaaagggagttctgtgcctcttttctcactgacctgcggcctgcctacatctgcccaattagagccatgaaggctgtgacccacccaccactttcctggttccat

SEQ ID NO: 711135 - DNA, 1941 bp, Homo sapiens
ccagcagtggctggaacatgaagtaaggggcagagagtggtgagagctcaggctgctgagatggatggaggtcaggccagccttgtaaaaccttgtatgctattgaagaaatgagatttatcctgtagtataatggatgacttggtggggtttgaaagaaacacatgttggggccagatctgggttttgacaagttcactctgaaaaagacacagcccatctctaggcacaaccccagatacaaggacgccagttctgaagcaggcaaggtaagagaagctgtcacccgcactaaggtggtgccagtggtgatggagggaagaaacaaatttgtttcatatctctaagaacaaatcatgatgggggattgagtggatttgaggaatggagaagagagagaacaattacktcagctagagctagactggaaatgaggggcacgcctgtccatgttgatcttttgtattaaaaggtctgagatgattccaaatatgaagtgcctttgctcatattcttagagtcttgatcatttgcttcctgctgaggcctggagaaagttgcctgggcagcctgggacgaggtctgaagttggacctgcatgctaaatagtcaacaactcaacttgggatgcagaaaagccactgagtatgatgtaagacctggtcccaatttccacttgaaccatgtcctggcattgctaccttaaactagctttgcaagttttaatgtcctcatctgccgaactggagctagcctctgctctgaagcacacgtgtgagggtcatctgcattcagaatttctctctccgtgttgaccaggattgatgcagctgatctgtttaccgccacgtgactctcctctgtggaccagagctcccagttcctgcttgtctgagagggagatgggataggagccaaactcagggcagcacccagaagagtcacatttgggtttcctaagcttggcagactattggttcacaatcaatccagactttcttgaaaacaaaggcccctttgcccccaaccagaagtaaataacaggttgtggcagaaattctctctccttggctgatggttctatcatctcaaatttgtatccattatctcctaggagagcttgctaaaggctgagccatatggggcctacgatgtcctcggtaagatttctaaatgaatctttaatgccaggagaacctggagtgacctgttgtttctacaacatgtaagcactcctctctaatgaagttgaacatttccctttcgggcttgctaaattgtggaaaataaatatgaaagagcttttaagatgcctcctaatcctagggtgcacaaccgcccttttgtttaccttaatgtaataggatcattatctaggtgccccatttggatgaagccttgaaaaacatactaacctgttgactttgttaatagtaatttaggaaaacctcttgggctccaaacccagctttttacagccaagtgtacccttgttttctatgttgactgtcattgcagatttgtgtaaacatagctgaatggtgactatgctgctttttggggccagcagtgtttgttggtggagattgttttttatctgcagggtctgtaaaaggtggagttttgggtgtctgttgaccttgatttgcaaaagggaaggacttacctctatattttatggtccaataacagactgcagtgctcaattacatggggggattaatagcgggttaattgatatccctttccaagtgtgtgttgctggtgaaacagaataatcagtggctctccaccccaactctgacagtctcactccccagagcccccacaaccgccaaaagggagttctgtgcctcttttctcactgacctgcggcctgcctacatctgcccaattagagccatgaaggctgtgacccacccaccactttcctggttccat

SEQ ID NO: 711136 - DNA, 1028 bp, Homo sapiens
gagttctaattactctgtctccacactaaacattggcgttgtcaatcttttaaatgttagccattctgctggacatatagtgatacctcaagtggttttaatctgcatttccatataactaatgatattgagcacattttcgtctgcatgttacccacatgaatctttgtgtgtgtgcatgaagtgcacgtttaattgcatgttcttttgcccacctttttcctaattatttttaggggytcttgatataaatcctgagttcaatatatgttttataaaataacttcttccagtctgtggtttgccgtttttcttgataatgtctttgaataaatacaagcttttatgttcaattatcaattgtttattttatggttagtgcttttttatgtcctgtcaaacaatatttggttaccataagttagtattctcattttggagattaaaaagacagtatttatttattacttattttttatagagactggatctcactatgttgccctggctggtcttgaactcctgtgttcaagcgatcctcctgctttggcttcccaaagtgcttgtgttacaggcatgagccaccatgacaggccaaaaaagacagtatttaaagaggaggaaatgactcaaaattacaaagcaactgatagtgctagaacaagaacccacagcctctgtagccccatgcttctttcatgggaatccacataaagtgcttcccttctagcagaggagctggagaaacagcaacaagcctctttctcttcctacctacacagataaaagcaatcagctttgagaaaatattgttccacatgtattgagagccttgaaaatatttttgctctttgacacaattgtccccttttcatgaatctgaaacttagacaaagttttatataggcagatattgattacaatgctttttaagtgcaaaagaaaaaaaagaatatcactaagtattcagcaacaatggctaatcaagttgtggcacatctataacattaaatagaatagctgtgtaa

SEQ ID NO: 711137 - DNA, 1028 bp, Homo sapiens
gagttctaattactctgtctccacactaaacattggcgttgtcaatcttttaaatgttagccattctgctggacatatagtgatacctcaagtggttttaatctgcatttccatataactaatgatattgagcacattttcgtctgcatgttacccacatgaatctttgtgtgtgtgcatgaagtgcacgtttaattgcatgttcttttgcccacctttttcctaattatttttaggggctcttgatataaatcctgagttcaatatatgttttataaaataacttcttccagtctgtggtttgccgtttttcttgataatgtctttgaataaatacaagcttttatgttcaattatcaattgtttattttatggttagtgcttttttatgtcctgtcaaacaatatttggttaccataagttagtattctcattttggagattaaaaagacagtatttatttattacttattttttatagagactggatctcactatgttgccctggctggtcttgaactcctgtgttcaagcgatcctcctgctttggcttcccaaagtgcttgtgttacaggcatgagccrccatgacaggccaaaaaagacagtatttaaagaggaggaaatgactcaaaattacaaagcaactgatagtgctagaacaagaacccacagcctctgtagccccatgcttctttcatgggaatccacataaagtgcttcccttctagcagaggagctggagaaacagcaacaagcctctttctcttcctacctacacagataaaagcaatcagctttgagaaaatattgttccacatgtattgagagccttgaaaatatttttgctctttgacacaattgtccccttttcatgaatctgaaacttagacaaagttttatataggcagatattgattacaatgctttttaagtgcaaaagaaaaaaaagaatatcactaagtattcagcaacaatggctaatcaagttgtggcacatctataacattaaatagaatagctgtgtaa

SEQ ID NO: 711138 - DNA, 1028 bp, Homo sapiens
gagttctaattactctgtctccacactaaacattggcgttgtcaatcttttaaatgttagccattctgctggacatatagtgatacctcaagtggttttaatctgcatttccatataactaatgatattgagcacattttcgtctgcatgttacccacatgaatctttgtgtgtgtgcatgaagtgcacgtttaattgcatgttcttttgcccacctttttcctaattatttttaggggctcttgatataaatcctgagttcaatatatgttttataaaataacttcttccagtctgtggtttgccgtttttcttgataatgtctttgaataaatacaagcttttatgttcaattatcaattgtttattttatggttagtgcttttttatgtcctgtcaaacaatatttggttaccataagttagtattctcattttggagattaaaaagacagtatttatttattacttattttttatagagactggatctcactatgttgccctggctggtcttgaactcctgtgttcaagcgatcctcctgctttggcttcccaaagtgcttgtgttacaggcatgagccaccatgacaggccaaaaaagacagtatttaaagaggaggaaatgactcaaaattacaaagcaactgatagtgctagaacaagaacccacagcctctgtagccccatgcttctttcatgggaatccacataaagtgcttcccttctagcagaggagctggagaaacagcaacaagcctctttctcttcctacctacacagataaaagcaatcagctttgagaaaatattgytccacatgtattgagagccttgaaaatatttttgctctttgacacaattgtccccttttcatgaatctgaaacttagacaaagttttatataggcagatattgattacaatgctttttaagtgcaaaagaaaaaaaagaatatcactaagtattcagcaacaatggctaatcaagttgtggcacatctataacattaaatagaatagctgtgtaa

SEQ ID NO: 711139 - DNA, 1024 bp, Homo sapiens
ggtacattctgtatgttcagtttagtaggagtggggaggggctgaaactcaaattaacatgactctgttcttctccttcagatgcctggactccttggctttgactsctttttagccactcactggctatggacatatccttcctccttatgcttaacctctctgtgcctcagtttcctcatctacaacggtgataacaacagtaccaattttatagcatcgttgtgagaagtaagtgggtgaagcactcatacttgagtctggtccatggcatgattgatgtaagttaagactgttattaggacaagctctgtctttatacaccctgtatcaattgagggtcacttgtgtactatgtagctcttaacctattaaggaaagcctggtccccaggtactgtctccagaaaagcatcaaacctctaaccaggctctactgaaatgctgattatttaacgccaggaaagtacacctctgtctagatgcctttttatcactctagtacaagcatggaaggtattattacctggagctgaaaacatatgtttacaaagaatttttattggaggtttaccctgtgtgctgttgttaagctctatgaaagggctttggagatgaaagtgagaatgcacagaccacttcaacatgcgcataccacttcaacatgcccataccacttcaacatgcacagaccacttcatcatgcactgacaacttcaacatgtgcattccacttcaacatgcatggccatttcaacatgcacctaccacgtcaacatgcacataccacttcaacatgcacctatcacttcaacatgcatggaccatgtcagcatgcacataccacttcaacatgcatggattatgtcaacatgggcatatcacttcaacatgcacagaacacttcaacatgcgtggaccacttcaacatgcacatagcacttcaacatgcttataccacttcaacatgcatggaccacttcaacatgcacattccacttcaacgtgcatggaccacttcaaca

SEQ ID NO: 711140 - DNA, 1024 bp, Homo sapiens
ggtacattctgtatgttcagtttagtaggagtggggaggggctgaaactcaaattaacatgactctgttcttctccttcagatgcctggactccttggctttgactgctttttagccactcactggctatggacatatccttcctccttatgcttaacctctctgtgcctcagtttcctcatctacaacggtgataacaacagtaccaattttatagcatcgttgtgagaagtaagtgggtgaagcactcatacttgagtctggtccatggcatgattgatgtaagttaagactgttattaggacaagctctgtctttatacaccctgtatcaattgagggtcacttgtgtactatgtagctcttaacctattaaggaaagcctggtccccaggtactgtctccagaaaagcatcaaacctctaaccaggctctactgaaatgctgattatttaacgccaggaaagtacacctytgtctagatgcctttttatcactctagtacaagcatggaaggtattattacctggagctgaaaacatatgtttacaaagaatttttattggaggtttaccctgtgtgctgttgttaagctctatgaaagggctttggagatgaaagtgagaatgcacagaccacttcaacatgcgcataccacttcaacatgcccataccacttcaacatgcacagaccacttcatcatgcactgacaacttcaacatgtgcattccacttcaacatgcatggccatttcaacatgcacctaccacgtcaacatgcacataccacttcaacatgcacctatcacttcaacatgcatggaccatgtcagcatgcacataccacttcaacatgcatggattatgtcaacatgggcatatcacttcaacatgcacagaacacttcaacatgcgtggaccacttcaacatgcacatagcacttcaacatgcttataccacttcaacatgcatggaccacttcaacatgcacattccacttcaacgtgcatggaccacttcaaca

SEQ ID NO: 711141 - DNA, 1024 bp, Homo sapiens
ggtacattctgtatgttcagtttagtaggagtggggaggggctgaaactcaaattaacatgactctgttcttctccttcagatgcctggactccttggctttgactgctttttagccactcactggctatggacatatccttcctccttatgcttaacctctctgtgcctcagtttcctcatctacaacggtgataacaacagtaccaattttatagcatcgttgtgagaagtaagtgggtgaagcactcatacttgagtctggtccatggcatgattgatgtaagttaagactgttattaggacaagctctgtctttatacaccctgtatcaattgagggtcacttgtgtactatgtagctcttaacctattaaggaaagcctggtccccaggtactgtctccagaaaagcatcaaacctctaaccaggctctactgaaatgctgattatttaacgccaggaaagtacacctctgtctagatgcctttttatcactctagtacaagcatggaaggtattattacctggagctgaaaacatatgtttacaaagaatttttattggaggtttaccctgtgtgctgttgttaagctctatgaaagggctttggagatgaaagtgagaatgcacagaccacttcaacatgcgcataccacttcaacatgcccataccacttcaacatgcacagaccacttcatcatgcactgacaacttcaacatgtgcattccacttcaacatgcatggccatttcaacatgcacctaccacgtcaacatgcacatamcacttcaacatgcacctatcacttcaacatgcatggaccatgtcagcatgcacataccacttcaacatgcatggattatgtcaacatgggcatatcacttcaacatgcacagaacacttcaacatgcgtggaccacttcaacatgcacatagcacttcaacatgcttataccacttcaacatgcatggaccacttcaacatgcacattccacttcaacgtgcatggaccacttcaaca

SEQ ID NO: 711142 - DNA, 1024 bp, Homo sapiens
ggtacattctgtatgttcagtttagtaggagtggggaggggctgaaactcaaattaacatgactctgttcttctccttcagatgcctggactccttggctttgactgctttttagccactcactggctatggacatatccttcctccttatgcttaacctctctgtgcctcagtttcctcatctacaacggtgataacaacagtaccaattttatagcatcgttgtgagaagtaagtgggtgaagcactcatacttgagtctggtccatggcatgattgatgtaagttaagactgttattaggacaagctctgtctttatacaccctgtatcaattgagggtcacttgtgtactatgtagctcttaacctattaaggaaagcctggtccccaggtactgtctccagaaaagcatcaaacctctaaccaggctctactgaaatgctgattatttaacgccaggaaagtacacctctgtctagatgcctttttatcactctagtacaagcatggaaggtattattacctggagctgaaaacatatgtttacaaagaatttttattggaggtttaccctgtgtgctgttgttaagctctatgaaagggctttggagatgaaagtgagaatgcacagaccacttcaacatgcgcataccacttcaacatgcccataccacttcaacatgcacagaccacttcatcatgcactgacaacttcaacatgtgcattccacttcaacatgcatggccatttcaacatgcacctaccacgtcaacatgcacataccacttcaacatgcacctatcacttcaacatgcatggaccatgtcagcatgcacataccacttcaacatgcatggattatgtcaacatgggcatatcacttcaacatgcacagaacacttcaacatgcgtggaccacttcaacatgcacatagcacttcaacatgcttataccacttcaacatgcatggaccacttcaacatgcacattccacttcaacrtgcatggaccacttcaaca

SEQ ID NO: 711143 - DNA, 590 bp, Homo sapiens
cagctctgcatcagaacctacagtggacccttttgaaaacactcttggctgccctagttggttaacttcagaatgtctggaatgggaccagagatgcagttcacatgttttgtaagttctttaggcgactgaagcacagctgcttggagaaccactgaggggtggacaccttcccctggcagccacaaggcaggcagcctgcgggagctcctgagcagctgttgggcgatggtcattacatcacccatgcctttgtatttaaatgaaactcgacacatagaaccaattcaacctgaaagttactacttctgctgattcaggcacttgtttgaagcattttttttttattaaccctgtacttctwctttgcccaccattaaagtgggggaaagtaatatcccaagtagttgagttgagctgttggttgttagatttaagctggaattagtccagggttttatgtggggaggcagttgctgtcttgggatacccggagtgggagtgggtgttttctgtgattggttctgttttttatttttacttatttattttgagatggagtttcatccttattgcccaggctggagggc

SEQ ID NO: 711144 - DNA, 1028 bp, Homo sapiens
gcactttgggaggctgaggcgggtggatcacttgagctcaggagttccacactagcctgggcaacatagcgaaaccctgtctctaccaaagatacaaaaaattagccaggtgtggtgtgcctgtggtcccagctactcaggrggctgagatgggaggactgcttgagcccccaaggcagaggttacagtgagccgagatcccaccactgcactccagcctggataacagggtgagactccatcttttttaaacaaacaaacaaacaaaaaaaagccctagacagtctcaaccccaaggcccagcctgacctctcccagccccctcccgaacctcatagtacaggtccccatggatggtcagctttggcttggtctgccacttgaagaaggcatcatgcagtttctggtagtcgatgtcaattttgcccatcttaggccgaactttctctcgcatttttgacttcatggtcttctgttcttcctgtggagaatggcagcaaccaagccttaccaagtactcaccaaattcatgtagagaatccagctcccaactccaaatgagatcatgggaagcctcaattatctcaccctgaaagtcatcaaaatccttcctgctaaaacctttcaaaattacataatccatactgaacaaaacagactatacaatatcagcctcagccgtgtatatcaataactagtttttaaaccatctcatcaagagatgaatctcaacagttctctggaaagcagagacttccccatgttcttttctacctcctgaattcaaagcatttaactaaaagctttaaaattaagaagttacacaaccaccatgaatctctagccacaaagtacatctgagaaaggagtcaccaggtgagctggcaaagtgaaggcagaggggaggaagagcagaggaggaaaacaaaaggataattagacaagtaacaagtaggtggtaggtgggtttcaaaccagattcccattttgaagcacactgctatgaaggatggggacacccgggggca

SEQ ID NO: 711145 - DNA, 1028 bp, Homo sapiens
gcactttgggaggctgaggcgggtggatcacttgagctcaggagttccacactagcctgggcaacatagcgaaaccctgtctctaccaaagatacaaaaaattagccaggtgtggtgtgcctgtggtcccagctactcaggaggctgagatgggaggactgcttgagcccccaaggcagaggttacagtgagccgagatcccaccactgcactccagcctggataacagggtgagactccatcttttttaaacaaacaaacaaacaaaaaaaagccctagacagtctcaaccccaaggcccagcctgacctctcccagccccctcccgaacctcatagtacaggtccccatggatggtcagctttggcttggtctgccacttgaagaaggcatcatgcagtttctggtagtcgatgtcaattttgcccatcttaggccgaactttctctcgcatttttgacttcatggtcttctgttcttcctgtggagaatggcagcaamcaagccttaccaagtactcaccaaattcatgtagagaatccagctcccaactccaaatgagatcatgggaagcctcaattatctcaccctgaaagtcatcaaaatccttcctgctaaaacctttcaaaattacataatccatactgaacaaaacagactatacaatatcagcctcagccgtgtatatcaataactagtttttaaaccatctcatcaagagatgaatctcaacagttctctggaaagcagagacttccccatgttcttttctacctcctgaattcaaagcatttaactaaaagctttaaaattaagaagttacacaaccaccatgaatctctagccacaaagtacatctgagaaaggagtcaccaggtgagctggcaaagtgaaggcagaggggaggaagagcagaggaggaaaacaaaaggataattagacaagtaacaagtaggtggtaggtgggtttcaaaccagattcccattttgaagcacactgctatgaaggatggggacacccgggggca

SEQ ID NO: 711146 - DNA, 1028 bp, Homo sapiens
gcactttgggaggctgaggcgggtggatcacttgagctcaggagttccacactagcctgggcaacatagcgaaaccctgtctctaccaaagatacaaaaaattagccaggtgtggtgtgcctgtggtcccagctactcaggaggctgagatgggaggactgcttgagcccccaaggcagaggttacagtgagccgagatcccaccactgcactccagcctggataacagggtgagactccatcttttttaaacaaacaaacaaacaaaaaaaagccctagacagtctcaaccccaaggcccagcctgacctctcccagccccctcccgaacctcatagtacaggtccccatggatggtcagctttggcttggtctgccacttgaagaaggcatcatgcagtttctggtagtcgatgtcaattttgcccatcttaggccgaactttctctcgcatttttgacttcatggtcttctgttcttcctgtggagaatggcagcaaccaagccttamcaagtactcaccaaattcatgtagagaatccagctcccaactccaaatgagatcatgggaagcctcaattatctcaccctgaaagtcatcaaaatccttcctgctaaaacctttcaaaattacataatccatactgaacaaaacagactatacaatatcagcctcagccgtgtatatcaataactagtttttaaaccatctcatcaagagatgaatctcaacagttctctggaaagcagagacttccccatgttcttttctacctcctgaattcaaagcatttaactaaaagctttaaaattaagaagttacacaaccaccatgaatctctagccacaaagtacatctgagaaaggagtcaccaggtgagctggcaaagtgaaggcagaggggaggaagagcagaggaggaaaacaaaaggataattagacaagtaacaagtaggtggtaggtgggtttcaaaccagattcccattttgaagcacactgctatgaaggatggggacacccgggggca

SEQ ID NO: 711147 - DNA, 666 bp, Homo sapiens
ggggtcctggagctcttatactctagggacttttcataacacctatatttgcttccattcagtttgccttatttcagccatgaatgagtttaattttgagccaggagcctcaagctgcaaaccatgagcacctctacaggatgctccacttcgagctgaaagatgtggatttgggagcagttttcaaggggagcttgttttctcccattctaggagactctgtgattggtgattaaagcagctgtcctcaggcaggcactgccaaatatgttggatagatgctgttcccaggtttctggaaccatgtaaagcaaagcctgggtaccaaatcataggagaatcagtttaaatgggaaacatgcatttttgtcatcactattcaatgcaatacacagcagtaaaaactgcacttttgctgaaagcagggtgaaacttgaaaagtcatattccttccagatatgcccctgcagagcataaaaccaggttgaaagttggctagctaatcattatcagaaggatgatttaaatcaagatacatgggccaatatttcttgctgttaatgaaaaaagatgatggtgattttctaacaaaaraggtttaaggagtaaccctaaaagggccaaaaaaaaccataataataagtcatctctacaatgtataactaa

SEQ ID NO: 711148 - DNA, 639 bp, Homo sapiens
tctcctttctagcttttataatagtttcctttttgtctctatttttgtttgtgattttctactttcattggtcagatttaccggaagtttgtctgttgtattttttcatcaaaattttcttcatatatttataaaaggtactttaaaaaattcattaatttccgtttttatctttattatttttctgtctgtattatttaggaattttattcatttgtttgtttgcctgattgctgtttacatctttcaacttgagttggattataatattttcttttaaaaatgttaataataaaagttaaaattatatatttgccttttagggcaattattagtttattcaacagtcttactgaatgttggctgggggccaggcaatatttcaggtgctggggatagaacagtgaacaaaacagacaaaagtccctagcttcatggagcttatattctagtaggagatggtgaaaattaagttaaagatgtaatatattatgtagtatatgagaaagtgataaattctaggaaaataayaacagcagaaatgggagataaggaattctggagagtagaatttgtaacataattaatgctataattttatttttgtctaaatagtatgaatttgcattttttgcttct

SEQ ID NO: 711149 - DNA, 644 bp, Homo sapiens
gggaaagtgcagtatctgtgtgagagtgcacggtatagtccctaatggcttcccttggctgggacagggagttcccggaccccttgcacttccccaccctgctttcgctcgccctccttgggctgcaccactgtccagccagtttcaatcagatgaaccaggtaactcagttggaaatgcagaaatcacctgccttctgcgtcgatctcgctgggagctgcagacctgagctcttcctgtttgaccatcttgccagcaacccccaagtactataaaacatttcaaatgcacataaaaacagaatagtacaataatcctcacatactcatcagccagaatcaacaattattaaaactgtggcacactgcactatgtacttttttctttgttgaaatattttaaaaggcatatcctacacttaaaatcattttgcctctacacacttcaatatggattgagggacaagctattaaatgccatcaacattcttctaagaggtgtagaatgtattctccaggttcctcactttccaaattcatttatacacatcccacacatttagtgtctaaatgttgaactcaactatataaaytataaattaaacaaatcaatcgattgtgttcactctaatatctggaagaaaa

SEQ ID NO: 711150 - DNA, 611 bp, Homo sapiens
catacagagctgcttttggttccttgtctgtttcattcctccactatgcttttgacagggtagtccctcaatctaataaattcaaacacctagtctttcccccagcacatttctttttctttttttctctttttcttttttaagactgagtctcactctgttgcccaggctggagtgcagtggcgtgatctmggctcactacaatttccaaacccggggttcaagcaattctcctgcctcagcctcccaaatagctgggattacaggcgtgcgccaccatgcccagctaacttttatatttttagtagagacagggtctcaacatgttggccaggctggtctcaaactcctgacctcaagtgatccactcaccttggcctcccaaagtgctaggattacaggtgtgagccattgcacccagcctccctccagtaccttcttaaagacatttctgcaatgacctgtgttgtccattaaagtagccactagctgcatgtggctactgcgtactttaaatgtggctagtacaactgaggaactgaatttttaatttatttgaatgaattgaaatttaaatacccacatatggctagtggttactctactggaca

SEQ ID NO: 711151 - DNA, 990 bp, Homo sapiens
tctcacatactgtatatttcacttattagttatatttattgtctgtctcctctatcagaatataagctccttgagggcaaggatctttgtcttattctctgatgcatcttaagcacctggcacatagtaggcgctcaataaaagtaactggatgaatgaatacatgaacacattaggtatactgtacagcatactgttcaaggaaatgctatataactgtatctttttgaaaatgttacctgttgccctacaagataacttatccaagttagtgacaaattatttttcttttctcttttatctgcttagtagttcagacattctcatttttagacatttctacwagtggtctgaggctatgggatacacacgtatatatatctattcatttaaacatattctgtacaaaatggtgtcaggactatgttctaagacaccattattataagcagagaccattttgttagcacatggagattaggatctatattttagaccctaaggagctgcagattttaaggaagtaattatctttaaataaggtatttttgatcaataaagagtagaaacgctatagtattattttccactttctggcttataggacatgacagttattataatactagttttcatttttatttctttattgttattttatttatttatttatttatttatttatttatttatttatttatttttgagacagagtcttgctctgtcgcccaggctggagtgcagtggcatgatctcggctcactgcaagctccgcatcccgggttcacgccattctcctgcctcagcctcccgagtagctggaactacaggcgcccgccaccacgcccggctaattttttgtatttttagtagagatggggtttcaccgtgttagccaggatggtctcggtctcccaaagtgctgtaattacaggcctgagccactgcgcccagcctctttattgttatttttaaatataatattaaaaa

SEQ ID NO: 711152 - DNA, 2411 bp, Homo sapiens
ggagtgcaatggcatgatctcagctcactgcaacctccacctcttgggttcaagcgattctcctgcctcagcctatggagtagctgggattataggcacccatcatcatgcctggcttacttttgtatttttgtagagagggggtttcaccatgttggccaggctggtctcaaactcctgacctcaagtgatctgcccgcctcggcctcctaaagtgctgggattacaggcgtgagccaccacacccgccactatcaatcaatggactcctacacttccactcagagcacttcctcctgctgccctgtgccttactgacctactacaccactagcatctcttctgccctctacaaggagttccctgaattggtctctgtctccagcttaccgcagaataaatccagcgaaaatcatattcaagtcaacacactgttagaagaaaagaatgaccattcctgtgccaaaagaacctgatgatgacataagggtgacggcacagtccaaaggatactgagtgatgatgttcatgaggaggtagaaccacatgatgggcagggtcactccgatgacgggaatttcatataactctgtagaggttacaagaggatatagccatattgctttttcacagctgaatttttcatcttttgaacagggtaatacagactgaacataataggaacagcaacattgtcttccttgcaaatagaattggatcacgcatcactttacttgccttgactccagkctatagcagccactaaagtcattaaattggtttcttaaaacaaataatagttttaatttttaaggaagtgttttaccatttgcctgaatagtacctcactttacaaagaaagactgtgaagcacagaaaagttgaaaatgataaaatgatatagacagccttaacaactcaacacaagaggaaaggcggctagcaactactgtttggaagtatgttcaatcacactagtaattacagaattccaaagtaaataagactgtaccattttatagctacaaaattagcaattcaaaacttattaatttatttttgagacagagtctcactctgtcatccaggctggagtgcagtggcatgatctcagcttactgcaacctctgcctcccaggttcaagtggttcttgtgcctcagcctcccaagtagctgggactacaggcacacaccaccacacctggctcatttttgtatttttagtagagacggggtttcgccatgttggccaggctggtcttgaactcctgacttcaagtgattcgcctgccttggcctcccaaaatgctgggactacaggcttgagccactgcgcctagccaattcaaaatgtataaataatatcttaatctggcaagttggtaatggaactggcagccacaggttggtggcagtataacttggcgtcattctttaaaaaaatcaatttcataatccttattaagggtctataaaagtattcctacccatccttcagaattaatcctagtttaattcaaaggaagaaaaaggttctgcactcattaaagtactatacataataaagaataactctgaatcaaaatcaaatgcccaatgatggtgcaatggctacataaacaaaggcactttcattagaggaggcattgtacatttgataaaaacaaaaatcatagagattttatagccacataaaaaaaactcagaaaaaaagtaaaaaacaaatataaaattatatccacacaaggattacagctatgtaagaatctctgtaaacagacatggtctagaagaaaatcaataaaaataaaattggcagatgtccaggttgatggaactgtgaataactttaaatatattcttacattagttttaggccaggagtagtggctcacgcctgtaatcctagcactttgggaggccaaggcaggaggatcccttgggcccaggagctcgagaccaatctaccattctgggcaacagggaggtcctgtctctattaaaagacacatacacacacacactctcactcttatgttagctttatataatgacacttgcacagtaaatttgtgggaggaaataagatgaaagagaatacagacatagaaatcctcaatggctcagtttttttgtattactaaatttttttcaggttttgaattatacagcataatttaagaaattctgatacaatgatgctgagatctggtaagaaatattaattttctttcacgaataaaatgtctcatatatacatacacacgcatacacataaagactaatttttgaaacttagttctggatcagtgggcaatgccaataatctggtattctattatctttgatatccttagcaagtattgaaatgaaaaggaagttaacaaacgtgattactttttaataactt

SEQ ID NO: 711153 - DNA, 620 bp, Homo sapiens
gggttcacaactctagttaatgcttcttacgagtggtgtgatcttgggcgggactctggagcttccatcttctcatctgtaaaatggggatggtaatattagggtcactgtgggatcaaatgagatcaggtggggatggctcccagtgcagcctgacacgtggtaggaagttagttctcttggaaactagaataacatgccaccaccacctggtggcaagatttggaattgcaaacaaaagtctccagaagaaagcagttttaagatggcttgccttctacattcaacttgattaaataacagcaagtaggccgggcgcggtggctcatgcctgtaatcccagcactttgggaggctgaggcgggcggatcaccaggtcagaagttcgagmccagcctggccaatatagtgaaaccccgtctctactaaaaatacaaaaattagccgggcgtggtggcgggtgcctgtagtcccagctactcgggaggcagaggcagaagaatcgcttgaacccaggaggcggaggttgcagtgagcctagatcacaccactgcactccagcctaggcaacagagcaagacgccatctcaaaacaaaaaacaaaacaaaacaaaacaaaa

SEQ ID NO: 711154 - DNA, 620 bp, Homo sapiens
gggttcacaactctagttaatgcttcttacgagtggtgtgatcttgggcgggactctggagcttccatcttctcatctgtaaaatggggatggtaatattagggtcactgtgggatcaaatgagatcaggtggggatggctcccagtgcagcctgacacgtggtaggaagttagttctcttggaaactagaataacatgccaccaccacctggtggcaagatttggaattgcaaacaaaagtctccagaagaaagcagttttaagatggcttgccttctacattcaacttgattaaataacagcaagtaggccgggcgcggtggctcatgcctgtaatcccagcactttgggaggctgaggcgggcggatcaccaggtcagaagttcgagcccagcctggccaatatagtgaaaccccgtctctactaaaaatacaaaaattagccggrcgtggtggcgggtgcctgtagtcccagctactcgggaggcagaggcagaagaatcgcttgaacccaggaggcggaggttgcagtgagcctagatcacaccactgcactccagcctaggcaacagagcaagacgccatctcaaaacaaaaaacaaaacaaaacaaaacaaaa

SEQ ID NO: 711155 - DNA, 627 bp, Homo sapiens
tggatcacaagatcaagatattgagaccatcctggctaacacgatgaaaccccatctctactaaaaaatacaaatatatatatatatatatatcagctgggcatggtggcaagtgcctgtagtcccagctatccggaaggctgaggcgggaaaatggcgtgaacccaggaggtggagcttgcagtgagccgagatcgcaccactgcactccagcctgggcgacagagcaagactccatatcgaaataaataaataaattaaattaaattaaaaatacacaagttaattgggcagggtgtttcatctgcatagggtacaaaaaactagttagggctgggtgtcgagttggataaggcatgaattcttgttagttccaccccacccctctagtgtgcatgtgggtcctaagcctgagttactccatattctttcatttcccttactgcacacgtgtcaggagatggaattttccaccgccgacgtgtctggttctacgtaacatttttatctatacagctgcaggcctgtcttaggaaagcccccttgtgcaagttcccttatctgagtatgcccaaaaaggaaaggaatgtgctcaakgaacccatcgtatataactggagctagctg

SEQ ID NO: 711156 - DNA, 590 bp, Homo sapiens
ccataaatcatggttattagttttttcaatgtagtgaagattctagcaaataccacccaaggtggtggttagagaagggaagatatctgggagggaactgggagaacaggatgagagggatgccaggagccaggcctgygggtctatctttaattattccatttcatttccaaagaggagcatccacaaggcattcattgacaaacccttgtctttgtagacatatgttatgggttcaatgattagattaaattatttaacaggcaagctaggtttcttcttgcaggaaacattgttcctttcttttctattcttttcttattttcccctttacgaagatttacccttttctctgctggacaccattaaacttcttgttctcttcccggagagcttgagaaaatgtgcttttcaaaagcccataagagcaaattggtgaaatggcactgaaagtgaacgtgttacacaactaataagccctgttactctccatccaccccccaggcaggaaggtcagagcaaagagccttccacaggaggcccccctgccccaccaccccgtgaatggtgtgaagcgtctgcttagcact

SEQ ID NO: 711157 - DNA, 2416 bp, Homo sapiens
tgaaggacaattaaaagggaacaacctagcactttgtcaagtcttctttggtccagtccctagtttcttctccagtcgcaccaaagaacttgaccaagtgctagattgttctcttttaattataagagtaatagatatcaaggcactatcaccattgccctgggtgtctctgctgcaaagtaaaacaattcatttatttagtaaatatttgttaagtacctactatgtgtcaagcaggctctaagcactgagagtacagcagtgaaagaaaaaaaaaacaggcctaaattcttgtgcttaaggaacttaaattctagtggattcctacacaaaacttaggaaaggattatatcacaccatgtttgtcaacatatttttttattactatcccctacccccaacacacatacgaggagcccttgagacattttttatctgattattccctccatgaaattttaataccagagatatactttgtatgtgtttaggtattatatgtgtttctgtgtttatacgaaaaacaagtaagagatttggccctccaagaatcaatttttactcccttgaaggcaatatcacttgcatgaagaaggcatgatatacaagtatgggcttatgataaaaaaagaaatttctatttggtaatagctgaccagagcttatctatgaggccacttgactaatattaattctgtatatttgtcactgccttgattaaaaatgataaattagtaatgtttgtattagctccctgttattgctcagtttgctttcctgacccatttccctattctatgtatgtctatttgtctcagtatctcaaagcrtcccatcatccttgcttccttagtcacaacctttttactcttagcactatctacctgaagacctactttcaaattattctttattaggataagtttataaagtttagtgattctataaataattttatgtcaccagtctaaatctatgccctaacatcttcatttattttatttagtttacattattattaatgaaaataacatgtaaacaacaagactgtgggtggtttaggtgacaaagaaaagttcaggactatggatagttcatttgtatgcaaatatgttagtcactgtgcatatttcagtgaaaaattagtaaatgacttcataaaatgcaagataattgggaaacaccaaaacgggtgaattctaagttgttttgcaaactttatatagatgtgttgagcaaatcatattttaggctgccagtttttagtcctgtaaaatgcattaaaaagtgctggccatatatcttggattttgttttctctttgtagaatttaattccagatttgctttgatctcattcttgtatttacatcttgctcctttgtttaaactgtcttcttttatttacaatatgcagagagggaagcaggtttaagtccaattaccataatttctgcttgacttatgtgcacttaagcagtttaaatcttgctttggtgacaggagacttttccttcaggattccacaataaatccttccaaactgatgaataattggattcacagtcagtcccttcagtgcacaaaatacttaggttcctgggtctcactaagtttgaggagcaggccttgcatctggaacacaagtcaacagtagaaacatcccttggctgtgccaagtccctaacacatcaaactgctatgcacaattccctttctctctgaaaatatcatgaattctcaactgctgaatcaagtgcaaattccttagcttgaaatttcttaaggttcttcatgaagtggctccccacttttactgactcctgttgtattaccctcagatcaaatgtttggcttcggtggggtctttctctgttccatctccaagcgcttgcttgtactgtgcaccctacttggtttactattttgcatctctctacccaaatcctactcatcattcaagggcaagctcacatttaaatctcccttggccacttcagctcctgtccatctaacccttctctaactcttatggaagtttattgatattcatttattttcaccaaaatcctcacacaattttgttttattattactagaatgttcaatgtgagtctgtaaaggtaagcagtgccattatgcaaacttgaatccaaaaagtcacctgtcatagttttaccatgtatgcacaattctttggggctcttgtcttcaaaaggtgaacataattctcatccccttgagtatagctgaattaatgactcatttctcatgaggaggacatggtaaaagtcagtgtatgtgacttctgaggctagtttataaaaggttactgcaagatctaacttgctctgtctcttggatcactgattctggaaaaaaacagctgccattttataaggacactcaagcagccc

SEQ ID NO: 711158 - DNA, 1777 bp, Homo sapiens
gaataatacacacatggggaccagacattcacagaaaatatagcccaatttataactagcagcggcattcagttactccaccctcaggagaagcaggatagagttaagtaagaaaggaatagctgggcaccttcctactggttttcacaacagttccatggccctcacgttgctgctgcttgatcatttccacagggacactgtatttcccttttttccagtaaatctcccacccaaagcggctgattatttctagttctttggagaagaagagatctgaatcatcgggtctgatctcattctatggtgttttggtcagaactttgttgggaaaatatttgtttacctcaaaagacaaattctatggtgaagctcattggttcctcaccccctgaatgtttcatttttaccaagtgctcctgtatcacttcatcatttgggggatcaactttctacgaatctttacactttgaaaagccatgaaccaaaaagcacgcctgcctcccatttgcctgttcttttccttctgtttcctgcggagctccctcctgaacccctatctacctggccattcatctgcaggctcgcaaatggcatcgatgatctcagatctcctatcaaatataggttggtagagggcggcaagttttctcaaaaccatagatgtcattagagaattgggcttcgactcactgggacacattcagccttaagtttcaggagggccccaacacctgcttcaccacccgaggccccgaccccccttcaccacccgcttcaccagctgtgcccgcaccgcagccctgcccagagcccttggacacatggatccccgcttccccgctgctgccgctagcccccttaccctcgggggccacggcctcctctgaggtcggttcctctgcggccggttcctctgtggcctcctctgtgagcttctcctctgcggcctcctctgggggtttctcatctgcggcctcctccgcgggctccctggccatctcggccaggtcagctggcactgcaggctctgggaccgacgcggcctcctggaccgacgcagcctcctggatcaggccgaggccctcgccttcyggggctgcagcccctgcacccagcctctgggacagcagcagcaggggagggttgtcccagaggttgggcacagcagcgtggggccccaccatcaggcggctgaggtgacggttcgctatctggatgtggtcgttgtgatagaggcggcggagaagggagtggaccaggtacaggaacacgaagccaatgcccgccgccgggtaccgacgggtggccaccgccaagtcgaagttggccgcctcgttcccctcttcctcctcctcctcttcctccgtcgcgggcccgatatctgagtcctcctcggcgctcccgccctgggggactgcggccaggcctgccgcctgctcaccctcctcctccccgaggccttccacgggccctgcgactccgaccacctcggccgcaggcaccatgtcgctgctgtcggggccggagtcgccgccctcctggttaccagctccggccgcctcggcctgtgctccctcctggcttaccggggcctcctggtccccttgggtcgggtgtcggtcccctgtggcagacatgacaccagcagcgcctcaactggggtggcgagcgggctgaggcgaccacggtgaagacggtgaccactgaggtggctacggccgaggggaggcgaggagctggccgctgagggaataagagtctttctctttattga

SEQ ID NO: 711159 - DNA, 651 bp, Homo sapiens
ccttctaggcacatctctccaaaaggcagactaatcatatacttgaatcactggcctagcggggaccgataagaaaatgtgagagagactcatatgcatgtatctacacacgcacacacatgcactgacaagctttgatgatctcaatcaacattttgtgaaaaaacatgtagaaataaggggccaggcgcrgtggctcacgtctataatcccagcactttgggaggccgaagcgggtggatcacctgaggtcaggagttcgagaccagcctggccaaaatgataaaaccccatctctactaaaaatacaaaaaattagccaggtgtggtggcgggcacctgtaatcctagctactcgggaggctgaggcaggagaatcgattgaacctgggaggcggaggttgcggtgagccgagatcacgccattgcattccagtctgtgcaacaagagcaaaactctaaaaaataaaaataaaaaattttagaaatataggacagctaaagttaaaaatactgacaattccaagtactggaaaggatatggagaaatggaatcactcatatattgctggtagcaatgtaaaatagtactgccactctaggaaacagtttctttagaaaactaaacattcaattatcatttacccagca

SEQ ID NO: 711160 - DNA, 608 bp, Homo sapiens
tttgtgccaccttttgaacttcttttgaatctatattttgaaataaaagtttaaaatgatctagaaaaattacttgaattttagtacgcatgtaaatgttgtrtcattttgaaaattaagatgttatgttgagtaacatgagatgggtgcatgggtagagtgtactattttcagtatttagggcctctaaaggactaaatctggccctgcctgccctcctcagaagtattttaccctctggccctttctctctcaattaaagccaatcttctgtgtatcttctgtcgtgatgtgtgcaggcacttggcctcaggaaaggtagctgaggagctctgtataccagctgggatggaaaagtctgtcattcagtatggggaggtctggcaagtggtaatcaggagcctcaacaggcatgatggcagagctgggtcaggggttggggcagggattctaattccaacagtaggcagaaacctagagagtgaagcaatgtcaggaaaatctggcagccagtaaacagcaagaacctgaaaacagagctagatttatggctcacagtcctaggcctaggcaaggaaagtcaagagtaaggctgggcagagatacac

SEQ ID NO: 711161 - DNA, 1648 bp, Homo sapiens
tggcaaaataatattttgtgcattaaaaattgagcactcttttgggttttttttctcatccaagttgggcaaaaataaatagatgaaaataaaaaaacttacttcaacttcctgtcctagatctggatctcttgaaagaatcatatatataaaagtagatgcaggaatgttttcaggaacagacactgaaacacctatacaattacacaatcatgaacaataatttaaattcaaatgtctttctttcacttcttgcttcatgctggtaccrtaaattaccatgctgtattttccttaaaatgatcttcttcatatttgtttcagagaaacaaaaaacccctacaaatacttactcccattaacatcaacatttaaaagagccatcataattcaggttgatattcctacctttaaactttgggctactgtatagaatgggatataattgctcaaagtcaatggccactaagatatgatttctacttttattcttttatattaggatattgaagctttttgtctcctttcacaatcatgtacaaaaaagtagagcacagcctgtgaagacaggaagaaatgcacttgaattcctgctccatcactattctcacctgtacaatggggataaagtacttctccaatcttagagtagttttagagattaaatagaatactatacataacacatctctcaaatgctcaacaaatgctacttgcctttttccaaccatcgcccctcatcctccttccaatgctaccaactatgattctgtgtaatcccaaaatcaaataacataaatgcacatttagactactgatagtttctttacctgttatgtgattctacgaatacttttttttaaaagaaaaaaggcttaatgtttactgtgcagctgaatcttggatatcaaatccagtgaatattgtatcacaatctagactgggtagtcctgtaagggtctctttacaggactttctaaggatgttatagaacaactttggtgcgactaggacttgcttattttgaacctttgtttcaaactgaacatgtgtaggcagattctctaatttagtgatttgttctggttaattatagcaactggataattaaacccagtaaatgaattgaatatgtgtgtgtcaaatcagcagcttgaaaatcatgtcaatgtctttggtaattcttggtcacagagacccacagagttgccctactttaaacagaaagtgacttcttgtcctcgcttctcttatgtcccaaggcccacagcccagatgatggaagaggaagacatcccgatcttggtactgctctagcagtttatgctggttcagccaagcttgtagtagaaatcgggtcaaaatgaccttcttgagatccacgtgtatctttttaaagtttactataattttggaagactgaaaggaaattacaaagaacatcaattaaattgtttcaaagtggtccaaaagatcatatcttcacaaacaccaaacccattcgttggtaccttgccaaggctcacctaggagacttttcttggttaaatttaatttctgtgaacaaatttctttaatataaacttctatttttagatatgtttattattatgtatatcagaagatatgttctgattcaaagtaataa

SEQ ID NO: 711162 - DNA, 1572 bp, Homo sapiens
ttaaatctttctcttaattaattgttacttaacatgcagtatcacttgagagatgaaaaaggtagttcagggcaatatttcaataatttttgcattgtttataatatctagcattaaattctacaaaaaagtaaaatcaataagttcatgcttattgaagacatgaaggcagcagaaaatttttccaaaaagttgatggcaactctattacaaacacagttaggaaagtgattcctacaaataaaggataaactaagctccaaattaccttaagttgttcacataatataacttaaaatgaatttggggaatcaaacaatgaattactctccttagtcatctgtagagatacaacttagtgatataaggaaagtacttgaaaactatttttctttttctctttcataatctaagaagtatttgattcctcttagattgtagtaatacatttcattactacattttgaagtatagaaaaacatctaacattcattgcgttcattatctgcaaacagttttgaatgctacaactgtacctccagagtatgaaagtaaaatattttaaattaaatactttaagcttaaggtctacctttctctttatttaaaattaatgtaattattaaaaaagcaatgtagcaactatgaataatcttcagcaaaggaaaaaaaagatacaccaagatcttttaccatattacaatgttggtaacttctaaatttgctttccagtattttctaatacatagtttactttttatctgtgtataccttaatcattgatatatagtcatatattttaacaacatcaaaaaaaaattctgagtagctacataatctttattatcattatttataacacagtcatccttggtatccatgggttttattttcatagacttaaccaaccatgggggacaaaaatattccctaaatatggtataacaactacttacatagcatttatactatattaggtattataagtaatacagagatgatttaaagtatacaagaggatgtrcataggttatatgaaaataaaactaccggtgtggtggctcacacctctaatcccagcactttgggaggccgaggtgggcggattggaacatttgaggtcagtagttcgagaccagcctggccaacatggtgaaaccccatctctactaaaaatacaaaaattagcctggtgtggtggcacacacctgtagtcccagctactccacttgggaggctgaggcaattgcttgaacccaagaggtggaggttgcagtgagccaagatcgcgtcactgcactccagcctgggcgacagagtgagaatctgtctcaaataaataaataaataaataaatgaaaagaaaaaaataatacaccattataaaagattcttgagcatccatagcttttggtattcaggggagtcctggaatgcatgccccacagataccaagggccgactgtatatgtgaaaagtttattttaaccattctcctatgtatacactttgaaataaatatgctcactcaaattgaggcttctcatcatttatgtttctaatcaagataat

SEQ ID NO: 711163 - DNA, 2733 bp, Homo sapiens
cttggcactctccctccaccamatttgtccactcattcttctaagtattcttatatttaatttgctctgcctgaaatgtctttcttttccagccaataggtagtaactatttgctctcctttactcatcaggttttatgtttaaaacccttcttcgtatccggtagctcttggtacattcctttatgagaccccataggatttatttctctttctttcatttaaacttccataaagagaagaattttttttctgaatctccagctcttaccagatcatttggtctattaataaatgtttacttaatgaatgcttggaggagcaaatgaataacaatctttaaaaggctaaaataataaatttacagtgccttttcaatgggagcaggttagaatattttgctgtgcttcagaagccttgctcatttaaccttaggcatcagagtctcaagttttagggaaaacgaactcttatacattttgtagttagaataaattttaaaatatttatatgaaaaaagattatattttagaaatataaaacaaattaaataataattattttacatttgatattttctttaccatttgttaacttacattacagtgaatgtaggcatctttcttacatattttatttttgatatatacacacatatccttttgagcttcctgtacaacacatcttatgtgtagtaatgtctaaaatattaatgctttatttaggtttgaaaactccccaggaagatttgacatttaagattagattcagagtgtattatcatgaacattgacagctgagagtgtgactgaagggtctttgtccttacaaactaaaagcctatttatagtgcttaatgaaacactagaaagccattttccttacatgtttctatatacatcattctctacaaaaacttgattggttgtgagtatttttatttaacaaaatttaagacgttggtgaagatgtagttgttttatagatcccattttctcaatacgaagcaaatttcttgttaattttttattgattataacaaattatgaatgtgaaatgtacatggcttgcactcgaaaaatgcttcagatattgcccatctttttattaaaatgagattaaatcaagatggtctaaaatattataagtttacttttctttgttcttaatttaagacaagttagaactttcaaatgaaccactttacatagatttatattcatgcccatctgtctgcatataataattaagaaaaaatattaaaatgattcattttccctactttaaaattattttaaaaggcaaacacttcatttactttcatttctctctctctttttttttttttttttttttttttgagacagggtctttctctgttacccaggcacaagtgcagtggcatgattatagctcattgcctcaaaatcctgggcacagcctcccaggtaactaggactggaggcatggaccaccacatcaagctatttttttttttttatttttttagagatggggtcttgctgtgttgcccaggcttgtctcaaacctttgacttcaagtaatccttccgccgcagcttccaaaagcactaagataacaggctgagccacctcactagcctcatttctctttttattaaactactcaagttgcttcttacaaaaagacttttatattctctattattggggatttaaaaaatataccctatcatttgccttacctcttatgaatgggattcctgaagaacatgacaaataacaaataaaatgtaaactccagattccagcaatgaaattctcattattttgtatataattcacatttaacttcttattttgaaacatatgaatgagcaaagtactatttctggaggggactacatctggccattcatttagaaacctgcctaatgtgtttgaagggaaaataaaattgtgtaaattagtggaaagaaaggttatcaacaacatttttttaagtttatgttttaactttatgtatcatatgttctattctaatttacatactttttgttttgaatgacatcaaatgatgttatatacatcttctggcacttgttagcctcatgagttttatagaccatgctgacgttgttgatccccttatgtatacaaagctttggaaatatttatcaaaaaaggaaaaaatcttcactgaggaattagcattccagtgacatgagaattatgcaatgttaagattaaaataattttcttttttcatgagtaatgcatgcttatagttataaaaagaaaataaattaaaactgcatggaagtatataaagtgggaagtaaaatgaaaaatatgctgtcctcacaaaacatattttaagatgtattttcaaaagagtgtgtgtgaacagaatttatatgcacttaatcacctctggacttagtttagcaatctacgcagttgtccggaatgagatctaggtaagcagtaagggtctaggaggcttaaatgacaggaaaagatcaggattatcttctgcaagatatccaacaagcctatacttgtgagatcatgaggacatttcagtttccaggagaccaatatatcacattagctttggattgatatcagattccaggaaataataatatcaatttgacaaaacagctagtcaataaaagggcaaatatgtagttaagtgaacccagagaatggtctgactttcatcagtttctcagcagtgagcctgagca

SEQ ID NO: 711164 - DNA, 1110 bp, Homo sapiens
tatttgaggcttctagtaacagattccaaagacaacttgttcctttctgcaggatatggaaaaaggagttagagttcagatactaaccctattcattactcttgaaatcttccttctgacatggaaattctcttttagagcacagcaattgacattcaaatgaagtttgttcttttcctcaatgaaaacattacttgtttatcttattatgaaaattcatttgttttaccgttcattaatgtttgaaatggggcacagagtaggctttcctttttcccaagacaccacaccactgtaattctcaaagagaaatggtggaaccaccccaacatttctccaaaatagttttcatttcttttatagttgcttgaattccagctctatttgttatattaggaaaaacttaaaatgctatgggtgggtgcatttttctagcatttcagaaaatgcaccttttaaaaaatatttttttctcaccatttattctttacataccattgttccatttctgcctgctctttttgcacaatttacaggttgatccactctccttaggaaagaaagcattgggtattttgtctacagatcctatgtaagaagtcttactgaaatcaaataatctagataaaatttaaattcctaaaagaaagttataatatcttccacaattaataatacaaattattagccaatgaggcagatctttgaaatgtttccctacttttcctcatgagtactattttattttcattgaaactatattctgatcagccaatatcatgaaagataaagaggcttttataagaaaactgaatagaccttaacagaaaataaaacaaagtaccttatattattttaatccctaaaattattgttgataaaacacagaatgaattttgacctggcctattccttttgtttttaatctgttatttgtttcataaaaggtgaactgtgtagaacctttgcattttatgggtacatttcccctacagtagctcctagacaccctgaagaggcaaggtcagtgaytggagaattcagagacttgaattctggtcaaagcacagcctctagctatttataatacttttgtcacattattttccc

SEQ ID NO: 711165 - DNA, 1295 bp, Homo sapiens
aaaaatgattcatttacaaatcttgtgggtgtagactctttttagaataatccttttggggttgggcgcggtggctcatgcctgtaaacccagcactttggaaggtcaagctaggtggatcacctgaggtcaggagtttgagaccagcctgaccaacacggtgaaaccccctctctactaaaaatacaaaaattggccaggtgcagtggctcacgcctgtaatcctagcactttgggaggccaagatgggcaatcacctgaggtcgggagttcgagatcagcctgaccaacatggcgaaaccccgtctctactaaaaatacaaaaaaaaaaattagccaggtgtggtggcgcatgcctgtaatctgagctacttgggaggctgaggcaggagaatcgcttgaacccaagaggcggaggttgcagtgagccaagattgcaccaytgcactccagcctgggcaaaaagaactaaacttcatctcaaaaataaaaataaaaataaataaataaaaacattagctgggcatggtggtggacacctgtaatcccagctactcaggaggctgaggcacaattgtttgaatcacttgaacccgggaggcagaggttgcagtaagccgagatcacaccatggcactccagcctgggcgacagagcaagactgtctcaaaatatatatatatatatatatatatatatatatatatatatatatatatatatatatatgtgtgtgtgtgtgtgtgtgtgtgtgtgtgtgtgtgtgtgtacacacacacacacacacacacacatatatataaaaaaggaataatccttttggggttttatgtcatttgttcctttcttcctatttaggtcatttttgttatacattttttttccaaattgtcctttaatcaggacatatttttaactcagatatttgttatgcctattactttttcaagatttctctataaatttgcattttagatcagtgagggaaaaatacaccacgtagaccctcaaacaccatgggtttgaacttcgaaggtccacttatatgcaggttttttccaaccgaactcagaaaatacagtatttgagggatgtgaaactcaaacatatagaagcccaacttttcatgtacacagttccacaaggccaactgtgggacttgagtatggcagatttgggtatgagggtgattatggtttgggtcatgttaaattataatacccagctggccacggtggctcacgcctgtaatcccagcactttgggaggccaaggcaggtggatcacctgaggtc

SEQ ID NO: 711166 - DNA, 1510 bp, Homo sapiens
tttttttttttttttgagatggagtctcactctgtcacctgggctggtgtgcactggtgcaatcttggctcactgcaacctccacctcccgggttcaagtgattctcctgccacagcctcctgagtggctgggattacaggcacccacccctacgcccagctatttttttgtatttttmgtagagatgggggtttcaccatgttggccaggctggcctcaaactcctgacctcatgattctcctgccttggcctcccaaagtgctgagattataggcgtgagccaccacacccaacccattttgatatttgaatggtacccagtgaagaccctggctatcagttcaataattaaaacaatatgggggaaaaaggtaaaaataaataaaacttactaagttattcaacacatttctatttcttgagtgcttcctgcatgtcgggcactgggcccaagtgactgggataaaataatggatgaaaagcagtccagtggcctagataaggggactagagaccaatacacataactctcataagggttctgagaacagcaagtatttttatgggtttggtaggttatggcaggagtatctatccaaccttaaagtgtcatattaaggaaggatggacacggagacttgacttctaagctgagtccagaaaggggaagagctgtcatgtttggaatggcgaaggtgagacagccaagagcagaggtaagagcaggggctggcacataattcagctgatggaaatctacagtttaaaggaggggctgggggaaaagtatgttagagagatagagaggtgccagattacacggggaacagatgcatttatataattcctagggaaacaggtaggttagagaagtttcaatgatgaaaggagcattacaagaaggaaccatcaaagactaatgaaaattcattagttaaaaactgattaagcatttagaaaaataatttcttttcatatgttcagtgagtaaaacaatcacacttttagagtttgggtatatattctttcagtttatctgtttcataatttattctctatactactattgattattagagttttatggttactgtagttaattttttaattgttagaccaaagttaggagtttgattttcatggaagctccatagctttaatttctttcatggtcatagactgaactcttaacacaagacgtaaaaatacacggcttttgtcaaagtagaccttgagaaagaatgctgatagaacagtataaatcaaatgttaaatcattgatgaaaaatctcattgttaacttgaccagcaatctcatctttgtcaaggaaaggtgggtaacaaataagtagttataaaaataatcgtatcaacttataaatgggctaggtaccaaagtcacatttgtaaataagtggccttaaacagaaacaattgcccccagaagcaatgttagccttggtagtttggttccaacaacattaaacttggtacccaacatcaacctt

SEQ ID NO: 711167 - DNA, 1510 bp, Homo sapiens
tttttttttttttttgagatggagtctcactctgtcacctgggctggtgtgcactggtgcaatcttggctcactgcaacctccacctcccgggttcaagtgattctcctgccacagcctcctgagtggctgggattacaggcacccacccctacgcccagctatttttttgtatttttagtagagatgggggtttcaccatgttggccaggctggcctcaaactcctgacctcatgattctcctgccttggcctcccaaagtgctgagattataggcgtgagccaccacacccaacccattttgatatttgaatggtacccagtgaagaccctggctatcagttcaataattaaaacaatatgggggaaaaaggtaaaaataaataaaacttactaagttattcaacacatwtctatttcttgagtgcttcctgcatgtcgggcactgggcccaagtgactgggataaaataatggatgaaaagcagtccagtggcctagataaggggactagagaccaatacacataactctcataagggttctgagaacagcaagtatttttatgggtttggtaggttatggcaggagtatctatccaaccttaaagtgtcatattaaggaaggatggacacggagacttgacttctaagctgagtccagaaaggggaagagctgtcatgtttggaatggcgaaggtgagacagccaagagcagaggtaagagcaggggctggcacataattcagctgatggaaatctacagtttaaaggaggggctgggggaaaagtatgttagagagatagagaggtgccagattacacggggaacagatgcatttatataattcctagggaaacaggtaggttagagaagtttcaatgatgaaaggagcattacaagaaggaaccatcaaagactaatgaaaattcattagttaaaaactgattaagcatttagaaaaataatttcttttcatatgttcagtgagtaaaacaatcacacttttagagtttgggtatatattctttcagtttatctgtttcataatttattctctatactactattgattattagagttttatggttactgtagttaattttttaattgttagaccaaagttaggagtttgattttcatggaagctccatagctttaatttctttcatggtcatagactgaactcttaacacaagacgtaaaaatacacggcttttgtcaaagtagaccttgagaaagaatgctgatagaacagtataaatcaaatgttaaatcattgatgaaaaatctcattgttaacttgaccagcaatctcatctttgtcaaggaaaggtgggtaacaaataagtagttataaaaataatcgtatcaacttataaatgggctaggtaccaaagtcacatttgtaaataagtggccttaaacagaaacaattgcccccagaagcaatgttagccttggtagtttggttccaacaacattaaacttggtacccaacatcaacctt

SEQ ID NO: 711168 - DNA, 2178 bp, Homo sapiens
tcaaatctttgagactcacactttcaaatctttgagactcacactttaaaatctttttcagtctttcataattttaatctatacagatcacttttatcttccaattattgactatattagctttagatctccttgcatgttatggaaaatttttggtagcttcttttgagtaagtaaaaggtctgatcatctcttttaactccctttatttcttttcctctttctttgtgcttacccttccataactttcagtattgtaactatctcctttgccccaggtctcccaggcccctagttccagggtgacctaggataggctttacgtttaatgtagatgaaatctgccctctggttttgaaaccacagatccagtcactgagtgtgctacttggtaaaggtccaggtggcaagactgtgtgttaactccagagtccttaaatgtatagattaacaaaaattgtagcttcaaacaacattagccggcaacttttgtcagcttcattttgtcaggaaatcttaccccagccatggttttagcagtaagttgatgtttatcttccatctgacacaaagctcttttagtctctttattattccacacaagctgaatgaccagtctgcttccaaacccaaaacccagagcctatgttttcatccctattctctattttgtgtttctgttctgtttttacttagtgcatagtatgcctgtcatcctgtcctcaaactcttcaaggcctcatacttttaaaaatcgttttttagcctcactctgtctttgagacatggtacagcttagtgactctaaagccacatggccttaaatcctggccatttcttttttaactgtgtgaactgtaggcaacttaattaagctttctgtggctcaatttcctcattcataaaatggaggtgatcacctattccatcatagttttgggtttttttttttttttttttttggtttcctgatatatgtatatatctgtatacaaatgcttggaaccctgagtgacacatagtaattacccaattagtgttagctattactagtttttaattgtctcatttcataggtattttttaagaccatcttgaccagggtccttccataaattatttaattcttctagaatatatttagttttatattatgaggtagaatcacagtttgactcatcatatagttgtgagagtcagctgtgacattatttacaggtatgttataagtgataaagaattatgcaaatgtacgattttgtgtcttatgatcacaaaaacatttttttctgagttttagctcatttaaatttctatatttgtgaaaaaattcttttaaattacatacaatcaacattgattactttctactttctttatatttattcattcaattagtgatttaaaatcaaatacctaacatgtagcaggaactgtgctgggtgctagagattcagtgttacagaaagagctccagacctaaatggaaacttctttgagagctttccatgcaaacacatttagtaccttcccattctcagtttcagtacttgtaccagtgacatattttaaagtctcatgagactgggcacagtagctcatgcttataatcccagcacttcggcaggtcaaggtgggaggatcacatgaggccacaggtttgagaccagcctgagcaacatagcaagaccctgtctataaaaaaaatttaaaaattagctgggggtgttgacaaacacctgtagtttcaactacttgggaggctgacgtggaargatcacctgagcccaggagtttgagattacaatattgaactgcagtccaccctgggcaacagaacaagatcctatctcaaaaataagatttaaaagtaaagtaaaataaaatgaattaaaagctcatgaaataaatagtaatatgtttggcaatgatatttgaataatatataactgttatctttgaggagtttaattatttgtagttattcacatttaaagtattaaaggattataaaaatacacaaaagctttaataaatgacgtaactccccatttaatcattgtacatgtgtattatatactttaatgtaaccacagtttggcataaatttttccatgttttacattggttctataattgttgttttaatggctttataattatttatctaagatattc

SEQ ID NO: 711169 - DNA, 1347 bp, Homo sapiens
aggagaaaaaactgataaatcattataatcagtataaaattcttcttcctttttgttgtaatttgatggccttgaataaaattttgaatccttcagtagttaagtttctttatgtataaaggtgcagatgagagtactttgtcatatgaggcagtggtgtttggttgtggggaatgggagggaaacagcaatgagaattaatgtgttagccattttatatgttgtgatttacttggaatatcccataataaaaacatttttactgcttataaataaaattatactttgccaaggagctattataatatactaatttgtattccactgataaattcatcttttaatgtatggataccttcagattaaatacaggtttattaaaggcttttgttgatgacaatgtcctcaaatatagcatttaccaccatttcctgacaaataactatgtggtgaaatggatccaaatgaacaatatctaagtagataaatgttaagatactgtaaaggaaagaaacttctttttttwaaaaaaaaacaatattattgctagctagaggtgctatagatagtcatccataaaaataaatgccaggtttgaaaactacaggatatacctgtagaatatcataaaacttacaatgaaaaaaaatcctccaaacagatcttaatatgcccctcttatctgttcactctatcctgtagctgtagttttccaagtaggctactaagcggtctttcaaagatttattttaacaaatggctgctctgtctatgcacaaagaaaatgaaataaccctataattttgtgaatttttaaaggtaagctaacaaaaagattcctttcctgttcctttgattccaaagaatgtatagttgtatattattttcccttgggagctcggtaagacaatcttcccctgagtctttattcaagtatttcatataacaatagaagtacagtgatggtcaatttcttttaaaattttccatgtatgcttactctagagcaaattccactagtgcccttaagagtctctagtggaatttattgaatgtgtgtgtgtgtgtgttttatatatgtatctaaaaatagttctttggcaaaaaaatatgtgctatcaattttttaaaattacactggcttttctagactttattaacgtatctccggagccagaattttatgctaagctttttttaaaaaaatttctatttgtggtatatctatattcagttataattggggaaaaaccctcacttctggagtgctgatgaatatagaattatttaagaattaagattatttcaagaattatgtttggaataaatctcttaaacacaattctc

SEQ ID NO: 711170 - DNA, 792 bp, Homo sapiens
gcatgcataaagccaaaatatgtgggacactggtccacctgagaagcaaggtagatatttcccaaattaagggtaattcaggagaggtattactattgcgtacacttataaaatatactcaaaatttgggcaaagataagaaaaggatttttaggcatatgggtatgtgtatgtctttctgaaaaaaaaaaaactaaaattttaagaatgctatcataatgatatacaagtaaaatagtctggatgtgaatacatccgggtcttttcaagatggtccttgccaggattttgttgaaatattattttcatgctatcaaacgtcctaagtaaatgtcattgtggtttctttatttactttttgggcccctactttctcaccgtatttccaccaagtctgacaccrtgttagctgtaagtggggcaaagagatattataaaacattcttcagtgattagagacataaaaactataaaaaataatgtgttactttgtaaatagaattcaaattagaatttaaccttcaaaatatttttttttggaaagtgatgagaaaacactgcatctatatggaagccgtgcagtataacagaaaatgtcctgttgtataaggatggaacacagaatttatttccacaactatcactggctcctaagacattaaagctagtcacttaatttctggtgtctatcaatcagttcttaaaaatggaaacaatgatgcaaattcataacaagagatcatacaaatattgggatgataaataatatgtgactgtattttagttgcccag

SEQ ID NO: 711171 - DNA, 792 bp, Homo sapiens
gcatgcataaagccaaaatatgtgggacactggtccacctgagaagcaaggtagatatttcccaaattaagggtaattcaggagaggtattactattgcgtacacttataaaatatactcaaaatttgggcaaagataagaaaaggatttttaggcatatgggtatgtgtatgtctttctgaaaaaaaaaaaactaaaattttaagaatgctatcataatgatatacaagtaaaatagtctggatgtgaatacatccgggtcttttcaagatggtccttgccaggattttgttgaaatattattttcatgctatcaaacgtcctaagtaaatgtcattgtggtttctttatttactttttgggcccctactttctcaccgtatttccaccaagtctgacaccatgttagctgtaagtggggcaaagagatattataaaacattcttcagtgattagagacataaaaactataaaaaataatrtgttactttgtaaatagaattcaaattagaatttaaccttcaaaatatttttttttggaaagtgatgagaaaacactgcatctatatggaagccgtgcagtataacagaaaatgtcctgttgtataaggatggaacacagaatttatttccacaactatcactggctcctaagacattaaagctagtcacttaatttctggtgtctatcaatcagttcttaaaaatggaaacaatgatgcaaattcataacaagagatcatacaaatattgggatgataaataatatgtgactgtattttagttgcccag

SEQ ID NO: 711172 - DNA, 3024 bp, Homo sapiens
taggagtgcttcatatttctgtaccctagcttttttttttcaggtattttctcccactctggttgtctttccagttcataatggcgttagtgaatggaatttcttgattttgataattgaaagtgtttctatcttctctttcagtaataatacattttgtggcccatttaataaatcctcacatacccaaaagtcaaagatgattagactattcccttccattattgtacattaattatgtacaatagtacataattaataccatttatgtaaaattaaaaactttattgataaaaatcaaaatagtgtttactttatggggagatagttattgagaaagggcatgaaggaggcttctggacgccgtaatgatctacaagtcaacttaggtattttcacttgacataaactcaccaacttaaacgcttgtgatttcagcactttgctgtaagtatgttatatactccaacaaaaatgttttcttacaaaataaaacagaaatatgcagaagaaaaacttcatatcctcaggggaataatgaaccatacgtccttaacacagaggcgaaattccacagcagccccactcctgaagtccaaggcagggaaatacacacatgatgataattaagtgaaactgatttatttttatctcagtatacatttttgtagcgctatatgacttcatgtgttgtgcttaaggaaatgcattcttatatctaaagtaaggatgaacagattgtaaattcaagaactgtgctggagtttaagacttttttatagtaattgttaattttcttaagtaaagatttctgccttgattacaactaattagcaaataaattttctttctgtcatatccccttatatggaatcaaaaacttattaagcatatgtctatatttgaatgcatttttacatgtgaacatctcttttatatatttaaatgtatatttgacatagtagagtatatatttaaatgcagacacacacaaatacatatgcatttaagttttaaatgaatagtaaacagtgatatggataacccaaaaatcgtttctatttgaatttggaatgtcttgcatgatttttgaggtatatttatcttcttgattacagcttgtttagactgatattaaaattagtctgcactacttgaagacacaacacctgatcttgaagaattatatctaaaacatattagttaacagaaagaaggtatctagggattaagtgttttacactaatattcatccagaaagatcagcaacatactgataaatggaaattaactgtaaattaaattcaatcattaaaataaggacatgcctgaaacaaaattaagaaattggcctaaagtgaaaattagggtatctcaatttattttaattcttcttattttattctgtgtgtgtgtgtgtgtgtgtgtgtgtgtctgtgtgtgtgtgtgtgtgtgtgtttgtgttgagagagtgtatgctacaataaaaagagcacagcccttagattctggcaaacagatgtttgactactgagtctattagttttaaaatatggtagcaagttacttgacctcttgtagttcttattatagmatgtgccttgggctgtgatcgtgagaatttaaccacaatggcatatgagttcatagtttgcttttggttgggcaaagttaataagtaagcaagggacagatcatgaggtagagagatctaggctgaaagatgataaattcactttgggatatattcagtggaaaccatcaacttgtaccctgatcaatagcaagttggatttagtgatatgagctggagacatagttcagagtcatcttatatatgatggactttggaaatggaagctttggaaatgaacccaggccgcctggaggagtgtgcagcatgagaatagaggagagcctggaatctagaagcctaagaataacaacatttaagggaggccaagaagagatttattttgcatcttataatctgatgatacagatgtcattagtttgattacatgtacaaataaacagagcaagtagagaaaaaatatttattaataataacaggcaaccacaacctccgggtacctaggggcaagaatataactgtaccttgtgagggactggagccaggaatgagaagccttcaagggatcccgagaggatgtccctcactcttgtttctgtttcaacctgaatatcttctttattcttctacaggcaggcttcatttgttcttctaaacacatgtttaaaaaagttaacactgaagattcccagttttatgtctcatctatgcaagaggccaactcaaaacaaaagtagagttaaaggccttattctcagtttttgggaaagggcattatttcagatacatatcttaaggcttttcactgattttcccagcactgctgtctccaaagtcatctagtcacttgtcctgagagtgctgagttctcccctccccttggctgcccctgtgcaggcacgttggccagccatgtgccaataattctgcctcaatgaccactttcagacttcaattaaacaccatgaaggcgggtatggaatcaggcacattgtgcagctgccaaaatatccagatgatgtaccctagaaatataggggagtttgatttccaagaagcaaacttgaactgaatcccattccttcttccctcccaggattagtcagagtcatagttttccctgcattctgcccaccaaaatcctgtatggcaaaggatataactctgtagcaacttgctgttccttttgtgtagtagccaatgcaggaatgccttattccctgtctgtccctgcctcacttctctttctctcattgcagctgctctgggcttgcatctcttaagtaaagcgtttgcacattaatccttactttagcctctcttttctggggaactcaggtgatgagaggcagcttattgcttagatgtgttcctgtgtcccctctgattctttctgcaagggagaggaaggcaaagtattcccaagaaaa

SEQ ID NO: 711173 - DNA, 3024 bp, Homo sapiens
taggagtgcttcatatttctgtaccctagcttttttttttcaggtattttctcccactctggttgtctttccagttcataatggcgttagtgaatggaatttcttgattttgataattgaaagtgtttctatcttctctttcagtaataatacattttgtggcccatttaataaatcctcacatacccaaaagtcaaagatgattagactattcccttccattattgtacattaattatgtacaatagtacataattaataccatttatgtaaaattaaaaactttattgataaaaatcaaaatagtgtttactttatggggagatagttattgagaaagggcatgaaggaggcttctggacgccgtaatgatctacaagtcaacttaggtattttcacttgacataaactcaccaacttaaacgcttgtgatttcagcactttgctgtaagtatgttatatactccaacaaaaatgttttcttacaaaataaaacagaaatatgcagaagaaaaacttcatatcctcaggggaataatgaaccatacgtccttaacacagaggcgaaattccacagcagccccactcctgaagtccaaggcagggaaatacacacatgatgataattaagtgaaactgatttatttttatctcagtatacatttttgtagcgctatatgacttcatgtgttgtgcttaaggaaatgcattcttatatctaaagtaaggatgaacagattgtaaattcaagaactgtgctggagtttaagacttttttatagtaattgttaattttcttaagtaaagatttctgccttgattacaactaattagcaaataaattttctttctgtcatatccccttatatggaatcaaaaacttattaagcatatgtctatatttgaatgcatttttacatgtgaacatctcttttatatatttaaatgtatatttgacatagtagagtatatatttaaatgcagacacacacaaatacatatgcatttaagttttaaatgaatagtaaacagtgatatggataacccaaaaatcgtttctatttgaatttggaatgtcttgcatgatttttgaggtatatttatcttcttgattacagcttgtttagactgatattaaaattagtctgcactacttgaagacacaacacctgatcttgaagaattatatctaaaacatattagttaacagaaagaaggtatctagggattaagtgttttacactaatattcatccagaaagatcagcaacatactgataaatggaaattaactgtaaattaaattcaatcattaaaataaggacatgcctgaaacaaaattaagaaattggcctaaagtgaaaattagggtatctcaatttattttaattcttcttattttattctgtgtgtgtgtgtgtgtgtgtgtgtgtgtctgtgtgtgtgtgtgtgtgtgtgtttgtgttgagagagtgtatgctacaataaaaagagcacagcccttagattctggcaaacagatgtttgactactgagtctattagttttaaaatatggtagcaagttacttgacctcttgtagttcttattatagaatgtgccttgggctgtgatcgtgagaatttaaccacaatggcatatgagttcatagtttgcttttggttgggcaaagttaataagtaagcaagggacagatcatgaggtagagagatctaggctgaaagatgataaattcactttgggatatattcagtggaaaccatcaacttgtaccctgatcaatagcaagttggatttagtgatatgagctggagacatagttcagagtcatcttatatatgatggactttggaaatggaagctttggaaatgaacccaggccgccyggaggagtgtgcagcatgagaatagaggagagcctggaatctagaagcctaagaataacaacatttaagggaggccaagaagagatttattttgcatcttataatctgatgatacagatgtcattagtttgattacatgtacaaataaacagagcaagtagagaaaaaatatttattaataataacaggcaaccacaacctccgggtacctaggggcaagaatataactgtaccttgtgagggactggagccaggaatgagaagccttcaagggatcccgagaggatgtccctcactcttgtttctgtttcaacctgaatatcttctttattcttctacaggcaggcttcatttgttcttctaaacacatgtttaaaaaagttaacactgaagattcccagttttatgtctcatctatgcaagaggccaactcaaaacaaaagtagagttaaaggccttattctcagtttttgggaaagggcattatttcagatacatatcttaaggcttttcactgattttcccagcactgctgtctccaaagtcatctagtcacttgtcctgagagtgctgagttctcccctccccttggctgcccctgtgcaggcacgttggccagccatgtgccaataattctgcctcaatgaccactttcagacttcaattaaacaccatgaaggcgggtatggaatcaggcacattgtgcagctgccaaaatatccagatgatgtaccctagaaatataggggagtttgatttccaagaagcaaacttgaactgaatcccattccttcttccctcccaggattagtcagagtcatagttttccctgcattctgcccaccaaaatcctgtatggcaaaggatataactctgtagcaacttgctgttccttttgtgtagtagccaatgcaggaatgccttattccctgtctgtccctgcctcacttctctttctctcattgcagctgctctgggcttgcatctcttaagtaaagcgtttgcacattaatccttactttagcctctcttttctggggaactcaggtgatgagaggcagcttattgcttagatgtgttcctgtgtcccctctgattctttctgcaagggagaggaaggcaaagtattcccaagaaaa

SEQ ID NO: 711174 - DNA, 674 bp, Homo sapiens
cttttgagatggagtttcactcttsttacccgggctggagtgcaacagtgtgatctcagctcactgcaacctccgcctcccgggttcaagcgattttcttgcctcagactcccaagtatctgggattacaggcgcccaccaccacgcccagctaatttttgtatttttagtagagacgggttttcaccatgttggccaagctggtctcgcactcctgacctcaggtgatctgcctgccttggtctctcaaagtgctgggatgacaggtgtgaaacaccgtgcccagcccctgcaaggttttatagttaataaacgctcttgaccattccattagtttttgtggccctgaagaatccaagatctccacctatgtcaattatttatcaatgattacttttaaaaatctaacagttccccgtactctaacttctcccatctctctgaactgagcattttttctctctgaatttgtggtcatatccacttataaaccttgaccataaattatgtagatgtttctaaaaccttacctttgggcctacagttctacccaaatctaggcacatttgaacttcttagagaatttctcagttgtatgtgtctccaacctcaatataaatcacttcagtctacaaactgtgattaagaagtgggagtagaatctaggctttttc

SEQ ID NO: 711175 - DNA, 674 bp, Homo sapiens
cttttgagatggagtttcactcttcttacccgggctggagtgcaacagtgtgatctcagctcactgcaacmtccgcctcccgggttcaagcgattttcttgcctcagactcccaagtatctgggattacaggcgcccaccaccacgcccagctaatttttgtatttttagtagagacgggttttcaccatgttggccaagctggtctcgcactcctgacctcaggtgatctgcctgccttggtctctcaaagtgctgggatgacaggtgtgaaacaccgtgcccagcccctgcaaggttttatagttaataaacgctcttgaccattccattagtttttgtggccctgaagaatccaagatctccacctatgtcaattatttatcaatgattacttttaaaaatctaacagttccccgtactctaacttctcccatctctctgaactgagcattttttctctctgaatttgtggtcatatccacttataaaccttgaccataaattatgtagatgtttctaaaaccttacctttgggcctacagttctacccaaatctaggcacatttgaacttcttagagaatttctcagttgtatgtgtctccaacctcaatataaatcacttcagtctacaaactgtgattaagaagtgggagtagaatctaggctttttc

SEQ ID NO: 711176 - DNA, 674 bp, Homo sapiens
cttttgagatggagtttcactcttcttacccgggctggagtgcaacagtgtgatctcagctcactgcaacctccgcctcccgggttcaagcgattttcttgcctcagactcccaagtatctgggattacaggcgcccaccaccacgcccagctaatttttgtatttttagtagagacgggttttcaccatgttggccaagctggtctcgmactcctgacctcaggtgatctgcctgccttggtctctcaaagtgctgggatgacaggtgtgaaacaccgtgcccagcccctgcaaggttttatagttaataaacgctcttgaccattccattagtttttgtggccctgaagaatccaagatctccacctatgtcaattatttatcaatgattacttttaaaaatctaacagttccccgtactctaacttctcccatctctctgaactgagcattttttctctctgaatttgtggtcatatccacttataaaccttgaccataaattatgtagatgtttctaaaaccttacctttgggcctacagttctacccaaatctaggcacatttgaacttcttagagaatttctcagttgtatgtgtctccaacctcaatataaatcacttcagtctacaaactgtgattaagaagtgggagtagaatctaggctttttc

SEQ ID NO: 711177 - DNA, 799 bp, Homo sapiens
aggtacatgtcctactccgtctccagggcctcactaacaccakagtaaccgctgacatagattctggaaacaacggctgtgttcctgaattggagttcctgatttttttttttttcggatttcctctgtctcatctctgttcaatccttttgctgtccccttaggaaaaactgggtacatttaaaatgagttaaagacagagtgagaaattttatcaattcattttagtagttaaaacacacacacacacacacacacacacacacacacagtctattcagagattatttatggcaaaggaggaaaggaacaggagaaacaataaaacccatagatagcctgttttaagtctctagagttgatgatatgttttagtacagcacttctcaactacacatctcaatccacaagcagcagctatgccacagctaattgtaaccagtaataaaaatacaagcgtgtgtgaataatagcctgatggttagactcactggagtaggaatacttgtttctaaatggccagacagtaaaagtttcagcctttgtggggccaaattaaaatcaattatattatgttggtacctctgtaaccatttaaaatgtaattaattttaaaatgtaaaatatattatttgctcatggcaataaaaaacaaaagcaaaaacagacagctgggtaaatttatcccacaggccttagtttcttcatctgtaaaataaaaatgaaaataataccctcctacctgattagatagttgtgaagatggccttggtaacatgggtaaggcaccagagtcctg

SEQ ID NO: 711178 - DNA, 799 bp, Homo sapiens
aggtacatgtcctactccgtctccagggcctcactaacaccatagtaaccgctgacatagattctggaaacaacggctgtgttcctgaattggagttcctgatttttttttttttcggatttcctctgtctcatctctgttcaatccttttgctgtccccttaggaaaaactgggtacattyaaaatgagttaaagacagagtgagaaattttatcaattcattttagtagttaaaacacacacacacacacacacacacacacacacacagtctattcagagattatttatggcaaaggaggaaaggaacaggagaaacaataaaacccatagatagcctgttttaagtctctagagttgatgatatgttttagtacagcacttctcaactacacatctcaatccacaagcagcagctatgccacagctaattgtaaccagtaataaaaatacaagcgtgtgtgaataatagcctgatggttagactcactggagtaggaatacttgtttctaaatggccagacagtaaaagtttcagcctttgtggggccaaattaaaatcaattatattatgttggtacctctgtaaccatttaaaatgtaattaattttaaaatgtaaaatatattatttgctcatggcaataaaaaacaaaagcaaaaacagacagctgggtaaatttatcccacaggccttagtttcttcatctgtaaaataaaaatgaaaataataccctcctacctgattagatagttgtgaagatggccttggtaacatgggtaaggcaccagagtcctg

SEQ ID NO: 711179 - DNA, 973 bp, Homo sapiens
ttttggggaatcttgacccaaacaaggtgagccatattcttgaatataattatttcattcctcctgtcagctttcctgtgtcttagakatttagtttttggagttcctggtatatttgaaaagaagaggctgatttttggaatttgtataaactactgttatggtatatttattaattcaaaaatacttatggactgaatattactcagtcttgaaatttgacgtaagctacaacatggatgaatcttcaggacattagctaaataagccagtcacaagaggacaaatactgttatggttctacttgtatgaagtacttagagtagtcaaaatcatagagacagaaaaagtgagtgatggttatcagggactgggggaagattgaggatgaggagttattgattaatgggtgtagagtttcagttttacaacatgaaaagagctatggagatggatgatgaatggtggcgaaggttgcagaacagtatgaatgtacttaatgccactgaactgtatacttaacaatggtcaagatagtcaattttatgttatgtatagtttactacagttaaaaataggaaaagtagaattaaaagctacactattctagccaaaaaaacaaaagtgaagaaaacgtatgtactgtctgccatgtacctggcactgtattaagcattaagtaagtatgcagtggtgaacaaactagattccttgcatttgactttgattcacaaaaaatttgtaagatgcatctttatgcagagcaatttggcttttttcttttttactgagttataacttgtatacagtaaggtatatatctcttaagatcctaagtatatagcttggtgagtttttacgtgtgtatgtatccatgtaaccaccatccagatcaacatatggttctatcatttcagaaaattccttcgggccccttctcagtcaattcttagtcagtagtttctccatcaga

SEQ ID NO: 711180 - DNA, 1287 bp, Homo sapiens
caggcatggtggctcacacctgtaatcccagcactttgggaggccaagtcgggaggatagcttgagcccaggagtttgagacaagcctgggcaaccctgtctctacaaaaaatttaaaaagtagccgggtgtggtggcacatgcctatagtcccagctagtcaggaggctgatatgggaggatggcctaagcccaggagtttgaagatgcagtgagctatgatcacactactgcactctggcctgggtgacagagtgaaaccctgtctctgaaaaaaaaaaaaaaaaaaaaaaaaaaaaagtcaatttattcaaattctacctctttcttaagattgttatatgctcaaataagatgatgactctaaaagtgccctgaaactaaaaaattaaggcatttaaaaattatttcttacctttattagcaacccagtaaggaggtagattacattatactcctcaatagagctaaagtgattgatatggtttggctttatgtccccacccaaatcttatcttgaactgtaatccccatgtgtcgagggacagacctggtgggaagtcattggatcacaggagcattttcccccatgctgttcttgtgatagtgagggagttctcatgagatctgacggttttaaagtggcagtttcccctatgcgctctctcctgccaccatgtaagacatgctttgcttcccctttgccttcaaccatggttgtaagtttcctgaggcctccccagccatttggaactatgaatcaattaaaactcttttctttctaaattacccagtctcaggtattctttatagcggtgtgaaaatggactaatacagtgatgaatttccatcactagttatggacaagggaagaagatgatgctggagtgttctggtagcaggaagaggccctcacttttctctgattaaccagagtggttaaattctagattgggcttgttgctagcagaagaggtgaaattcaggacaacarttgaaagttggtagcatttgaacacatcatttaggaacactcagttttaatcatcatctaccatggatactcaaaagaataccctcggacccccgattggttgactagttgcctggtcttagaaacttaatctttctgcaattcctccacttcttcaactgaaaatgggcatatcaccagtctagtttggtgacggtgacaattatgtaaataaaagtataaaaacacctagtacattgtctcctatattatcttagtaatatataatatataataatattgttaacatatgt

SEQ ID NO: 711181 - DNA, 665 bp, Homo sapiens
tatggtgcttgaaaaagcaaaataatcttttcacttaacagaaaaaaactgtactatttttgagcaactgaaagtcacrtcaatatattaattgaatgacctataattgctgcattgttctgatgtttatcttagaccctgcatgagtggtttttccttgatgctaatcccattagaagtaaaatggaccgcagttttgaatctctctgttccttaaaaaaaaaaaaaagttaattgacaagctgtttaatatgagatgccattttacagatgaccagattgaataataaaagaactaagggggaaaatgagcttttacctgtttcacaggttttaatatatatatattcaaaaatttttctaaaagggtaaaataaccaccaataccttatgcatataaagatgaagcagataaaaagaccaaacgcaataagaatctctcatactataccacatttatctcaaaaataatctttttgttgagaccctaatatcctccccttcctcaccatctcgaacattctctcacctcctctctccctgcctgcctccctgagaggactcttacacaccactctttgttctgtaaaggaatgcccggaatggacacaaggtactctgtcttggagctcagtgtcttgattttagaagcttgaaagggtatg

SEQ ID NO: 711182 - DNA, 614 bp, Homo sapiens
tgggaggatgacctatacaaactataacaatagagttcccacaccctctggtttcaggaagttctcaagtagattataatttctgaaaccactgcactcccaagtctagaattctccagatttctatgatctgattacatttgcagcaactgtcagagttgtgaattgggttcaaccattcctgctgggtggcccaccattccataacccaccaaaaggccaagtttcttctcttttcttttctttttcttttttttcttttttttttttttttttttttttttgagatggagtcacagtctgttgcccaggctggagtgcagtggcacagtctcggctcactgcaacctccgcctcccgggttcaagygatccttccacctcagcctaccgagtagctggaactacaggtgtgcgccaccacacctggctaatatttttgtatttttagtagagacggcatttccccatgttggccaggctggtctcaaactcctgatctcaagtaagcagcttgccttggcctcccaaagtgatgggactgcaggcgtaagccaccgcatccagccccaagaaggctcttctaatgatcccattttccctgcagattaaaca

SEQ ID NO: 711183 - DNA, 1114 bp, Homo sapiens
tagcacaaagcatttttaaagtacgtttccattttaaataataatctaaacaatactttgctgacgttgactaggcttgatagaaaatggtaatatttataacagtgggctgtaagatactgaaataataaaggatcagctgtattcacaaggacaacaaaatgactaaccaatttagtgtactggtcatttcagaaaaataattgtaaatttagtgagctaaaataaaaatgaaaaaacatttgtgccagttatttaatggtctgatttctgtcaaagtggcagccctctggagaaagtcaaataaaatattccaggataacatcactggtatcagtttgttcaattgatgtttgggtcattttcataaaagtgcagcagaaaatgtgttttaaaatctcagtttttttcagctctgattgtttggttctctggtaagtccacagtattaatacttttagtttgtcagtcttttattataataaattataatagttaaaaaccaagaaatgaaaaatgtaagtcaagtcacttagctattgtaatatttaatcatggctgaaataaagtgttataaatgcaatttttatccttgcaccaccaagtttatttttgagtaaaagacaaaaacaaaaccaagtgctctctgaccatctgattattcatttatttatgtatttatgtatttatttttattttgataggttttgggggaacgggtggtgtttggttatatgaataagtcctttagtggtgatttctgrgattttggtatacccatcacccaagcagtgtacattgtacccaatgtgtagtcttttatccctcaccccctcccatcctttccctcaagtccccaaagtccgctgtatgatccttatgcctttgtgtcctcatagcttcgctactacttatgagtgagaacagatgatgtttggttttccattcctaagtcacttaacttagaataatgatctccaattccatcccggttgctgcaaatgccattattgtgttcctttcattgttgagtagtattccgtggtatacacataccatatttcctcattgattgatgggcatttgggctggttccttatttttgcagttgtga

SEQ ID NO: 711184 - DNA, 1114 bp, Homo sapiens
tagcacaaagcatttttaaagtacgtttccattttaaataataatctaaacaatactttgctgacgttgactaggcttgatagaaaatggtaatatttataacagtgggctgtaagatactgaaataataaaggatcagctgtattcacaaggacaacaaaatgactaaccaatttagtgtactggtcatttcagaaaaataattgtaaatttagtgagctaaaataaaaatgaaaaaacatttgtgccagttatttaatggtctgatttctgtcaaagtggcagccctctggagaaagtcaaataaaatattccaggataacatcactggtatcagtttgttcaattgatgtttgggtcattttcataaaagtgcagcagaaaatgtgttttaaaatctcagtttttttcagctctgattgtttggttctctggtaagtccacagtattaatacttttagtttgtcagtcttttattataataaattataatagttaaaaaccaagaaatgaaaaatgtaagtcaagtcacttagctattgtaatatttaatcatggctgaaataaagtgttataaatgcaatttttatccttgcaccaccaagtttatttttgagtaaaagacaaaaacaaaaccaagtgctctctgaccatctgattattcatttatttatgtatttatgtatttatttttattttgataggttttgggggaacgggtggtgtttggttatatgaataagtcctttagtggtgatttctgagattttggtatacccatcacccaagcagtgtacattgtacccaatgtgtagtcttttatccctcaccccctcccatcctttccctcaagtccccaaagtccgctgtatgatccttatgcctttgtgtcctcatagcttcgctactacttatgagtgagaacagatgatgtttggttttccattcctaagtcacttaacttagaataatgatctccaattccatcccggttgctgcaaatgccattattgtgttcctttyattgttgagtagtattccgtggtatacacataccatatttcctcattgattgatgggcatttgggctggttccttatttttgcagttgtga

SEQ ID NO: 711185 - DNA, 1394 bp, Homo sapiens
ctatctggataatattctgatattggtctggaaaatttatgaggraaggatagtagaaatttaacataatcttttgagattaacacttgatactcttacttattttctggacatttagtaatttccttaaactttttactagatgtggggaattaacttttgtttgtaagtgtcctatctgctcattccaacaacgtcttttggacaggaacacctgttagttgagtccacttcattcaaataaacatacctgttccttaaaataaacatacctgaataaaaggtctgaatttcacaaatgcacaaaatcactacttgagaaataaacctacctagggtgtgatactaatttagcaaaacttttatatatcaaattgctgtgttatatataataacatatattttcaacctctgtatcctaataattgcatcttattctattaaagatatatacaggaagtttatggagatatgttggaggaaaaaagagtcattaagtctttagaaagcatgcacatagtaagctatgtgccaggcataaaacagatttaattgcaattgactttactttttggctttttttttttttttaactttccttttctccttttcctgaccctttaaacatcttttttcctgacttctttgctaatatttttttcttatttttctatttatttttcttcctttcaaggtacttatcaagtgcttgtacctaatatgtctcctaatctatcatttaatttttttccacttctattaatattttttttgtaactgaatttgacctcaagtcagccatgctcagggctagaacttcaataatgtttggttttcatagtcatctcaagggaatgcatttggtgttcaggactaggttgcagaggaccgttgactcaaacacagatgtcccatgttaaaagcaatgggctactggttactggtttgggtaagaaattaattgaatgtgtgcttgggtgattaaaagtctcagcattgggtactgaaagcagtgcagacatttcactgagaagaatagaagggaaaataagtattagtttgacgcaaacgtaattgctggttttgccattactaatatttagtgagcatgtgcaccccaggtcctgtactaaatacatctttatatattattgattattatattgttttctggaagcaggctaacctcacattttttaagcagctagtcctggaagcagagtaaagttatgaccaactgaatctcttagtcaaacagataactaaagagcaacacagtttagtagaaggaccacttcaaagtcaaatactttatttgggcaagggctgaaattataagaaaaaccatacagataaataccatttaccatgaatagtgtacccaggtgtaccaa

SEQ ID NO: 711186 - DNA, 1394 bp, Homo sapiens
ctatctggataatattctgatattggtctggaaaatttatgagggaaggatagtagaaatttaacataatcttttgagattaacacttgatactcttacttattttctggacatttagtaatttccttaaactttttactagatgtggggaattaacttttrtttgtaagtgtcctatctgctcattccaacaacgtcttttggacaggaacacctgttagttgagtccacttcattcaaataaacatacctgttccttaaaataaacatacctgaataaaaggtctgaatttcacaaatgcacaaaatcactacttgagaaataaacctacctagggtgtgatactaatttagcaaaacttttatatatcaaattgctgtgttatatataataacatatattttcaacctctgtatcctaataattgcatcttattctattaaagatatatacaggaagtttatggagatatgttggaggaaaaaagagtcattaagtctttagaaagcatgcacatagtaagctatgtgccaggcataaaacagatttaattgcaattgactttactttttggctttttttttttttttaactttccttttctccttttcctgaccctttaaacatcttttttcctgacttctttgctaatatttttttcttatttttctatttatttttcttcctttcaaggtacttatcaagtgcttgtacctaatatgtctcctaatctatcatttaatttttttccacttctattaatattttttttgtaactgaatttgacctcaagtcagccatgctcagggctagaacttcaataatgtttggttttcatagtcatctcaagggaatgcatttggtgttcaggactaggttgcagaggaccgttgactcaaacacagatgtcccatgttaaaagcaatgggctactggttactggtttgggtaagaaattaattgaatgtgtgcttgggtgattaaaagtctcagcattgggtactgaaagcagtgcagacatttcactgagaagaatagaagggaaaataagtattagtttgacgcaaacgtaattgctggttttgccattactaatatttagtgagcatgtgcaccccaggtcctgtactaaatacatctttatatattattgattattatattgttttctggaagcaggctaacctcacattttttaagcagctagtcctggaagcagagtaaagttatgaccaactgaatctcttagtcaaacagataactaaagagcaacacagtttagtagaaggaccacttcaaagtcaaatactttatttgggcaagggctgaaattataagaaaaaccatacagataaataccatttaccatgaatagtgtacccaggtgtaccaa

SEQ ID NO: 711187 - DNA, 1394 bp, Homo sapiens
ctatctggataatattctgatattggtctggaaaatttatgagggaaggatagtagaaatttaacataatcttttgagattaacacttgatactcttacttattttctggacatttagtaatttccttaaactttttactagatgtggggaattaacttttgtttgtaagtgtcctatctgctcattccaacaacgtcttttggacaggaacacctgttagttgagtccacttcattcaaataaacatacctgttccttaaaataaacatacctgaataaaaggtctgaatttcacaaatgcacaaaatcactacttgagaaataaacctacctagggkgtgatactaatttagcaaaacttttatatatcaaattgctgtgttatatataataacatatattttcaacctctgtatcctaataattgcatcttattctattaaagatatatacaggaagtttatggagatatgttggaggaaaaaagagtcattaagtctttagaaagcatgcacatagtaagctatgtgccaggcataaaacagatttaattgcaattgactttactttttggctttttttttttttttaactttccttttctccttttcctgaccctttaaacatcttttttcctgacttctttgctaatatttttttcttatttttctatttatttttcttcctttcaaggtacttatcaagtgcttgtacctaatatgtctcctaatctatcatttaatttttttccacttctattaatattttttttgtaactgaatttgacctcaagtcagccatgctcagggctagaacttcaataatgtttggttttcatagtcatctcaagggaatgcatttggtgttcaggactaggttgcagaggaccgttgactcaaacacagatgtcccatgttaaaagcaatgggctactggttactggtttgggtaagaaattaattgaatgtgtgcttgggtgattaaaagtctcagcattgggtactgaaagcagtgcagacatttcactgagaagaatagaagggaaaataagtattagtttgacgcaaacgtaattgctggttttgccattactaatatttagtgagcatgtgcaccccaggtcctgtactaaatacatctttatatattattgattattatattgttttctggaagcaggctaacctcacattttttaagcagctagtcctggaagcagagtaaagttatgaccaactgaatctcttagtcaaacagataactaaagagcaacacagtttagtagaaggaccacttcaaagtcaaatactttatttgggcaagggctgaaattataagaaaaaccatacagataaataccatttaccatgaatagtgtacccaggtgtaccaa

SEQ ID NO: 711188 - DNA, 1394 bp, Homo sapiens
ctatctggataatattctgatattggtctggaaaatttatgagggaaggatagtagaaatttaacataatcttttgagattaacacttgatactcttacttattttctggacatttagtaatttccttaaactttttactagatgtggggaattaacttttgtttgtaagtgtcctatctgctcattccaacaacgtcttttggacaggaacacctgttagttgagtccacttcattcaaataaacatacctgttccttaaaataaacatacctgaataaaaggtctgaatttcacaaatgcacaaaatcactacttgagaaataaacctacctagggtrtgatactaatttagcaaaacttttatatatcaaattgctgtgttatatataataacatatattttcaacctctgtatcctaataattgcatcttattctattaaagatatatacaggaagtttatggagatatgttggaggaaaaaagagtcattaagtctttagaaagcatgcacatagtaagctatgtgccaggcataaaacagatttaattgcaattgactttactttttggctttttttttttttttaactttccttttctccttttcctgaccctttaaacatcttttttcctgacttctttgctaatatttttttcttatttttctatttatttttcttcctttcaaggtacttatcaagtgcttgtacctaatatgtctcctaatctatcatttaatttttttccacttctattaatattttttttgtaactgaatttgacctcaagtcagccatgctcagggctagaacttcaataatgtttggttttcatagtcatctcaagggaatgcatttggtgttcaggactaggttgcagaggaccgttgactcaaacacagatgtcccatgttaaaagcaatgggctactggttactggtttgggtaagaaattaattgaatgtgtgcttgggtgattaaaagtctcagcattgggtactgaaagcagtgcagacatttcactgagaagaatagaagggaaaataagtattagtttgacgcaaacgtaattgctggttttgccattactaatatttagtgagcatgtgcaccccaggtcctgtactaaatacatctttatatattattgattattatattgttttctggaagcaggctaacctcacattttttaagcagctagtcctggaagcagagtaaagttatgaccaactgaatctcttagtcaaacagataactaaagagcaacacagtttagtagaaggaccacttcaaagtcaaatactttatttgggcaagggctgaaattataagaaaaaccatacagataaataccatttaccatgaatagtgtacccaggtgtaccaa

SEQ ID NO: 711189 - DNA, 1394 bp, Homo sapiens
ctatctggataatattctgatattggtctggaaaatttatgagggaaggatagtagaaatttaacataatcttttgagattaacacttgatactcttacttattttctggacatttagtaatttccttaaactttttactagatgtggggaattaacttttgtttgtaagtgtcctatctgctcattccaacaacgtcttttggacaggaacacctgttagttgagtccacttcattcaaataaacatacctgttccttaaaataaacatacctgaataaaaggtctgaatttcacaaatgcacaaaatcactacttgagaaataaacctacctagggtgtgatactaatttagcaaaacttttatatatcaaattgctgkgttatatataataacatatattttcaacctctgtatcctaataattgcatcttattctattaaagatatatacaggaagtttatggagatatgttggaggaaaaaagagtcattaagtctttagaaagcatgcacatagtaagctatgtgccaggcataaaacagatttaattgcaattgactttactttttggctttttttttttttttaactttccttttctccttttcctgaccctttaaacatcttttttcctgacttctttgctaatatttttttcttatttttctatttatttttcttcctttcaaggtacttatcaagtgcttgtacctaatatgtctcctaatctatcatttaatttttttccacttctattaatattttttttgtaactgaatttgacctcaagtcagccatgctcagggctagaacttcaataatgtttggttttcatagtcatctcaagggaatgcatttggtgttcaggactaggttgcagaggaccgttgactcaaacacagatgtcccatgttaaaagcaatgggctactggttactggtttgggtaagaaattaattgaatgtgtgcttgggtgattaaaagtctcagcattgggtactgaaagcagtgcagacatttcactgagaagaatagaagggaaaataagtattagtttgacgcaaacgtaattgctggttttgccattactaatatttagtgagcatgtgcaccccaggtcctgtactaaatacatctttatatattattgattattatattgttttctggaagcaggctaacctcacattttttaagcagctagtcctggaagcagagtaaagttatgaccaactgaatctcttagtcaaacagataactaaagagcaacacagtttagtagaaggaccacttcaaagtcaaatactttatttgggcaagggctgaaattataagaaaaaccatacagataaataccatttaccatgaatagtgtacccaggtgtaccaa

SEQ ID NO: 711190 - DNA, 600 bp, Homo sapiens
tggatctggaaaggcatgggaaggcaaaaaatccagaaagcacaggacaattttgtacatcttcccctttttgcagaaaccaagaaactcatgatggggagtgggctgtttgaagccctctatgcctacatatggcccaggccatttctgttctactacagctgtcacagactgcatggaaaagagttttcagaaagttatctcctcctagagaatcccattcaaatcacctaattgacttttttttagatttattctgccctgtctgatagagtacagcatgcaggagctcgccatgctgccagatgatgggaaaagaataacagataaaaggaattaaaatatatctgagtttaacgtaaaatcatgatatataacatgctgctgttattactgtcatcattgttgttattactcattattctagccacttccttcccagcatggtagttgtcaggatgtttcagagactcactaacratgccatcatttcctagtatcacaagaggaggaaggactggggttcactttctaccctttgctctgcgagaactcacgtagaaagaaccataacattaagtcccacacaaacaggaaaaa

SEQ ID NO: 711191 - DNA, 605 bp, Homo sapiens
aacagactcctaagctagattaaactgctcctacactgaaggcatttctgaatcactctaaagggtgaaaatcgtcttaagggcatttcaaagagaaatacttattttctcactttcctcattatttttctaactttctctactgggagaaatactgtatacttacagttaacaggaatgtcaaacaatgtatttaatttcattctaagcrcgtggtatatttatttactttatagaaaagaatacatctctaaaatttaagttactcctacttgcaaataatgaacttaatttcccctgcccacctcatcccttttaaggcaatagcttgtaagcaatttacctgtgagaggatgcctgtctaactcctccctcaggtgcacttaaggaagctaagggtcccagataactctacctggagccaaatatacaactttgctacaaagttacaaaactttttcacaaagactgattctgtacattcaaagactcttcagaatcacctggaggttttgctaaggacagattggcagaccccacctgcagaattttaaattctataggtgctacaatctaaaaggttcgtgtcctctcaaatctaaaag

SEQ ID NO: 711192 - DNA, 581 bp, Homo sapiens
agctgtaaaaaaggatttttttacaaaagaataacttttcaaggtatgtcctggggtcaaatagagaccaatcttctttattctatatatgtacaactataacagtgtacctcaatcctgaagattccaaatgattcctacaaggcacagcaagatgttcactcatcataraaagattcaattatgtttgctggacagcatctgctaaggcataaagggggaataatgtgttttaggaatatttccaacagcattagagaaagaaaaggtacatggctgggtggtctcattgttgtaaagtggtgagcacagttcattgcagagaaatgcaaagctctcaggaaatgttttagttacgtcatatttaaaataaaacatcggttagtgtgagttaattgggacacaggtaatcttgggacacaagattgcttctagctctgtcttttcattctatgtattgttacctgattttggaagacttcatcgcctcagtctatgaatgaaaagagcttgtttcagtttctgaagccatattgaattcttatctaggtttctggctcacccatcaacaagtatccaga

SEQ ID NO: 711193 - DNA, 2327 bp, Homo sapiens
tatttttgaccatatgaaaaaaaatctgttcttgaattttgatgatatttgcatagtttttaaattacctctggcagaaaaattatgtcaaagatgaacctaaacaaaagggtgagtggcatgtaattaaatatcacgtgggagtgaaggattgtctagaaagtcagcccaaacatttatggctttgtggggtatgtgctaattttgtatctaacccaggaatctcaccactccataaatactcaagcttctaaaacacactttgaaccagtcataacatcttactgctctccatcaatgatgagttaaataaatttttttacatgtgatcattttgtatttgtgtgagagacatgatttttttttcctgaaaattatacttaaactttccaattccccaagacagtcagaatccttgataataaagataagacaaagataatgatccaaataaaattttctgcgaaaaagaagatttaaaattgagtggaaattttagatcagtccatgaacaggtagagtattaatatgtaagcaagagaatttggtccgatctgagcattgtcagtaacaaattttttaagttttaagaagtaatttaattattccagaatttctcatttctttaaaaaggaagctatctaatacatggagttctgcatttcaaggaatgaaattaccttgctcaaatagaggcatatatatgtaaatataaagcatagtggaagtggaacttgatgggcagtaagtaaaatgctaaaaataaaggaacgaaagtgtgtttttcaaagtgagttctaatttgttggatgccgtctttaaatgcttaagatacaaaaacaaactcaaagggaaaacaaaagtaaattgtgacagttatcttccatttttaaagattttaatttaactttcaaataacatgaaaacttttcccagataatagtttatctttttcacagaagtttgatattgcagcaataagtctgtgaaagaagcttttctatttgaccaaaaattaattttatttcctatgtatctttggcaataagaggacacctcatgatttgtggacattatgtcatgtgttttgtgacgtttgataagaacatgacactaggcttggtgaacatttaaggtagtttccattcggatgcatagcccacggggtgaattcctgatgcacagggctagtgtatgagatcacctcagcaatgtgtaattagtgtgtttcaataaacagcatgtctccttgtgaagcacggggaattgaaagcacccatgatttaaattatttatttctgcctttattattttattactattagtcttttaaagatataaatcacaagtgatttatatataaaaccactctacttttaaatttttatttctgcttttattatttgattaccactagtcttttaaaaaatataaaagtagagtggtcatttgcatattcttagatttactagtattataacgtacttgcgtcaagcaagttatgtttcaagaaaaatgttcaggccrggtgcagtggctcacgcctgtagtcccagcactttgggaggccgaggcgggtggatcacgaggtcaggagatcgagatcatcctggctaacacggtgaaaccccatcgctactaaaaatacaaaaaattagcctctactaaaattacaaaaaattagccgggcatggtggcaggcacctgtagtcccagctactcgggaggctgaggcagaagaatggcgtgaacctgggaggtggagcttgcagtgagccgagatcgcgccactgcacttcagcctgggcgacagaggaagactctgtctcaaaaaaaaaaaaaaaaaaaaaaagaataaaaatgttcattctattcttgagtgtctgaaaatacctctctgttacattcatgcatgaaaaatcatctggctgggataggattttttacctctaaattgaatgtgtggtgtgatggcctgctggcattatatgttataaagaagtattaagcaacaaatgttttgaaaactgctgtggcagcactattgatctagatgtaagagacttagagcataggtaattttgaatgcctgttttttcaaataagttttttggccaggcgtggtggctcatgcctgcaatcccagcactttgggaggccgaggcgggtgaatcacttgaggtcagaagttcgagaccagcctggccaacatggtgaaatcccgtctctacgaaaaataccaaaaagttagttgggcatagtggcgggtgcctgtaatcccagctactcaggaggctgagacaggagaatcacttgaacccgggagg

SEQ ID NO: 711194 - DNA, 453 bp, Homo sapiens
aattcacctgtttcttcagatttgggggcagtgtcttgtcttaaaatctcagttttctgatagaataaaaaagtcaccgatttttcagtttatttagcttttacttgttttaaacataggagyagtgactgttaaggtttttacacgtcaaaactaaagttggagatctgcaagatttttgtatgtattatttcattttccctgtcaaacttcctgtgagctattgggcaatttacttcatctcagaggcagggcactctttcttgcagatgttaatcatttaatttcaaagaactttgtggcatatgataactttacaacaaagaaaataccacaatattgtttcccatattccatccatgatataattttattacctttctctctttagagataaaagtaaataggtttccacagcttaatttcaagaaattatttattcatttatttata

SEQ ID NO: 711195 - DNA, 453 bp, Homo sapiens
aattcacctgtttcttcagatttgggggcagtgtcttgtcttaaaatctcagttttctgatagaataaaaaagtcaccgatttttcagtttatttagcttttacttgttttaaacataggagtagtgactgttaaggtttttacaygtcaaaactaaagttggagatctgcaagatttttgtatgtattatttcattttccctgtcaaacttcctgtgagctattgggcaatttacttcatctcagaggcagggcactctttcttgcagatgttaatcatttaatttcaaagaactttgtggcatatgataactttacaacaaagaaaataccacaatattgtttcccatattccatccatgatataattttattacctttctctctttagagataaaagtaaataggtttccacagcttaatttcaagaaattatttattcatttatttata

SEQ ID NO: 711196 - DNA, 588 bp, Homo sapiens
agttagaaaaataatgaggaaagtgagaaaataagtatttctctttgaaatgcccttaagacgattttcaccctttagagtgattcagaaatgccttcagtgtaggagcagtttaatctagcttaggagtctgttcactgagaatgcactggctttagtcaaaactcatagagcaacatttctaagaaattattgtatcttagaacctgttattagttgaattcctttcatctggtgaaaagcactctctatagctatcattttaaaatgtcagataataaccacacatctaaatactgtgaaactttgtggaaagaaccaattactattaaatcaacaaactgacttaaaattaaaatttaaattttagggattagaacttaagtggaaagtttggaatctttgtttactggaagaaaaaatacacacagcctgagtgttcaawttattcatgcatcgttaaagagatattaattaaagctgcttttgtcctgaaagcacagtaataaaaaaaaaataatttccctgacctcatggaagctaattctaataaaggagacagagaaaacaagtaaatacataatatgg

SEQ ID NO: 711197 - DNA, 585 bp, Homo sapiens
aataaatatactgaatgaatgaagaaataaatgtcttctacaagacttattttcaaagctggagcatacttaaataatgggagagaaaaataagccaccctggaaagatttgctatggaaaagagagcattatttttctacattatttttaaatcatcctccttccacttggagaactgctgatcatgagagcagcacagtgaccttgtcagactcctgcctaattcttgaacttctctatgaagcaagtaaatgaaatctgttccaaaaactgctgtttctttttcttctgatacttgaaaatgtgaattcacctttctgagtagattttgatttggggtaagttacaaaatgggccttagataaaagtaagaaaaagaaaaatgaggttctggacaargcagtactaaaattattctataaattaatgtaaaggtactgtcttgtttgggtatgaaaaatattttggtgttaatttgttttttaattgcgtgaggcttgggaactggtattcggtgcccttgaagtagatggggatagtggagatgaagaaattagctttgctgagagtgattgcatatggta

SEQ ID NO: 711198 - DNA, 2886 bp, Homo sapiens
ttgggaaaatggcgggggtcagcacagtcagagggctaatcctcgtcctgggaaaaccatggtatctcccctgccaggaaaatattgctcactcttaactgtcatggtacacgcagcagccaggcagctgacataaagccactctggtgtctgcgtcctcttggggtcttaggattctcacaggaactcactctagccaaagttttagcacaacatttcagaagcggctattttctggcctggcagatatgatccgtgcagtgtttttttctaaccattttaagctcatggaatgtttcaggatggcccactgtgatgatgactgatggctagtcacttttgtaatggaaactgggtcccctgtgcactggcttagccccattaacatttctcaaccctccgttggatagattactgactcttttcataagctttctgaccttgtcttaagctttacaatccacggtgatgaatttatagagtgattgtgackatgtatgagtagtgtaacagagataaatgggcatttgatgttgacaaagcggagaaaaaaatattgttctccacaccttttgttagcaaacacatgattcactagaactcttttttagtgatttatctataaatcttcttttctcacttaataaaatgcctcccattgctcttccgaggctgacaccatggctttgtaatatattattaaagccatgtcacgctcaagaggcagtgagcttggcttcacagcagtgttattttaccttctgtttctaaaaatgatcaaacagttccaaggacgtattagctgcttctgtattattcccaacaacttcctttgtaagcaaccagacctacctaatgctttggaagtgggtatttttctttcataaagttcttatatattttctatgaagtttggggaaaactatgaaaaatgaaccacaggagttgagaaaatagttgtttttcttaaaattatattcagaagaatcattttatacaatgttctggacctaacaggttgaatattattactattatcctgcgactcttttgctggcacacttgaaaaagccatattctcttttttagggtccaaaattaaaggtatgttattttaatttcattttatttatttatttttacttattcatttacttacgtattttgagacagggtctcctgtttctcaggctggagtgcagtggctcgattacggctcactgcagcctcaacctcccaggctcaattgattctcccacattagcttcctgagtagctgagactatgggcgtgtgcccctatccccagctaattttgtatttcttgtggaaagagagtttcaccatcttgcccaggctggtctcaaactcttgggttcaagccatcagcccacctcagcctcccaaaggaatcaacacttttttgaagatcttcaggggtttcttacatgcagctaagttggacccactgaaaaaggttttgagagatgcttagagtttgggctcttggagatgtggagaaatagccatccagggagggtggcagcaactctgagttaggtttcacaagagatttggtcaacttgggctgtgttgtgtgaggatgatcagtaagtagcaaacaaggctaaaaagagagtttaaagccagatgaggttaatataaagtccctattaacaattttgatgttttgtttcataagcagaaaatatattctacatttttacattggctagatgacataattagagcagatcctcaggaagataaatctggcagtaatgagttggatggaacagggagaaaataggttggaaatagggccatcagctgggagactgcaaaagttcatgcaagtggtaatgaggacctgacctcagaaaataagggtttcattagaaagaaggaggcagggacatgagactttctggtaaactggattgaataattccaggtaaattcaaaaatgatatgcagaaaataatgaagaaatttaaaccattctgtcatgcaatgtaaacatgtcattcgctcaaagcctgttatcctaatattacatgacagtgtcctctgggttattttccattacaagaagttacagtagctgataagcctgtgactaatttaaaatataattgttgttctgtctttctgcaacacagtttgagtttcgatcctttaagtaaacaatataaacaattatagtcaagttcaatattaggagcctgattcctagaaacagaaaaagggcttgagaaatgtttctagctataaagcaaatttgatcttcaaattgtcattttccatctatggtggcgcagtcattgtgagtgaagaccttgtcccaggtcctagaatgagtgaggttttcagatactgacacaagtggaggatataaattaaacaatgaagacatgttggggaccaccaggttaatagatcactagaaattcatttggagaagaaatttcataaattttagactgttagccctggaagaggtttaaagatcacttagttaagtgtatgagttttagagtcaagccgaagtgggtttcaattcacagctccttcttgtactagatgtgtggcctttatttcactagtagtcattttggtgagaagtttctccatgttacagatggagacacccccagctcacagaatcatggcaataattaaataaattaatggttgcgaggtgcttagcccagtatgtagcaaacactcagcatacaacagctgttattagaagtaagatgaatgctatgattcaggtctcctgaacgcggactgagtccccctccacagagtcatgccctctcctcttatattcccactttaaagtattcaagtattaaaagtaatggcaaaaactgcaattaca

SEQ ID NO: 711199 - DNA, 2886 bp, Homo sapiens
ttgggaaaatggcgggggtcagcacagtcagagggctaatcctcgtcctgggaaaaccatggtatctcccctgccaggaaaatattgctcactcttaactgtcatggtacacgcagcagccaggcagctgacataaagccactctggtgtctgcgtcctcttggggtcttaggattctcacaggaactcactctagccaaagttttagcacaacatttcagaagcggctattttctggcctggcagatatgatccgtgcagtgtttttttctaaccattttaagctcatggaatgtttcaggatggcccactgtgatgatgactgatggctagtcacttttgtaatggaaactgggtcccctgtgcactggcttagccccattaacatttctcaaccctccgttggatagattactgactcttttcataagctttctgaccttgtcttaagctttacaatccacggtgatgaatttatagagtgattgtgactatgtatgagtagtgtaacagagataaatgggcatttgatgttgacaaagcggagaaaaaaatattgttctccacaccttttgttagcaaacacatgattcactagaactcttttttagtgatttatctataaatcttcttttctcacttaataaaatgcctcccattgctcttccgaggctgacaccatggctttgtaatatattattaaagccatgtcacgctcaagaggcagtgagcttggcttcacagcagtgttattttaccttctgtttctaaaaatgatcaaacagttccaaggacgtattagctgcttctgtattattcccaacaacttcctttgtaagcaaccagacctacctaatgctttggaagtgggtatttttctttcataaagttcttatatattttctatgaagtttggggaaaactatgaaaaatgaaccacaggagttgagaaaatagttgtttttcttaaaattatattcagaagaatcattttatacaatgttctggacctaacaggttgaatattattactattatcctgcgactcttttgctggcacacttgaaaaagccatattctcttttttagggtccaaaattaaaggtatgttattttaatttcattttatttatttatttttacttattcatttacttacgtattttgagacagggtctcctgtttctcaggctggagtgcagtggctcgattacggctcactgcagcctcaacctcccaggctcaattgattctcccacattagcttcctgagtagctgagactatgggcgtgtgcccctatccccagctaattttgtatttcttgtggaaagagagtttcaccatcttgcccaggctggtctcaaactcttgggttcaagccatcagcccacctcagcctcccaaaggaatcaacacttttttgaagatcttcaggggtttcttacatgcagctaagttggacccactgaaaaaggttttgagagatgcttagagtttgggctcttggagatgtggagaaatagccatccagggagggtggcagcaactctgagttaggtttcacaagagatttggtcaacttgggctgtgttgtgtgaggatgatcagtaagtagcaaacaaggctaaaaagagagtttaaagccagatgaggttaatataaagtccctattaacaattttgatgttttgtttcataagcagaaaatatattctacatttttacattggctagatgacataattagagcagatcctcaggaagataaatctggcagtaatgagttggatggaacagggagaaaataggttggaaatagggccatcagctgggagactgcaaaagttcatgcaagtggtaatgaggacctgacctcagaaaataagggtttcattagaaagaaggaggcagggacatgagactttctggtaaactggattgaataattccaggtaaattcaaaaatgatatgcagaaaataatgaagaaatttaaaccattctgtcatgcaatgtaaacatgtcattcgctcaaagcctgttatcctaatattacatgacagtgtcctctgggttattttccattacaagaagttacagtagctgataagcctgtgactaatttaaaatataattgttgttctgtctttctgcaacacagtttgagtttcgatcctttaagtaaacaatataaacaattatagtcaagttcaatattaggagcctgattcctagaaacagaaaaagggcttgagaaatgtttctagctataaagcaaatttgatcttcaaattgtcattttccatctatggtggcgcagtcattgtgagtgaagaccttgtcccaggtcctagaatgagtgaggttttcagatactgacacaagtggaggatataaattaaacaatgaagacatgttggggaccaccaggttaatagatcactagaaattcatttggagaagaaatttcataaattttagactgttagccctggaagaggtttaaagatcacttagttaagtgtatgagttttagagtcaagccgaagtgggtttcaattcacagctccttcttgtactagatgtgtggcctttatttcactagtagtcattttggtgagaagtttctccatgttacagatggagacacccccagctcacagaatcatggcaataattaaataaattaatggttgcgaggtgcttagcccagtaygtagcaaacactcagcatacaacagctgttattagaagtaagatgaatgctatgattcaggtctcctgaacgcggactgagtccccctccacagagtcatgccctctcctcttatattcccactttaaagtattcaagtattaaaagtaatggcaaaaactgcaattaca

SEQ ID NO: 711200 - DNA, 627 bp, Homo sapiens
atgaattgcttttaaaaaaatacgttgaatttttccatgtaaattttaaacttggtaaagcgtttgagaaatgaaatcatccttgtttactgcttacatacttacagcctacccacactgggtagaaaaactgaatgatactcagttagacagtgggagccctctccgatgggaatgtaaggctactggaaaacccagacccacgtatcgttggctgaagaatggagtacccctctcacctcaggtactgttgggagttattaacctgttctgytgtaattttagcgagatttcacacaggacaaactaggcttctttagtcttattgaaagccttttcctgtttctgattcgtataataggacatgtttgtgttaaggatgaatgttacggggattaactgagaatttaactcaatgtctgggatatagtagtcatatattttaatatattttgagtgagaaacataacaaatatgtaagcattttaaaattttaattacctcattacattttttggtaatacagtgtttctttaaactgttttcaatcctataaatttttatgaaactatcaatattatcatagatttatttccatttgtagctaacctttagatatcacctaaa

SEQ ID NO: 711201 - DNA, 1361 bp, Homo sapiens
taaatcacaaataacgctagaatgatttgccttttaaagattccccaaatagtccaggtacagtgctcactcctgtcatcccagcactttgggaggtcgaggcggatggatcacgaagtcaggcattcgagaccagcctggccaacatggcgaaaccctgtctctactaagaatacaaaaattagccaggcgtgttgacaggcgcttgtaatcccagctactcgggaggctgaggcaggcgaatcgcttgaacccgggaggcggaggttgcagtaagccaagattgcgccgctgtcctctagcctgggctacagagcaagacttcatctaaaacaagacaaaacaaaacaaaatcccccaaacaaggaatcaatcactggatgatagtatttcaggcattcctgaggtacacactcctggcaactatctcttccacttattttttttatttcttctaacaaaaatactaactaaacttgactcaataattctttgttaatgagagagaaaaaaattgttcttatttcaacatatacttcagatagaatttagtacttgaataagcattcagaataaaatgcgaaagtattattaagggcacaaaagtattatgcacttaacgattatgccgataattgttaagggcgcaacctaacaatgtaggatgtgacaaaaatatcaatatcggctttattcaccttcatgatggaatgtaaggcattcatttcttatttctccttggctttggagttagctcactcatttctacattctagctgtctaactagaaaggcaaaacatagccatgtgtggtggctcatgcctgtaatcccagcattttgagaggccgagatgagtggattgcttgagttcaggactttaagaccagcctggcaacatggtgaaaccctgtctctaccagaaatacaaaaaattagcctggcatggtgtcgtgttgctgtagtcccatagtcccagctactcatgaggctgaggtgggaggatggcttgagcccagtgggtggaggttgcagtgagcagagatggcgccactgtactccatcctrggtgacagagtgagaccctatctaaaaaaaaaaaaaaagaaaagaaaaagaaaagataaaacataaataagcaaaatagaattttctctataagttctagaaatctaataatgccaaatttttagcatttaagtaaattgtactagagtgacagtttataaaggaacactatttaaacaagagcacctgtagacgtgtcatattttaagggcaattataagaaattctatccaagttgatattttccaataatataggattgctatttttttttctgatacatggttaagcaat

SEQ ID NO: 711202 - DNA, 655 bp, Homo sapiens
taaatatcaggagttgcaaagcaaaaagctgaaagcattctaaatcatggtggcaacgcaagtaaatatagtcatagtccatataggaaaaattaaagatttacaaaaaacagatayattgtagaagcattgtaggtttgcttttattgagatagggtctcacaatgtcacccaagctggagtgcagtggcacatacacagctcactgcaacctcgaccttccagggtcaagcatttgtcccacctcagcctctcgagtagctgggaccacaagagcacactgtcaccaccatgcctggaaaatttttttaatttgttttggtagagatggggtctcaccatgttgcccaagcttgtcttgaattcatgggcttaagcactcctcccagcttgacctcccaaattgctaagattatacgtgtgagccactctgcccagcccactgtgggcttttttaattacatttttgatgagtacttaaggacaatgataaaataatggtatattatcagtggaagaaatcattgaacacggtagaaatttcatttgaagagaaaatgtctgcatggacacaaatacattaaaaatactggaaataaatgcagctaattgttcacaggttatctctgagaagaggattatagataattttcaa

SEQ ID NO: 711203 - DNA, 655 bp, Homo sapiens
taaatatcaggagttgcaaagcaaaaagctgaaagcattctaaatcatggtggcaacgcaagtaaatatagtcatagtccatataggaaaaattaaagatttacaaaaaacagatatattgtagaagcatygtaggtttgcttttattgagatagggtctcacaatgtcacccaagctggagtgcagtggcacatacacagctcactgcaacctcgaccttccagggtcaagcatttgtcccacctcagcctctcgagtagctgggaccacaagagcacactgtcaccaccatgcctggaaaatttttttaatttgttttggtagagatggggtctcaccatgttgcccaagcttgtcttgaattcatgggcttaagcactcctcccagcttgacctcccaaattgctaagattatacgtgtgagccactctgcccagcccactgtgggcttttttaattacatttttgatgagtacttaaggacaatgataaaataatggtatattatcagtggaagaaatcattgaacacggtagaaatttcatttgaagagaaaatgtctgcatggacacaaatacattaaaaatactggaaataaatgcagctaattgttcacaggttatctctgagaagaggattatagataattttcaa

SEQ ID NO: 711204 - DNA, 655 bp, Homo sapiens
taaatatcaggagttgcaaagcaaaaagctgaaagcattctaaatcatggtggcaacgcaagtaaatatagtcatagtccatataggaaaaattaaagatttacaaaaaacagatatattgtagaagcattgtaggtttgcttttattgagatagggtctcacaatgtcacccaagctggagtgcagtggcacatacacagctcactgcaacctcgaccttccagggtcaagcatttgtcccacctcagcctctcgagtagctgggaccacaagagcacactgtcaccaccatgcctggmaaatttttttaatttgttttggtagagatggggtctcaccatgttgcccaagcttgtcttgaattcatgggcttaagcactcctcccagcttgacctcccaaattgctaagattatacgtgtgagccactctgcccagcccactgtgggcttttttaattacatttttgatgagtacttaaggacaatgataaaataatggtatattatcagtggaagaaatcattgaacacggtagaaatttcatttgaagagaaaatgtctgcatggacacaaatacattaaaaatactggaaataaatgcagctaattgttcacaggttatctctgagaagaggattatagataattttcaa

SEQ ID NO: 711205 - DNA, 624 bp, Homo sapiens
ccttactctcaccctttcaagataactgagtcgctttcttttcaaaacttaatttcctggctaagtgcagtggttcacacctgtaatccaacaatttgggaggctgaggcaggatgattgcttgatgccaggagtttgaaaccagcctgggaaacatagcaagaccccatttacaaaaaaatacaaaaactagctaggtgtggtgctgcacacccgtagtcccagctactctggtgactgacctgggaggatcacttgagcctaggaggtcaaggctgcagtgaactatgattgtgccattatactccagcctgggcaacagagtgagaccctgtctcaaagaaatgaaaaaaaaaaaaaamaaaaaaaaaacctttaattttctgcatttaactcactgtcatttagatatgccgtaagtatttcatggttttttcctcctcccaacacccctctccctgccacggtgtgggaagctcaggttctactctttaccattctctgtgtgaaattcaactgacttctctacctctgtgggcctcaatattggactctatactatgaggaagttaactaaaagattttgaaagcatcttcatgaatgaaaaatgtaagcttctcaac

SEQ ID NO: 711206 - DNA, 624 bp, Homo sapiens
ccttactctcaccctttcaagataactgagtcgctttcttttcaaaacttaatttcctggctaagtgcagtggttcacacctgtaatccaacaatttgggaggctgaggcaggatgattgcttgatgccaggagtttgaaaccagcctgggaaacatagcaagaccccatttacaaaaaaatacaaaaactagctaggtgtggtgctgcacacccgtagtcccagctactctggtgactgacctgggaggatcacttgagcctaggaggtcaaggctgcagtgaactatgattgtgccattatactccagcctgggcaacagagtgagaccctgtctcaaagaaatgaaaaaaaaaaaaaacaaaaaaaaaacctttaattttctgcatttaactcactgtcatttaratatgccgtaagtatttcatggttttttcctcctcccaacacccctctccctgccacggtgtgggaagctcaggttctactctttaccattctctgtgtgaaattcaactgacttctctacctctgtgggcctcaatattggactctatactatgaggaagttaactaaaagattttgaaagcatcttcatgaatgaaaaatgtaagcttctcaac

SEQ ID NO: 711207 - DNA, 1322 bp, Homo sapiens
gatctatttctcattctagcatgtggtctcagcattctgtacaaatgattttactggcttcrtaaactcccaagttaaagaatctctttaggaagaatcttaattgacctcttgaattgttggcctggtacccagagtaaaagaattgtgttttaataaggattacttttgtcgtggtttattatgctttagcaccacacgctaattgatgtagttgcaggaaataaggtaagacatgccatggtttggttaaaagcttcattacatgtatttatgaagagtcttatggatgaaataatttacaacatctattacatatattgaaatgtatgctactgcttccatttcttataatctgcggaacccaggtctgaaaccacttggtggaaaacgtttttaaattttattttggtaccaagtggcaataacaaaagttcaatgactggctgagtagcaatttggactgatttctaaatgtgggcacagcattaatgaaagacatttcttatttttgagataaagcaaacctacatgaaagagaaattacatcatttgggtactagtttcagtgaatgcctgacaatgggggagtcggaagagtggtgtaatgacggaatgctaaagctaggtgagttaggaagggttatttggagataagccttgagtaggacctcaaagaagggaagcaatgtggataagctagtaggaggctgatccagaagttaaatattaaaagtatagcactagagatagcaacaaccatgtgtctagactaaagagcttgttttttttttgtttttgtttttgtttttagaaatgagtatggatggagagaggggattatagcagagcgaatagtgttgaagtcttggtggggacattccgatttaataagtaagtatagtttctttatcaagagtaaccattcgaaaatgctatttgaggattagttaccaatgcaactaaacttcataatgaatgatgatcatggttagcacccactaagtgcttactatgtgttatatactattttaaaaacttcatgtatgtccttgtgtttaatccaggattttgtaaccatgatgcaattgacatttaggattaggcaattcttacttgtgggggactgacctgtgcactgtatgatggttagcagcatccttgacttctattcaccagatgccagtaatcacaccaaaacatccccacacaaccacaagttgtgacaatcgaaagtgtctccagacattgccaaatactcgagggcaaaatctccctagttgagaaccactgatttgttcttaacaccacgtttcagttaa

SEQ ID NO: 711208 - DNA, 1322 bp, Homo sapiens
gatctatttctcattctagcatgtggtctcagcattctgtacaaatgattttactggcttcgtaaactcccaagttaaagaatctctttaggaagaatcttaattgacctcttgaattgttggcctggtacccagagtaaaagaattgtgttttaataaggattacttttgtcgtggtttattatgctttagcaccacacgctaattgatgtagttgcaggaaataaggtaagacatgccatggtttggttaaaagcttcattacatgtatttatgaagagtcttatggatgaaataatttacaacatctattacatatattgaaatgtatgctactgcttccatttcttataatctgcggaacccaggtctgaaaccacttggtggaaaacgtttttaaattttattttggtaccaagtggcaataacaaaagttcaatgactggctgagtagcaatttggactgatttctaaatgtgggcacagcattaatgaaagacatttcttatttttgagataaagcaaacctacatgaaagagaaattacatcatytgggtactagtttcagtgaatgcctgacaatgggggagtcggaagagtggtgtaatgacggaatgctaaagctaggtgagttaggaagggttatttggagataagccttgagtaggacctcaaagaagggaagcaatgtggataagctagtaggaggctgatccagaagttaaatattaaaagtatagcactagagatagcaacaaccatgtgtctagactaaagagcttgttttttttttgtttttgtttttgtttttagaaatgagtatggatggagagaggggattatagcagagcgaatagtgttgaagtcttggtggggacattccgatttaataagtaagtatagtttctttatcaagagtaaccattcgaaaatgctatttgaggattagttaccaatgcaactaaacttcataatgaatgatgatcatggttagcacccactaagtgcttactatgtgttatatactattttaaaaacttcatgtatgtccttgtgtttaatccaggattttgtaaccatgatgcaattgacatttaggattaggcaattcttacttgtgggggactgacctgtgcactgtatgatggttagcagcatccttgacttctattcaccagatgccagtaatcacaccaaaacatccccacacaaccacaagttgtgacaatcgaaagtgtctccagacattgccaaatactcgagggcaaaatctccctagttgagaaccactgatttgttcttaacaccacgtttcagttaa

SEQ ID NO: 711209 - DNA, 1432 bp, Homo sapiens
agatttgttctccaagtatctccatcttccccacttcccctggtattgctgtttttcttagtgtcacttttgccttctcctctcatctgtacatatttcttttgcggttttcttagttattctactcgtattccaatacttaaaacatctgtatcatataactctggtgatattcctgatccttcacaaaatgttgtgtataattaataaaattacagtgtgtataaatatgtaaaaataaataaggataaattaaaaataaaaataaaatgaaatatataattataaataaaataaaatgaagataaaatgtaaaaaataacctaacaggtgatttttttgacatagataagaacaaccctagtagggacttgccatttttatttctgttwttaaagcagatcttgaatatgtaatgcccgttacatccatttcttttagattattaagattaagacattgtttaaatacttctttctacttttattggctattttttttaaaaaatatattttatggttccgtgctctccctctggcatttgaatgatacaaaaatgaattataggaaccaaaacataatgctacttgtttcatcttaaaaccttaagttgcttacaatgaaatgaaggaggtaagatgttaccacataaagagaaaacactgtcatagagtttttgtttagagagatctaggacatcttggatatgcaaaaatgacaaggttggtagaacattgagggacagattagatgaattctcgttacttgtttttcccattcacatatccctctctctcttctctcttccgtcctctctgccttcctccctccttcccaaggtgtcttattacctttccctccctttgtccttctgtttttttctttggtggatgaatgtttgtaagatgtccattttgaagctgaaagcctcaaaggctcaaaggcagataattctctttttggaagtcattttacaaaatcctttttatgaacctgtctatagggaaatttcttcctgtcctggctgtgcaatgaaccatttatttgttctcatggataccaatacttattcattattttaaactttgtattttcttttttttttcctcctaagaagttcattttgctctttcttctgattttcctacctgtttgtaataacaggaattagtctttccatgtgtctgtgttgatttttttaatattactttagtgaaaattatagaggttacaggtttaggagctgttggggaaataaaatttaaaaccaaagtctcccaactgagaaattctctctataaaagtaagagagaaagaaaacaaatctattttttattcttaaacaagcattaaatcagaatgtgatgtacatcacaggtaatccactaagagatggcaaagacagaaagaactctcactcttttatgaagcc

SEQ ID NO: 711210 - DNA, 2285 bp, Homo sapiens
gttctccagaggtagttccttcccagaccctgagacatatcaaagttgtccgaaagtggagccttgttattaatcccctctcaccacaccggttcctgcctgcctttatgccccacctggagacatccatttctccagacattgaacagggcagagaatagagcccatttgtatctgtttttcttggcatctttcaaagtacttggcacagaagagaaactcaggtgcattgtgtgatgcacaatgcctcccaaatatgtgtgatgtgatgcctcccaaatattattttactttttgagtgtggcaactgaaatgtcgaaaattacatatgtggttcgcattatcatttctgtcagacactgcacatctagcccccaaatcagaagacctagaacgaactgggagtcctctctcccatttgtccaaggtttgccttttcagttacaatttcctccttagaattttgtctgtcataatattctcccaaatattattttgggaggcatgacatatatgtatgacaatgctttttaaacttctaccaactttcccctaagaagcaagagaataccatatctctggcaatctaaggatataatccaaacaatttaccatgactgtaaaatttcttttcaatccacttttttttcccttgaaagttttgtagattttatattttactcttcagtattcctcttttttttttctgcattaatgttgtttttggggaaaaaaacaaaaaaacaaaacaaaacaaaacaaacaacttctaaaaactgaggcctctccacagaatagcccttttcagggttaattatttggttactttttactcacagtcactttttagctgccaggcttgcctttgttttctaaactcccatccgggttatttttttttcttttaacgacttcctgctatttaaccggtgtgtggctttgctagggctgcaatgacaaaataccacagtgtgggtgactttaacaaacaaaattaccttctcacagttctggaggctggaagtccaagatcagggtgttggcagggttgatttcattcttgatgcctctctccttggcttgtatatggccatcttctctccttgtctttacatggtcttcctctgtgtgtttgtgtcttaatctcrtcttctgataaggatgctagtcatatgggattaaagaccccctttatgacctcatttgagctcagttatgtctttaaatgttctgttttcaaataaagtcacattctaatgtactgtgaattaggaccttagcatataaattggggttgggtgacacaactcagtccataacaataaataatcacaaatgttttttctctcatggagagtaactactccctgatggaaaactatgactatgctttggtaaatgtaagctatgttatgattatgtgaaaaaagatctcttttctatcacagaaaagcctttggatcactgtgttcttgggggttgcaggtaagggggatccctgtagcctctgaaggtccttctgaggctttcattggacacttgaattttaatggagtggactttagactggtatatgggtttctgaggatcctgaaatactcatgttgtcattatttatgttctaatacaacttggtagaagttaaagcagattatagtggaaagagcattaggagaagacagagaaaccaggccatcacttccactctgccactacttagctggtgaccttaggcaagtcctgtccatgtctgagagctgtggtatctacgtccacataggaagagagttggcatacatgcttgatgagctcctttttttctttgataactgttcatctgttaacatttcccaacgggaagaagtcatcaggagctttctgtttaactatggtctccactgtgtatcttagtgcttcaatatcagttttactttttccttaattacttactacttgcctgtagatcttccacaaacttttctaatcttcttttacattataggagtagagctgcatgactattaagacctgcatatacctttaatgttatttatcaactttcagattgtcacctcttcagtttacttctctatcttccatgttcctaaagcaaatctagaattgaaattgtctggtaggagcactactaggtttcctgttttactgaggaaatgtcgaatctgagaatgaccttaaactgaaacatgtagaaccataggcctgaatgtctttaaggccataaagttagtttcgtctttcagtattttatttatattcttgcccca

SEQ ID NO: 711211 - DNA, 2285 bp, Homo sapiens
gttctccagaggtagttccttcccagaccctgagacatatcaaagttgtccgaaagtggagccttgttattaatcccctctcaccacaccggttcctgcctgcctttatgccccacctggagacatccatttctccagacattgaacagggcagagaatagagcccatttgtatctgtttttcttggcatctttcaaagtacttggcacagaagagaaactcaggtgcattgtgtgatgcacaatgcctcccaaatatgtgtgatgtgatgcctcccaaatattattttactttttgagtgtggcaactgaaatgtcgaaaattacatatgtggttcgcattatcatttctgtcagacactgcacatctagcccccaaatcagaagacctagaacgaactgggagtcctctctcccatttgtccaaggtttgccttttcagttacaatttcctccttagaattttgtctgtcataatattctcccaaatattattttgggaggcatgacatatatgtatgacaatgctttttaaacttctaccaactttcccctaagaagcaagagaataccatatctctggcaatctaaggatataatccaaacaatttaccatgactgtaaaatttcttttcaatccacttttttttcccttgaaagttttgtagattttatattttactcttcagtattcctcttttttttttctgcattaatgttgtttttggggaaaaaaacaaaaaaacaaaacaaaacaaaacaaacaacttctaaaaactgaggcctctccacagaatagcccttttcagggttaattatttggttactttttactcacagtcactttttagctgccaggcttgcctttgttttctaaactcccatccgggttatttttttttcttttaacgacttcctgctatttaaccggtgtgtggctttgctagggctgcaatgacaaaataccacagtgtgggtgactttaacaaacaaaattaccttctcacagttctggaggctggaagtccaagatcagggtgttggcagggttgatttcattcttgatgcctctctccttggcttgtatatggccatcttctctccttgtctttacatggtcttcctctgtgtgtttgtgtcttaatctcgtcttctgataaggatgctagtcatatgggattaaagaccccctttatgacctcatttgagctcagttatgtctttaaatgttctgttttcaaataaagtcacattctaatgtactgtgaattaggaccttagcatataaattggggttgggtgacacaactcagtccataacaataaataatcacaaatgttttttctctcatggagagtaactactccctgatggaaaactatgactatgctttggtaaatgtaagctatgttatgattatgtgaaaaaagatctcttttctatcacagaaaagcctttggatcactgtgttcttgggggttrcaggtaagggggatccctgtagcctctgaaggtccttctgaggctttcattggacacttgaattttaatggagtggactttagactggtatatgggtttctgaggatcctgaaatactcatgttgtcattatttatgttctaatacaacttggtagaagttaaagcagattatagtggaaagagcattaggagaagacagagaaaccaggccatcacttccactctgccactacttagctggtgaccttaggcaagtcctgtccatgtctgagagctgtggtatctacgtccacataggaagagagttggcatacatgcttgatgagctcctttttttctttgataactgttcatctgttaacatttcccaacgggaagaagtcatcaggagctttctgtttaactatggtctccactgtgtatcttagtgcttcaatatcagttttactttttccttaattacttactacttgcctgtagatcttccacaaacttttctaatcttcttttacattataggagtagagctgcatgactattaagacctgcatatacctttaatgttatttatcaactttcagattgtcacctcttcagtttacttctctatcttccatgttcctaaagcaaatctagaattgaaattgtctggtaggagcactactaggtttcctgttttactgaggaaatgtcgaatctgagaatgaccttaaactgaaacatgtagaaccataggcctgaatgtctttaaggccataaagttagtttcgtctttcagtattttatttatattcttgcccca

SEQ ID NO: 711212 - DNA, 758 bp, Homo sapiens
aggtgctgccttggagaaggaggaccagactccagattccacaggaaggaaaggactcttcggaggcaggatcctgagggcagctgagagtcatgggactcagcagggacacagtgagcaggctggaagggcgggaggcaggccagaggggatggggcagtataatcccactgtcccctggcctcgcagggtccctggtttgcagagccctccttgcctgggatgggctaaggaggcagtgtatgagaatatctgggggtcatggtgttgacacccctggaattggcacattacyacacagctcacacgttttcacagtggtttaggggggaagctgcataaggcggggctgacagcaaggactttgacattagacacgcttcagttaagcctcgctcccacttcccaatctaggggactaggggatcctcagacagcccagatgttcctcagactactcagcacctttctagttaggcaggatcatgccaaattctaaagaagccagtacgcacctccatctgtgtcttcccctgccaggaagttggcagaggccactgttccagacagcagagcctcaatcagcctgaatccctgagcgacctgcatggagcagattccctcgccagcccccatgagtgggagtgagaggtaaactactgcgttaagttatgagatgtttagagctgtgtgttacagcagcataaccaagcctaccctgactattacacagggtcaacctcacctttgtaaaatgg

SEQ ID NO: 711213 - DNA, 758 bp, Homo sapiens
aggtgctgccttggagaaggaggaccagactccagattccacaggaaggaaaggactcttcggaggcaggatcctgagggcagctgagagtcatgggactcagcagggacacagtgagcaggctggaagggcgggaggcaggccagaggggatggggcagtataatcccactgtcccctggcctcgcagggtccctggtttgcagagccctccttgcctgggatgggctaaggaggcagtgtatgagaatatctgggggtcatggtgttgacacccctggaattggcacattactacacagctcacacgttttcacagtggtttaggggggaagctgcataaggcggggctgacagcaaggactttgacattagacacgcttcagttaagcctcgctcccacttcccaatctaggggactaggggatcctcagacagcccagatgttcctcagactactcagcacctttctagttaggcaggatcatgccaaattctaaagaagccagtacgcacctccatctgtgtcttcccctgccaggragttggcagaggccactgttccagacagcagagcctcaatcagcctgaatccctgagcgacctgcatggagcagattccctcgccagcccccatgagtgggagtgagaggtaaactactgcgttaagttatgagatgtttagagctgtgtgttacagcagcataaccaagcctaccctgactattacacagggtcaacctcacctttgtaaaatgg

SEQ ID NO: 711214 - DNA, 758 bp, Homo sapiens
aggtgctgccttggagaaggaggaccagactccagattccacaggaaggaaaggactcttcggaggcaggatcctgagggcagctgagagtcatgggactcagcagggacacagtgagcaggctggaagggcgggaggcaggccagaggggatggggcagtataatcccactgtcccctggcctcgcagggtccctggtttgcagagccctccttgcctgggatgggctaaggaggcagtgtatgagaatatctgggggtcatggtgttgacacccctggaattggcacattactacacagctcacacgttttcacagtggtttaggggggaagctgcataaggcggggctgacagcaaggactttgacattagacacgcttcagttaagcctcgctcccacttcccaatctaggggactaggggatcctcagacagcccagatgttcctcagactactcagcacctttctagttaggcaggatcatgccaaattctaaagaagccagtacgcacctccatctgtgtcttcccctgccaggaagttggcagaggccactgttccagacagcagagcctcaatcagcctgaatccctgagcgacctgcatggagcagattccctcgccagcccccatgagtgggagtgagaggtaaactactgygttaagttatgagatgtttagagctgtgtgttacagcagcataaccaagcctaccctgactattacacagggtcaacctcacctttgtaaaatgg

SEQ ID NO: 711215 - DNA, 758 bp, Homo sapiens
aggtgctgccttggagaaggaggaccagactccagattccacaggaaggaaaggactcttcggaggcaggatcctgagggcagctgagagtcatgggactcagcagggacacagtgagcaggctggaagggcgggaggcaggccagaggggatggggcagtataatcccactgtcccctggcctcgcagggtccctggtttgcagagccctccttgcctgggatgggctaaggaggcagtgtatgagaatatctgggggtcatggtgttgacacccctggaattggcacattactacacagctcacacgttttcacagtggtttaggggggaagctgcataaggcggggctgacagcaaggactttgacattagacacgcttcagttaagcctcgctcccacttcccaatctaggggactaggggatcctcagacagcccagatgttcctcagactactcagcacctttctagttaggcaggatcatgccaaattctaaagaagccagtacgcacctccatctgtgtcttcccctgccaggaagttggcagaggccactgttccagacagcagagcctcaatcagcctgaatccctgagcgacctgcatggagcagattccctcgccagcccccatgagtgggagtgagaggtaaactactgcgttaagttatgagatgtttagagctgtgtgttacagcagcrtaaccaagcctaccctgactattacacagggtcaacctcacctttgtaaaatgg

SEQ ID NO: 711216 - DNA, 632 bp, Homo sapiens
tataaaacaagaacctaaatttttgcccagttcatttcataagcctgttataagaatcacatgagatggtatgtttgaatattaccatgtccttttaaaatactgctattaattcttctgaatttttattttagatattcaatactaagaatctccaaaatacgaagattctttattttcagaatccaggatcaagaggaaaggtgctaattcatggattgggtatctcagggttagaaataaaggtaagtacaaaaatgtcaaaattaaattttgttatatgaagatctacattattgcctctggtcagtttcccatttgggagacctatttgtttgcaaaacattaacacagaaaatgactgcacccraagcacatctctcagacaagattcttaatgagttccatccagattcttaacgagttcagggagcattttgtggagacaagcaagtctattggcttgttctttttttttttttaacttttatttttgattagggggtacattttctgtcctgtttcacagcaacttcctgaggtcaaaggaacattagttgttttcctgcccttgaacgatagccttcaaaaaggatgtacgtatggcctaaacctttgatggacataaatta

SEQ ID NO: 711217 - DNA, 1812 bp, Homo sapiens
atgcaacattaaaaaactatattagtatatatttagtaatagttataaaataataaatatatacataaatgcacttgtatttctaattatctctttcttatcacaaggactctctctttgtctccctggtttccacagggtctaaatcaaagccctgcacttgataatgttttaaggcttcaaatatctttagaggtcatttagtctaaactcctcaatttatggataaggaaatgcccaggaaagttaaaaagcctcgtaattaaggcaaagttggaactagaatccaggtttccaaggttcaaggctgtttctccattattacactgcctgaaaaaccagcacgtggtattattgactgactctctacaactcaactttgggattttataacatttatttatttatgttttaattctgaactactctattctcagacacatcgtcaaattttgtacatctacctgaatattgctttgccttatttaatactaaagactaaaagtcaacagttaatttggttccaagagtaaatgaactaattaatttggtggctatttggtttcttgatctaacaggtgttccctcatcacaggccaggagtgaccaagtgtttacagctgcaaaaattgacttaggttggcttcaaatgtgataagtaaggattaggaattaaaacagctctgatcaaagcataaagaacagcctgaacagttagcctttgtatagaaggatagagtataaataaaaggaataatgatgcattccttatttttttctacatgtaggacttgtcattaaagaagggtctgtaggtttgctgctttgaagcactatyctttgacttcaccattatcagccctttccacagcaacacctgctctgcaaatttcaactaacactgctccaactaagaccccattcagagtcatatggtagctagtggtagtgcagaattggtcacaattggtgaccaattctgcactaacatcctacctgatgtcagcagctcactgatgatgtctttttgcagaagctgattaaaaggagccaggggaaagtaattcatcaagcaaaatgaatatactgcatccaataagttttcagaagaaatagtgtgaagataaccagtcagagcactagccataacttccacgaactgtctggggaacaaagaaaagtcagtttcccaacatatacagaaggccaatatctgtaacgattccaaagaaaagagataagaaaatcagccttgcaagtaagtatccacacatcattctggacagttggttatctcataataagtgtatacattcaataaatgttggctattgctgtatgtcttgcacgagacaaacattttatagactttaactcatttaactcacactaaaaaactccatgggtattactattattctcctcatttaaaaaaatgggtaaacaggcttagagattgagtaacttgtctaagaacacacagacaaggaagtagcaaaggcagtattagaacataaggtgtcaggctccagaaccttttcataattatgctagattttctataacgcctggaccaccactacagttttataaccaactaaaattatctagttatcaatactatgggttaaaagaactgcaagcctaatcctaccacccacagctaatggtacacagtataacgtggttaagcacaaatgaagacagaaaagatcaaaatcaggggcagtcgcttgcccagagtgacaccactaataaatggtagataccctttgaacacacgtcaatctgattctcagggcatatgataca

SEQ ID NO: 711218 - DNA, 656 bp, Homo sapiens
tgcattttgctaatgtagtaccatagagactttgaattagtttatattattccaaagtgctgcttttttttttttggtattagcatgcaattaattttactggactccacatgtgaaatcttattttgaattttttttctcctttagaaaggttgtttgctacctgtcccacacatgtacagtcagacctcactcagtcagagacttaagtagaaatatgcycataattagagctccccttgctggttactcaagattcacagtacttaagattcaaactgaagaatcaattctcagatgacttaattgacactttggcaacacaaaacttaagtctcttttaatatattgagatttactagatcaaaatcaatttttatcaaagttgtcaaatatataattgaataaagcaaaagactgcatttccattttggagaaaaaattcatccattcttcttattcccataaccttctttcatctttcattcatctttcagtctcaaaagttgagtctacctcctctttcaatgctgttacatgtaccacttatatgtcctttgtctctgtcccttatctcaacatttttctctctctgttctttccctttaatcctttgttttcaacttagcagagtgggttcatacataagtgatctc

SEQ ID NO: 711219 - DNA, 592 bp, Homo sapiens
taatgttttyacacaaaaacacatgcctacacatgcctacttttcctgggcactaaaccataatatcatgacatcgaaaactcctcctgtcactgaacccacagtggtcatagccatttgcttttaataagattcccccccaaaatacacactttatacatgtggacatgtgggcacacatgcatgtgtgcacaggcacacacacacacacacacaccaaaaaccctggtagaaaggagaaattgaaaaataataacttggagaaatattcctttcttgaaattacaccaatatgtaatgacacattttatacccacttccacttgatgtatcatggaattattagaagcagcaggaatagcatatgatttttacaaatgtctgaattgacaaataagacatgctggttttattaagtaatatacatgcttgttttgtaaggtgactatacaaatcgtttctgctatggtctgaatgtttatgtccattcaaagtccacaggttgaaaacctaagcccaaggtgacagtattaggaggtgcagcccgtggaaggtgattagatcatgagtatggggccctcacgattaggct

SEQ ID NO: 711220 - DNA, 646 bp, Homo sapiens
atattttgcatcttttaggtaagaaaaacattagaaaagaaagcctcaggtcctttgcctctgagaaaatgactgttaaagggaattagggaaacatgttgtttaacttttatgtaaatgatagaggaagactcttgaaaatacacatgtaatatttgacaaacacataattatttgttatgaagaaaaacaaaatgaacacatatgaattccccactgtacttataattacattaccgatacctatttatatgcttctctcctgtcttcatgcctgaggtagctcttatcctgaaattctgttttatctaagaggctttgaggactttaataaggctcactagcccccagtttgctgtaatggtagtggaagtccctttggacttgtcagactcaactacatttgtgtcacctatgtaactcatcatatgctcatctttgaggtgttatagattcacttctgttctttctcatccacattcaatcatttaccagtattggccctacracagaaaaaggtcattttcttatatttttctttatcagatggtaataaattaacacctgaattgcagaatgggaaaactgatataatcttatataacctttaactactatattagcctgttctcacactgctaaagac

SEQ ID NO: 711221 - DNA, 605 bp, Homo sapiens
ttttaggagtccttggtagttggatggaggtaagagggaaaaagaggaaggtatattagtctgttctcacactgctatgaagatactacccaagactgggtaatttagaaaggaaagaggtttaactgactcacagttctacatggctggggaggcctcggaaaacttacaatcatggcagaaggcacctcttcacagggcggcaggagacagaatgagagccagcaggggaaatgccagctacttataaaaccatcagatctcatgagwactcactcactatcatgagaacagcatgaaggaaactgcccccacgatccaattacctccacctggcctctcccttgacatgtggggattatggggattccaattcaagatgagatttgggtgggaacacaaagcttagccatatcagatgatatcaaaatggttacccagtttctggccagaatgactgggagtgatggtaatgccatttgatgagctagcagatatttaaagaaggaaaggagaagaagatctgagtttggggtgtctctgagattttcaagatatatgtggagtagatagttggagttttgctaaatattctggagaaaaca

SEQ ID NO: 711222 - DNA, 637 bp, Homo sapiens
taaaaatttaaaaattagccaggcgtgatggtgagcacctgtaatcccagctacgtgggaggctgatgcaggagaatcacttgaacgcaggaggcagaggttgcagtgagccaaaatcgtgccactgcactccagcctgggcaacaagagtgaaaccccgtttaaaaaaaaacataaataaggaagggcgcagtggctcatgcctgtaatcccagcactttgggaggcagaggygggcagatcacgaggtcaggagttcaagactagcctggccaacatagtgaaaccccatctctactaaaagtacaaaaaattaccgggcatggtggtgggtgcctgtaatcccagctactcgggaggctgaggcaggagaataacttgaacccgggaggcggaggttgcagtgaacggagattgcaccactgcactccagctgggtgacagagtgagactccatctcaaaaaataaataaataaataaataaataaaataataagtatgtatatacaaatatatgtagtgtgtgtgcattttatgaacatgtaatatagacgtgtgtggaatacatatacgtaatttaaagtacagtcatacaatgaagattactgagcagaatggatcttaaaaaattttgaa

SEQ ID NO: 711223 - DNA, 637 bp, Homo sapiens
taaaaatttaaaaattagccaggcgtgatggtgagcacctgtaatcccagctacgtgggaggctgatgcaggagaatcacttgaacgcaggaggcagaggttgcagtgagccaaaatcgtgccactgcactccagcctgggcaacaagagtgaaaccccgtttaaaaaaaaacataaataaggaagggcgcagtggctcatgcctgtaatcccagcactttgggaggcagaggtgggcagatcacgaggtcaggagttcaagactagcctggccaacatagtgaaaccccatctctactaaaagtacaaaaaattaccgggcatggtggtgggtgcctgtaatcccagctactcgggaggctgaggcaggagaataacttgaacccgggaggcggaggttgcagtgaacggagattgcaccactgcactccagctgggtgacagagtgagactccatctcaaaaaataaataaataaataaataaataaaataatargtatgtatatacaaatatatgtagtgtgtgtgcattttatgaacatgtaatatagacgtgtgtggaatacatatacgtaatttaaagtacagtcatacaatgaagattactgagcagaatggatcttaaaaaattttgaa

SEQ ID NO: 711224 - DNA, 637 bp, Homo sapiens
taaaaatttaaaaattagccaggcgtgatggtgagcacctgtaatcccagctacgtgggaggctgatgcaggagaatcacttgaacgcaggaggcagaggttgcagtgagccaaaatcgtgccactgcactccagcctgggcaacaagagtgaaaccccgtttaaaaaaaaacataaataaggaagggcgcagtggctcatgcctgtaatcccagcactttgggaggcagaggtgggcagatcacgaggtcaggagttcaagactagcctggccaacatagtgaaaccccatctctactaaaagtacaaaaaattaccgggcatggtggtgggtgcctgtaatcccagctactcgggaggctgaggcaggagaataacttgaacccgggaggcggaggttgcagtgaacggagattgcaccactgcactccagctgggtgacagagtgagactccatctcaaaaaataaataaataaataaataaataaaataataagtatgtatatacaaatatatgtagtgtgtgtgcattttatgaacatgtaatatagacgtgtgtggaatacatayacgtaatttaaagtacagtcatacaatgaagattactgagcagaatggatcttaaaaaattttgaa

SEQ ID NO: 711225 - DNA, 1212 bp, Homo sapiens
tcagctgatttgagagcagaattccacagaattccacatatttcctcatcaatcaccgttataagacagtaaaaaatcctaaaaatttgttgtggtctttagtgaatgaattattcccatgtgtattggaytgatgctaattcactgcaaatattagatcatgtaatgctatatctctactctcccatggtggacttcacatattaagtgtatacaatgtttgaatccatcttagccagagcttcatgtattgaccacaaaaccaccacagttggcaatcaaggtaaagcctacttactaacagatatccataaattctctaccacaacccacatcatggcacagaagacctccatgatctgacccctgtatgcttctctaccttcatctccaaagattgcttccattttagatttgcctgaaaactttaatatgtttctttctcatgctgcaccactgaacatgctatttcctctctgtggtatattcttctggtaacttttacccaacaaattaatgcatatgcatcccttatttaagttcaactgttcatatagccattgtcactttgcagacagaattaagcccttgcttcttggttctccatagtgctgtactcatgcctctattttagcatctatctcttggttgtactactgtttgtttcctgcctcagacttcctgcttccagacctacagggaacagctgtaggttgaggtttctagctcttagcaaaatgcctggaaccaagtataaaaaatgaatcactagaaaaataaatcaatgaactttactctctcaaacttaaattttaaaaaatcctaaaaaataataaagtattctaattaaagctatgagtcagaataagccacatactatggtggaaacaaagaatcttgaagtctttaaagctttacttttcactcacacaaaatcagttgtatgtagtaacagctgtccaggtcaaaggtcttcttggcaattcgggcagaagacagctccatcactctgtggcttcaccatctggagcccatagcctcctcagtggacatgacaagaagaaagagaagagaagggtctcagatggtctatggaatacttgaggccaaaaatggtacagaatgtgcgcattcattcctcataagccggaattagtcatgtggttacacctatcttgagagagggaaagtgtaatatttcccttgaccaga

SEQ ID NO: 711226 - DNA, 1212 bp, Homo sapiens
tcagctgatttgagagcagaattccacagaattccacatatttcctcatcaatcaccgttataagacagtaaaaaatcctaaaaatttgttgtggtctttagtgaatgaattattcccatgtgtattggattgatgctaattcactgcaaatattagatcatgtaatgctatatctctactctcccatggtggacttcacatattaagtgtatacaatgtttgaatccatcttagccagmgcttcatgtattgaccacaaaaccaccacagttggcaatcaaggtaaagcctacttactaacagatatccataaattctctaccacaacccacatcatggcacagaagacctccatgatctgacccctgtatgcttctctaccttcatctccaaagattgcttccattttagatttgcctgaaaactttaatatgtttctttctcatgctgcaccactgaacatgctatttcctctctgtggtatattcttctggtaacttttacccaacaaattaatgcatatgcatcccttatttaagttcaactgttcatatagccattgtcactttgcagacagaattaagcccttgcttcttggttctccatagtgctgtactcatgcctctattttagcatctatctcttggttgtactactgtttgtttcctgcctcagacttcctgcttccagacctacagggaacagctgtaggttgaggtttctagctcttagcaaaatgcctggaaccaagtataaaaaatgaatcactagaaaaataaatcaatgaactttactctctcaaacttaaattttaaaaaatcctaaaaaataataaagtattctaattaaagctatgagtcagaataagccacatactatggtggaaacaaagaatcttgaagtctttaaagctttacttttcactcacacaaaatcagttgtatgtagtaacagctgtccaggtcaaaggtcttcttggcaattcgggcagaagacagctccatcactctgtggcttcaccatctggagcccatagcctcctcagtggacatgacaagaagaaagagaagagaagggtctcagatggtctatggaatacttgaggccaaaaatggtacagaatgtgcgcattcattcctcataagccggaattagtcatgtggttacacctatcttgagagagggaaagtgtaatatttcccttgaccaga

SEQ ID NO: 711227 - DNA, 1212 bp, Homo sapiens
tcagctgatttgagagcagaattccacagaattccacatatttcctcatcaatcaccgttataagacagtaaaaaatcctaaaaatttgttgtggtctttagtgaatgaattattcccatgtgtattggattgatgctaattcactgcaaatattagatcatgtaatgctatatctctactctcccatggtggacttcacatattaagtgtatacaatgtttgaatccatcttagccagagcttcatgtattgaccacaaaaccaccacagttggcaatcaaggtaaagcctacttactaacagatatccataaattctctaccacaacccacatcatggcacagaagacctccatgatctgacccctgtatgcttctctaccttcatctccaaagattgcttccattttagatttgcctgaaaactttaatatgtttctttctcatgctgcaccactgaacatrctatttcctctctgtggtatattcttctggtaacttttacccaacaaattaatgcatatgcatcccttatttaagttcaactgttcatatagccattgtcactttgcagacagaattaagcccttgcttcttggttctccatagtgctgtactcatgcctctattttagcatctatctcttggttgtactactgtttgtttcctgcctcagacttcctgcttccagacctacagggaacagctgtaggttgaggtttctagctcttagcaaaatgcctggaaccaagtataaaaaatgaatcactagaaaaataaatcaatgaactttactctctcaaacttaaattttaaaaaatcctaaaaaataataaagtattctaattaaagctatgagtcagaataagccacatactatggtggaaacaaagaatcttgaagtctttaaagctttacttttcactcacacaaaatcagttgtatgtagtaacagctgtccaggtcaaaggtcttcttggcaattcgggcagaagacagctccatcactctgtggcttcaccatctggagcccatagcctcctcagtggacatgacaagaagaaagagaagagaagggtctcagatggtctatggaatacttgaggccaaaaatggtacagaatgtgcgcattcattcctcataagccggaattagtcatgtggttacacctatcttgagagagggaaagtgtaatatttcccttgaccaga

SEQ ID NO: 711228 - DNA, 1212 bp, Homo sapiens
tcagctgatttgagagcagaattccacagaattccacatatttcctcatcaatcaccgttataagacagtaaaaaatcctaaaaatttgttgtggtctttagtgaatgaattattcccatgtgtattggattgatgctaattcactgcaaatattagatcatgtaatgctatatctctactctcccatggtggacttcacatattaagtgtatacaatgtttgaatccatcttagccagagcttcatgtattgaccacaaaaccaccacagttggcaatcaaggtaaagcctacttactaacagatatccataaattctctaccacaacccacatcatggcacagaagacctccatgatctgacccctgtatgcttctctaccttcatctccaaagattgcttccattttagatttgcctgaaaactttaatatgtttctttctcatgctgcaccactgaacatgctatttcctctctgtggtatattcttctggtaacttttacccaacaaattaatgcatatgcatcccttatttaagytcaactgttcatatagccattgtcactttgcagacagaattaagcccttgcttcttggttctccatagtgctgtactcatgcctctattttagcatctatctcttggttgtactactgtttgtttcctgcctcagacttcctgcttccagacctacagggaacagctgtaggttgaggtttctagctcttagcaaaatgcctggaaccaagtataaaaaatgaatcactagaaaaataaatcaatgaactttactctctcaaacttaaattttaaaaaatcctaaaaaataataaagtattctaattaaagctatgagtcagaataagccacatactatggtggaaacaaagaatcttgaagtctttaaagctttacttttcactcacacaaaatcagttgtatgtagtaacagctgtccaggtcaaaggtcttcttggcaattcgggcagaagacagctccatcactctgtggcttcaccatctggagcccatagcctcctcagtggacatgacaagaagaaagagaagagaagggtctcagatggtctatggaatacttgaggccaaaaatggtacagaatgtgcgcattcattcctcataagccggaattagtcatgtggttacacctatcttgagagagggaaagtgtaatatttcccttgaccaga

SEQ ID NO: 711229 - DNA, 1212 bp, Homo sapiens
tcagctgatttgagagcagaattccacagaattccacatatttcctcatcaatcaccgttataagacagtaaaaaatcctaaaaatttgttgtggtctttagtgaatgaattattcccatgtgtattggattgatgctaattcactgcaaatattagatcatgtaatgctatatctctactctcccatggtggacttcacatattaagtgtatacaatgtttgaatccatcttagccagagcttcatgtattgaccacaaaaccaccacagttggcaatcaaggtaaagcctacttactaacagatatccataaattctctaccacaacccacatcatggcacagaagacctccatgatctgacccctgtatgcttctctaccttcatctccaaagattgcttccattttagatttgcctgaaaactttaatatgtttctttctcatgctgcaccactgaacatgctatttcctctctgtggtatattcttctggtaacttttacccaacaaattaatgcatatgcatcccttatttaagttcaactgttcatatagccattgtcactttgcagacagaattaagcccttgcttcttggttctccatagtgctgtactcatgcctctattttagcatctatctcttggttgtactactgtttgtttcctgcctcagacttcctgcttccagacctacagggaacagctgtaggttgaggtttctagctcttagcaaaatgcctggaaccaagtataaaaaatgaatcactagaaaaataaatcaatgaactttactctctcaaacttaaattttaaaaaatcctaaaaaataataaagtattctaattaaagctatgagtcagaataagccacatactatggtggaaacaaagaatcttgaagtctttaaagctttacttttcactcacacaaaatcagttgtatgtagtaacagctgtccaggtcaaaggtcttcttggcaattcgggcagaagacagctccatcactctgtggcttcaccatctggagcccatagcctcctcagtggacatgacaagaagaaagagaagagaagggtctcagatggtctatggaatacttgaggccaaaaatggtacagaatgtgygcattcattcctcataagccggaattagtcatgtggttacacctatcttgagagagggaaagtgtaatatttcccttgaccaga

SEQ ID NO: 711230 - DNA, 2137 bp, Homo sapiens
atcttctcatctcattaggccacacacaagattagcaaaagtaacacaacacacggttattgtacagagctgtggagttgacagagggtttttacacagtggaaactccacctcataatgacccaaataagcgatggagatgcgtggtgaaaatttgcatctctgtgtccatgagacttacctaagttcacagcgatcgagaggagggcaaggatgtgaggggagcatcctggctgcacagtgtcatggttgccggtactcatcgggtatatgatgagtcatcagtgctcatcgggtataygatgtagtgtgcatgtgtacctcctccacatctcatgtttaaatatgattcccaggtggaggtgatgcctggtgggaggtgattgtatcactggggcagaattctcatgaatgacttagtcccatacccttgttgatgaatgagttcttgttctgagttcatgtaagatctggttgtgtaaaagtgtggcacctccccgcttgccctcttgcttccactcttgccatatagaaatgcctgtttctttaccttccaccatgattggaagcttcctgaggcccttaccaggagcatatggtgccatgcttgtgcaacctgcagaaccatgagccaattaaacctcctttctttataaattacccagcctcagatattcctttgtagtgatgcaaacacacacacacagtgtagatcatactgcagcacattaacagattgcttaggcgttcctgtaggcttctttcctcatggcttttataagtcaacttagttttcaggagacagatgtcttttcaacaacaccaataatttatgctttttaaagggtctgaacattgaataagatcatgtggagattaaacccaagtaccacctgtcttaagtcacacagtgttggttcttaacactgtatgttcaacaaactaacttaaggcagagtttaaataatttgttgcattagattatcctgagccatgagtttggctgttttctagaccagtaggagatcgtgcctcccagagaggatttggcaatgtctggacacatttttggtgtcacactagggaggagggtgatctggtatccagcaggtggaggccaggggtcctgctaaacgccctgcagacacagggcagggggcagctccacagcaaagaatttcctggcccatcaacttcccagttaacctttgtaaaagcaaacaaaagaaaaaaagaaacacaaacattgatgtgacagactagtttgctatggttgagatattcagtcatgtcagaagcagcagccagcagagaaaacagggtctgtaaaccatttgtgtttgtgccacaccctacggtgaaattaagtgcagtctggagcttctaaagataggtggtggggtctgcagtgaccatcctgggagctggacaacccaccaacaactttatcccctgcacctcccaaaaggtgtggggagagacagaaataggttttggatccacaggaagcaagcccagcccagcacggagcacagaatgtagcacaagcaccgctaggcagcccattaaaagcatgagggaggtggaaacagagacaaatgcattgcagatcagccctgcctgcttcttccaaaggtcttaaatgtatttcttttgtccattttttttttaacaacatgatttctttggctgagatgatcagtcccagaatgtaagttgctgctgcaacatggctgacacatgtactgattttgttttctcagactctcagcaaatcatctgtgtgtgtgcaacaaaataaaagagaacatgtagctttcagtcttcccaggggagtttatgcttcaatttttaaatgtcatttgttttttttttttctcatttaagaaaaatgggctgatagaaaattaggaaactaagggctaattcataaaagtttctgaaaggctcatggcaaacaggtctcctaatggaatgcccttaagagacacagcacagagactaaaaggcttcccagagaaaattttcagcacttgccgttctgggtccttctctaagaaatgttattaccacacttatttacattgggtctcaaaacctaattgctatttaatgtggtgagaaggtagaggtacac

SEQ ID NO: 711231 - DNA, 2137 bp, Homo sapiens
atcttctcatctcattaggccacacacaagattagcaaaagtaacacaacacacggttattgtacagagctgtggagttgacagagggtttttacacagtggaaactccacctcataatgacccaaataagcgatggagatgcgtggtgaaaatttgcatctctgtgtccatgagacttacctaagttcacagcgatcgagaggagggcaaggatgtgaggggagcatcctggctgcacagtgtcatggttgccggtactcatcgggtatatgatgagtcatcagtgctcatcgggtatacgatgtagtgtgcatgtgtacctcctccacatctcatgtttaaatatgattcccaggtggaggtgatgcctggtgggaggtgattgtatcactggggcagaattctcatgaatgacttagtcccatacccttgttgatgaatgagttcttgttctgagttcatgtaagatctggttgtgtaaaagtgtggcacctccccgcytgccctcttgcttccactcttgccatatagaaatgcctgtttctttaccttccaccatgattggaagcttcctgaggcccttaccaggagcatatggtgccatgcttgtgcaacctgcagaaccatgagccaattaaacctcctttctttataaattacccagcctcagatattcctttgtagtgatgcaaacacacacacacagtgtagatcatactgcagcacattaacagattgcttaggcgttcctgtaggcttctttcctcatggcttttataagtcaacttagttttcaggagacagatgtcttttcaacaacaccaataatttatgctttttaaagggtctgaacattgaataagatcatgtggagattaaacccaagtaccacctgtcttaagtcacacagtgttggttcttaacactgtatgttcaacaaactaacttaaggcagagtttaaataatttgttgcattagattatcctgagccatgagtttggctgttttctagaccagtaggagatcgtgcctcccagagaggatttggcaatgtctggacacatttttggtgtcacactagggaggagggtgatctggtatccagcaggtggaggccaggggtcctgctaaacgccctgcagacacagggcagggggcagctccacagcaaagaatttcctggcccatcaacttcccagttaacctttgtaaaagcaaacaaaagaaaaaaagaaacacaaacattgatgtgacagactagtttgctatggttgagatattcagtcatgtcagaagcagcagccagcagagaaaacagggtctgtaaaccatttgtgtttgtgccacaccctacggtgaaattaagtgcagtctggagcttctaaagataggtggtggggtctgcagtgaccatcctgggagctggacaacccaccaacaactttatcccctgcacctcccaaaaggtgtggggagagacagaaataggttttggatccacaggaagcaagcccagcccagcacggagcacagaatgtagcacaagcaccgctaggcagcccattaaaagcatgagggaggtggaaacagagacaaatgcattgcagatcagccctgcctgcttcttccaaaggtcttaaatgtatttcttttgtccattttttttttaacaacatgatttctttggctgagatgatcagtcccagaatgtaagttgctgctgcaacatggctgacacatgtactgattttgttttctcagactctcagcaaatcatctgtgtgtgtgcaacaaaataaaagagaacatgtagctttcagtcttcccaggggagtttatgcttcaatttttaaatgtcatttgttttttttttttctcatttaagaaaaatgggctgatagaaaattaggaaactaagggctaattcataaaagtttctgaaaggctcatggcaaacaggtctcctaatggaatgcccttaagagacacagcacagagactaaaaggcttcccagagaaaattttcagcacttgccgttctgggtccttctctaagaaatgttattaccacacttatttacattgggtctcaaaacctaattgctatttaatgtggtgagaaggtagaggtacac

SEQ ID NO: 711232 - DNA, 2137 bp, Homo sapiens
atcttctcatctcattaggccacacacaagattagcaaaagtaacacaacacacggttattgtacagagctgtggagttgacagagggtttttacacagtggaaactccacctcataatgacccaaataagcgatggagatgcgtggtgaaaatttgcatctctgtgtccatgagacttacctaagttcacagcgatcgagaggagggcaaggatgtgaggggagcatcctggctgcacagtgtcatggttgccggtactcatcgggtatatgatgagtcatcagtgctcatcgggtatacgatgtagtgtgcatgtgtacctcctccacatctcatgtttaaatatgattcccaggtggaggtgatgcctggtgggaggtgattgtatcactggggcagaattctcatgaatgacttagtcccatacccttgttgatgaatgagttcttgttctgagttcatgtaagatctggttgtgtaaaagtgtggcacctccccgcttgccctcttgcttccactcttgccatatagaaatgcctgtttctttaccttccaccatgattggaagcttcctgaggcccttaccaggagcatatggtgycatgcttgtgcaacctgcagaaccatgagccaattaaacctcctttctttataaattacccagcctcagatattcctttgtagtgatgcaaacacacacacacagtgtagatcatactgcagcacattaacagattgcttaggcgttcctgtaggcttctttcctcatggcttttataagtcaacttagttttcaggagacagatgtcttttcaacaacaccaataatttatgctttttaaagggtctgaacattgaataagatcatgtggagattaaacccaagtaccacctgtcttaagtcacacagtgttggttcttaacactgtatgttcaacaaactaacttaaggcagagtttaaataatttgttgcattagattatcctgagccatgagtttggctgttttctagaccagtaggagatcgtgcctcccagagaggatttggcaatgtctggacacatttttggtgtcacactagggaggagggtgatctggtatccagcaggtggaggccaggggtcctgctaaacgccctgcagacacagggcagggggcagctccacagcaaagaatttcctggcccatcaacttcccagttaacctttgtaaaagcaaacaaaagaaaaaaagaaacacaaacattgatgtgacagactagtttgctatggttgagatattcagtcatgtcagaagcagcagccagcagagaaaacagggtctgtaaaccatttgtgtttgtgccacaccctacggtgaaattaagtgcagtctggagcttctaaagataggtggtggggtctgcagtgaccatcctgggagctggacaacccaccaacaactttatcccctgcacctcccaaaaggtgtggggagagacagaaataggttttggatccacaggaagcaagcccagcccagcacggagcacagaatgtagcacaagcaccgctaggcagcccattaaaagcatgagggaggtggaaacagagacaaatgcattgcagatcagccctgcctgcttcttccaaaggtcttaaatgtatttcttttgtccattttttttttaacaacatgatttctttggctgagatgatcagtcccagaatgtaagttgctgctgcaacatggctgacacatgtactgattttgttttctcagactctcagcaaatcatctgtgtgtgtgcaacaaaataaaagagaacatgtagctttcagtcttcccaggggagtttatgcttcaatttttaaatgtcatttgttttttttttttctcatttaagaaaaatgggctgatagaaaattaggaaactaagggctaattcataaaagtttctgaaaggctcatggcaaacaggtctcctaatggaatgcccttaagagacacagcacagagactaaaaggcttcccagagaaaattttcagcacttgccgttctgggtccttctctaagaaatgttattaccacacttatttacattgggtctcaaaacctaattgctatttaatgtggtgagaaggtagaggtacac

SEQ ID NO: 711233 - DNA, 2137 bp, Homo sapiens
atcttctcatctcattaggccacacacaagattagcaaaagtaacacaacacacggttattgtacagagctgtggagttgacagagggtttttacacagtggaaactccacctcataatgacccaaataagcgatggagatgcgtggtgaaaatttgcatctctgtgtccatgagacttacctaagttcacagcgatcgagaggagggcaaggatgtgaggggagcatcctggctgcacagtgtcatggttgccggtactcatcgggtatatgatgagtcatcagtgctcatcgggtatacgatgtagtgtgcatgtgtacctcctccacatctcatgtttaaatatgattcccaggtggaggtgatgcctggtgggaggtgattgtatcactggggcagaattctcatgaatgacttagtcccatacccttgttgatgaatgagttcttgttctgagttcatgtaagatctggttgtgtaaaagtgtggcacctccccgcttgccctcttgcttccactcttgccatatagaaatgcctgtttctttaccttccaccatgattggaagcttcctgaggcccttaccaggagcatatggtgccatgcttgtgcaacctgcagaaccatgagccaattaaacctcctttctttataaattacccagcctcagatattcctttgtagtgatgcaaacacacacacacagtgtagatcatactgcagcacattaacagattgcttaggcgttcctgtaggcttctttcctcatggcttttataagtcaacttagttttcaggagacagatgtcttttcaacaacaccaataatttatgctttttaaagggtctgaacattgaataagatcatgtggagattaaacccaagtaccacctgtcttaagtcacacagtgttggttcttaacactgtatgttcaacaaactaacttaaggcagagtttaaataatttgttgcattagattatcctgagccatgagtttggctgttttctagaccagtaggagatcgtgcctcccagagaggatttggcaatgtctggacacatttttggtgtcacactagggaggagggtgatctggtatccagcaggtggaggccaggggtcctgctaaacgccctgcagacacagggcagggggcagctccacagcaaagaatttcctggcccatcaacttcccagttaacctttgtaaaagcaaacaaaagaaaaaaagaaacacaaacattgatgtgacagactagtttgctatggttgagatattcagtcatgtcagaagcagcagccagcagagaaaacagggtctgtaaaccatttgtgtttgtgccacaccctacggtgaaattaagtgcagtctggagcttctaaagataggtggtggggtctgcagtgaccatcctgggagctggacaacccaccaacaactttatcccctgcacctcccaaaaggtgtggggagagacagaaataggttttggatccacaggaagcaagcccagcccagcacggagcacagaatgtagcacaagcaccgctaggcagcccattaaaagcatgagggaggtggaaacagagacaaatgcattgcagatcagccctgcctgcttcttccaaaggtcttaaatgtatttcttttgtccattttttttttaacaacatgatttctttggctgagatgatcagtcccagaatgtaagttgctgctgcaacatggctgacacatgtactgattttgttttctcagactctcagcaaatcatctgtgtgtgtgcaacaaaataaaagagaacatgtagctttcagtcttcccaggggagtttatgcttcaatttttaaatgtcatttgttttttttttttctcatttaagaaaaatgggctgatagaaaattaggaaactaagggctaattcataaaagtttctgaaaggctcatggcaaacaggtctcctaatggaatgcccttaagagacacagcacagagactaaaaggcttcccagagaaaattttcagcacttgccgttctgggtccttctctaagaaatgttattacyacacttatttacattgggtctcaaaacctaattgctatttaatgtggtgagaaggtagaggtacac

SEQ ID NO: 711234 - DNA, 633 bp, Homo sapiens
gacatttcacttaaagtgttttcaataggttttcaggatgtcctaggaattaatttttcattttgttatagaaattactatttctccttactctttttataatacatatttataaaaagatgttttcactttaacataaaatatattcatcttcattgagtatgtatgatcactgagatgcactcagaagtgatataacctgacacataagaaaaactctattttctttgtgatttcattttatttcttgtcctactcattttaacagatccacgtctactgattaaacacattaaactttygttacaaatttcaatcaatttataaaaattcaattcaattctctaatgtgactcacagcttggtgcatgctgagcagttgggcctttatctcagagctgttttaagattgatggtaatttcctgttccaggtatatacctaaggatacctgctcatggtctcacagcagcatggcctgattccaggtaccaatagctccacaactgctccttaggtatttcagtttaaagtgactgtggtcaatccaaagccatgtaaagaggaatgttctttccttataaaagtagtgtgatatagtcatatttttcttacagtatcagggaagataaca

SEQ ID NO: 711235 - DNA, 1241 bp, Homo sapiens
tcttttcttgttgagggggctgaggatgaggctttgtgaaaccaaccaggaagaatgaaacacagagctggtccgacacccagctcgagggaggggggccggaagcttctggaagttggctgcccctaagcaggggccactctagcccacaaggccaagttggcagaggcagacgaggggactctgcggctcaagtcacgggccaggagcccgcagctgccgggctggaaaggtcagagccggctctgcgtctggctgcgccggcaagaagccacaattacgcaggcaaaagagcccggggattagccccagcacctgggaccctgaatggtgagaaggcacctagggggtgttggaacacattctgagttcagagcctggtcagggagaaaaaaccaaacggagatcaggaaggggaaggggccttcgagggctttcccatcccaacttcccaggatgcctgaccccagagctcctggatttgatccacgcctcgtgacacacacaacccctgggaggaaggagcccaggccccttggagagccccagaggcctctaagggccggtgagtctaggacatggggcaggagctgcaaatggggcctccctgctccccacccttccttccctcctcctctaaacattgccccacccacctcgccctgtgagcccagccccctgcacggcccacactgtaggggcatggggtgtgccaagagatgctcctgtcgaccaggcgcagtggctcatgcctgtaatcccagcactttgggaggccaaggcgggaggatcacttgagatcaggagttcaagaccagcctcgccaacatggtggaactgtgtctgtactaaaaatacaaaaattagccgtctgtgttggtgcacacctgtaatcccagctactcaggaggctaaggcaagagaatcgcttgaacacacgaggcagaggttgcagtgagccaagattgtgccactgcactccagcctgggcaacagagcgagactccgtctcaaaaaaaaaaaaaaaatgctcttgtccaacaggcaggtgggtgccgtgggccggtgcatcccaaggcttccaggcccgggcccccaactgctgcccctgcctgtgttgagggggcgggtttgtgaggttcagggcaggccacatcctggaccccacatgccccatctctaaccatcaatcaagtgccgctgtggcggagaggattcaggcgacwgcagatatccatccc

SEQ ID NO: 711236 - DNA, 966 bp, Homo sapiens
tccgccccatctctcctctcagcttggccatgaggcgggctatgaggtcattggttaaagatttggggaagcagagccaggcgagtggccagatgtggtggctcatgccatcacaggatcccagcactgtgagaggacaaggaaggaggatgcttgagctcaggagttcgagaccagcctgtacaacatagcaagacccccgtctctacaaaatataaaattagccagttgtggtggcacgcgcctctagtcccagctactcgggaggttgaggtgacaggatcccttgagcccaggaggtcgaggctgcagtgagtgggtaacagagccaaaccctgtctctaaaacaaacaaaaacagaaacaaaaagtacactacttactgtcctgcttctcaccattccagcctggtagtccttttttttttttttgagacagggtcttgctcagttgctcaggctggagtgcagaagcgtaatcacagctcactgcagccttgatctccaaaaagactaccagcttggctgggtgtggggactcatgcctataaccccagcattttgggagccagaggcaagaggattccttgagccaaggagttcgagaccagcctgggcaacacagtgagaccctatctctaaaattttttttttttgagatggaatttagctctcrttgcccaggctagagtgcaatggtgcaatctcagctcaccacaatctccacctcccaggttcaagcaaaattctcctgcctcagcctcccgagtagctgggattacaggcatgcgccaccatgcccggctaattttgtatttttagaagagacggggtttctccatgttggtcaggctggtctcaaactcccaacctcaggtgatctgcctgccttggcctcccaaggtgctggaattacagacatgagccaccgtgcccagcctaaaaaaaatttttttaaaaaatagctg

SEQ ID NO: 711237 - DNA, 544 bp, Homo sapiens
aaaaaaagaaaagaaaagaaaaaagaaaaagcagcctcatgactggcagggctttggccataaaatcattcatgtggctcagccctccctaaggaaggtggggccggggttgtaaaaccagagctggcccctcctcgccctccccgtcaataagaggcagagatcagaaggtgccggcgccagggactcccgagatcagagcgcggggaggagcggccaycgcagctctccttggctgcccgaggcgccccaggtccaaaggccggcgtggcttctctggccttgacactctccgtagcccagcacgcagggaatgcaaggaaacgcctggaaccgcagagcgcctgctaacgcctcctgtctgggctgagtctccctcccggatctcgctccttccgggtcttgctcatccccaagttccccatccagggcgtgatacagtcaggcttccctggttcaaatcctggctacgccctgcttggcagctgtgtgaccctgggcaagtcactcaacctctctgggcctcacctcttacaggggatga

SEQ ID NO: 711238 - DNA, 949 bp, Homo sapiens
taaaaaactatttaaaaatggccataaacaataaagtttagaaccatcaatgtcatttaaatcttagggggaaatttttatttttatttttattttttgagatggagtctcgctctgtcgccgaggctggagtgcagtggcgctatctcggctcactgcaagccccgcctcctgggttcacgccattctcctgcctcagcctccggagtagctgggactacaggtgctcgccaccatgcccggctaattttttgtatttttagaagagacggggttagccaggagggtctcgatctcctgacctcatgatccacccgcctcggcctcccaaagtgctgggattacagtcgtgagccaccgcgcccggccgagaaatttttttttaatgagtgtttttatttctaaactaaagaactgtggcagagatgtagtaatttcaaagacctcaaaccaactccccgaatattaggacttactcttgtgaggacaaaatggaaaaatcatactgcataataaaaggaattgatacatttttaacagtaataagaaaagatgaggatgatgatattcattataatgactttagtaatgcctaacattcattacatgttttagttaccaggtactgtgcaagaacttcacatacattatcttatttattctttataatagccctgtgaaataagtgttcttattattcccattgtatagttgaggagactgagatttagagggtttcactaacatattcaargtcaagcctgaagtaggaacagccatctgacttccaagcctagtaaagcatgaaaacatgaacaacaacaataccacaacagcaacaacaaccagcaatctatgcctgtgagcatcaggtaaacagggccaaatatggccagcccatccctgtagtcacccatatatctatggagacctaccacgccttagggta

SEQ ID NO: 711239 - DNA, 616 bp, Homo sapiens
tgttttactttattgtgttttcttgagtgtaaagaaagaataaatcaaagttcttcatacccattttgacaaagtggaacagtggagctgttttttgcttttgtttttatttattttttgccactggtgatgatagatttcaaaaaacaaaaggtggcagcagcacaatgttcatggtgaattatctcatagtatctagattgatcaagatctgacagaaggaatgcacaaaggattctatattcttaatgatttattaattaccaggatccttttytaaattgaatgtacttttgaattactaggtttcttctttttttttgttctgcaatagtgaaagaaaactcagtagtttagtttcagtttctcatggaaattggtaaatgttagttttgacttcatctattttttatttgtttttattagcgtagagtaggaagtctcatattctactgttctatctaggatggtgaaattccaaaggtgcctaacttgagtaagggatttgtgacaagatagtacacattactataagggctattatttcctgaactggatgtccctaaaagcaaataaactgcccactatctctactctagtgctctctttgtcctta

SEQ ID NO: 711240 - DNA, 616 bp, Homo sapiens
tgttttactttattgtgttttcttgagtgtaaagaaagaataaatcaaagttcttcatacccattttgacaaagtggaacagtggagctgttttttgcttttgtttttatttattttttgccactggtgatgatagatttcaaaaaacaaaaggtggcagcagcacaatgttcatggtgaattatctcatagtatctagattgatcaagatctgacagaaggaatgcacaaaggattctatattcttaatgatttattaattaccaggatccttttctaaattgaatgtacttttgaattactaggtttcttctttttttttgttctgcaatagtgaaagaaaactcagtagtttagtttcagtttctcatggaaattggtaaatgttagttttgacttcatctattttttatttgtttttattagcgtagagtrggaagtctcatattctactgttctatctaggatggtgaaattccaaaggtgcctaacttgagtaagggatttgtgacaagatagtacacattactataagggctattatttcctgaactggatgtccctaaaagcaaataaactgcccactatctctactctagtgctctctttgtcctta

SEQ ID NO: 711241 - DNA, 572 bp, Homo sapiens
cactaaaaatactcactaagagattgaaaggtaatcatacatgagcaaacgatggtgcaaaccaccaggtggctcaagtcgctctgtcagaaccattgaggtacctgatgatatacataaaaagctatctagaggacttctacttatggaaagatggcgtagatgtgcttttgcttattcatcacactgagttgaatttaaagccttgagcattatacaaaacaaacaccagaagactctcagaggcaggagagcagaaggcaggctggcaagggacttgggacctcaggaatgacacagatggtggtgagttctctgggttttccttttgcttcatatatctccaacctgrcagcttagtaaacagaaaacttgaagacaataatcacttgactctaacgagataccacacacaaaaaaatctggccccccccacctccaccagcactggctgaatagggagcctagacaaagtaccccaagtccctgctggagtagtatcagagaaggccaagtagggagctaggactctgaactttgctgagtagtgatgaagtccctccatacaatgt

SEQ ID NO: 711242 - DNA, 2310 bp, Homo sapiens
ggattccacatctgtatcgttacacccaggggctggcagagactaaagtggggtatggagggcagagatgggggagctgccttctacggttggcctttccctctccccttgcctgcttatccactgtgctgatctcatccgcgccattatcttctcttgctcaaaggactgcagacctcctctcttccctgtctgcttccactctggccccacagacaatgtactccacactagagcagccagagtgagcttcccaaacacagactatgcttaacacccttcctcagcttcccttggctcttagaaaccaaactttggttccctgccatggtgctcagggctcagtagcacctggcccctggcccctgcctccctctctagtgtcacctctgcttttccctctattgggaaatcaccccctgccgcccaccccctgtcttctcttttgtggcaactgccattcatttttcagctcaaaacagtcacttcctccgggaagccttccctgcccctcgggcgtggccccactccagtctcatacagtcttatggggcctttgttagtggtgttggcttggcatctctctctctccttagactataaggcctctaagagggaaaccacatatttgtgtggccaaagcacagtatcactggtacctagcatcgtgcctggccggaacccacacttggtgatgtttgctgtgagagtgagcagcgtcctgctttggaatcccagtcagagcactgagagaggggcagccagacctgggagctctgtgttgcccctgccattgtccttacatctccagttagagagattttgctgggttattcttcagcctgctcttttcccacccacttgcagtgggagtggtaaaaatctagaaaaacttccagtagttaccttgtggggccacacccctgtcccagtgatggacctgtctgtaaaacacttcttgtagagccttggcctctccctggttgtcatacaagacttgtcacatagtgggtgcttaggaaacatttgctgaattcccagcagccaattattttgagtatccttattagtaggaagtacttttctcttatgatgtaatttacataaaatatatagattttaagtgttacatattttaaagtgtgtatttaatttaaaaaatgggccaaacgtgggggctcattcctgcaatcccagcacttcgggaggccaagatgggcggatcacttgaggccaggagcttgagaccagcttggccaatatggtgaaaccccatgcctaaaaatacaaaaattagctgggcatggttgccggcacctgtagtcccagcttatcgggaggatgaagcatgagaacagcttgaaccctggaggcagaggctgcagtgagccaagatcgcaccactgcactccagcctgggcaacagagtgagtctgtctccaataaagaaagaataataataatttttaaaatgggcctggctgagtgcagtggctcatgtctgtaatcccaacactttgggaggctgaagtgggaagatcacttgagctcaggagttcaaaaccagtatggaccacatggtgagaccccatctctacaaaaatacaaaaggttagccacgtgtggtagtgcacgcttgtagtctcagctacttggaaagttgaggtgggaggatcacttgactccaggaggtcgaggctgcagtgaaccgtgattttgccactgcactccagactgagcaagacctagtctcaaaaaaaawaaataaataaataaataataaaaaattttaaatggacaaaccatttggaaccaggtggaataaatacagtatgttggtaagctgggtgatctcctatcatagtaattttctatatgccatctaatttctgtagtgatatcctattgtatgcctgacaaatatgtatttcttgttttaattcttaccgttactctatggagtgcatattatcatcccattctaccagttaaaaaaaggacccagtgagcttaaatgagaccaaagtctcattgctgtgagaagtggaggcaagatttgaaagcagctctctttagcttcaaagctaatgatcttgccatttcctaatccgatgtatcttcttaagactacttagtaaaagacgagatatgattacaatgtcaaaagcctgtttcttttgtgtaccttgtacacagcctctagaggcagaaacaaaggtgaaggacccatttatcagccctccccattgcctgcagcctcctcctttccctccatgatattcctgcagatggtccggaagacagattcac

SEQ ID NO: 711243 - DNA, 644 bp, Homo sapiens
atatccaagacattatttcatgaaaaagaaagtatgacctgagctatataaaaaataaatttgtgtgtatgcatatatatatggacaagaatataaaggaagaaggaaggatgttctccaaacctctaacaatctgttacctttgtgatggatatgaaggtgtattagtctgttctcatgctgctaataaagacatacccaagactgcgtaattataaagaaaaaagaagtttaatggactcacagttccacatggctggggaggcctcataatcatggcagaaagcaaaggaggagcaaaggcacttcttacatggcagcaggcaagagagaatgaatgccaaacaaaatgagaaactccttataaaaccatcagatctcacgagcactcactcactctcacgagaacagtatggggtaaactgtccccatgattcaattatctccatctgacatatggggattrttacaattcaaggtgagatttgggtggggacacagagccaaaccatatcagaaggtaaatattaatgttttgttctctgtttctgaatccaactttttatgaggaaatgcattttcctatttcatgtataacaaacatttaggaatcaaatgttgaagtttgaattcctgtaaaaaaa

SEQ ID NO: 711244 - DNA, 1312 bp, Homo sapiens
caatcctcccccttcagccttccgagtagctgggaccacaggtgtgacccactacacctggctaatttttgtatttttagtagagatggggtagccatgttgccctaggctggtctcaaactcctggactgaagtgatccacctgtcttagcctccccaaagtgctgggatttcagtcatgagccatcacacctggtccaacacttcttaatatcttttttgtgtgtgtgccttattctaaggcatatttatatttctcgtgtagtctttctttttttttttttttttttgaaacagtctcactctgtcacccaggctggaatgcaatggtgcgatctagggtcactgcaacttctgcctcctgggttcatgcagttctcctgcctcagcctcctgagttacaggcacgcaccaccacgcccagctaattttctgtatttttagtagagacggggtttcatcatgttgcccaggctggtctcgaacttctgagctcaggcaacccacctggctcggccccccaaagtgctaggattacaggcgtgagccacgacgcccagccatttgtttagtctttattgcagaatcaatgcaatcattggtttttgtcgtgtttgatattttctatttaactttggtatgaaaagttttctttgttgacctttttagtttcatttttttgatacgcagtttcactcttgtcacccaggctggagtgagctggtgagatctcatctcaccctaacctctgcgtcccaggttcaagcaattctcctgcctcagcctcccaggtagctggaattacaggtgtgcacaaccacgcccagctaatttttgtatttttttagtagagacggggtttcaccatgtttgccaggctgctctcgaactcctgacctcagctgatccaaccgcctcggctcccaaaagtgctggaattacaggtgtgagccaccatrcccagcacacccccctcttgtttttaaacactgttaacttgcttgcatctttgtattgcgtcctagaagtgggattttctttctttcctttctttctttcctttctttctttctctttcttttcttcctttctttcttttctttcttccttccttccttccttcctttctttcttccttccttcctttctttcctcctttccttgtttccttccttcttttttttgatggagtctcgctctgtcgcccaggctggagtgcactgcaagctccacctcccgggttcatgccattctcctgcctcagcctcccgagtagctgggactacaggcacccaccaccatgcccggctaa

SEQ ID NO: 711245 - DNA, 2649 bp, Homo sapiens
tgtcaaaacaaatttgaaagtgatcctaaccacaaacaatcatattaggcaatggttgactcttatatattgtgcataacttaatgaaaaaggcaatcattcctcacaaaagggttcgactgtgttcccaatagcaagtaaaaattacaaaagtaataaattgtcatttcaacttaaaagctactgatatttatgtggacattttattttagctcagagtctctattatatatgctttcagttctttttagcttcttgcaaatacaccagtaattttcagaacaaaaatgaagtattccttttttgtgtccattgccactagggtcaaatccaaattcccaagatactaatggtctgtcttctgtctacctccctaacttcactcttatttgatcctttgttcctatccctgtagcactaacctaatatcccagactcacagtctcccatagtccatcatgttcattttttccccagctttattctgtgtagctccaaagaatacatccatagtgcttaaacatacaatatttctggttgcgctgtcttctctgcctggaatgaagccactgttgtttgtccctctggaaaattctttcttgtctttcaaatctgagctcaagccaccagcgtctcctctctgaagctttcgttgacttccaggtgggcttagctgctcattcctacctccttctatgacaatgtttcctaccatctctactggagaccagagtattaaaggtattagtgtcaagatcaaaggaccctgtagtgccccttgcctctgcgctgatctcaacatctgtagaaaatatctccagttcttgacatggctattttagagcaacattgatgaactggaacatgttcagagaagaaaaggatcttaaaaccataatatcatgtacttccattcctgcagttataaagtggggtgattaatatctgaggctattctaagattaaaataaaataacacatataaatactttaagttgaaaagtgagttttgataaatatattccatgccagtttaccaactttattcttcttctgtttaatggccaacctcttgagagaatagactccccggtatgcattcagttcctctgatcataaataataatatattaaaaatattattttcccctccctccctcccttcctcccttccttccttccttttttcttgacaagatttctttctggcacccaagttgcagttcagtcatgagatctcaggtcactgcagctgcaacttcctgagctcaccctcctcccacctcagcctcccgagtatctgggactataggcacacaccaccatgcctagctaattttkgtcttttttgtagacacagagttttgccatgttacccaggctggtctcaaactcctgggctcaagtgatctacctgcttcggccccctaaagtgctgggattgcaggcatgagccaccatgcctgcccccaaaatactgttttctattattgatattttttattattttatttttatttccatgattaggacacaaacttcttaatggcaagaacttgtaaaattatttccatgtcctttaatactaacacattaatacaaggcttataagacacagactttgaagggctatgaaaaagaatggaagaaatggagtttcttccgccaaggggaaacaatattgtgttctttcaaagagctaaggctgtcatatacaagatgataacttcattctgtgtagctcagaagaaaaatatgggtagctgatttcatatcaagattgggaagatactgaaaatattaaaaaagacacgcaaatagtttgttatcccaatatccaaataacctctgctaatttaaatacataaaaaataattattacagatgattaaaacataaaaataagaaaggtataaactaaaaataaaagcctaattttacctttttagaaaccattatttacagatttgcaaaaaggtattatacatataattatacatatattataaggtacatccttaaaacattttacactattttacactgaaggtattctccttattccctgatctgagccttgacacagacacacacacacacacacatacacatatacacacacaaatatataatttacatttatatacacacatagacagagacacacatgtagatattgatatggtttggccttgcgttcccacccaaatctcatcttgaattgtaatcccataatccccacgtgtaatgggaggaacccggtaggaggtaattgaatcctggaggtggtttccctcatgcagttctagtgatagtgagtgattctcataagatctgatggttttataaacacctggcatttcccctgctggcacttgtctctcttgacaccctgtgaagaggtgccttccaccaggattgtaagtttcctgacgcttccccagccatgtggaactgtgagtcaattaaacctcttttctttataaattacccagtcttgggtatttcttcatagcccttcaaaagggtgagaatggactaatacatatacgtattgatatatatatatctgaatatatgtatatagatatatataactgagtatatatattgatatatataactgaatatatatattgatatatataa

SEQ ID NO: 711246 - DNA, 2465 bp, Homo sapiens
gccctgtagacaatagaaaggaacttagattgagggtcttgctgtcataactgaaccatattcgtatggtgttttagtatggtgaaaacacttaatgctgtctaggaaaacatttgaatatgttgggaagtttagttagattatggcatgaactcaaatccataagattttagcattaaaattatagatttgccatgtaaatgtatttaattaataacattgatcatgatcacttacatctctgaaggaaatattaatgctctgcaaaaaagaagttaacttcttttataggttttcttgttgttgttgcatgacaacaaaaatgtcttcaaggcatagatccaaagttgctttctgtattggaaaaaataatataattgaaaacgtgattagcgaggagtttctacgtacttctccaatatgaatttgcctatggwtgcctggtctgtagagccttcaagaaacgtaactgaattaggaaaaaaaaaaaaaaatcttcaagcaagttctttttccatgagtaatgcttcagcagtagcggatgtatttcagaattggtctggaatcagtagacttttgattccttagacataaaaatacaatttgaatatagttagtaatttcagtgaccaaaaaatttaacagggataaagacaatttcattattcacatctgtcaaaaactcttgttctggttctcttgaacaagaacatgaaactaaattaaacaaaacatctattttaattcttggggtatgacttgtatacgaattgaattttcttgtgagctgaattatctcatgtttttattcattgttaaaacccttgttagagctttttctaaagtagcaaatcattgtttttttgatagaatgcttcaaagttattggggtgatcctactggatattattatttggtgcgatattcatagaaagtatacatagtttgattatgtttatgtgtttcaggtgtgtccagaaagctttcggttttaaatggattcttgtcagttatatcttctgatgtacttagttctaggggaaaaaagagcaggtttgtcatagattcattataggtttcactttgaatacaagatgaagatactggtggtttggctattagtaatgaaactgaaaatattgtatgcagatttttaaattgtttctcagactaataaaatttttgatttacagactttttcattcgttaatggttttggagaagataattggaaattctgcatttcttcttattttgaaggacaaactcacatacgactcttactctcctgataccttcctggagatggttagtaatttcatctatggtcatcataaaaatgtgtaattccattgttcttgcattagcaaagaggatgagaagcttaatgaaaaaagacattgaaatataattttttgtacattatttgaaagaatttttatcacttaatataaattacctgtatgttcatcttttctataaatatttcaaagtatgtgaaatatgtagggttttagaatactattaagatgttagtaaggcaactggggcattataactagttgttttgcttggctttaattagaaaccccttgatatttaactttttataagtccttaatctgttcctcctaaacttgaatttgaatggtcttctggtttcaggatgagtccatggagtgttaagtaaaattaaaaaattactgttcatttttataggatttgaaacaaaaatcacaagattctctgccacaaaaaaatataataaggctgagtgcggagccaaggtaaattcataatttcttacaaatgtttaccactttctggcttaatagtttttggttttatggttctggtttttagttagcgtatattttgaggcaatcaatttattaattaaaaaactcctaaaaaatggattttctttcatgactgtgttatgctcagtgccaatagctaacacagtgcttagtatattgactgctgaataaattattataacaatatttctcacagatataaggtatagcatgataaatatatagcttataaaacattttcttatctctataaaattttcagattatatcctttcttgattaacctttcatttaactaccttgttttcattaatccctgatcctatttttatatgaaagaagaaactttattattattggaagatcaaggtttctactgtaaattgtttattagataactgtcattttgctggtgaaacagccttgttttagcactattgatttatgctaaagtaaatgggaagggtgttcagtgaccttaaaccagggcatttaattggtggctacctaataattataaagaaatgcattatgttttattggtatttctttaaacagcaaggtatctgtttttaataaccaaatatttgttggtcatttcctagttgacccaggcacacagtggttattttttgtaatataacc

SEQ ID NO: 711247 - DNA, 611 bp, Homo sapiens
aaaattccattcctggctaagaaagattaattggtatcagacttgccataagcaactagaaagctagacaaaatatattaagcaactgctgggcacagtggctcatgtctgtattcccagcactttgggaagccaaggctagaggatcacttgaggccaggagtttgagaccagcctggcaacagagcgagatcccatttctaccaagaaytgcaaaataaaagcaaataggaaaaattggccaagcatgctggctcactcctataatcccaacactttgggatgccgaggcaggaggatggcttgagcccaggagttcaggactaacctggacaacatagggggacactgtctctgtgaaataagttttttttttattttaaatgaaagaatatattaaacaactagaaatttacacccaaagaaatgaaatgatgtgtccacataaagacttgtaaaagaatgctcatagtagctttatctgtgatcaccaaaaactggtaacaatccaaatgtccatcatcagataaatgaattaattgtggtatatccttacagtaggcttctattccacaataaaaagaaggtaacaactgataaagaacaaaatg

SEQ ID NO: 711248 - DNA, 540 bp, Homo sapiens
atcaaatggtttcatgaagacaaactagattatataagtaaagtggcttctaccaatttgaaactctggttcagcaagagtgaaaaccttatttgattaacaaatctattgaacttctgcatcttgattagtggtgttcttgaggaataccctaaaatctattattcttcatcycctaaaatctaattattcttcacaattgtcaagagtttggtgtccaaagatgtttaaccaatggtcaacactggagaacagtgagattcaacatcagatgcaagttctctagctaaagctaaagtttgaagcaaatggcccatctcaacctttcctcagtactgctctatcttgtgcaaaacaatgtaaggcatggccaagtcaaggacatcattcgaaagaagccagagaaacagacagaaaaaacgaaaaagctctcaactcaatatgctttcatctccaaaacaacatgttctttctctttggttcacttggtgtttctgacagaagtgaaattcttctctggcatccaagaaagatttatga

SEQ ID NO: 711249 - DNA, 540 bp, Homo sapiens
atcaaatggtttcatgaagacaaactagattatataagtaaagtggcttctaccaatttgaaactctggttcagcaagagtgaaaaccttatttgattaacaaatctattgaacttctgcatcttgattagtggtgttcttgaggaataccctaaaatctattattcttcatcccctaaaatctaattattcttcacaattgtcaagagtttggtgtccaaagatgtttaaccaatggtcaacactggagaacagtgagattcaacatcagatgcaagttctctagctaaagctaaagtttgaagcaaatggcccatctcaacctttcctcagtactgctctatcttgtgcaaaacaatgtaaggcatggccaagtcaaggacatcattcgaaagaagccagagaaacagacagaaaaaacgaaaaagctctcaactcaatatgctttcatctccaaaacaacatgttctttctctttggttcactyggtgtttctgacagaagtgaaattcttctctggcatccaagaaagatttatga

SEQ ID NO: 711250 - DNA, 540 bp, Homo sapiens
atcaaatggtttcatgaagacaaactagattatataagtaaagtggcttctaccaatttgaaactctggttcagcaagagtgaaaaccttatttgattaacaaatctattgaacttctgcatcttgattagtggtgttcttgaggaataccctaaaatctattattcttcatcccctaaaatctaattattcttcacaattgtcaagagtttggtgtccaaagatgtttaaccaatggtcaacactggagaacagtgagattcaacatcagatgcaagttctctagctaaagctaaagtttgaagcaaatggcccatctcaacctttcctcagtactgctctatcttgtgcaaaacaatgtaaggcatggccaagtcaaggacatcattcgaaagaagccagagaaacagacagaaaaaacgaaaaagctctcaactcaatatgctttcatctccaaaacaacatgttctttctctttggttcacttggtgtttctgacrgaagtgaaattcttctctggcatccaagaaagatttatga

SEQ ID NO: 711251 - DNA, 869 bp, Homo sapiens
tcttagggaaagattaccaaacaagatttgtaattcaaatccacagtgtgatagtaggcattgatcgcacaaatacaataaacaccaaaattctgttttgctcttggagacctaattaataaccacttcaatgcctagcacaaaagaaagctttctgcaagtgccttcctcttaacgaaatatcgtcatagacatcttaatcttttctttctccttttacaataatttggtattattatcaatattgttattttttatgatgattatacattggatttggagacatccaatagcttgaccaggtcagcaagtggtagccccaaaactgatatccatgccttctaattccaagacttgagcacgttctatcccaaacctcaaattccatttgagtcattctttaattctataacctgatttctagtcacttgaaagtaagagcacaatgaaaagagaactaggttacttaaaacaattgtgataaagaaaactgccaaaaataaagatatgcaagtcttttttcccacctactgatttgaaattctataaaacaaagggcatgaaacaaggaacctacaggttggcctttctcattaacaaactttttccccttcagtaactggcaacagtttgtggagaaatagaatagtagaactggaggcattctttagagttgaaactgattccaaaaacctgagttctcacctctgggtccctcttaaactcctctacccttcaccttctcagatctcctcctgggccgagattcccatgccacagccttccctaaggaggggctgtagcaygtgatagctcagagacaccgcgggcagaaagaaggcacagggctgtggccagatgtgccagca

SEQ ID NO: 711252 - DNA, 869 bp, Homo sapiens
tcttagggaaagattaccaaacaagatttgtaattcaaatccacagtgtgatagtaggcattgatcgcacaaatacaataaacaccaaaattctgttttgctcttggagacctaattaataaccacttcaatgcctagcacaaaagaaagctttctgcaagtgccttcctcttaacgaaatatcgtcatagacatcttaatcttttctttctccttttacaataatttggtattattatcaatattgttattttttatgatgattatacattggatttggagacatccaatagcttgaccaggtcagcaagtggtagccccaaaactgatatccatgccttctaattccaagacttgagcacgttctatcccaaacctcaaattccatttgagtcattctttaattctataacctgatttctagtcacttgaaagtaagagcacaatgaaaagagaactaggttacttaaaacaattgtgataaagaaaactgccaaaaataaagatatgcaagtcttttttcccacctactgatttgaaattctataaaacaaagggcatgaaacaaggaacctacaggttggcctttctcattaacaaactttttccccttcagtaactggcaacagtttgtggagaaatagaatagtagaactggaggcattctttagagttgaaactgattccaaaaacctgagttctcacctctgggtccctcttaaactcctctacccttcaccttctcagatctcctcctgggccgagattcccatgccacagccttccctaaggaggggctgtagcacgtgakagctcagagacaccgcgggcagaaagaaggcacagggctgtggccagatgtgccagca

SEQ ID NO: 711253 - DNA, 893 bp, Homo sapiens
gcatgctactgcatccagctaactccccttttttcatgaacaatttcaaacatgtagaaaagtaggaagagtagtacaataagtgccatatattacctcctagactcagtcattgtttaacgtattcatatttgctttgagtgtgtgtatatataattttgctggaccatttgaaagtaaattgcagttattgtggcatttcaccactcagcatgcagctcctaagaccaagcatattaggagctgatacgttaatgagggagcttttatgtgaaactattaatattaagcaggtaatacaaaggagcctcagctctttcagttctatgagatggtcttttggagaagagagaagacagggaagagattccacagtggagcacggactgggggaagatgagtaaaggcttggaattgagaatcctagatataatgtgttttgggggacagtgaaggcacctgccttcaggaatgaaggactgatgtttgcacgtagggggaggtgagaaggatgggtggagggagtcagttacaaatgaagcgggggacttgattctgtaggtcttcaaacatttttattgtgcaactgtcagaatttctttagcacaatcccccatacatatttatttatattttataagtgtaatgtataaattatgtatttcaaggaactgaccaactcttactacctgcactgctgccagcctgatccacttggattatgtaattcctctcaactgctttctctgctttctttttgccccgcttcccccagtctctttcatcccagcagagagatcccttagaattggaatcagattttgtcagtcctctcctcaaatccctccaaataactgcccttttctttccttcttyctttatttttctttctt

SEQ ID NO: 711254 - DNA, 550 bp, Homo sapiens
tgctaatacatgtctgcacaggtgggttttactttccttgccccattagtgcacaggaaggtactctgcccctccctgccccggtttaccaccattgcacatggagccttggcagacaacgagccagccagctccacctccaccagcacctcacccttgcactaacactgcacaaagaacarcatatcatcccccaccctgagcaaccactcctgcttgtgggacacaaagaaggcactcagacccgtacccaccagcaccctacctctgagccaacaccacctccaacatgaccacgcatagtctctaggaggggctcctgccatcaggagctcactgcctatgccactgtagtgaacacccacagggaggcaggcaccccagcacctggtagcactctgccacagctgccactacaaggacagatcctgctatcactacactatgaaatgctttggttgatactacccattgaaggatagtgaacagtggtcaggggggacctcagcccctccagtacagtggattgctaacctcaaggagggagata

SEQ ID NO: 711255 - DNA, 2101 bp, Homo sapiens
taagttaatatcactgattacttcttaataataatattcctagtatattttaacttgttttccgggaattctcctgaaatgctagaaaagcaatgtctctcaataaaacaccagttacataaaccctcaaaagcctttgtttgatttttgttagaaggtatgtactcccacttaggatatttggaatgtattcaacacaagtgtgaatgattggtatgtcatcttgagaatatattgaaagaaaagtccttgaagaaaagaaaatactttaaaataatcttgtagcatctggctttacacctggaaaagtaaattttatagtttagcactgtgatgattttagaaatctaacgtgaactgtccttgggttttttattttcttgtttcagactatttccatgtacagaactagtttgactgttctgagcctttttgtccacaactgaacacctgaagtaaaagtagcaaagaataatgaattaaattaccctgtggcatttaaattaccctgtagccagagttagtgtgtatgagtgtgcaagtatttatttgtagtactatgatgctcaaaagtttataatcttcaccctctttagcctataaagtctttagcctaaaagtgtgaacacacctacactcaagatttgtatgtaaagcctactttttcagaggagtaacatatgaggtactttctaaataatgccaaaatattactgaagctcagtatagcatggctttttattctttttcttttttgtactggcatggttcctgaatacgattctaactcattctttcataacatcaattaaggtatacaggaaggcattcaggagtctttattttttctttcaaactatcaattcttaagttttgtgaatatagtctttttttgaaaactgagaattttctaaataacagctaatatttttcagatgatgtcacacaaacttgaatatatattttcacattatatttattgatggatcttctctctgtctctcccttcagaatcccttgtttatgtttgtcccatccactcaattcccacatgtgtgtttgtttgctcatgtgaactcataaacaggtctacaaatatgtaatgtctacacacacacataactagatatttcacaacaagcttgtaaggtctgtgtgccgaacctttatatcaaacctatgtgcccaaaacttatgtataagcctgtgtgtgtatattgagcctatgtacccaaagcttgtatgtataacctgtgtatccaagacctatggcctagggggtagagtgtaaagtacatggatgtgctgtggccaagaataggccgaggcagacatcagggccagtgtgactcagccagttcggagtgcagacacataactccacttgttatgtaatcactgctatgtagccataacatgggaaggctcgtcacccaactctgagccactattgcttgtaaaaggtataactgccttgctgatgctgtacatatggcatggcttggcttgtgctgagagagagaatgtgaagctgcagaccctgtaagggaaagccagccttgcaggtcagggaatgtagttgcaggagtggaagcagcaggagctgcagagccagaacaggcagctgagacaaaggcagacagtgtaagagagctgctgaataaaaccatctttcacctgtctatggccccccaagtgttatgtcagctatctgccacctgaacccactccctttaaacttcaacatggactgaaacctgaggcttggcatgacacaggttcatatcctttcttctcttttggtcattttttttcctgatattttttgtccagatcctaccacctaatggctgsgataaagctaggtgatgtgatgaaggagcccaagattgaatggaatattcccctctctttgtcatttatcccatctttcccttctctcacttagcactcttaagctgtaccttagggctctctcttcctagctatgtctccctacacatgcacacactctgggaagcacctcttatttcttttttcttttataaattatttttatggaatatagaatatatcactttgagaaaaaattttatgtctt

SEQ ID NO: 711256 - DNA, 2101 bp, Homo sapiens
taagttaatatcactgattacttcttaataataatattcctagtatattttaacttgttttccgggaattctcctgaaatgctagaaaagcaatgtctctcaataaaacaccagttacataaaccctcaaaagcctttgtttgatttttgttagaaggtatgtactcccacttaggatatttggaatgtattcaacacaagtgtgaatgattggtatgtcatcttgagaatatattgaaagaaaagtccttgaagaaaagaaaatactttaaaataatcttgtagcatctggctttacacctggaaaagtaaattttatagtttagcactgtgatgattttagaaatctaacgtgaactgtccttgggttttttattttcttgtttcagactatttccatgtacagaactagtttgactgttctgagcctttttgtccacaactgaacacctgaagtaaaagtagcaaagaataatgaattaaattaccctgtggcatttaaattaccctgtagccagagttagtgtgtatgagtgtgcaagtatttatttgtagtactatgatgctcaaaagtttataatcttcaccctctttagcctataaagtctttagcctaaaagtgtgaacacacctacactcaagatttgtatgtaaagcctactttttcagaggagtaacatatgaggtactttctaaataatgccaaaatattactgaagctcagtatagcatggctttttattctttttcttttttgtactggcatggttcctgaatacgattctaactcattctttcataacatcaattaaggtatacaggaaggcattcaggagtctttattttttctttcaaactatcaattcttaagttttgtgaatatagtctttttttgaaaactgagaattttctaaataacagctaatatttttcagatgatgtcacacaaacttgaatatatattttcacattatatttattgatggatcttctctctgtctctcccttcagaatcccttgtttatgtttgtcccatccactcaattcccacatgtgtgtttgtttgctcatgtgaactcataaacaggtctacaaatatgtaatgtctacacacacacataactagatatttcacaacaagcttgtaaggtctgtgtgccgaacctttatatcaaacctatgtgcccaaaacttatgtataagcctgtgtgtgtatattgagcctatgtacccaaagcttgtatgtataacctgtgtatccaagacctatggcctagggggtagagtgtaaagtacatggatgtgctgtggccaagaataggccgaggcagacatcagggccagtgtgactcagccagttcggagtgcagacacataactccacttgttatgtaatcactgctatgtagccataacatgggaaggctcgtcacccaactctgagccactattgcttgtaaaaggtataactgccttgctgatgctgtacatatggcatggcttggcttgtgctgagagagagaatgtgaagctgcagaccctgtaagggaaagccagccttgcaggtcagggaatgtagttgcaggagtggaagcagcaggagctgcagagccagaacaggcagctgagacaaaggcagacagtgtaagagagctgctgaataaaaccatctttcacctgtctatggccccccaagtgttatgtcagctatctgccacctgaacccactccctttaaacttcaacatggactgaaacctgaggcttggcatgacacaggttcatatcctttcttctcttttggtcattttttttcctgatattttttgtccagatcctaccacctaatggctgggataaagctaggtgatgtgrtgaaggagcccaagattgaatggaatattcccctctctttgtcatttatcccatctttcccttctctcacttagcactcttaagctgtaccttagggctctctcttcctagctatgtctccctacacatgcacacactctgggaagcacctcttatttcttttttcttttataaattatttttatggaatatagaatatatcactttgagaaaaaattttatgtctt

SEQ ID NO: 711257 - DNA, 672 bp, Homo sapiens
ctctgcgcttgcaactccaggcaagctgttggtggcaatttgggaacttctcaggggcagagcaccatgtggccagctaatgctggtgcactcacatactgctcaggctggaagagagacagcaggtgccatactggttgtgcacctctgtgggccactcctctgctaggggaatcttagcccttgtgttgccacattaccaaatgccctgcaaatatatcccacaacctgctctgacattagccactgcaggggaccagttgctccctggggagctacrggattcccaaacatctagtccacagtactggctacccctagaagagagggtagtgcagtccaccaaagtctccccttgggacaaaggaaattcaggtgtgatgctgattgctgaaggtggttgggaataaatatggaataggggtcacctcctgcttttccatctactgttgcagatacatagaggctttcccctctcagggccggcttaagtgcacttggatatgaactttccagtgattttcatggtggctacaccccctgttgaaacatcccaccctgcctgggcttgcatgaagggcagggccccactctccctccctacgcagagaagcagcattccagcaatagagggcatacaagctgcagaactgtctgttctagactgaggga

SEQ ID NO: 711258 - DNA, 672 bp, Homo sapiens
ctctgcgcttgcaactccaggcaagctgttggtggcaatttgggaacttctcaggggcagagcaccatgtggccagctaatgctggtgcactcacatactgctcaggctggaagagagacagcaggtgccatactggttgtgcacctctgtgggccactcctctgctaggggaatcttagcccttgtgttgccacattaccaaatgccctgcaaatatatcccacaacctgctctgacattagccactgcaggggaccagttgctccctggggagctacaggattcccaaacatctagtccacagtactggctacccctagaagagagggtagtgcagtccaccaaagtctccccttgggacaaaggaaattcaggtgtgatgctgattgctgaaggtggttgggaataaatatggaataggggtcacctcctgcttttccatctactgttgcagatacatagaggctttcccctctcagggccggcttaagtgcacttggatatgaactttccagtgattttcatggtggctacaccccctgttgaaacatcccaccctgcctgggcttgcwtgaagggcagggccccactctccctccctacgcagagaagcagcattccagcaatagagggcatacaagctgcagaactgtctgttctagactgaggga

SEQ ID NO: 711259 - DNA, 629 bp, Homo sapiens
tgtcgtcctcaaagataaatgagcaggcaagctggctagaaaaccactaagggtatttattctttaaagaatctttacagggtcaaagaagaatgggtcttaactggctatgtgaactccccacagattctgaggatgatgtcagtatccctttccagatgtgtttaacactttgcagtcacttgtattcctgcyactgagtgccagtgctttgctaatttgaactgattccagctcacgctgaccccagctccctggatgttaccattagccaagactgtcacccatactgtaccctttcaaagagtcctaaaaacagctcttcacctactcttccaagacaagtaaaaatgtctgccaaagaaatggggaaaaaagattcagagagtgaaaacaattaatatactaacaagagagcaaaaagcaaagggggaggagaaactaggaaaatcatatatgggctctcacctatttccaaagctgggctaatgtccttttgcttgtgtctgaataaggcaccaattttaagctgctaatgaaaaaaaaagaaaaagagaaagaagcaggcccaggctgggcgcagtggctcatgcctgtaatcccagcactttgggaggccgaggcgggtg

SEQ ID NO: 711260 - DNA, 802 bp, Homo sapiens
tatgacaagttgcttaactaggtcccatttcctcaagcgtaaaatggggatatgatactccacaggatttttgtgaggattaagtaaagtaatacatgtaaagtgtttatttagcacagagcttgacacatcattgccattcaataaatgttatttattgaatgtcaatttgctgggccccaagcaagcacacagaaaacaaactgtactatgagagcaaataaaactcggggtaaaataacaaaaattccaaatcctaatttctttcttcttactagcagtacgtaaactggtagagaatgactctcataaataattcttatcaaaaattctacttgcatatattactatttaaccacacaagtgcactatgtaaaaagtcagtgtttttcatcttggagaaacaggggaggatgttaaaaaaattataactaaagctgagaaaccactactgccaggatgtcaaaggtgggctacaggggtaatatgactgaaatctaccatttgcccacctccttcttctcagactttctgtaatacacaaaagctgtacgtggaactctgcagtgcctacaaaattaacagcctttctggggaaataatcagaagataaaggggagtgatggagaaagaaacacaaawgtcctcaaaacacaaataactcaaacagaactaatgatatagcaaaagcctaactattggacttaaacgtctataatttgaagaatccctctctctgatatccaccattcaggaatctaggacaatggccattttctgaaatgatcactgttcttaggcc

SEQ ID NO: 711261 - DNA, 2300 bp, Homo sapiens
tcccagcttgacttttccctttggcttaatgagtctggggtcccaagatttaatttcctttcacatttccccctttttttctttaacatcttttggagaaagcattttaaaaggaatatgtgttcctggcctcagttcgctttttcctccttttttgagctggtttcttgtcgctaggatggtttattccaggaaattcaggtctcacgttactaggaaggctcattcctaggaagtcatgttccatgttgctaggaaggctcattcctagaagtcatgtcccacaaagattaaaaaataaattgggggaggaaagagggaaaaaggaaggaaaggagatgattctgagggctccagacttaaaggagaaaagggtcctwtctcttttctcttaatgttaaatgttattttgtttgtggaatgttcactctataatatatatgttgattaagtataccattatgcatgatttgcaatattgattgacctgtggagtgccttgagcctgtgtgtccaagactctgagtgctgagtgagtgggaagtactaaggagaattgctttcttggaaactccatgtagttcgtggcttttgtgattgaaatagcatcagtaaaagtctggcattgtggaaaaacacaaatgtacgtggactctgttatttctgaccttgcactcctcacaaggcatgtgaaattggagtcacagatgtagaaaccaggcagaagacagtctgaagagatgatacttgagaattttccaaatataataaaagacaacaaatcacagatccaagaagctcagataaacccaaggactttcttataaaggaaaagatatacttaccatatgatcaaataatctcactctaaggcatttacacaagcaaaatgaaaaccaatgtccatacaacgatctgtatgtgaatgtttataatggttttatttatattcactaaaatctgggaacaacccaaatatccagcaactggcaagtgaattgtatgatatatccatacaatggaattctactcagtaatacaaaggaagaaattattgatacatgtaataatatggatgaatctcaactacaaaatactaagtgaaaaaatatcagatccaaaaggatatataggattccacttatgtgacattctggaaaaggcaaaactagggacagaacacaaattagtgattgccatggtttgagtatgggataagtggactaactacagaaacaagggaactttggggatgacagacaattccatatttgactgtaagtgaatgtatgtacaaaattcaaaactaaaaaggataaaactttatgtaaattatactttaaatcaacttttttttttaatgaggtgatttaaataaatgtgttaggtagcttgatgacacggtaagtatgaaagtggtaccagaatggcttgaaactcataaaatattggcagagtggttatgagttattccaaaaatcaaataatgcatatgttgattcgtaagacccttgtcatttcagaagctggaaatgaaacagtactaatgaatttgtggcttcaccactttttagctccacaaccaggagctatatcaggagagattaggttaatctctctaaacctgttttcttttctataaaagagggatcatcatacttgcctacagggtagagttaccagataaaatacaggacgattggttaagtgatgtgaatttcaggtcaaccacgaatcctactttaggacgagtaggtaccatatatatttataattaaaaagcgattcgccgttaatctgaaattcaactttagacgttctgtaattcgtgcgtgtgtgtgtgtgcatgtgtgtgtgtgagtgacagagagagagagagagagagagagagagagagagagacagaatcagaatctggcagccctacagagagccctacagagaggttatgcgaataaataagacactggaaccgcaagacgttcgcccagagtttggcataataagcgcctcagtggtagcgaacgctattttaaccccagcctctgatgcattacgtcttcctttattctttcgcccaattgttaaatgaatcaactgtacgtgtggcccttcattccaagcaggcaaaaactcgaaggaagcatccaggtgcattataccaggaccccaattgttaagcttagaaattccaagagcgggcgacgtcatgacgcaaaggccccgccccggaagaagccctagacgcgtaaataagacgccgaccggcgcggcgctagcctcggggcttgacgggattg

SEQ ID NO: 711262 - DNA, 659 bp, Homo sapiens
ggtgcctgtagtcccagctactcgggaggctgaggcagaagaatcgcttgaacccaggaggtggaagtggcaatgacccgagatcgtgccactgccccccagcctgggcgacagagtgaaactccgtctcagaaaaaaaaaagtcatgattaataatgaaaacaattaaagttattgtttgttaactaatgctgcatgacaaaccaccctaaaacgtatggcttaatctgtcaacagtttatgtctgataatattttgggttggctgcgtggttcctctgcttacctggggtcattgatgcgtggtatttggctgctgggccagctgggctggaaagtccaagggcctcactcgtgtcctgcagtgcgtgctggccccgtgttcttcttcacctggccgctcatcctcagtgggttagactggcttccttaagtggcagtgccaggacaacattcccagagaacaaaaacagactgttgrctgggcatggtggctcatgcctgtaatctcagcactttgggaggccgaggtgggtggatcacctaagatcgggagttcgagaccagcctggccaatgtggtgaaaccctgtctctactaaaaatacaaaaatgagccgggaatggtggtgggtgcctgtaatcccagctactcgggagg

SEQ ID NO: 711263 - DNA, 753 bp, Homo sapiens
tgatggggctgagatgccttatggctcataaactactatctgcctactgtcagttgactttcaagcttacatatacaaatttttttcatgagaaaatttatcctaaaaagkttttttttttgttttttttttatggagtctcattctgtcacccaggctgaagtgcaatggtgcgatcttggcccattgcaacctctgcctcccgggttcaagcgattctcctgcctcaacctcccaagtagctgggactacaggtgcatgccaccatgcccagctaatttgtgtatttttagtagagatggggtttcaccatgttggccaggctggtctcaaactcctgaccgtaggtgatccacccgtcttggcctcccagagtgctgggattaaaggcgtgagccactgcaactggccctgaaagagttttgactaatcacagatctcaagagccacagtctgctcccctggcgtatgggatggcagtggaagggatgcttgtgctgaaggcccatctggggctggggaccacggacttctagtggctgtccgcgtctggcagggaagagagcagagccaggaggtgggggaagtcctcctagggcagagtaggggagatggaggtgaatggagcacaagtgggaatgggagctggggatcaggaggcagtgcttggagagtggacgctggagttaagacttcagtggtggaataacttcagcctatgggaattcatggagagaaagggtgagggagaga

SEQ ID NO: 711264 - DNA, 753 bp, Homo sapiens
tgatggggctgagatgccttatggctcataaactactatctgcctactgtcagttgactttcaagcttacatatacaaatttttttcatgagaaaatttatcctaaaaaggttttttttttkttttttttttatggagtctcattctgtcacccaggctgaagtgcaatggtgcgatcttggcccattgcaacctctgcctcccgggttcaagcgattctcctgcctcaacctcccaagtagctgggactacaggtgcatgccaccatgcccagctaatttgtgtatttttagtagagatggggtttcaccatgttggccaggctggtctcaaactcctgaccgtaggtgatccacccgtcttggcctcccagagtgctgggattaaaggcgtgagccactgcaactggccctgaaagagttttgactaatcacagatctcaagagccacagtctgctcccctggcgtatgggatggcagtggaagggatgcttgtgctgaaggcccatctggggctggggaccacggacttctagtggctgtccgcgtctggcagggaagagagcagagccaggaggtgggggaagtcctcctagggcagagtaggggagatggaggtgaatggagcacaagtgggaatgggagctggggatcaggaggcagtgcttggagagtggacgctggagttaagacttcagtggtggaataacttcagcctatgggaattcatggagagaaagggtgagggagaga

SEQ ID NO: 711265 - DNA, 753 bp, Homo sapiens
tgatggggctgagatgccttatggctcataaactactatctgcctactgtcagttgactttcaagcttacatatacaaatttttttcatgagaaaatttatcctaaaaaggttttttttttgttttttttttatggagtctcattctgtcacccaggctgaagtgcaatggtgcgatcttggcccattgcaacctctgcctcccgggttcaagcgattctcctgcctcaacctcccaagtagctgggactacaggtgcatgccacyatgcccagctaatttgtgtatttttagtagagatggggtttcaccatgttggccaggctggtctcaaactcctgaccgtaggtgatccacccgtcttggcctcccagagtgctgggattaaaggcgtgagccactgcaactggccctgaaagagttttgactaatcacagatctcaagagccacagtctgctcccctggcgtatgggatggcagtggaagggatgcttgtgctgaaggcccatctggggctggggaccacggacttctagtggctgtccgcgtctggcagggaagagagcagagccaggaggtgggggaagtcctcctagggcagagtaggggagatggaggtgaatggagcacaagtgggaatgggagctggggatcaggaggcagtgcttggagagtggacgctggagttaagacttcagtggtggaataacttcagcctatgggaattcatggagagaaagggtgagggagaga

SEQ ID NO: 711266 - DNA, 753 bp, Homo sapiens
tgatggggctgagatgccttatggctcataaactactatctgcctactgtcagttgactttcaagcttacatatacaaatttttttcatgagaaaatttatcctaaaaaggttttttttttgttttttttttatggagtctcattctgtcacccaggctgaagtgcaatggtgcgatcttggcccattgcaacctctgcctcccgggttcaagcgattctcctgcctcaacctcccaagtagctgggactacaggtgcatgccaccatgcccagctaatttgtgtatttttagtagagatggggtttcaccatgttggccaggctggtctcaaactcctgaccgtaggtgatccacccgycttggcctcccagagtgctgggattaaaggcgtgagccactgcaactggccctgaaagagttttgactaatcacagatctcaagagccacagtctgctcccctggcgtatgggatggcagtggaagggatgcttgtgctgaaggcccatctggggctggggaccacggacttctagtggctgtccgcgtctggcagggaagagagcagagccaggaggtgggggaagtcctcctagggcagagtaggggagatggaggtgaatggagcacaagtgggaatgggagctggggatcaggaggcagtgcttggagagtggacgctggagttaagacttcagtggtggaataacttcagcctatgggaattcatggagagaaagggtgagggagaga

SEQ ID NO: 711267 - DNA, 858 bp, Homo sapiens
tgctggcgagtgggtgccagggcagaacccttcgccactctagtaccttcctccagatctcttggaaggatattagaaaataatgggtctcacagcttaggtttaatggagtagattatacatgtgaagggaaaattaattacaaatatcttacagcaaaaagtaccagagtagatttttggtagtcacatagaaagcagcttagatttacagatggctcaatattttgcgttagaattcttaaaatattacacactgagtttgcrtattaacctaaaatggcatagaaatattaataagctaatgatttatgttgaactacgtcctttaaaatattgtcattttgaaaaagcccaaacattctcatggatagtagtaattctttcctttttatagtgtttctgttagatgtcagactcaaatactctgcattgcaatttctttgttggttttgaggtcattctgttactgactgatttttcattcaattaacttgaaaaaaagtagacttcattttttacagcagttttaggttcacacacagcaaaattaagaagaaggcacagaggcccggagcggtggctcatgcctgtaatcccagcactttgggaggccgaggccgcctgaggtcaggagtttgaaaccagcatggccaacatggcgaaacccagtctctactacaaatgcaaaaattagccgggcatggtagcagaatcctgtaatcccaacgactctggaagctgaggcaggagaattgcttgaacctgggaggcggaggttgcagtaggccgagatcgtgccattgcactccagcctgggcaacaagagcaaaactccgtctcaaaaaaaaaaaaaaaa

SEQ ID NO: 711268 - DNA, 858 bp, Homo sapiens
tgctggcgagtgggtgccagggcagaacccttcgccactctagtaccttcctccagatctcttggaaggatattagaaaataatgggtctcacagcttaggtttaatggagtagattatacatgtgaagggaaaattaattacaaatatcttacagcaaaaagtaccagagtagatttttggtagtcacatagaaagcagcttagatttacagatggctcaatattttgcgttagaattcttaaaatattacacactgagtttgcgtattaacctaaaatggcatagaaatattaataagctaatgatttatgttgaactacgtcctttaaaatattgtcattttgaaaaagcccaaacattctcatggatagtagtaattctttcctttttatagtgtttctgttagaygtcagactcaaatactctgcattgcaatttctttgttggttttgaggtcattctgttactgactgatttttcattcaattaacttgaaaaaaagtagacttcattttttacagcagttttaggttcacacacagcaaaattaagaagaaggcacagaggcccggagcggtggctcatgcctgtaatcccagcactttgggaggccgaggccgcctgaggtcaggagtttgaaaccagcatggccaacatggcgaaacccagtctctactacaaatgcaaaaattagccgggcatggtagcagaatcctgtaatcccaacgactctggaagctgaggcaggagaattgcttgaacctgggaggcggaggttgcagtaggccgagatcgtgccattgcactccagcctgggcaacaagagcaaaactccgtctcaaaaaaaaaaaaaaaa

SEQ ID NO: 711269 - DNA, 646 bp, Homo sapiens
aatttcaggaaagacaaagaaaggttgaggaactgttccagattaagggagacttaaaagacttgtatttttagtagagagrgatttcaccatgttggccaggctggtctcgaactgctgacctcaactggtccgcccgccttggcctcccaaagtgctggaattacaggggtgagtggtgatgcgtgcctgctatcccagttactcgggaggctgaggcaggagaattgcttgaactcaggaagaggttgcagttagccaagatcgtgccactgcactccagcctgggcgacagaagactctgtctcaaaaaaaaaaaaaaaaaaaaagatttgacaactaaatgcaattccaaaatggattctctactggaaaaataattgctataataaacattttgtgggcaattaactacattagaatatatattataaattagatatatatcattagattacatcattagatctatagattattacatgttgatgttaaagttcctaaatttggtaaaataattgtggttatataaaggaatacccttattcttaggaaataatcactgaaaaattaagggcatagtggtatgatatatgcagcatatacctaaataattcagaagaaataataataaacgttttcctgt

SEQ ID NO: 711270 - DNA, 625 bp, Homo sapiens
gcgggcatcctctatttcattcttgtcaactttaatttctgtagacactgctagagctaagcaaccaatcattaaggaggaaggcattggccatggttgacaagcaacatactgaacatggccaactttgactccactttcctcttctacttctctcctaacagcatcttctattgtctctcctaatgaaatggagcaaaagaacaagttgctgatgaacatgcccgggacactttgtgtcctgaatggttcaaacatctggaaatcactttggacagaaacccaatgcaaataatcagaaagcagaagcctaaaactagactgtaattgaagaaaacaatttttttaaagtacatgaccacatatagaatatcaaaatgccaacaataaacttttcgtttttttaaggtacaaatttgtcagttacattttaaaaataatgataccatctaaaaatatccaatacctaatactggttaaacactatgcaaacactttatatcttatctcatgtatayattgtccacgaaatagttataaattacatgatttttacaaatagctctttcacactaaaattctgaaacttttttttattatgttgtcaaacaattattgcaggtaa

SEQ ID NO: 711271 - DNA, 745 bp, Homo sapiens
gagttccataaaggattggttcagaaggaaatctggaaatttggactaaaaagcaaggatgactttactgtgattaaaggacaccttacctgttatttctaaacaaagtgccctgacagtgctctctcagctgttcccaacttgtctgatttcagtatcccagagaggatttctgttgcttcctaagctatcattacagcaataatataatgctgattgctacgatattttcagaatacattaaaaggaggaatgaaatttagaatgattaataaacacttttagaatttgtgggatggcattttgtttttattctctgaatagaactgtcagtctgaatgcagtaaatttctagagttttgaaaaataagaatattcatctattttttttgaggaacatagtcatttcaaaaggcatgtgtatatttttaagacaaaaactgattttaaacattatgtgatgatttttaacactgatgttaaaaatgatttrtatattttaagtccttctgaaaaatccttgagaatccacttattgccactatcctgtttagcaaattctaatataaatctaactgacagaattgtgggaaaggcagagtaatataagagagtagctgtgtcactgaaggccatgtgaaatacttggaaagccaggataaggaactattaccagacacaaaatgtcactacagatatcttataaaatattccattttgttctacttaaaaagttatctgcaat

SEQ ID NO: 711272 - DNA, 606 bp, Homo sapiens
caaaaatattgagcaggaaaattttttcagaattagcacaaaaaggtacagaggcaaaaaacatgaaagaaagtgaaacaaaagaccccaaagtttcaaaatctatcaaataggagctcccaaaggaaaaaaatggaagagagaagatacttaagggaataacaaatgaaaatttcccacaacttagaaatacggattttgcagttgaatgagtacactgaggcctgccagatggaagagataaaggatcctcccctagacacaccagagagagctttcagagcaccaagtatawagacagacacttccaaagggagaaacagacaaacatatataggaaaaagaactggatttacatccaacctcccagcaacattagatacagaaagacaaatgttttgaacccatgtttttgtgcttagccaaactctcatacctctgtgaggacaaaattaaaatttttcagatatatttttttaaaaataaattcttctaactacaaatcccagtgaagaagcaaacggtatgtattgtagcaaagtaaacataagcgtaaagaaaaagccatgatttacaagaaattgggaaaggaagaatccaagaaaa

SEQ ID NO: 711273 - DNA, 597 bp, Homo sapiens
catctaaaccaggacctgaacgtaaatctattgtctctctctctctctttttctgtctctcaatatcagttccctcctgctctagtaaactaattgaagctgagcatatagctgcatagcaggactaccttttccacctacctatcaattaagtgaggccagaagccatagaatgtgagtggaaatgcagtgtatcacttcctgtgaactgggatttaagacattaggtgtctttctccaagtcttcttctcttttcccactatggtgggctgcatgaccatgtggaatataactctcctgctagttctgtagtatgagaaaacatctttttaaaaaagtytttatatttgagggtcaatttttcatggcttttaactaacaccacatctacacctctacagatgggtatataaagttgttgagaagtaatgtatatgaaagcactttgcaaaattttaaagtaaggcagccaagtgaggtagaaagaacatagaatttggattcttaagatctgggatccagcctttcctaagatataggcctaaagttaagatgactttaggcacctgttggaaagcatctattaatttccacta

SEQ ID NO: 711274 - DNA, 656 bp, Homo sapiens
atttactccacaataaaaggttattcttttgaagtttctttcataaatgtatataaaatccctttgtatcaaatttgccactaaattcactagaatgaagaataagcttaattttaaagaatcttgttaaaatgattaaagattctgggaccagatctttacacataaattcaatttagcaaagcccttctatgctttctattgcatactctgaaaacattgtaatgtatctgtaaaaagtaagtagtacatccaaatatttacacaaatgttaaagttagcaactgaactctccggaaaaagcctcaagaactttcttttaaaaaagctattggaaacactgaatgtatttcaagtatgtttatacaagaaatgtttcctaagagactgtcatttccctactcccattatttgttaaaacagtaccctgcactggtttaaaaaatggaatgaagaccaaaataattctcagttttgaggcactagagatatcaaaaatttcaagatattattttgcttgagaaattaacttctgaagacacactttggcttacgactttgaaagcaatgtacactttctctaagaagacatgttttactactgattgaytgattgagacagagtctcgctctgtcgcccaggctggagtgcaatg

SEQ ID NO: 711275 - DNA, 2428 bp, Homo sapiens
taaatctttattcatatgcaaagtcctttctatagagccaattcccaagcttaactgctggaatcatatgctaagaacaatacgctataaaagctacacacacacatttatgacaaatcacagagaaggacatgaataagaagcagaagtctctttcctctccttattccccaatgtataagcatttctgtgtatgctgcatttatacaactgaatgttatgcagccataatgagatctggaaagttattcaaaatacattttaaaatttaaaaaaaaagttaaagattaacaaatagtatgtcgcctaccccatactctttttctttctttttttgaaacatagcttactaaaaaaaaaaaaatgcatgtagcaaaaaatgaggggaagatccatcagccagaagctaggtgactactatcccattctcatccacctgttttattggttccttgctatacagtggtataacccaggataacccaccctcaaccttacctttccagcaaccattttgggatccacagggagggaggacctaggactcacaagtaagcaaatatctatttgtatatatactattcaagcatacattttggaaacacagtatagtgtatgaaatacaatcmgcattttaagtgatgacaaatatctatttgaaaaaataagacggtcatagtaagtaagtatcagattcaggtatagatttgaaaaggaggtcacagtaatccttcagagttttaaacttttaacaagacaaatttccttgtattaatgtacaaatctacaaatctgcacctataaagtaattatactataaatatatctttctagtgttcaccatcactagaagagaaatcttagggagaggaatgaggtgagaagaagaaaaaaaggcaaggaagacctccctgctagggagtagcaaaatacaaacgtaagcaagtgttatggactgaattgcatccttccccagtcccccagaccccacccctcgccactggaaattcacatgttgaagtcctaacccccagtacgtacctcagaatgtgactgtattttaaaatagggtctttaaagaggaaattaaattaaaatcaggtcattagaatgggccctactccaatatgactggtgtccttataaaaagaggagattagatctctcacacacacacacaaacagaggaccatgtgaagacacaaggagaagatagccatttatcatttatcaaccaagaagagaggttcagaagaaaccaaccctgccaacaccttggatctctgacttgtaggctccagaaatgtaacaaaatgaatctgttttgagtcactcagtctatggtacttttgtcactgcagctcaagcaaactaatacagcaatgtaaacagcctgcagattccattcctaggcttctgtccaagaaactcacatacacttgcccaaaaaactctgacaaggatgtgcgacacagcgttgctcataaaagaggaaaaaaatggaaaaaaaaagtctcttagtaggaaaatgatttacttatgaaatactgtaaacagttaaaatattgctttacaccaaaatttcatatatttacaagtatttatgttaattttctaaaaagcaatttacaaaaatacatacaacataatgctatttatgcaatgtttaaaaacacacaaactaatggaacatagtttttgtgcataaaaatatagttttaaaaacataaataggatatgatttcaggatgctgtgatagtcctgggcaagtgagatgctgctttataatgtcaaatttaagagaacttgtgttttcttccacacaatacaaattcagacaaaaagaatgaggtttttgccttcattaagacttaccactagagaaaaaggataattctccaagaagttctgtttgtttagaggtattaacaacatagtcttcaaaagaagtctgagctgcaggtctaaagctcttcaaagattctgtggctttctgtattctgcagacagatattttatataaaaatgtttctttaagaagtcaaatcagactaaatatctgcaacatgattaacaaaataaaacccacacttcactcaaaattaaagttaagaatgaggcaagatgtacctcacattaacacagcattatggaccaatcagagctaaagtgagaatacacagcagcatttaataacattgctcaataggttctaaagttagaagtaaaagagaatacctgaggtggagctgctttgctgtctgcacaaagcaagactgatctgtctcctttagcacttcttgagcatatcccacaagtccattgttctctagaagtccctggtactcttccatttgagtctgaaatttgtctaatcttagtttcttagaggagtcaattgctttcaaaacagatgatttcctctct

SEQ ID NO: 711276 - DNA, 665 bp, Homo sapiens
tgctcttattatggatgttgagttgataaattgcaatttgctctcattttaagtaatgggcttttaaaattttgcttttatccccattggttatattcaagtacatttctttttgaaatgaacatgaccatcaaaycttaaagagctggtctcttaccagcaatattttgttctcatttgatttgacgttagttaccacaaagagagatatagttatctcaacataagagaggatgttggactgggtttatatgtatattttcttctttcctgaaaccctacttcacaagacattaaaggagtttaaataacaaaaagataaaacctacaaagaaaaagagagtgaagaggagagagaaccgtggatcagatataataaaaaaatagatgggatggtagagtgggaacctatttagctgagtgagccactgcctaactgcgtacagagggggatactgataagcaagccagccagccagcattcttcacctgccttcatcttagaatgcctgcagctagattcgaactcttctgtctggacttcagcaggtccttttctagagagcctactgccatcacagaagggacctgctgataacctgcaattgtggtttccccaagcaaaaagtgagctcaccatctgatcactgttcattgaatttaca

SEQ ID NO: 711277 - DNA, 1548 bp, Homo sapiens
tagccgggcgtggtggcgggcacctgtagtcccagctactcaggaggctgaggcgggagaatggcgtgaacttgggaggtggagcctgcagtgagccaagatcgcgccactgcactccagcctgggcaaagagcgagactccatcttaaaaaacaaacaaaaaaactgcaaaaccttccccaacactccctatgccctttccctgctttattttctgtggccattaacatacaatatagtctagttatttatctggtgtattgtctttctcccaccctagaaaataagctctatgaatgtagaggtccttaatagatacctactaaataaacgaagaaaaagggcacattgtttaatctacattgtgggagaatatgcaacttgcaggtcccagtaaaattgacaaatacaatattcatctgaacctgaaaatacttaatttactttttcatggtgctgagttatttttcacatttaattgatgtgtaccaccataaaaataatttttgtttagtgtttgattgatacatttgttttaaacatatgtcccatgggagagttatgccaaattactagatcaggacagccataaaaagattagaacttcattcaaactctctgaaagtctcaaaggctgaaaaatgagtcattacgtactcatttatttataacatttctataaacatcttaattctatactattattggaaaaaatgataaaaacaaactcattctaagaaggtgcacgcattatccaagaattgtaaatgtagtttataacactggagagtctgctaaaataagaaagctcaattacccctcctagaagttgccaatttatattctgtatttcttcaaaaaacctttggtatctacttatttttatggttttttttttcctcatagttctagtagtaagcagaaatggaaaaatatttttactgaaatgatgtttacattcacatgctggcataaaagtaacataatgcctatagctaccacatgtaaggtatcatgctatgccaaccaagaagcaatgagtctactgtttacccacgtatgaagctatataacccaggtaaattaactaacctttttaggccttaggtgctccatctattaaatgggtgatatggtttggttctgtgtccctactcaaatctcatttctaattgtaatccccttgtgtcgaaggagggaggtgactagatcatgggggcggtttccccatgctgttcttgtgaagtgagtgagttctcatgagatctgatggctttataagtatttggaagttcctccttcattattctctctcccgctgccacgcaaagaaggtgcttgcctccccttcgccttctgccatgattgtaaatttcctgaggcctccccagctatgcggarctgtgagtcaattaaacctttttcctttataaattacccagtttcaggtatttcttttcttttcttttcttttttgagacggagtttcgctcttgttgcccaagccagagtgcaatggcgcaatctcagctcactgcaacctctgcc

SEQ ID NO: 711278 - DNA, 650 bp, Homo sapiens
acttcaaggtgaaaaacaacctatgaaataaaaaaattgagtgcttctttgtagaagaacagtgaatctgaatataagacaatggaaaatacataaactgaagcaagagagagttttaaaaaagggctaaaaaatgaacagagcctcagtgagctattggacaatactatgcagtctgatatacatgtggtcatggaaggagaagagaaaataatgactaaatataaattcacagatctaagaagctcaacaaccccaagcaggataatcataaaaccaaggcacatccaaatcaaattgctaaatactaatgataaaatcttaaaactagacacaggaaaaaagacacttatacaaaagacaaagataagaaataacactgagttctcatcagaaacaacttagaatcctatatccagtgaaaacatcttaaaaatgaaggtattataagaacattttcagacaaaagctgaatttgtcacaartatctactataagaaaaattaaaggacatacttcaactgaaggaaaatgatacaagatggaaaccttgtagaataaatagcactggaaatgatcagaatgaaggacttcattgcagaggaaaaacaccagaggtttggacactctgccaggtgctggatacccta

SEQ ID NO: 711279 - DNA, 656 bp, Homo sapiens
ttgttttaagaagagacattgtcaaaacagataattatagaaaagctagaaacagtttgaagacaggacctgtcacaaaaactttattttcctttcaacatttcaccttatatccagttgtgcaaatcagaaaacatttaattttattactacatagcaagaacttcatacattaaagatgaaaagcaatcaatttttaacccaaatgtttttcatactttgaaaacgaatgaaagaaaaacatatttttttaaataaaaaagaaatcaagttaagcaaatacctagatttatgacacttattttaagcagaagatctttccacaccttccctcagaaatggatctttcstttggtactactgtattatttctctttctgtataattgaatttctatgctaacaatatgattggatgcataggacttggggcacacttagtgcagaatacattgagctgtattactgttttatattgtgtaggttatttattactatggtagccaggctttaaagttatccaagattatttaggtaatcaaaatcaaaagacttggcctataacaaataaaagcagtcatttctaaattttaaatatataacactgtcatacttaatatccaactggcaacaggcttacctttcattttggggaat

SEQ ID NO: 711280 - DNA, 1671 bp, Homo sapiens
ggtagatttttttaaattttgagaggaaaaaacattcgagggcactaagagctgctggtgccctatctagaggacgtatttgagatgcaccagagatcccctacctcttaaaatccatttagagagtcagctgcaaacctttccttgggtaatgggattagcactctgttgtaactgcaatccttaaggatacaaatttgtttctgaatgttgtagctagtaatcttatgctccttgacaggtcttacagtgtaactgccactcttggaatggaaaatgcagacctcagacctctctctgtctgctaggttaggaagttcaaagactttaacaggaagtattcagtcttgaggaagtaaaaattagctgctccccacctttatttttcaatgatattattgaaggaatgtgatgagtcacctaaatttagaatacatatagatgcttttataagagaatttttccttgtagtacccttaatttttagtacttttaaagaaaagaatgctaagaaatattttctgtctaagtatatttgttgatatttaaaaaccttctgaaccagttagtttgtttggaattcagtattaaaggaataaaagtcaagaactgtttgtggttcttctctttgctatcctctttctatgagacagctcttatttccctggatggacaatatgcattgagcattcttaatccagaaatctgaaatcttccaaaatgttaaactttttgagtactgacagctcaaaggaggagcatttctgatttcagattttcagattagtgatggccaactaaatataatggaacatattccaaaatccaaaaaaaaatccaaaacctgaaacccttctggtcccaaacattttcttgataaaggatattcaacccatgtaggtatgctgagccactatgatcctaggaaaataagataacattttagtatttttttatacaccttcctgatacattctgatattttcttctgtttttaattttatcctcataatacaaatgattattgaatattgttaaaatattcttactttaagaaaatgtctataaatttgaaatattccaagtctgttttcatgaggcgtaattttttatagctaggattccagtagaatgtaaaataaaaattacaatatcttttgaagctcactatgattttagcattaaaaaccactcttggacttcattgagtaatttacataaaaacaaatattaatgtagtataaagctgatatttattttaatttttccttttgaaactattctcaattctttcttaaatgttctattcatggccatgcacrgtggctgatgcctataatctcagcactttaggaggccgaggccagcagattgcttcagctctggagttcaagacgagcctgggcaacatggcgagaccctctgtctactacaaatacaaaagaaaaaaaaatagccaagcgtggtggtgtgcatctgtggtcccagcttctcaggaggctgaggtgggaggattgattgagcctagaaggcggaggttgcaatgagcccaagatcttgccactgcactccagcctaggtgacagagcaagactctgtctcaaaaaaaaaaaagttatattcatatcctattcttcttggatatactatattgactatacatttacctca

SEQ ID NO: 711281 - DNA, 602 bp, Homo sapiens
agacatgtatgggatggcttgaaaatggcatacaaatacgtagagatgttatcagaataatttctatatctataaatgtaggcttagagacatgtcggagtaatgattaaagaaatatttccggctgggtgcrgtggctcacgcctgtaatcccagcactttgggaggccgaggtgggcagatcacaaggtcaggagatcgagaccatcctggctaacacggtgaaaccccatctctactaaaaaatacaaaaaaattggccaggcttggtggcgggcacctgtagtcccagctactcgggaggttgaggcaggagaatggtgtgaacccgggaggcggggcttgcagtgagccgagatggcaccactgcactccagccggggtgacagaacaagactcagtttcaaaaaaaaaaaaaaagaagaaaaagaaatatttcctatgggaaatgatcacagtgaggattttattgtaactgtgtgtgcatgtgtagagtaaaaagactactgattattgcatttattatgtagagttattatgtatgaaggaacattgaaatctgttgtatttttctaaaggaaaacttcttgttgtgcttcatg

SEQ ID NO: 711282 - DNA, 602 bp, Homo sapiens
agacatgtatgggatggcttgaaaatggcatacaaatacgtagagatgttatcagaataatttctatatctataaatgtaggcttagagacatgtcggagtaatgattaaagaaatatttccggctgggtgcggtggctcacgcctgtaatcccagcactttgggaggccgaggtgggcagatcacaaggtcaggagatcgagaccatcctggctaacacggtgaaaccccatctctactaaaaaatacaaaaaaattggccaggcttggtggcgggcacctgtagtcccagctactcgggaggttgaggcaggagaatggtgtgaacccgggaggcggggcttgcagtgagccgagatggcaccactgcactccagccggggtgacagaacaagactcagtttcaaaaaaaaaaaaraagaagaaaaagaaatatttcctatgggaaatgatcacagtgaggattttattgtaactgtgtgtgcatgtgtagagtaaaaagactactgattattgcatttattatgtagagttattatgtatgaaggaacattgaaatctgttgtatttttctaaaggaaaacttcttgttgtgcttcatg

SEQ ID NO: 711283 - DNA, 602 bp, Homo sapiens
agacatgtatgggatggcttgaaaatggcatacaaatacgtagagatgttatcagaataatttctatatctataaatgtaggcttagagacatgtcggagtaatgattaaagaaatatttccggctgggtgcggtggctcacgcctgtaatcccagcactttgggaggccgaggtgggcagatcacaaggtcaggagatcgagaccatcctggctaacacggtgaaaccccatctctactaaaaaatacaaaaaaattggccaggcttggtggcgggcacctgtagtcccagctactcgggaggttgaggcaggagaatggtgtgaacccgggaggcggggcttgcagtgagccgagatggcaccactgcactccagccggggtgacagaacaagactcagtttcaaaaaaaaaaaaaaagaagaaaaagaaatatttcctatgggaaatgatcacagtgaggattttattgtaactgtgtgtgcatgtgtagagtaaaaagactactgattrttgcatttattatgtagagttattatgtatgaaggaacattgaaatctgttgtatttttctaaaggaaaacttcttgttgtgcttcatg

SEQ ID NO: 711284 - DNA, 602 bp, Homo sapiens
agacatgtatgggatggcttgaaaatggcatacaaatacgtagagatgttatcagaataatttctatatctataaatgtaggcttagagacatgtcggagtaatgattaaagaaatatttccggctgggtgcggtggctcacgcctgtaatcccagcactttgggaggccgaggtgggcagatcacaaggtcaggagatcgagaccatcctggctaacacggtgaaaccccatctctactaaaaaatacaaaaaaattggccaggcttggtggcgggcacctgtagtcccagctactcgggaggttgaggcaggagaatggtgtgaacccgggaggcggggcttgcagtgagccgagatggcaccactgcactccagccggggtgacagaacaagactcagtttcaaaaaaaaaaaaaaagaagaaaaagaaatatttcctatgggaaatgatcacagtgaggattttattgtaactgtgtgtgcatgtgtagagtaaaaagactactgattattgcatttattatgtagagttattatrtatgaaggaacattgaaatctgttgtatttttctaaaggaaaacttcttgttgtgcttcatg

SEQ ID NO: 711285 - DNA, 2523 bp, Homo sapiens
ctgtggccctcaactaccatggaggagaagaaaatggggcccagggatcccaaggtgggtatgaagctgccaaaaccaatgaccatatagaggggatgaaaggagctgttgcccagcaacccagagctttgagtctcatttactcttgccagtgggacttcatctccagggccccgtttacgtccccacctggtgtctccactctggagggttctctgtttcttccctctgggagagaagctgtactctgacatctggtcaggggcatggggctcagcaggcccctctgctagccattggatggagaggaaccctactttgtcccactagtcctgagggcttagccccagggcacctgtgaggttctttcatgagaaggagggaaggaatgaagagctgatccactccctggccaactgaggaaataattcccagacaccagagaactctgttctatttcatagattgggaagctgaggttaaaaagagacaaaggaacttgaggaaatctgctgacagcctttacatagccctcaaactgatcatactaaataatataggggacttttgtttgtttgtcttttaaggttctaagcagcaaagtctcccctcccctgatagcagaatgctccaagttgaggctttcattgggacattagtgtggagtaggagttttccccaactgagggttgactcacagatgggtcccagttttgcacctaagactcctgacaagtgtttcgccttggaggctgtattagtctgttctcacactgctgtaaagatgctacctgagatcgggtaatttataaacaaaagaggtttagttgattcacatttaaaagttaccaaaacaaacaatatattggaatagaaaataagatataaaatgtcagaggacaaaaataaaaatgttttaatttgagattctctttcacactgcgtggctggagaagcctcaggaaacttacaatcaggagaaggggaaacaaggcatgtcttacatggaggcaggagagagaccaagagctgccacacccttttaaaccatcagatctcgtgagaactcactatcatgagaacaacaggggggaaaccgccccaatcatacaatcacctcccaccaggtccccgccttgacatgtggggattacaattcaggatgagatttgggtggggtcacagaaccaaaccacatcaggggctatcacatttggatccagacagaattaggtagggctcctgtcaggttggtgtccttacctatttgtgtctcccatttcctagtctgtctcatgaggtcagcacttcacagggtgattatgaagatgaatgaaggtcaaaaccttaacatgaggtctagcacatgataggyactcagtaaatgctgcccatttccatatcttaaacaaacaaacagacaactctcgctcctcactggttctatgcacttaaatgttttaaaattatccatggcaaggagtttatatacagtgtgaggaaggcaaatagttcaattgaatccccattgagggtattacttgccccgtattgggacttttatcatccctgttaggcacttgcacttgtactattcttgtaaataaataaaatgttctaattctgaacttactgataaatagactatgaaaatgacctttttaaagaaattagttttggaagtaagaaaatgcatagcccaattcttatattcttagagagagtaggttctgagagactgataccactaaaatccatggtgttcatctctgtccttgcaatgatacataatatattcatatttttggattgatagaaaactatgttagctttgttttcatgtaaagtgtgaaagaaatctcaaaacatttttattttcatcctctgactttttatatcttattttctattccaatatattatttgttttggtaacttttaaatcactgctgagagcccataatttaaactgaatttatttaaataactgcagaatgttttgtacgtactaggattttttttttttttgtatttggtagtcattcagtaactatttgctgatttgaatattttaattagaaagaagatgagaagcagtgtctttatgccattttggtgaatccatgagtcttattgataaaaggatttaagccagagggctatccaaaaaagggtaagatattaaactccacaggtaggaggaaagagtgtgctagggataacaacccttatgagatttagggtcttgacagatagagaaagtggattaaagaggacatgaaagcaaatgcgcctattcagctgctgatcagaaaatgacagatggattcactaagaaagttgaaatggcacaccagaaggagaaaacaatactattatttaagataatagagacattcttcacagatcgtttctggaaaaaccagcaggcaagtttatcccttgattgaggaactgaatactttcaatcaaagcacaatgagttcacctaataaaagttttcagaacaaaagtaaagaaaaa

SEQ ID NO: 711286 - DNA, 584 bp, Homo sapiens
tcatttgagaatgaaatatttaggattttacctactagcaagagcaggttaggcttgtaggaatcctttttcattactctaaaaatttttatccacactatatctacaggcttgttttgtagactagctgtttgttaatcagtttctttgtgtctattcattatatgtgctrttcatgtctaaaatgcccatcatgtttaaacactgtgaagcatattgaatgttttcataagctaagcttctatttttcagtgaaatttgttcagaaaaagagaggtaatttgaactcttgaattgaagctggattccaaataagttataattttaataaagaagtttagaaagtcttaagtttgctggtggctcatgatgtgtgtatgtgtgtgtgtgtgtgagtgtgcgcgcgtgttcaaaaacaatcttatttcttaaaaaaaagaatcattttatttttactgcctgggttttgttgtaacctacactaacatcaaacactcaggtgaaatcaattcatcttttttagaatgcttccttacggctgcttcaaaaatcatcaaatagtttttgagaaatagcatatacat

SEQ ID NO: 711287 - DNA, 809 bp, Homo sapiens
gagaatggcgtgaacctgggaggaggaggttgcactgagttgagatcgcgccactgcactccagcctgggcgacagagggaaactccgtctcagaaaaataataataaaataaaaaagaattaaaataaaaaaacagatttccaggcaatagccacaaatttctgttttcacacatatcagatattttgtccattgcaactgatgtattcttttattggtgttcaacaactcaggtagctttaagaaaaaaactatatctgtattacaaaataaagtatattatttggaaataatttgtttgaaaacagttgaacttcatttgtattattagaaaccacatttatttaaacactgtatttctcaataaaagaaaatgaagagctagttcatttaaaatatgaatgtatacctttggagtggttggaaaatcaattttgtcactattgagtgtgaataaagttctaatctctcaagacagtaatgaaatcatcagccaggcatcttgattcatgcctataatcccaacattttgggaggctaaggtgagaggattgcttgaattcaagagattgggaccaacstgggcaacacagcaagatcccatttctacagactttttccttttctttttcttttcttttctttttttttttttaattagttgggcatggtggtgcatgcctgtagtcctaaccactcgagaggctgggacaggaagattgcttgagccttggagttcaaggctgcagtgagctgtaatcacactgtagaaagaaaaacttcagctgagttaaatttaaaggagttt

SEQ ID NO: 711288 - DNA, 1754 bp, Homo sapiens
cattgycacagtgcagctaagtacaatatcatcatgtatattttcttctgaaactactcccttttctacataagacattaacattactactaatacgataattttggctctactgcttaaattctaggaagtggtgttgaaatactttttaaagcataaaaccagtttagtagtttgcattttacattgacttgaaactaaataatgcaaagcctaagatattgttgacatatccatggggagattatgaataaaataggacaacacacagttcaccagagtaaatatatgaatccagtattcaactttatattttatcatataaaaatttgtagagtaatattatctcatgagttcttatgagcattaaatggtaaatgagctaacattgatatacttataatagtgtcaaagagattaccatcaccacaaactattttgttaaaaaaattaagatgttggcagggtgcggtggctcacgcctgtaatcccagcactttgggaagccaagacaagcagatcacgaggtcaggagatggagactatcctgactaacacggcgaaacccgtctctactgaaaatacaaaaaattagccgggcgtggtggcgggcgcctgtagtcccagctactcgggaggctgaggcaggagaatggcgtgaacccgggaggcggagcttgcagcgagccgagatcgcgccactgcactccagcgtgggcgacagagggagaccccgtctcaaaaaaaaaaaaaaaagaaaaattaaaatgttaaaatttttccttctctcaaacacatgcacaaacctcagctcagtatttgtaaagaaaaaatgattaacatctcgacattcaaaaatctgtgctcttacaggtaaagatcaaataccttaactgcaaggctgtatgcaagtagcgttataaaaatgtttctccaaacctatagtatatttgaaagaaaccctctaatcaacccaaaagagtcgtctatttgtttttcacaaaatatttgccaaacttcttttctccccaccgttttatttgctggtttctttttgtgagacactctctggtatcttctgcttatagaaatcctactcttaatccaagactttaattctaacattcttcatgaataatattttgattgactcaaatttgggctatcacacaatactttagatcatgtatgtttatgtatgccttttctctctaagcagtgaatcacgttttttaaaagattagggtatattcttcacattatattgtgtattcaagactaaattagtgccccatgttgcacaatttacaaaggactgttgatgaccatactactgcagatactcaacgttttacatcttcaggaccttcatggccacagtctgcataattcagttcaggtgaaaaaaaagtttttctgtcaatattggatttagtatgagatttatcaagtatgacttaaaatagatgttaacaggatttagagtacaaaaattaaggacaaagagaataagtaatgtaacaatgcttctaaatcttcatcttatagagagaagaaacataccaaataaagaacagcctggatatttgatctatgatttatagatatacataaaatcatatgcccaatatttagagaatacttgttatttcaaataaaaatggagtagtactaacaacttaccacatactgtgttaggtcactaagcacatttcaatgcaaacaaaaaatcattactatataatcacataatc

SEQ ID NO: 711289 - DNA, 605 bp, Homo sapiens
agtatcaaagatgaagaagtactcttgaccttttaggctttctgttccagtctagttttagtgtggcattgtatttgaacttgccttagaaactcataggtttatgccctcttgtggtctgtcaccaatataaatagcacaaatgaaaattttaagtactggagatcttactgcatgttactgctctcctttataaaataatttttaaaaagcagcttctgaggaacaacagctaagaaattattattcctgtcttccatataatgtgtggagcttaaaagttaccaaatgttattttaacccttggtaacaaaatgtatgtgtatgttaggtggacactaatgaacagaaaaatatttttggatgggctgtccatcattgtccttctaggtgtctaaccctattaatttataagtgtcttaaaaatatgatgaggtgtgatagtaattgtagggctagcacattacccttctaccttcacctaaacatacacagatatactagtaaatgatgcttgggraatgtgtttatacttgtttcatctgaaagggtcaggagctgtaggaggcattggaagaaataaggattataatgttagtgaattg

SEQ ID NO: 711290 - DNA, 588 bp, Homo sapiens
gctacagtgggttgagggccattaattcttattggacttctgctttccctgagttcccaagtcagattctaagtcaccagtttccatttatttctgccactctaaaactaaagaaataggccaggcgcggtggctcatgcctgtaatccaagcactttcagaggccgaggtgggcggatcatgaggttaggagactgacaccagcctggccagcatggtgaaagcccgtctctactaaaaatacaaaaattagctgggtgtggtggtgcacccctgtagtcccagctactcaggaggctggggcaggagaatcgcttgaatctggaaggtggaggttgcggtgactgaagatggcaccactgtactcccrcctggatgacagagcaagactccatctcaaaggaaaaaaaaaaaaaaaactaaagaaataaaaccaagagttttggacttacaagagatgaagcattttgtggaccagagaagtcctcagacaaagcatccagaaggaagtcttcactcatgggctgcaagaaccaggaaatgtatcaacaaacaccattgcaatcagggccaaaaggaaaagatatc

SEQ ID NO: 711291 - DNA, 1932 bp, Homo sapiens
  misc_feature 1453, 1460, 1464, 1467, 1472, 1474, 1477, 1481, 1483, 1486,1491, 1496, 1498, 1500, 1505, 1509, 1511, 1512, 1518, 1519,1522, 1523, 1527, 1532, 1534, 1538, 1539, 1544, 1546, 1548,1549, 1553, 1555, 1559, 1561, 1563, 1564, 1578, 1579: n = A,T,C or G
  misc_feature 1590, 1591, 1616, 1832, 1833, 1834, 1835, 1836, 1837, 1838,1839, 1840, 1841, 1842, 1843, 1844, 1845, 1846, 1847, 1848,1849, 1850, 1851, 1852, 1853, 1854, 1855, 1856, 1857, 1858,1859, 1860, 1861, 1862, 1863, 1864, 1865, 1866, 1867: n = A,T,C or G
  misc_feature 1868, 1869, 1870, 1871, 1872, 1873, 1874, 1875, 1876, 1877,1878, 1879, 1880, 1881, 1882, 1883, 1884, 1885, 1886, 1887,1888, 1889, 1890, 1891, 1892, 1893, 1894, 1895, 1896, 1897,1898, 1899, 1900, 1901, 1902, 1903, 1904, 1905, 1906: n = A,T,C or G
  misc_feature 1907, 1908, 1909, 1910, 1911, 1912, 1913, 1914, 1915, 1916,1917, 1918, 1919, 1920, 1921, 1922, 1923, 1924, 1925, 1926,1927, 1928, 1929, 1930, 1931: n = A,T,C or G
tttgcaaattttacaaaagaatatgaccatgtgaagatatattgctcaggttcttcctggggcttggaaaggatccacaagaaaagagtcttgaagcttgagcttcatcagctttatggtaaattggcctctggtgtgctattcctggtttgtctctttctgaaataaattctctcagaatagttatcctagaatacaagtcagatcatggcgctcaatgctttgaattctttgagaactttcttctttgcctcttattttgcaaaatttcaaacctaagaaagttgacaagaataagacattgaaccctagattttataaacacacacacacacacttttttttggctgaactatttgagagtgaattgtaaacattatgagatttctttattcctaattactttagcatgtatcatctaagaacaaggccgttatcttattaagcctaatacaatcatcaatcaagaaatctaacatactattacatttttactattatttaagatataatctggccaggcgcagtggctcacgcctgtaatcccagcactttgggaggccgacgcgggtggatcatgaggtcaggagatcgagaccatcctggctaacacggtgagacccggtctctactaaaaatatgaaaaattagccaggcgtggtggcaggtgcctgtagtcccagctatttaggaagctgaagcaggagaatggcacgaacccaggaggcggaggttacagtgaaccgagatcgcaccactgcactccagcctggacgacagagcgagactctgactaaaaaaaaaaaaagaaaagaaaaaaaaaagagatagaatccatattttcatttccccggttgtttccttataatgtgctttatagctggggtttatcattgttgttgtcttttaaccaatccaggatgcaattaaatattacacattacatttagttgttatatctctcaattctctttttttttttctttctttctgtttttttttttttttttttttaraaacaggatcttgctgtgttgcctaggctggtctggaactcgggcctaagcaatcctcctgccacaggctcccaagtagctaggattataggcatgcatgaccacatctgccttctaatctcttttaatctggagcagtacgcccagtgggtttggggggagggaccgtgtctgtcataatatgaacatttttaatgagcccaggccctttagtttgcataattccttcatttatgataaatgtgcttgcaaaatagtgatgtttctatcgttcttcctatacttattggttgatattcttctgtaaatggagctttcctttttctctgctcccaaatttttctcttagaattattatgattcatggatttctattttaaattcagtattttgtgatctgttctgattattcttttggatagctcgcacattatgcnttcccantatnttntggcntntgnccangnggngaagntccantntntccanaggncnntacacnntcnntaantccangngttnntttangncnncccntntccntntnnatgttatctggcanncaagatattcnncaggctccagactttgcgctatccncagtcctagaatcagccatttcttcaggaactctggttccttctagggggcaatgatatttagaaaccaaggtctgggctctaggatgctcatgactttaggtgtctttacttctgcgccctttaattggctagagctagggattatactttttatttaaattatgggcactgatgcccttatttcaatctggtattcgtatctcatttcaataannnnnnnnnnnnnnnnnnnnnnnnnnnnnnnnnnnnnnnnnnnnnnnnnnnnnnnnnnnnnnnnnnnnnnnnnnnnnnnnnnnnnnnnnnnnnnnnnnnnt

SEQ ID NO: 711292 - DNA, 901 bp, Homo sapiens
tttatcgtataccaaagatggtactaagcactttgcatggaataaagcacttaatcttcagaagtactagagaaaacatatttttatcacccccctttccaggtgcaaaacaccgagaaggcacagagagcttaagtcacttgccgggccccctagggccacatgattagtaaacggatggtggaatttggatgaatcccagcatactttaccctcagccctgttctcaaatataataagctatattcttagaaacataactagaagcaaaagtaattaaggagaggtttgaaacatagttcatccactatgagtattaggtctcctcgccctgatttatttcttttgttgctgctgtgtagatatagtatggtaggcagagtagcagctccccaaagatgtctttgtcctaattaccaaatctgtgaatatgttaccttacaaggcaaaagggacttggaaaatgtgattaaggattttaagatgaggagattatcctgggttatcctcatgagtccaatgtaaccacaaggatccttacacgtgaaagagggaggcaagagagtcagatgatggaatgtgggaagaacccagtccatcaytgccagctttgaagatggaggaaaaagattataagccaaggaattcagacagactctagaagctagaaaaggcagggaaatagacagtgccctagagtctccataaggaacacaaccccgacaacattttgattttagtcttatgaaagccatttcaggttcttgacctctaaaactataaaagaataatttttttttttttttttgagacagagtctacctctgtttctcaggctggagtgcagtggcacaatcttggctcactgcaacctccacctcctgggttcaagtgattctcc

SEQ ID NO: 711293 - DNA, 2173 bp, Homo sapiens
ctttaaatgaaagaaggcaggcaggcaggcaggcaggcaggccggccaagccacatgttgtgaagaatagtgaatacccctagttggttatttcaccatccagcatctattcatgttcctctgggtaacagtgccctgatgctacctctccctccctctcagcacataggctccaggtgagcctccacatttagcttaggggtgacagtcaacatgtcacattaccctgggatgtattgattggttcagtgatgcgcacatgattcaattagagacaaagaaatatttctaggaaccctgagacaaaggttcttgcctttttgcatgggatttgaaaaccagaccacagaaaccagaaaaatcttggaaagatttctaggattataaatttaaaaacaaaaaaagtaacattcctgctggtcatgaggagagagccatcctggggtcaaagtcaaccaagacaatgtggacatgagagacagaaagaaagcccccagttccagttgtcatggattcagcctccggatgcagctggcctatgtatctgttggtcagtgttattttgaaacacagcttacagaaaataaaatagaaccacaggaatttttctctatattatataatcttgtattttctctactgtcaccagaacctattactatatctcttccctttttcttcactcatctgtgaatcacaatcatctttattttctgtgagtctattcattctaccccttttcaaatgtacttatgatgcagaattgtcttgtttgcgggcctgtctcccttctgaaatacgagttcccccaggaaaggggttatgcctcattaatttcatatccaccagcctacatagtttaatttacagaacatagtaagtgctcacactaattttggggacagtgtgcagtgttgtggagagaaatttgaagcaagcacacctaggttcaaactagctacttgtctaaattacaaaacatcttaacactgcagaatcctcacgtaaaaaatgggcataataatgtatcttccatcattgctgtgaaaattaaataatgtttgaaatatccctatatgatgcctagctcacagaaagtccccaataattattagtttttgcaaccccattcccaaaaaaaattgtataagttgataattcaaggaagagataatgagaatatgataaaagactgttataagcaaaaagaccaaatttaggagataatgtgaatgtaaaaacaacaattttgggcaaaggactaaatagaatgaaaaacacagacaattaaatgtaatctagaaaagatttgaggactcagagatgccagtgacaatttcatcatgatgtggaaaataagcacagaccatgttatcaggttgttaagaaattcttctctaaggttgtaatgatataactagcggtagtaatggtaaaccgtaatttaactgctgtgaacttcttaattagtcagaggctaattctctgttagggcctccatcagccattccagtaattaattgcccaaattagttgtaatcattgagttcattgataaacaatttcatgataacacggagcacagggcaacaagaacgaaaatgaactgctaaatatccaaactaagtgtattagtccattttcacactgctataaataaataactgagactgggtratttataaaagaaagaggtttggccaggtgtggtagctcacgtttgtaatcccagaactttgggaggccgaggcaggcggatcacttgaggtcaggagttcaagacaagcctgaccgacatggtgaaacctcatctctgctaaaaattcaaaaattagctgggcatggtggtgcacacctgtagtccccaggaggctgaggaaggagattcattcaaattcgggaggcagaggttgcaggggactgagatcacaccactgcactccagcctgggctacagagcaagactcagtctccaaaaataagtaaataaataaggaaagaggtttgtttaattgactcacagttccacatggccagagaggtctcaggaacttaaaatcatgatggaaggtgaaggggaagcaaggaccttctccaccttatggcaagagagagaagtgcaagcagagaagcgccggatgcttataaaaccatcagatctagtgagaactca

SEQ ID NO: 711294 - DNA, 634 bp, Homo sapiens
gctgtctttattttgatcacaaatacataaatcataagatgcctcttaaagttcatcttagggaacaatataactcagtctatgagcagtttagaatgatttacaatcatcttctcatttaaaaacagtcctactctaaaggaagtaaaaaaaatagctttttttgggggattgaagkaagttatttgcttttttttttttttttaaaaaaactgactcaggtggttaatttgcacagttttgaaagctggcttcttgccaatcaacttaaaaaaattaaacagggatataaaattcagtttatttaaaactaacctaagaaaggaggaaaatatactttttgatatgattgttgcaataacttggaatcaaagtttttagaacttttaaactttttttttaaaaagctttgttttaactgtttctgatatgaaagtaaaagcatgtgtaaaatactttcaattgaatattgatacattccataaggtcctccaaagtatatgaccctgtctctgccttctaagactttccagtaaagtgatgatttatgtgaatgaaaatcaaatatcaggcagcctatagaaagtgctcactaaattgaatagaaagtaaatatattaatgcgggtcagata

SEQ ID NO: 711295 - DNA, 634 bp, Homo sapiens
gctgtctttattttgatcacaaatacataaatcataagatgcctcttaaagttcatcttagggaacaatataactcagtctatgagcagtttagaatgatttacaatcatcttctcatttaaaaacagtcctactctaaaggaagtaaaaaaaatagctttttttgggggattgaagtaagttatttgctttttttttttttttwaaaaaaactgactcaggtggttaatttgcacagttttgaaagctggcttcttgccaatcaacttaaaaaaattaaacagggatataaaattcagtttatttaaaactaacctaagaaaggaggaaaatatactttttgatatgattgttgcaataacttggaatcaaagtttttagaacttttaaactttttttttaaaaagctttgttttaactgtttctgatatgaaagtaaaagcatgtgtaaaatactttcaattgaatattgatacattccataaggtcctccaaagtatatgaccctgtctctgccttctaagactttccagtaaagtgatgatttatgtgaatgaaaatcaaatatcaggcagcctatagaaagtgctcactaaattgaatagaaagtaaatatattaatgcgggtcagata

SEQ ID NO: 711296 - DNA, 634 bp, Homo sapiens
gctgtctttattttgatcacaaatacataaatcataagatgcctcttaaagttcatcttagggaacaatataactcagtctatgagcagtttagaatgatttacaatcatcttctcatttaaaaacagtcctactctaaaggaagtaaaaaaaatagctttttttgggggattgaagtaagttatttgcttttttttttttttttaaaaaaactgactcaggtggttaatttgcacagttttgaaagctggcttcttgccaatcaacttaaaaaaattaaacagggatataaaattcagtttatttaaaactaacctaagaaaggaggaaaatatactttttgatatgattgttgcaataacttggaatcaaagtttttagaacttttaaactttttttttaaaaagctttgttttaactgtttctgatatgaaagtaaaagcatgtgtaaaatactttcaattgaatattgatacattycataaggtcctccaaagtatatgaccctgtctctgccttctaagactttccagtaaagtgatgatttatgtgaatgaaaatcaaatatcaggcagcctatagaaagtgctcactaaattgaatagaaagtaaatatattaatgcgggtcagata

SEQ ID NO: 711297 - DNA, 591 bp, Homo sapiens
gatatcaaagtagttccaattgaggcagagtgatggcaactagcagagagaagtttctctttagatataatggaagtttttaaaaatttttattttttgtagagatgggggtcttgctgtgttgcccaggctggcctcgaactcctggctttaaacaatcttcccatcttgacctcctaaagtgctgggattacagatgtgagtcaccttcccgcccactgraatgtatttttattgaaatgacttagatgcttttcaattagaaaagtgttttactgcaacagaagtaaactctacttgagtccaataacagagggggtttgtttctctttctgtttttgtgtttaatcagaggtccagagagaggcaggccaagattattgcagctgctttgtgatgtcaacgtgcatcaaggactcaggcatctctattgccacggttcctcatagttggaagttggctactgtgcctctagtcatcatatttgaatacaaaaaaggggaaaaatgaagggccccagagctgaaaggacatgccagtctgcctctttccagattgttccatagtcttgtctagtagtgtgtgagaccc

SEQ ID NO: 711298 - DNA, 1768 bp, Homo sapiens
tcagccttgtttttccagagccgtattctatacaacagcaaaaatatttccttctgggcagtggtctttgggctgtcttctactaacactctctttgggttctttgagaatacctaagtccagccttggcacccactgtttttctctgtacctcccctcttccctttccagccaggccagtctcactgggactgaccctactcgacgctggagcacaagctgctacccacgcagtgccccagaacaccctgccatcacccctccaccttcccttggccacytctgtccaaccccacctctgtcctggtctcagcagcaaaggcacctgctcaaaacccagacagcactaaccttgtccctgctccagagcttctgcctatccccttatagacagtctccctgtgctgttccccagggaaattatgtctccctgccaacccacgagagttccctgtggctcctggacacacctgaagtcccaggaatagaggaggaaacctggcgagggatgaagtgagataagccagcaagctaagccttatcccattttgaccagctctttatctgttgaacatctctctgtggtgctgcagctattggaattcttaggaaagcatcagttttacccagaaatgaaagccatcatcaagagtttaagatctaaaatcacacacacagtctcaagcagggcactgtcttggcatgctgcttgcagtctctggaaagtgtgggcaaaggttgcattctccccatgggtcataggctcatgcttgcgaagagtcataacaatgtggaaagggaattcagaggacaactctctctctttgctacagatgcagaaacaagagctggctcagatgatgcacagaggaagaaccaaacagcatcgacagcctccttcccttgaaaggctgtgaactgaactcacttgagctcttttttctgggtggaaagatgagtgcctgtctggatgcacaatatcttctaggtcctgtgcctaaacatcatctcctgtttggcagcaggagatgctgtgtttagaaacacagcaaaaactggctgggcacggtggcctacacctgtaatcccaatgctttgggagaccaaagtgggaggattacttgagctcagcagttcaagactggcctgggccacatggtgaaacaaaaatatcaaaaaattaaccagaggtgtggaatgtctatagttccagctgctcaggagattgagcaggaggattgcttgagcccaggagctggaggctgcagtgagctatgattgagccactgcactctaacctgggcgacaaaggagcaagactctatcttaaaaacaaaaaacaaaaaacaacaaaacaacaacaacaacaacaaaaaacaagcagaaaaaccaagtgccacatgctcacatgcctcctttgtcctctccttttattgatagaacaagagattatatttgtcacaggtcggggctgaagtagtagacaggcctttccagttgtcataattgggttttaatgtgtaaattctagcaggcttcagttattcaagcacagcctatttcacaatatttcagttatggtacattgcaggattacagtttaaggcaattgatttaactctcaaattccattcaatctggaagtgtgagatatgttttgtgtgctgtcagatgggctctaaaacatgtccctggggccgggcgcggtggctcacgccagtaatcccagcactttgggatgccgaggcaggcggatcacttgaagtca

SEQ ID NO: 711299 - DNA, 1768 bp, Homo sapiens
tcagccttgtttttccagagccgtattctatacaacagcaaaaatatttccttctgggcagtggtctttgggctgtcttctactaacactctctttgggttctttgagaatacctaagtccagccttggcacccactgtttttctctgtacctcccctcttccctttccagccaggccagtctcactgggactgaccctactcgacgctggagcacaagctgctacccacgcagtgccccagaacaccctgccatcacccctccaccttcccttggccacctctgtccaaccccacctctgtcctggtctcagcagcaaaggcacctgctcaaaacccagacagcactaaccttgtccctgctccagagcttctgcctatccccttatagacagtctccctgtgctgttccccagggaaattatgtctccctgccaacccacgagagttccctgtggctcctggacacacctgaagtcccaggaatagaggaggaaacctggcgagggatgaagtgagataagccagcaagctaagccttatcccattttgaccagctctttatctgttgaacatctctctgtggtgctgcagctattggaattcttaggaaagcatcagttttacccagaaatgaaagccatcatcaagagtttaagatctaaaatcacacacacagtctcaagcagggcactgtcttggcatgctgcttgcagtctctggaaagtgtgggcaaaggttgcattctccccatgggtcataggctcatgcttgcgaagagtcataacaatgtggaaagggaattcagaggacaactctctctctttgctacagatgcagaaacaagagctggctcagatgatgcacagaggaagaaccaaacagcatcgacagcctccttcccttgaaaggctgtgaactgaactcacttgagctcttttttctgggtggaaagatgagtgcctgtctggatgcacaatatcttctaggtcctgtgcctaaacatcatctcctgtttggcagcaggagatgctgtgtttagaaacacagcaaaaactggctgggcacggtggcctacacctgtaatcccaatgctttgggagaccaaagtgggaggattacttgagctcagcagttcaagactggcctgggccacatggtgaaacaaaaatatcaaaaaattaaccagaggtgtggaatgtctatagttccagctgctcaggagattgagcaggaggattgcttgagcccaggagctggaggctgcagtgagctatgattgagccactgcactctaacctgggcgacaaaggagcaagactctatcttaaaaacaaaaaacaaaaaacaacaaaacaacaacaacaacaacaaaaaacaagcagaaaaaccaagtgccacatgctcacatgcctcctttgtcctctccttttattgatagaacaagagattatatttgtcacaggtcggggctgaagtagtagacaggcctttccagttgtcataattgggttttaatgtgtaaattctagcaggcttcagttattcaagcacagcctatttcacaatatttcagttatggtacattgmaggattacagtttaaggcaattgatttaactctcaaattccattcaatctggaagtgtgagatatgttttgtgtgctgtcagatgggctctaaaacatgtccctggggccgggcgcggtggctcacgccagtaatcccagcactttgggatgccgaggcaggcggatcacttgaagtca

SEQ ID NO: 711300 - DNA, 877 bp, Homo sapiens
gctgagatcgcgacactgcactccagcctgggtgacagagtgagactctgtctcaaataataataataataataataataataataataataaataacttggagtagaaaaaggacaagacagaatatcctaagaggacttatgaaacaccaaatgccactgaattaatgttacatgttgaacattattgcaggcagtataatgaagagctgagcttatcctttaggatggttttggtttggtttttggaatgacgtgtcagagcactggaaaggaagtgccaatgccaataaaaaccaactttgctctgtgcttttccatttataaaacacttctgcttctgtttttgtatttgatcagaaacatggtgactggttcaatactgtctttccttctttcctgaaaggacacattcctgaaaataggtctgaagattgtataaaagcctacatattataggggattctggccatagaaagccaaatatattatgaaatctctaattatatctwgctatttagacacagcattcagtgtatactccattttctaatttttctttctttaaactttacacaattttggttattttctcctcatttcaataacagttgaccagctcaagttcaataaatgtctgattcagatgaaaagatttgccatttttggcatgtctaataacttctacctttgtcttacttagtttatgagacaaacacttctcataattactattaggcttttaattttcccatttcccattcacttttttgtaataatgaaaatatgcagtaacatttgaataagtgaatgaataattctctgggtaatgacaaggatggtgattctgcaaaaattgaactattggcttagggca

SEQ ID NO: 711301 - DNA, 671 bp, Homo sapiens
tgctccatctctctgcctctcatcgtcagctccttccacacacgtaggaggaggcaaatctgtgctctcccttcttaaaatctttcactaccaatcccttgttcacaagatgcaatccaaaccccttaatatgctaaaaagtccctgcatgagctgatcattcccgtctgcctagccagsctgctctccttgcagaacccctgagctcttcccctagcccacttctctagccacatcaaactccacactctggatgcagaacacagtctgagtaaaggcatggagactttttatttatttattgacatgattgtcaatgaagtgataattaagcaatggagtgacaggaggtggcccagttggtgctgagcaccagtttgtgaagcattgccatgggttggggccagggccctgatgtccagctaatgaatggccatgagaggtcaccaagccattctccccgagaggcgaagaaatctggttctcccttacccactgatatccactgtttctctcctcaatctcagcctgcgatggtgatcactggggtccccactgcaccagccggtgccagtgcaaaaatggggctctgtgcaaccccatcaccggggcttgccactgtgctgcgggcttccggggctggcgctgcgaggaccgctgtgagcagggca

SEQ ID NO: 711302 - DNA, 1278 bp, Homo sapiens
gcagtgagctgagactgtgccacggcactccagcctgggtgacagagtgagactccatctcaaaaaaaaaaaaaagtttcctcattatacttataaacatactgaacttattgaccagggcggtcctttgtgaacactcaccttggaaatcacctctctgcactgtcctagactcttcttgttccagccaagagatcagactgggtttgaagagctgatatcctgtgcacaaagaaagatacattaccagaagaggctcatgcaagagatgataaatctttccacaactcaggagatatagttccaatggaagcagtgaaattattttaaaagggctaaaaatgcaaatatcgtctgtctgtgcccccaaaagattggtgatctctgatccctgaagcccaaatccaggctgatgtacacacttacaaagcactaagacttttatccaaataggaagttaagtgaaacaaagagatcttcattctcatgggaaacaactatacatctcattcttcaacattatagcacatcagattcatgagagcttgttaaaacacagatgacaggggccctgttgcagtttctcactgagtatgtcaaaggtggagactgagaacatacatctccaacagtgctggtgatgctcttcatctgacaccacattttgagaatcaccaagtagatgaaaccctattagggcagggactatgtctgttatttcccattgtgttcagagttgctatctctgatgtgcaatacagtaagtacataacataatctgttccatagtaggctacaagggatgaggccagtcttacctactgtggccaaattcttgtagttctccagcatcacatctctgtagaggtttctctgagttgggtccagtaaagtccattcttctggggtgaagtccacagccagatcatcaaaagtcactgaatcctaaaccatcacacacatgctggcttgagccacaaaacatgtctaccagtgttcactgcaaaatgcaatacctacagagtctgagggctcacaytgcccaccccaggaggtcctctctatccacactcactcactgtcagtcccctccagtgacacggcttgaatggcacttcttacacatgattgtatgtaacacaaccagactgggaggtcatctgatttccctccactgcagcacactcttgagcagatgctagataaacactgatgaatggaaagattatctcaaaggatactttcatgtcccttaccatgtgtcagaacactcaacaa

SEQ ID NO: 711303 - DNA, 1048 bp, Homo sapiens
tattagaagttttttgcgtcttgtttagaagtttggtgatgtttgtgaccagaaatatgctataaaaacttaactgttggtcaaatcaattagcctattgtaaaacagagtttgttatatgtcatttaagttatagtttccaagaacttatagatgacattaagtgagtacatctgcatttagctaacacgtggggagccagtgatttctctgtggacactaacattagccagcaactttggcatgttagtcaaggacaaaaagataaaaacaaatggctgggggaaaaatttatcaacattttgagaaatgaactcaaaaggcagattcctcactagcagcaagatatccattgtgtacccacttttacctgtatggacaggaatttgttataatttgttgtatttataattatttttatttttaaacgtagttaactaattccaccttagtttttttaggtgagattctacaagtcatcaggttctttcttgctggctaagccctaacctctggaattcataatcggaggacctcataaggattatggaaacagaatttcatggtaaaataagtggaagtgctaaattctcaaggaaacattaacctttaacagtggttgcttctaaagttccaaacataaggttataattctgagaggaatagaaggaagaaaaacttttgtccctaaattttccacttttctcctcgttctcttgtccacaccatatggctagacatgaccactttgaaatgaaggtgatgttgtctttcttggattccatttcccacatgttgaactcatttggtgcaactaaatgctgcatgcagagacttaatgaatactttggatgattatgatgacaaggcactaacatggcagactgaattttccctcatgggagaagaatcagatactgtataatggattgaaatgcttaagttcatggccagcttcaaaagtaagctgaaggaaggactacttttcaaatgaagaagctaattatttgtgctygattagatgatgtgggaaatagtgtttctagtt

SEQ ID NO: 711304 - DNA, 1306 bp, Homo sapiens
catactgtgattttcctgaggttaagaattgtgtcatggccggacacagtggctcatgtctgtaatcccagcactctgggaggccaaggcaggaggatcgcttgagtccaggagtttgggaccagcctggacaacctaggaagaccctatctgtacaaaaaaattaaaaattagcccggtatgtggcacacacctgtggtcccagctactctggaagctgaggtgggaagattgcttgggcctggaaggtggaagctgcagtgagccatarttgtgccactgcactccaacctgggaaacagagtgagaccttgtctcaagaaaaaaaaaaaaagtgtcatatttctcctcatgaacccagaacctagcacagtgccaagtacatggtaaggtgttagtgaacatttgtcaaacatataaatgtgacttgaacagccccagacctcattttctctgatttgcctttatcaacagagctacataatagaaacacctggcaagttctggggctcgctcatcaccattgaattgaaagccagatgagtttctataggtggtagcaaaatactaggatccccttctgtcttcctgaccaatgctgcttccataatgccagtgatgctgactagattagggtccccaaggcatatggatttttctctagaaaaaatatcatcctcattctcaacactgtgcccagtgctatgcaaatattcttcccaagatgtatttgttggttactgcgtatgatttagtccactatctcatgccaagagttctctctggaaaccaggcagagccaatatagagttgcctgccgaaagctatattgcatctgacaaaaacaaccagctatggctgaggtttttcgctgggggtgagagtggagtataagcaaaaaaaaaaaaaaaaaattgctagaacctgttaatctctgtgcagccagcatctaagattttcaaattgataactaagtttaatgtaatttggtatatttgctcagtgtgccattttacccttgggttaacttgggaaaatgaggaaagagctaattgctgtattatcacttcaacataaggggtcagtgccccagagcagctgctgttcttattagatggtgtcaccagggggaatactattgcctgtttccttaggttcaatttcttttgttcagtagctgtgtttacaagacacacttgtctggtttgccccgacacaaggtggcatagctgtaactacactttccttctcccaaatcctcaatatcaagtttgcactaaaaagaccactccgctttagaaggtaa

SEQ ID NO: 711305 - DNA, 1306 bp, Homo sapiens
catactgtgattttcctgaggttaagaattgtgtcatggccggacacagtggctcatgtctgtaatcccagcactctgggaggccaaggcaggaggatcgcttgagtccaggagtttgggaccagcctggacaacctaggaagaccctatctgtacaaaaaaattaaaaattagcccggtatgtggcacacacctgtggtcccagctactctggaagctgaggtgggaagattgcttgggcctggaaggtggaagctgcagtgagccatagttgtgccactgcactccaacctgggaaacagagtgagaccttgtctcaagaaaaaaaaaaaaagtgtcatatttctcctcatgaaccyagaacctagcacagtgccaagtacatggtaaggtgttagtgaacatttgtcaaacatataaatgtgacttgaacagccccagacctcattttctctgatttgcctttatcaacagagctacataatagaaacacctggcaagttctggggctcgctcatcaccattgaattgaaagccagatgagtttctataggtggtagcaaaatactaggatccccttctgtcttcctgaccaatgctgcttccataatgccagtgatgctgactagattagggtccccaaggcatatggatttttctctagaaaaaatatcatcctcattctcaacactgtgcccagtgctatgcaaatattcttcccaagatgtatttgttggttactgcgtatgatttagtccactatctcatgccaagagttctctctggaaaccaggcagagccaatatagagttgcctgccgaaagctatattgcatctgacaaaaacaaccagctatggctgaggtttttcgctgggggtgagagtggagtataagcaaaaaaaaaaaaaaaaaattgctagaacctgttaatctctgtgcagccagcatctaagattttcaaattgataactaagtttaatgtaatttggtatatttgctcagtgtgccattttacccttgggttaacttgggaaaatgaggaaagagctaattgctgtattatcacttcaacataaggggtcagtgccccagagcagctgctgttcttattagatggtgtcaccagggggaatactattgcctgtttccttaggttcaatttcttttgttcagtagctgtgtttacaagacacacttgtctggtttgccccgacacaaggtggcatagctgtaactacactttccttctcccaaatcctcaatatcaagtttgcactaaaaagaccactccgctttagaaggtaa

SEQ ID NO: 711306 - DNA, 1306 bp, Homo sapiens
catactgtgattttcctgaggttaagaattgtgtcatggccggacacagtggctcatgtctgtaatcccagcactctgggaggccaaggcaggaggatcgcttgagtccaggagtttgggaccagcctggacaacctaggaagaccctatctgtacaaaaaaattaaaaattagcccggtatgtggcacacacctgtggtcccagctactctggaagctgaggtgggaagattgcttgggcctggaaggtggaagctgcagtgagccatagttgtgccactgcactccaacctgggaaacagagtgagaccttgtctcaagaaaaaaaaaaaaagtgtcatatttctcctcatgaacccagaacctagcacagtgccaagtacatggtaaggtgttagtgaacatttgtcaaacrtataaatgtgacttgaacagccccagacctcattttctctgatttgcctttatcaacagagctacataatagaaacacctggcaagttctggggctcgctcatcaccattgaattgaaagccagatgagtttctataggtggtagcaaaatactaggatccccttctgtcttcctgaccaatgctgcttccataatgccagtgatgctgactagattagggtccccaaggcatatggatttttctctagaaaaaatatcatcctcattctcaacactgtgcccagtgctatgcaaatattcttcccaagatgtatttgttggttactgcgtatgatttagtccactatctcatgccaagagttctctctggaaaccaggcagagccaatatagagttgcctgccgaaagctatattgcatctgacaaaaacaaccagctatggctgaggtttttcgctgggggtgagagtggagtataagcaaaaaaaaaaaaaaaaaattgctagaacctgttaatctctgtgcagccagcatctaagattttcaaattgataactaagtttaatgtaatttggtatatttgctcagtgtgccattttacccttgggttaacttgggaaaatgaggaaagagctaattgctgtattatcacttcaacataaggggtcagtgccccagagcagctgctgttcttattagatggtgtcaccagggggaatactattgcctgtttccttaggttcaatttcttttgttcagtagctgtgtttacaagacacacttgtctggtttgccccgacacaaggtggcatagctgtaactacactttccttctcccaaatcctcaatatcaagtttgcactaaaaagaccactccgctttagaaggtaa

SEQ ID NO: 711307 - DNA, 474 bp, Homo sapiens
ttccctatggattttttaaatgatgtaaatttctttaataatatacacatacatgtggaaaatatataaaataacttttaaagtatatgcttatctttaagtagcatataagtggattttaaaatactttttgctgactttgtatacattttaagttttcaaataattgcctatatttatattctcyaattctactccttccattctcatttaaatgtactccaatcaggcttttgcccacatgaaactttatagaactacttttttatgtggtaaaatatgcataaaataaaacttaccaccttatgtatttttaagcatacagttcaatggcagccatccacaacctcttttctcttgcaaaattgaaactcacccattaaacaataactcccgattctccccctacaaaccctggcaatcactattctactttctgtctctatgaatttgactgctccaggtacttaatgt

SEQ ID NO: 711308 - DNA, 474 bp, Homo sapiens
ttccctatggattttttaaatgatgtaaatttctttaataatatacacatacatgtggaaaatatataaaataacttttaaagtatatgcttatctttaagtagcatataagtggattttaaaatactttttgctgactttgtatacattttaagttttcaaataattgcctatatttatattctccaattctactccttccattctcatttaaatgtactccaatcaggcttttgcccacatgaaactttatagaactacttttttatgtggtaaaatatgcataaaataaaayttaccaccttatgtatttttaagcatacagttcaatggcagccatccacaacctcttttctcttgcaaaattgaaactcacccattaaacaataactcccgattctccccctacaaaccctggcaatcactattctactttctgtctctatgaatttgactgctccaggtacttaatgt

SEQ ID NO: 711309 - DNA, 597 bp, Homo sapiens
tggatatgccacattttgtttatccattcatcagtttgtggatatttgggttattctcactttttggctattatgaatgaatgctgctatgaacattcacgtacaaacttttgcatgtacatacatttttctttcttttggatatctggtagggactatttttctccttgttttacaaataaggacattgaggcacagaaagtttaagttatttgcctgggtcacacagcarataagtaacagagtcataattagaactcaggtagtctgcctccaaagtctgtgctgttcatcagtacctctcctgaacgcttccttatagcagctactgtgccaggagccagagagactggggagagcaaagcagacatgtccctgtccttgtgaaacttacagggagaccatggcgcaataatcgaagacacgggaaataactaccatgacagctgcgttaaggattacagtcgagagttgcaaggttctggcaggtagaccaatgggctatgggacttgtcatcatcagagtggccagggaaggaaagcttccctggagaggaggtgcttgctctaagatctgtaggacatgtaagtgctaac

SEQ ID NO: 711310 - DNA, 597 bp, Homo sapiens
tggatatgccacattttgtttatccattcatcagtttgtggatatttgggttattctcactttttggctattatgaatgaatgctgctatgaacattcacgtacaaacttttgcatgtacatacatttttctttcttttggatatctggtagggactatttttctccttgttttacaaataaggacattgaggcacagaaagtttaagttatttgcctgggtcacacagcaaataagtaacagagtcataattagaactcaggtagtctgcctccaaagtctgtgctgttcatcagtacctctcctgaacgcttccttatagcagctactgtgccaggagccagagagactggggagagcaaagcagacatgtccctgtccttgtgaaacttacagggagaccatggygcaataatcgaagacacgggaaataactaccatgacagctgcgttaaggattacagtcgagagttgcaaggttctggcaggtagaccaatgggctatgggacttgtcatcatcagagtggccagggaaggaaagcttccctggagaggaggtgcttgctctaagatctgtaggacatgtaagtgctaac

SEQ ID NO: 711311 - DNA, 1771 bp, Homo sapiens
ttctggacactcaggttccctgacactcaccgagctctccttgcccatcctcattcattctctgaacacacctcctgacatctccttattgtatacaataagtcatccctccaggaccactgtatgaagccttttctaaactaagctgtgcattgcctaccaaaggtgtcctatcagggccccagggagacatgacactgtttccccaggtcacccacccagatagacagggccttcctgagacctgttccggatgctgcagctgacatgtctggaaaaccacaagccagcatggcccaccacatgcaagggtcccaagtctgtggattcccaagtgtttgcacactcagattcccaagtgaacacatcacagtgagcaggctgctctagccagaagctcgccttgtctgcaactcgactgctatttctttggtttttaggaccacagaggcctacagtaactgattacaaaggagctctgcacaacagtggaaaagaaacagttttcgcctctgaaaagtatgacttgctttatgggtttttctcccatcatttctttttaaagaagaaaataaatagaatgttattccctgaagggaagccctacctgcaagtcaacatgaaacaccgaagtgttctgagctgaaggcggctggaataaagtcagcagtgaaacaaataagcaattaaaacagctattttgggaagccctagaaagaggcagatacaatatgaattattcattcataytgcgaggatgacttctgggcattgtcctctttgcctttgctcttctcttgttcattcagcctctcaagcacagaaagggaacacaataccctggcatgcacgcacgtgcatgcgtgcgcgcgcgcacacacacacacacacacacacacacacacacacacacacacacagaaggcaggttgccactccagatggtgaaccacacggaaaagaaacccacaggttggcagacgctttgagctccagtgctggggagaatgtatgaatttccagttggcccaaaaagtgtgtgtgtgtgtgtgtgtgtgtgtgtgtaagagagaaagaggaagaaaaagacagtatcttaatatcttattaacagttgtaacctcagcatcttatgagtgggcaccaaatgaatgttcactgaatgaataaatgaactcacaaaagaacaaagaaagaaagatctcattggaattcccagcagggttcacagctaggccctctactttccaaattttgcttgtcccaacaaagagaaacttgtgattgaagaaacatttaaggtcctcaaggtgcttttggattcttgaccttatttgatactcaaataaccgtcacaacagtggcatcatgaccatcatgattatttccctgttttacagatgacactcagagacttcccacaactgacagggctcccagggccctaggtagggccaggattattggatatgagccacctgagccttggcccactgctccatctcctccaccaggaaccgtctccatgggcttcccttattcccagctggtaactggagaagcgcgacaagagccaattcccttcccctgggaatgcataacccactgggtagcaaacaaggcctctgtctcctactcctgtttcattttaattagtataatcatcatcatgaagaagccagctctctctggcatgtgcattctgcagcccttggatagctctactcgaaagtcctgggggaagaaggtgacactaaggtagaaaggatcc

SEQ ID NO: 711312 - DNA, 979 bp, Homo sapiens
tgagggccagagggaatatcccctggctttgaggcagttgttttggatcctcgccctggttctgcaggggatgaaatcaccattatctccttggccttgagttctccactcgcaaattacaacttgtctcaattggtggttgggggacaggctgggataatgggagaggctgcgtttgggaggtaacggcacttagataaatgagagaaatgatggctattcatccactgagtggtccccaaggggcaggactgagtgaacgctgttctcaattacccagcagctcctccttgcctctctatagttacacaatctggacaattattcagagcagctgagacctttcagactttgatagtgctgagcgccggttctgtagcaggggttatctgaacgcctcccatctgattgtagcagaggtctcagctgcacccagatggaaactgaccacccctcggtcatcgcagaaagacccaagcacaaattatgttctgaaaactcaatctgtatatgcttggccataaagcgccgaggttttatgtggggcataaaaatgttctttaatgggacagaaactgcaaaccacagttttatgacrtcccataaaagctgaaagggttatgatcttataggcagtgcagatggtaggttgctgctagatttctctgtgctgttgttaatcaaggagtgactcaaaggtattctactgaacagataatgataccacaattaaggcaataatcgaagttgggaagaaatatgtgctgtgccagacaggcgacagcactgacattcgctttcctgggaagtctcaatgtgtcctgcaccttttatacccagctccaatgttttcctgcgctgacatgcccctggctcccatgaggttctgtttgcaaaagggaatgatgacaatcatttggattcttggcaggaacctctgcttacctgtccattctcacttgcttgactctctgacaat

SEQ ID NO: 711313 - DNA, 641 bp, Homo sapiens
ttataatcttatgagaccaacatcatatatgtagtccgtcgtggctgaaacatcattatgtgatgcatgactgtatttgattttctttaaatagtattctggatctttagaggggtcttgaccatgagtccatgcagagagaggagcctgagctttatctcccasaaccttagtttccttatctgcaaaatgggaataatgggaataattatatcatgggaaatggttgtgagtaattgtttgagataatgatagtaaagcagccagcactgctcatggtagcaatgatgtacaggttgagtgttccttattcaaaatacttgggaccagaactgttgctaatttcagattttttcagattttggaatatttgtgtatacataatgagatctcttggggatggtagccaagtctaaacatgatttttttatgttttacatgcaccttatactcattgcctgaaggtaattttatacaatatttttcattgttttgtgcataaaataaagttttgactatattttgactgaggtctgtcacatgaggtcaggtgtggaattttccacttgtggcatcatattggtgctcaaaaatgttcagattttagagcattttggatcttgaatttcagattagggata

SEQ ID NO: 711314 - DNA, 641 bp, Homo sapiens
ttataatcttatgagaccaacatcatatatgtagtccgtcgtggctgaaacatcattatgtgatgcatgactgtatttgattttctttaaatagtattctggatctttagaggggtcttgaccatgagtccatgcagagagaggagcctgagctttatctcccagaaccttagtttccttatctgcaaaatgggaataatgggaataattatatcatgggaaatggttgtgagtaattgtttgagataatgatagtaaagcagccagcactgctcatggtagcaatgatgtacaggttgagtgttccttattcaaaatacttgggaccagaactgttgctaatttcagattttttcagattttggaatatttgtgtatacataatgagatctcttggggatggtagccargtctaaacatgatttttttatgttttacatgcaccttatactcattgcctgaaggtaattttatacaatatttttcattgttttgtgcataaaataaagttttgactatattttgactgaggtctgtcacatgaggtcaggtgtggaattttccacttgtggcatcatattggtgctcaaaaatgttcagattttagagcattttggatcttgaatttcagattagggata

SEQ ID NO: 711315 - DNA, 853 bp, Homo sapiens
aaaacagaagttttctggctataaaaataacattttaaaaaaattatctgcgtcccgatgagagacaaaggaatcagttattttttccttttatagttccctaaatcccctggaatcatactctcagctcccattgtatttttgtgatagttctttttaaacatctacctcaactcctctactccagattcacttctttaatgctgtctgaatggctcaagattaattttctatactttctctttgaacaaattcttagaaatcaaaatgtcaatgatcctgaacaaaattactctccaaacactggcttgtgccaggaatcatgacaattgctttctagaaacttagtttctgttactttcaaaatagtctgatatttakgggaggacctgcaggtctcagtttaaaagaagttaacatattagtttgaatgagaaattgggagacctcagatatatgaataacagatgagagatacttttcacatagtaataaacatttcactaaagtgataatcacagaaaataagcaatcacaaagttcttagagaaacagagaggtttcactgttaaatttttttaattgttaagatttattttgagttggttttgggatcatttaaaatcataaaatatgcaagtcctatgctagtccagctgcttaatttcctaggattatttatgactcacttttgttcaataagtaaaattaccgtccctgctaaatttgagttaccagacacttccaaaatatttctgaaatcaacaactgttttctaatttgctacttggcctatcttcaaaaatgtatttaacacttgtagtaatgtctcagagatttgatcaaaggtgtt

SEQ ID NO: 711316 - DNA, 1003 bp, Homo sapiens
gacagagtctcgctcttcaggctggagtacagtggcaagatcttggctgactgcagctttgacctcccaggttcaagtagttctcctgcctcagccatctgagtagctgggattacaggcgtgtgccaccaagcctggctaattttttttttttttttatcgttttagtagagacagggtctcaccatgttggcgaggctggtctcaaactcctgacctcaagtgatctgcccattcggcctcccaaagggctggcattacaggtgtgagccattgtgcctggcctaactaattattttttgagaagaactcattgatagcacaaaagtacttggagaaactacttaagctaactactattaagctgtcttctttcacaaatattaataaaagtactgatagaaatgtaactaagatacataatgtgttttaatacacattaatcttttgaattacacattttctcttgaggattataataaaatgatggtacaatttatccttctttatagatttgtggaaagtaccaacataattgacaagaaatgaaatactgccatttaaaagtcctgtattaaaataaaactactttgaatcatcttagactaaatattttaaaaactgattcaagtgcttattcrtaagataatggaattttaaataagaaaagccaaattaaaaattatattttaggcaaaaaccattttaacacagataatactgtgatatttattttcctgaagaaaaccacttatgctagttacattaatactcttcatagaacttaagataaattttaattatgaatgctcatgaagtatttaaagacactaggatcaatgccaacaaagtagttaagtgctgaaaaattcttatgataatataggcatgtgtgaatctttgagagcccttacaaatgtttttatattcagtataaaaataataaaaaaatcaccttcttatcccattcctaatttcccttttaagaattatctcttaacag

SEQ ID NO: 711317 - DNA, 629 bp, Homo sapiens
tccaaaaacctcatctagctgaatcggaagtaaagagcctawtttttcatgtgtatcatcaattaataaatcaatgaaaaagcggaaaggcagatggatatgtggatacatggagaaagagaaagagatgacagaaccatgaatgctgctgtattatttggattaccagaatctctatgaaatatttcctggcaaaacgttgcaagactacatcttaaatttcaaaacaaatgcaccctgctgcagcctattaattcactgtaaccctctcagtggttcatctagatgactgctcagcttctctggtttctgcaaaaatctttcatttggaacaaaacctaattgatctgaactacttagcttttttgctgatctgctatgatcaaataatttacacctaaaaggcaagaaaatggatattctcactcacactgttaaagtaggattagtttcattaacaagtaaggtcaagctcagaatggctcagcttaatggacatttattttccattacctttagcaatttggctgggtcagtgaaagggtgtggttgttcatgaacccaaaaaggtggagattgtcatttctacatttgtctctcatggtcacatctttaatgattttgtttta

SEQ ID NO: 711318 - DNA, 920 bp, Homo sapiens
ctccacatgctaacaacagaatcaactttctaaaagattgtatctattatgcttgtttcagtttcaataaattacagtgtttctgcagcaccaacagctttcattttaaactgctatgctcttctgtgcaataaaggattaatctcacacagagagtggtctggcctttgtcctcagctcctaggaggtgatctctaggtcactacaatgtcctgcctgggatgagtgtctctttgcttggaagcttcgctataggacagtctaaaaacgtgatttatgatgggggctttgggacacaccaaatcagctccaacctccagaggaactggagattaagtattggctcaaacttccaggaagggcttggcaaaacaaaggtcagtccatgtagcagtatgtgatatagctagaagaaaagtggacgcccagtggcttgggtgggggtycccaaagggtcatggtcagaagaggtaactgcccatagctccatggcgagatgactggaagcccttcctcctaagtatgcatcctcctaactgccctattcagcatcgtcttcagctggttctaatttgtatcatttttctgtaataaacctgactgtgcatatatttgagcaacagggatttctattgcgagtccatttacatgagggtttttttcaacaaatgctcggcccctcctatccaacaggttctgcatccataacccagtgcagatgaagaatacagtattcccaggataagaaacccacagatacagagggctgactttttgtatgtgcaagttctgcgggagcactgtggggacttgagtatgagtggattttggtgtcttcaggcatcctggaaccaatgccccatggatactgagggtcaactgtaatagcttctggtgagttctgtgagtctttctaacaa

SEQ ID NO: 711319 - DNA, 645 bp, Homo sapiens
ttcattattttacaaataatgtggctgaaaacaagaatggattcttttaaaaatatttgaaggtgttagttatcaaccctcagcctcagaagactgggtaacacaatgcctttttgaaaatgaaataaaggcacaactggaaaagtaaraaagatgtttcctgtgtcatgtactcgtgtacatgaagatcagatttaacaaactcatgcactagaagagagaagaggcacggcgaaacaagcaggtacaacaaaggttgtagcaaacatttcaactccgtgttttccccatgtctacacactgacttgcaaagtttcagaaggtgaaaaagaaccctaaccctactctaagaatacacacctgcacttgttcatcctatagctgtttgaagtagtagactgatataattctagtgtgttgttgttgttgttgttgtttttagagaaagggtctcactctcttgcccaggctggagtgcagtgacgtgatgtgatctcaactcactgcagcctcgacctccctgggtgcaagtgaccctcccacctcagcctcccaagtggctgggactccaggcacatgccaccttgcctagctattttcttaatttttattttttgtagagacggggttttgccatattgccca

SEQ ID NO: 711320 - DNA, 1032 bp, Homo sapiens
ttttttccttaaataagttaatttctccttagtacatttggttccaagcagagatgaatttcttttcaacatttcttggttctagtcactgaatttaaggtaaaaatagcaaatgcaattcagatggccatgccttcagtcaccaaaatgatttatggagtcagtttcatatctctgcaatatatctatatmtatatatatatatatgtgtgtgtgtgtgtgtgtgtgtgtgtgcgtgcacgtgcatgtgtttgtgtattctctgttatatatattatctccaaaatgctttatgcagtcagtttcatatctctgcaatatgtgtgtgtgtattctctactttatatatatataaaatacatatagcaatatataaataatataatatatataactgatatataagttcttgaacagttaaacttctaatctggatggaattgctcatctcatgacaagtgaattctgatcctgtttggcagctagataaatgaatgaacttaggcaagtcattttattcaaaattaagacaaattagttagaggagagagtttttaagtttcctttccactctaaaatgaatatatcttatgatggtggtaatttttgtaatataataaataatatttccccagtgaatttgcccatcccaagcccactgcctttcactatggtatgacatttctcaactggatctaccaaaagatagaccatcataacttagggtttaagaaaataaaaccaaaatataattatcttagagcaatttaatgtataatgatcttaaattaaagaacaaacttcttgtgttaattcatttttttaaaaaatgcagtacaagtatttagttatcaattacagtttgatttctgatcttttcctaacacctgggcagactgcagaagatagctctgttctcttgaactaaaacaaagtatggctttttaaataaagttatatgagtctgattttagaggtgttagtaaataaagcaaaatatctggaggcaaaacctaaagttcatatggagca

SEQ ID NO: 711321 - DNA, 645 bp, Homo sapiens
ctctggtatccttcccattggagaaaagaaaaacagaaaaaagaaactgttttaattatttcatgtcccactctcaacccacctaggtccatcatgttcaaggtcaccacacacacaggagcagttatgttccactcacacagagctgtttgcatcctgtctgggcttgagattagggaggagggttatataaatgatgagatagggaggagggcttgagatagggaggagggttatataaatgatgaacattttcatttgaggtacagaaaggaacacacacacacacactcacatgcacatgcacacacacacacatgcacacacacacgcacatgcacacacacatgcacacgcacatgcacatgcacccatacagacctggaagtgctgtgttaccttcaattctcaagcatgcataaggagagaaggggaaggggtgagctgctgtccatttcattaggactaaatgaagasgtgagggcagtgtccatctccccagccttcatcaggaagggaaaagtctgggtgaaggtaatagctctgaccaagagactgagggatatagatttctccccacccttctaaactcagagcctagctaccacaggcttcaaatctcaaattagtgatgtgtgaagtttc

SEQ ID NO: 711322 - DNA, 645 bp, Homo sapiens
ctctggtatccttcccattggagaaaagaaaaacagaaaaaagaaactgttttaattatttcatgtcccactctcaacccacctaggtccatcatgttcaaggtcaccacacacacaggagcagttatgttccactcacacagagctgtttgcatcctgtctgggcttgagattagggaggagggttatataaatgatgagatagggaggagggcttgagatagggaggagggttatataaatgatgaacattttcatttgaggtacagaaaggaacacacacacacacactcacatgcacatgcacacacacacacatgcacacacacacgcacatgcacacacacatgcacacgcacatgcacatgcacccatacagacctggaagtgctgtgttaccttcaattctcaagcatgcataaggagagaaggggaaggggtgagctgctgtccatttcattaggactaaatgaagacgtgagggcagtgtccatctccccagccttcatcaggaagggaaaagtctgggtgaaggtaatagctctgaccaagagactgagggatatagatttctccccacccttctaaactcagagcctagctaccacaggcttcaaatctcaaattagtgwtgtgtgaagtttc

SEQ ID NO: 711323 - DNA, 629 bp, Homo sapiens
gaaattgttccatagctcttgctgtaatttttatttttgttccattgttctcctaaaatctttagaaattaattttagtagtctacataatgacattctaacgttattctcaaataaatcactgcccattacccacagtaagaatgaatcacctaagatcactacacagggcatgaaattcttgggggctcttctaattatattttgtagatctcggcaactgctgttatagtaggtgatagytgttcttgatttttcatttcagaaaatactacatttgttaactctttcattagatttttacatataggattaccatgtaatttatcatacaaattatatagttttttaaaagtaaactgaaggtggcactattgataattatgacagaaaaataggtataggctgggacttaaactgtgatacatgtttgccctatatatgaagattttacttctaaaaaaccctctacttagcttgatttatccatactgaatacaaccaaaatgttctcccactatggagtgaataaatatttatatcatgatatactacagtggcatatttgtattaggttggtacaaaagtaagcacgatttttgccatttaaaataatgacaaaaaccatg

SEQ ID NO: 711324 - DNA, 629 bp, Homo sapiens
gaaattgttccatagctcttgctgtaatttttatttttgttccattgttctcctaaaatctttagaaattaattttagtagtctacataatgacattctaacgttattctcaaataaatcactgcccattacccacagtaagaatgaatcacctaagatcactacacagggcatgaaattcttgggggctcttctaattatattttgtagatctcggcaactgctgttatagtaggtgatagttgttcttgatttttcatttcagaaaatactacatttgttaactctttcattagatttttacatataggattaccatgtaatttatcatacaaattatatagttttttaaaagtaaactgaaggtggcactattgataattatgacagaaaaataggtataggctgggacttaaactgtgatacatgkttgccctatatatgaagattttacttctaaaaaaccctctacttagcttgatttatccatactgaatacaaccaaaatgttctcccactatggagtgaataaatatttatatcatgatatactacagtggcatatttgtattaggttggtacaaaagtaagcacgatttttgccatttaaaataatgacaaaaaccatg

SEQ ID NO: 711325 - DNA, 508 bp, Homo sapiens
aatgactctcaytttcaaatttactctttgaaactctgctcattgatactggtgctgataccgataatcttaaagctgtacatcccagagtcccttgccaatgactttctcttagattctgccagatagagtcatgagagagaaaaaagatgcagataatagatcttttatgtaccctgcctcacacgcccttgactcactttttatttcagctacactgtgatggatagagcccagcatgctgacagtgttccatgagagggcttgccattgtcgtttagcttttgtgcttcagggctctctctcaagccacaggatacacttagcctatattcaactgcagcacagaaattaaagcgagttaacactcctagagaaaatcctcaaccaatgtaattggctaactaccccaactttctggccttcagatgtacattctgagaggaattctgaattcttctcataagacaaatcaagccctttttgcttacagtcaatagccttcatg

SEQ ID NO: 711326 - DNA, 508 bp, Homo sapiens
aatgactctcattttcaaatttactctttgaaactctgctcattgatactggtgctgataccgataatcttaaagctgtacatcccagagtcccttgccaatgactktctcttagattctgccagatagagtcatgagagagaaaaaagatgcagataatagatcttttatgtaccctgcctcacacgcccttgactcactttttatttcagctacactgtgatggatagagcccagcatgctgacagtgttccatgagagggcttgccattgtcgtttagcttttgtgcttcagggctctctctcaagccacaggatacacttagcctatattcaactgcagcacagaaattaaagcgagttaacactcctagagaaaatcctcaaccaatgtaattggctaactaccccaactttctggccttcagatgtacattctgagaggaattctgaattcttctcataagacaaatcaagccctttttgcttacagtcaatagccttcatg

SEQ ID NO: 711327 - DNA, 522 bp, Homo sapiens
tcactcccttctccttattacatcatcatcaccataatcatcctgatcgctcatctgcacgcgtgactcacacgcagtgttccatgcactgcactaggcacctccgctgcaccctcccttccttccttctttcttttcttttcgacggagtcttgctctgtcacccaggctggagtgcagtggcgccatctcggctcactgcaacctccgcctcccgggttcaagtgattctcctccctcagcctcctgagtaactgggactacagacgcmcaccaccatgcctagttaatttttgtatttttagtagagacggggtttccccatgttgacctcaggtgatctgcccgcctcggcctcccaaagtgctgggattacaggcgtgagccacccactcccggcctcactgaactatctcatgcattccaataacagtcctctgagctaagtcttattatttttatttttgtttacagatgggctggaattgctcatggcaacactgggattcagagcagcaccaa

SEQ ID NO: 711328 - DNA, 605 bp, Homo sapiens
gaacctcatgtgaggccaccactaagaactcatgggcctatggagcacccaccacattggtgtttgtgcactttctggcctctgaggctggtgtcttcagtacctcaccagaatctaggtaaagcagcatcatgttgtctagctgcaaggcctgggtaaggtatagtagtaaaattttcatattgtgtcttgtattcttgggctatggaaatgtgaaaatagggattgggtacgaagctacttaagcagctctggtgaggggtggaaaaatagcaggaaggaacttcctcttatttcctgctgcagcccttctagtatacttagagatttggtgctttctagaaagacattttaawgctgatctgagagggtagatgagggaagcatagtgggcctatttttcagcacccatgagtccattaaccttggtcagtaggtagctgtggcaattttggtttctttgctttgaagaaaggttaactaagccctgagtgtagggcaggataggccctaggaaaaggggtaggttctactccttgaagctttggcctttcatattaggtttcaagcctctatgctattcattgttgggtatgaatactgag

SEQ ID NO: 711329 - DNA, 605 bp, Homo sapiens
gaacctcatgtgaggccaccactaagaactcatgggcctatggagcacccaccacattggtgtttgtgcactttctggcctctgaggctggtgtcttcagtacctcaccagaatctaggtaaagcagcatcatgttgtctagctgcaaggcctgggtaaggtatagtagtaaaattttcatattgtgtcttgtattcttgggctatggaaatgtgaaaatagggattgggtacgaagctacttaagcagctctggtgaggggtggaaaaatagcaggaaggaacttcctcttatttcctgctgcagcccttctagtatacttagagatttggtgctttctagaaagacattttaatgctgatctgagagggtaratgagggaagcatagtgggcctatttttcagcacccatgagtccattaaccttggtcagtaggtagctgtggcaattttggtttctttgctttgaagaaaggttaactaagccctgagtgtagggcaggataggccctaggaaaaggggtaggttctactccttgaagctttggcctttcatattaggtttcaagcctctatgctattcattgttgggtatgaatactgag

SEQ ID NO: 711330 - DNA, 630 bp, Homo sapiens
ctagatgtctgttttgccaatatctgtgatctagatggcttatccagtagggcgagccagtgactcatgaggggtctctagcacctgtgtgccttgcccctgccaggccatggtcgctgtagtaactgtactgttgaaccacgactggtggcagcaacatgtaagactatatacattcctctttctgtagcagaaacctatttcctcatgagcacttgggatcatttgccactgcctgtagagtaacgcctgtccttgcctacgtgtccactgstataaaatgcccgagtgtccactagtagctacaggtgttctggaaacccattcagtgtctcctagaggaagtattcctctcttggggtaggcaagactgggtggggagggagactgttctcactactggagttgaagctatagaacagagcagtcgatgtccaggtgggactccagttgcaatggtgacaggagccacattacactgccctttggtactggatgcatttttctctggggaaaaaagttctttccaacttacagtataaccaacaaacatgcctttaattggatgtgtgaaaggtttgatatgaaaccagctgaattaaatacccaaagagtttgaggcacagagaa

SEQ ID NO: 711331 - DNA, 630 bp, Homo sapiens
ctagatgtctgttttgccaatatctgtgatctagatggcttatccagtagggcgagccagtgactcatgaggggtctctagcacctgtgtgccttgcccctgccaggccatggtcgctgtagtaactgtactgttgaaccacgactggtggcagcaacatgtaagactatatacattcctctttctgtagcagaaacctatttcctcatgagcacttgggatcatttgccactgcctgtagagtaacgcctgtccttgcctacgtgtccactgctataaaatgcccgastgtccactagtagctacaggtgttctggaaacccattcagtgtctcctagaggaagtattcctctcttggggtaggcaagactgggtggggagggagactgttctcactactggagttgaagctatagaacagagcagtcgatgtccaggtgggactccagttgcaatggtgacaggagccacattacactgccctttggtactggatgcatttttctctggggaaaaaagttctttccaacttacagtataaccaacaaacatgcctttaattggatgtgtgaaaggtttgatatgaaaccagctgaattaaatacccaaagagtttgaggcacagagaa

SEQ ID NO: 711332 - DNA, 630 bp, Homo sapiens
ctagatgtctgttttgccaatatctgtgatctagatggcttatccagtagggcgagccagtgactcatgaggggtctctagcacctgtgtgccttgcccctgccaggccatggtcgctgtagtaactgtactgttgaaccacgactggtggcagcaacatgtaagactatatacattcctctttctgtagcagaaacctatttcctcatgagcacttgggatcatttgccactgcctgtagagtaacgcctgtccttgcctacgtgtccactgctataaaatgcccgagtgtccactagtagctacaggtgttctggaaacccattcagtgtctcctagaggaagtattcctctcttggggtaggcaagactgggtggggagggagactgttctcactactggagttgaagctatagaacagagcastcgatgtccaggtgggactccagttgcaatggtgacaggagccacattacactgccctttggtactggatgcatttttctctggggaaaaaagttctttccaacttacagtataaccaacaaacatgcctttaattggatgtgtgaaaggtttgatatgaaaccagctgaattaaatacccaaagagtttgaggcacagagaa

SEQ ID NO: 711333 - DNA, 882 bp, Homo sapiens
cattctgtggagaacaagcagtgattgagagtcctaaggagacttctggggcatgcaggcctggatgggaggcagttttgggaaggagaatgggttaagctgaaaggaaaatgaatctcaaagctggggatccaaagtagaagttgtttaggatagaggacctctagtggaacagaggtgatatggttaggcttagtgtcctcacccaaatctcatcttgaattgtaatctccataatccccatgtgtaaaaggagagagcaggtggaggtaattaaattatgggggtggcttcccccattctgttcttgtggtagttctcacaagatctgatgcttttatacggggctcttcccacttcatctgtacttcaccttcctgccagcttgtgaagaagttgccttgcttcccctttgccttctgccatgattgcacgtttcctgaggtctcccagccatgctgaactgagtcaatgaaacatctttcctttatagatcacccagtctcacgtagttctttatagcagtatgaaaacagactaatacagragctgaagtctaaagcagagcaaatatgcagagaagccagagccagcttttctatgtcaatggccagcaccttggagtgtggactgggggtcatagtagctggaggatggtatgtttttcaaggtaacatttgcagaaccaaacacttgctcacattttctcttatgtgtagaaaaaaaggaatcagaaggaagaaaatgtatggctatattttctatgctttcactttctagtgtgccttattgtatacaaactttctttcaaacaggagccttgccaggcctcttgggattgttttaacttctctcaatgcaggaaagacatgtgacacatca

SEQ ID NO: 711334 - DNA, 882 bp, Homo sapiens
cattctgtggagaacaagcagtgattgagagtcctaaggagacttctggggcatgcaggcctggatgggaggcagttttgggaaggagaatgggttaagctgaaaggaaaatgaatctcaaagctggggatccaaagtagaagttgtttaggatagaggacctctagtggaacagaggtgatatggttaggcttagtgtcctcacccaaatctcatcttgaattgtaatctccataatccccatgtgtaaaaggagagagcaggtggaggtaattaaattatgggggtggcttcccccattctgttcttgtggtagttctcacaagatctgatgcttttatacggggctcttcccacttcatctgtacttcaccttcctgccagcttgtgaagaagttgccttgcttcccctttgccttctgccatgattgcacgtttcctgaggtctcccagccatgctgaactgagtcaatgaaacatctttcctttatagatcacccagtctcacgtagttctttatagcagtatgaaaacagactaatacaggagctgaagtctaaagcagagcaaatatgcagagaagccagagccagcttttctatgtcaatggccagcaccttggagtgtggaytgggggtcatagtagctggaggatggtatgtttttcaaggtaacatttgcagaaccaaacacttgctcacattttctcttatgtgtagaaaaaaaggaatcagaaggaagaaaatgtatggctatattttctatgctttcactttctagtgtgccttattgtatacaaactttctttcaaacaggagccttgccaggcctcttgggattgttttaacttctctcaatgcaggaaagacatgtgacacatca

SEQ ID NO: 711335 - DNA, 882 bp, Homo sapiens
cattctgtggagaacaagcagtgattgagagtcctaaggagacttctggggcatgcaggcctggatgggaggcagttttgggaaggagaatgggttaagctgaaaggaaaatgaatctcaaagctggggatccaaagtagaagttgtttaggatagaggacctctagtggaacagaggtgatatggttaggcttagtgtcctcacccaaatctcatcttgaattgtaatctccataatccccatgtgtaaaaggagagagcaggtggaggtaattaaattatgggggtggcttcccccattctgttcttgtggtagttctcacaagatctgatgcttttatacggggctcttcccacttcatctgtacttcaccttcctgccagcttgtgaagaagttgccttgcttcccctttgccttctgccatgattgcacgtttcctgaggtctcccagccatgctgaactgagtcaatgaaacatctttcctttatagatcacccagtctcacgtagttctttatagcagtatgaaaacagactaatacaggagctgaagtctaaagcagagcaaatatgcagagaagccagagccagcttttctatgtcaatggccagcaccttggagtgtggactgggggtcatagtagctggaggatggtatgtttttcaaggtaacatttgcagaaccaaacacttgctcacattttctcttatgtgtagaaaaaaaggaatcagaaggaagaaaatgtatggctatattttctatgctttcactttctagtgtgccttattgtatacaamctttctttcaaacaggagccttgccaggcctcttgggattgttttaacttctctcaatgcaggaaagacatgtgacacatca

SEQ ID NO: 711336 - DNA, 595 bp, Homo sapiens
gtacatgggtatctttgtttttcttagctgttagagaattcagagacagatccttgggtatttacatctgctcatttatggtgcctgaaaggtgctatttctggttcttgtagcagatgaactcatttcaggccattgataatattaatatgtcttgtttttcagcctgccattcatctcacatcttttgggaagtgagtaggctcaaatctcatatactcaagatgaaatggaataaaaaggaaaattattgattagaaagaaacatgaggttctaagataggttttcaaggtggattggaggatttctatcacttaaaatgaccaataatggagggccagccatttgactcaatattcttggccatcattagtcacctgtacttgtgtgstaatattcgggtctctatattgttgtcccctcctcccacaatccatggttttactttccatggtttgttacttgcagttaattgtggtccaaaaatattaaatggaaaatccacagataaataattcataagttttaaattgtgttctgttctgagtcatgtgatgaaatcctactctctttgcctaggatgtgaatcatccc

SEQ ID NO: 711337 - DNA, 1566 bp, Homo sapiens
agtgatccacccaccttagcctcccaaagtgctgagattacaggcgcaagccactgcacccggcccatttgaacagtattattacttggaggagaacagtggagaaggggtatatataggaggtatttgatatacacagaagagtgatcactggagcattgtttattacagaaaaaactgagaaaaaaacccaaaaagatccatcaataagaaatggattaaactgtgatacatccatacagtggaatgctcttcagtgattaaaaaggatgatatatatctacattcattggcctgaaagaagtacacaatttattgttgagtaaaaacgacaggctgtgaaacagcatttgttgtttagccccatttatcaaaatgataccctgaaaatatcattcatgtatatacatgtagggagacccttgaaattatgttcatcaaaacatggatgacagttttcgttaggtgatacgatgtggtagcaggttgtttatttgtttgtttggggatggggggggtgatttctctttagatcttttctggatagcatgaattttcttccataagcttgtaatatcttaaacataagacaatgcaaattttcaaaaagaagtcgaacagttattgagttcttgcaaggcaaacagccccgrgtctagagtgtgaatagttgttaatctgcattagctgacctctctaaatcagtaatttggcctttgagcctctctccaaagagggtaagggaattttagtctggcataaggacgaaggaacttaagggatcatgctcagacagtctggtaattttctgccctcttccagggtcttcctgagagctatcaacaagtttgcagaaaccatgaaccagaagttcctagaacacacgaactttgagttccaggtgagtataagccaccagagctacccttggagctgcccagggcgtctctgacattctgggctgattgctccatcagacacatcccaaaggccacagaagctgtcccagtctctccagggattcccacggggggttatggctggggagaaaattctcaggctttcaaccagggccttgattaaatagtcatcaactgatcatcatatgcaaatgtgacggtataatggcctcttatattaacaaggagatttgcattcattcattgtcagagtctgtaccaccttttaaaaatgtatcaccttttttttacttttctattctctggaaccaaaagggcagccagtcattgacaatgaaaaatgatttacaatcaaattctccagtacaactttgtggtttcctgattcctttgaaagtcatttttagtgctcagccaataactgggacctctaagagattcagggtcctaaaagtatgtgcctggggcaaacagaatgacacacctgccccaggtccaggcccaagaagcacaaactctgtgggaaagtccagattgcttcctctgcctggagatgtgcgagggaaggccccccacaaaaggatcccctccaggggaagtctccgatccctagcatctatctcttccagtgggggcttagggggta

SEQ ID NO: 711338 - DNA, 569 bp, Homo sapiens
tcagctcactgcaaactctgcctcccgggttcaagcgattctcctgcctcagcctctcaagtagctgggattacaggtgtgcaccaccwtacccaactaatttttgtatttttagtagagacgaggtttcaccatgttggccaggctggtcttgaactcctgacctcgtgatctgcccgcctcggcctctcaaagtgctaggattataggcatgagccaccgcgcccggcaacagagtgagactcttgtctcaaaaaacacacacacaaaaatctgttgtttaagctactctctcaagaaaaaaagacagaaagaaagaaaagaaaaacataatgacgttcagaaacaggaagaaatggtttccttcatcttgctaaagtgaaaagctacttgtcacaaagctcaatgccattttaccagcttctccaggatcatcctcacgtaacataacagcactgatagttacatcttctgttatactgtggggctctgtgtttgtgaacagcccggaacgctgtgatgaaaatgcagctgcccagttactgtcatccagattagtaaccttaaaa

SEQ ID NO: 711339 - DNA, 1189 bp, Homo sapiens
acccccacccccacgatgctacccgtcgtattttcttcacactcacttatcacaccccgaaatgacattttcatttgctcacttggcaattgcctctcttgctagcatgcaaattttgtgaagatgaggacttygtcctatttgcagtcatacagcctgcactagaacaatgtctggcacatagtatgtgctcaatacatactttaatcaatgaaatgacttcattaattcattttccttctgctctttgataagattgctttcatcttcagaggaaaaatgtgaaacctgcctctcttcctcttgagtccttgcttggccaaacccttttctcctactccaggggagaatttgattaagtgctttttgttttttgaagggcaggagagaccacagtgagcatgccattgagcttcacttatcactgctttgctcttgaaagtagatccctgaatgcagattctgaccaaacccaacatcctattggacagcattagggcctggcttctgagcctcgccccagctgttccctctgctggaatgcccttccctcactgtgtgtataaagacttcctgctaatgacccttttcaccttagctcaaatgtcgttttctctaagaagccttccccaatcttccagtctaaattaatctctcccacgaaagcaaattctcttcattgtggggctcacatttataatgaaatactctctgctcattggttgattttctgcctcctgccctagactgtcagcctaggagggcaggggtctgcctgtgcggtgtcccactgcacacctagtgcccagcgacgccctgcagcaggtgttggccgagcttgtgttggaggagctggagaacagccccttcctggaagcctgcagcctacagagcccacctcactggtcctcctcggtgagagctcatctgtgtcccgtctgcccgtaggggagccccacagctcagctgcgctccatgtgtcccaggaattctgctggaacacgccagagacaggcagctcactacctcctccccagcactgcgctaggcatgggatagaaggagggcgccactggggaattttcttgagcagtagaagggcccctcctggccatgggggtggtcatggagactgtccctttggggaggattcagcccctcagtccccatccccccaccccccatggta

SEQ ID NO: 711340 - DNA, 1189 bp, Homo sapiens
acccccacccccacgatgctacccgtcgtattttcttcacactcacttatcacaccccgaaatgacattttcatttgctcacttggcaattgcctctcttgctagcatgcaaattttgtgaagatgaggacttcgtcctatttgcagtcatacagcctgcactagaacaatgtctggcacatagtatgtgctcaatacatactttaatcaatgaaatgacttcattaattcattttccttctgctctttgataagattgctttcatcttcagaggaaaaatgtgaaacctgcctctcttcctcttgagtccttgcttggccaaacccttttctcctactccaggggagaatttgattaagtgctttttgttttttgaagggcaggagagaccacagtgagcatgccattgagcttcacttatcactgctttgctcttgaaagtagatccctgaatgcagattctgaccaaacccaacatcctattggacagcattagggcctggcttctgagcctcgccmcagctgttccctctgctggaatgcccttccctcactgtgtgtataaagacttcctgctaatgacccttttcaccttagctcaaatgtcgttttctctaagaagccttccccaatcttccagtctaaattaatctctcccacgaaagcaaattctcttcattgtggggctcacatttataatgaaatactctctgctcattggttgattttctgcctcctgccctagactgtcagcctaggagggcaggggtctgcctgtgcggtgtcccactgcacacctagtgcccagcgacgccctgcagcaggtgttggccgagcttgtgttggaggagctggagaacagccccttcctggaagcctgcagcctacagagcccacctcactggtcctcctcggtgagagctcatctgtgtcccgtctgcccgtaggggagccccacagctcagctgcgctccatgtgtcccaggaattctgctggaacacgccagagacaggcagctcactacctcctccccagcactgcgctaggcatgggatagaaggagggcgccactggggaattttcttgagcagtagaagggcccctcctggccatgggggtggtcatggagactgtccctttggggaggattcagcccctcagtccccatccccccaccccccatggta

SEQ ID NO: 711341 - DNA, 945 bp, Homo sapiens
cagccccatgaccctgctgcttcctgtctctgaacatggatgtgtgtgggtgtcatcccgcacaggcatcatgagttaacaaaaggcagacatcactgtcagtagcaccttggtcaagaaagagaactttgcccttccagaagccctttcaygcactactcctaatgaaaacctcttccttctccccaaaatatcatgttatcctgacttctcaggtcctcatttccttgtatgtctttagttttattacacacagatgcatccctagatcctatagttgaatcctacccatttaaaaaagtagatgtatgtgggtttgttgttgttgttgtttgtttgtttttgtttgttttgagacacagtctcactctgtcacccaggctggagtgtagtggcacgatctcggctcactgcaatctctgcctcccggggtcaagcgattttcttgcctcagcctcctgagtagctgggattacaggcacgcaccaccacacctggctaatttttgtatttttagtagagatggggttttaccatgttggccaggctggtctcaaactcctgacctcaagtgatccacccacctcggtctcccaaactgctaggattataggcgtgagccatcacgcccggccagatatatgtcttttaagtctcttttaacctgcagttccctcctccatcccttttattcctttaaaatttttttttttttttttttttttttgagatggagtcttgctctgtcaccaaggctggagtgcagtggtgcaatctcagctcactgcaacctctgcctcccaggatcaagtgattctccggcctcagcctcccaagtatgtgggactacaggcacacaccaccacgtccggctcatttttgtatttttttgtagagatgggatttctccatgttgggcaggctggtctcaaactcctgacctca

SEQ ID NO: 711342 - DNA, 945 bp, Homo sapiens
cagccccatgaccctgctgcttcctgtctctgaacatggatgtgtgtgggtgtcatcccgcacaggcatcatgagttaacaaaaggcagacatcactgtcagtagcaccttggtcaagaaagagaactttgcccttccagaagccctttcatgcactactcctaatgaaaacctcttccttctccccaaaatatcatgttatcctgacttctcaggtcctcatttccttgtatgtctttagttttattacacacagatgcatccctagatcctatagttgaatcctacccatttaaaaaagtagatgtatgtgggtttgttgttgttgttgtttgtttgtttttgtttgttttgagacacagtctcactctgtcacccaggctggagtgtagtggcacgatctcggctcactgcaatctctgcctcccggggtcaagcgattttcttgcctcagcctcctgagtagctgggattacaggcacgcaccaccacacctggctaatttttgtatttttagtagagatggggttttaccatgttggccaggctggtctcaaactcctgacctcaagtgatccacccacctcggtctcccaaactgctaggattataggcgtgagccatcacgcccggccagatatatgtcttttaagtctcttttaacctgcagttccctcctccatcccttttattcctttamaatttttttttttttttttttttttttgagatggagtcttgctctgtcaccaaggctggagtgcagtggtgcaatctcagctcactgcaacctctgcctcccaggatcaagtgattctccggcctcagcctcccaagtatgtgggactacaggcacacaccaccacgtccggctcatttttgtatttttttgtagagatgggatttctccatgttgggcaggctggtctcaaactcctgacctca

SEQ ID NO: 711343 - DNA, 568 bp, Homo sapiens
gaactatgaaagagcagtgaccgtcattcagatcgaagccaaaaaggctgaattacagttaaagcagctggaaatatgaagattaatacctgacagaggagatgggccctagtatgaatatctgttattaaggcacttattgagcattctccaaaatcagctcctgaaaattaatcattcatttttctaaatacaaagtatattttctttagtgaaaaataaattgtaaatatattctcaatttttcctctctgatgaataaaagagcttcttccgttgctctgtttctcaatgttgatttagattaaggcttttgatgggggttttggctttctcttttgggtttaaaatatactaataaaaactggagaaataggaatttgtaaattccaaactttgtggtaactgtgaaaggttagcattgatctgacaaatggaagtttagaagagaagtctaattatgttaagcatctgtaactgtgatagtttttacaaacatctatattatagrcatctgtattattgagaaacaactcaggattttaagttccataaaaactttgaacca

SEQ ID NO: 711344 - DNA, 2375 bp, Homo sapiens
  misc_feature 379, 380, 381, 382, 383, 384, 385, 386, 387, 388, 389, 390,391, 392, 393, 394, 395, 396, 397, 398, 399, 400, 401, 402,403, 404, 405, 406, 407, 408, 409, 410, 411, 412, 413, 414,415, 416, 417, 418, 419, 420, 421, 422, 423, 424, 425: n = A,T,C or G
  misc_feature 426, 427, 428, 429, 430, 431, 432, 433, 434, 435, 436, 437,438, 439, 440, 441, 442, 443, 444, 445, 446, 447, 448, 449,450, 451, 452, 453, 454, 455, 456, 457, 458, 459, 460, 461,462, 463, 464, 465, 466, 467, 468, 469, 470, 471, 472: n = A,T,C or G
  misc_feature 473, 474, 475, 476, 477, 478: n = A,T,C or G
tgcatgataatttcctgggtatcatttatttctaaatgtttaataaacctgtacactcttttccccgattatatgacagttcaaacggtttcagactggattctagcacaccgctttgcagcacatgagtgtcttgcaattgggtgaaaagctgacacaatctgatgtacagaaagtggtcatgtgatagcggtccactctcatctttctaatccactcattcacgtcggggcagtcactcattcaactgacttcaatctttttttctttgctacaggagactccctttaagtctctaattcttactttccactcaacttttttatttaaaacttaatacacagcatttaacttgttggtattgctttgaactcaaacnnnnnnnnnnnnnnnnnnnnnnnnnnnnnnnnnnnnnnnnnnnnnnnnnnnnnnnnnnnnnnnnnnnnnnnnnnnnnnnnnnnnnnnnnnnnnnnnnnnnttcccttcccaccaaccttcacacccagaaactgatgcttcctcattatactggtgatgtctagaaatgttgagttacctgtgtctgtgatccttttttttttttaattaaaaaaataaggggggtgctgggtgcggtggctcacgcctgtaatcccagcactttgggaggccgaggtgggtgaatcatgaggtcaggaaatcgagaccatcttggctaacacggtgaaaccccgtctctactaaaaatacaaaaaaaattagccgggcttggtggcgggcgcctgtagtcccagctactcgggaggctgagacaggagaatggcgtgaacccgggaggcggagcttgcagtgagcacagatcacgccactgcactccagtctgggctacagagcgagactctgtctcaaaaaaaaaaaaaaaaaaaaagtgtagagacatagtctttctaagttgcctaggctggactgcagtggcatgatcatagctcactgcagcctcaacctcctgttctcaagtgattctccagcctcaacctgccaaagtgctgggattacaggcaggagccactgcactcagcaaagactctgctcttttatcacctaagtccagagcaccaagtattgtgagtccttcctttgcagattccatttgatttgcttctttcctttccattttaacaatgagattttatatactagctcataatctaaacaactgatcagaacaaaagccttggagctgctttcctggcctccgtccctctcactctgtccaccctgcttggtgttatgccactagttttatcctgactgccctgttcaagaatctaacctagttgaaatctgtccatgcatagttgtcaatggtacacacaaagggtccttttactcaggagaatggctttgcatgaatagtgatgacaaatgtgttatgaattcggatttattactaacattcgattcgaagccaaaggaggaaaaaaaaaaaacyagtattaatggacatttcctaatgaatccgtaggcttttagtacctgttgattgttctggttaaaggtagtttcccagtcacattttcttccatttaatagctaatggggcagtttagaagtctgtagtagacttcgcttttagatgctcattgctatagttcaggaggaaaaaatgaaaatggaagtgattgttgggaatggaaacttcccccccttttttttttctgagggagaaacctttttatgaatggtaagatttttttttgtccatttgctttttctcttgaataaaattccttttaaaatctgatctacatgttcactttttaaaatctcaatgctttattttcagtcaacttattaacaaagtacagctccaggggctctgtccagccaacaattttatttaatcacaaattataaatgtatatttggtatatgcatcacccccaacgttttaataaatcagcaatggcttctgccctctaagagcgcattgtctatacatcaataatgatcaggctttactgagcatgtcatgatgtgcagatactgtgctctgtgatttatctatagtatctcatttaagactcacaataaccaagctttacagatgaggaaactgagaacgaaaaacaaacttgccaaaagacacatgagtaaattttgaaatgagaatttttatagaatcttctctgacttcaaagaccagaaatataacctccatgaaacactgtattcccatgcttcctgtaatataacacttaccgaactcaattatggaaaactatctgtattctcttctattcccttgctaaatatgaacttcttgaggaaaggatttagcttattaatctttagtttcaacaacacaatgtaagacccatctagcaaccagttaa

SEQ ID NO: 711345 - DNA, 2375 bp, Homo sapiens
  misc_feature 379, 380, 381, 382, 383, 384, 385, 386, 387, 388, 389, 390,391, 392, 393, 394, 395, 396, 397, 398, 399, 400, 401, 402,403, 404, 405, 406, 407, 408, 409, 410, 411, 412, 413, 414,415, 416, 417, 418, 419, 420, 421, 422, 423, 424, 425: n = A,T,C or G
  misc_feature 426, 427, 428, 429, 430, 431, 432, 433, 434, 435, 436, 437,438, 439, 440, 441, 442, 443, 444, 445, 446, 447, 448, 449,450, 451, 452, 453, 454, 455, 456, 457, 458, 459, 460, 461,462, 463, 464, 465, 466, 467, 468, 469, 470, 471, 472: n = A,T,C or G
  misc_feature 473, 474, 475, 476, 477, 478: n = A,T,C or G
tgcatgataatttcctgggtatcatttatttctaaatgtttaataaacctgtacactcttttccccgattatatgacagttcaaacggtttcagactggattctagcacaccgctttgcagcacatgagtgtcttgcaattgggtgaaaagctgacacaatctgatgtacagaaagtggtcatgtgatagcggtccactctcatctttctaatccactcattcacgtcggggcagtcactcattcaactgacttcaatctttttttctttgctacaggagactccctttaagtctctaattcttactttccactcaacttttttatttaaaacttaatacacagcatttaacttgttggtattgctttgaactcaaacnnnnnnnnnnnnnnnnnnnnnnnnnnnnnnnnnnnnnnnnnnnnnnnnnnnnnnnnnnnnnnnnnnnnnnnnnnnnnnnnnnnnnnnnnnnnnnnnnnnnttcccttcccaccaaccttcacacccagaaactgatgcttcctcattatactggtgatgtctagaaatgttgagttacctgtgtctgtgatccttttttttttttaattaaaaaaataaggggggtgctgggtgcggtggctcacgcctgtaatcccagcactttgggaggccgaggtgggtgaatcatgaggtcaggaaatcgagaccatcttggctaacacggtgaaaccccgtctctactaaaaatacaaaaaaaattagccgggcttggtggcgggcgcctgtagtcccagctactcgggaggctgagacaggagaatggcgtgaacccgggaggcggagcttgcagtgagcacagatcacgccactgcactccagtctgggctacagagcgagactctgtctcaaaaaaaaaaaaaaaaaaaaagtgtagagacatagtctttctaagttgcctaggctggactgcagtggcatgatcatagctcactgcagcctcaacctcctgttctcaagtgattctccagcctcaacctgccaaagtgctgggattacaggcaggagccactgcactcagcaaagactctgctcttttatcacctaagtccagagcaccaagtattgtgagtccttcctttgcagattccatttgatttgcttctttcctttccattttaacaatgagattttatatactagctcataatctaaacaactgatcagaacaaaagccttggagctgctttcctggcctccgtccctctcactctgtccaccctgcttggtgttatgccactagttttatcctgactgccctgttcaagaatctaacctagttgaaatctgtccatgcatagttgtcaatggtacacacaaagggtccttttactcaggagaatggctttgcatgaatagtgatgacaaatgtgttatgaattcggatttattactaacattcgattcgaagccaaaggaggaaaaaaaaaaaaccagtattaatggacatttcctaatgaatccgtaggcttttagtacctgttgattgttctggttaaaggtagtttcccagtcacattttcttccatttaatagctaatggggcagtttagaagtctgtagtagacttcgcttttagatgctcattgctatagttcaggaggaaaaaatgaaaatggaagtgattgttgggaatggaaacttcccccccttttttttttctgagggagaaacctttttatgaatggtaagatttttttttgtccatttgctttttctcttgaataaaattccytttaaaatctgatctacatgttcactttttaaaatctcaatgctttattttcagtcaacttattaacaaagtacagctccaggggctctgtccagccaacaattttatttaatcacaaattataaatgtatatttggtatatgcatcacccccaacgttttaataaatcagcaatggcttctgccctctaagagcgcattgtctatacatcaataatgatcaggctttactgagcatgtcatgatgtgcagatactgtgctctgtgatttatctatagtatctcatttaagactcacaataaccaagctttacagatgaggaaactgagaacgaaaaacaaacttgccaaaagacacatgagtaaattttgaaatgagaatttttatagaatcttctctgacttcaaagaccagaaatataacctccatgaaacactgtattcccatgcttcctgtaatataacacttaccgaactcaattatggaaaactatctgtattctcttctattcccttgctaaatatgaacttcttgaggaaaggatttagcttattaatctttagtttcaacaacacaatgtaagacccatctagcaaccagttaa

SEQ ID NO: 711346 - DNA, 2375 bp, Homo sapiens
  misc_feature 379, 380, 381, 382, 383, 384, 385, 386, 387, 388, 389, 390,391, 392, 393, 394, 395, 396, 397, 398, 399, 400, 401, 402,403, 404, 405, 406, 407, 408, 409, 410, 411, 412, 413, 414,415, 416, 417, 418, 419, 420, 421, 422, 423, 424, 425: n = A,T,C or G
  misc_feature 426, 427, 428, 429, 430, 431, 432, 433, 434, 435, 436, 437,438, 439, 440, 441, 442, 443, 444, 445, 446, 447, 448, 449,450, 451, 452, 453, 454, 455, 456, 457, 458, 459, 460, 461,462, 463, 464, 465, 466, 467, 468, 469, 470, 471, 472: n = A,T,C or G
  misc_feature 473, 474, 475, 476, 477, 478: n = A,T,C or G
tgcatgataatttcctgggtatcatttatttctaaatgtttaataaacctgtacactcttttccccgattatatgacagttcaaacggtttcagactggattctagcacaccgctttgcagcacatgagtgtcttgcaattgggtgaaaagctgacacaatctgatgtacagaaagtggtcatgtgatagcggtccactctcatctttctaatccactcattcacgtcggggcagtcactcattcaactgacttcaatctttttttctttgctacaggagactccctttaagtctctaattcttactttccactcaacttttttatttaaaacttaatacacagcatttaacttgttggtattgctttgaactcaaacnnnnnnnnnnnnnnnnnnnnnnnnnnnnnnnnnnnnnnnnnnnnnnnnnnnnnnnnnnnnnnnnnnnnnnnnnnnnnnnnnnnnnnnnnnnnnnnnnnnnttcccttcccaccaaccttcacacccagaaactgatgcttcctcattatactggtgatgtctagaaatgttgagttacctgtgtctgtgatccttttttttttttaattaaaaaaataaggggggtgctgggtgcggtggctcacgcctgtaatcccagcactttgggaggccgaggtgggtgaatcatgaggtcaggaaatcgagaccatcttggctaacacggtgaaaccccgtctctactaaaaatacaaaaaaaattagccgggcttggtggcgggcgcctgtagtcccagctactcgggaggctgagacaggagaatggcgtgaacccgggaggcggagcttgcagtgagcacagatcacgccactgcactccagtctgggctacagagcgagactctgtctcaaaaaaaaaaaaaaaaaaaaagtgtagagacatagtctttctaagttgcctaggctggactgcagtggcatgatcatagctcactgcagcctcaacctcctgttctcaagtgattctccagcctcaacctgccaaagtgctgggattacaggcaggagccactgcactcagcaaagactctgctcttttatcacctaagtccagagcaccaagtattgtgagtccttcctttgcagattccatttgatttgcttctttcctttccattttaacaatgagattttatatactagctcataatctaaacaactgatcagaacaaaagccttggagctgctttcctggcctccgtccctctcactctgtccaccctgcttggtgttatgccactagttttatcctgactgccctgttcaagaatctaacctagttgaaatctgtccatgcatagttgtcaatggtacacacaaagggtccttttactcaggagaatggctttgcatgaatagtgatgacaaatgtgttatgaattcggatttattactaacattcgattcgaagccaaaggaggaaaaaaaaaaaaccagtattaatggacatttcctaatgaatccgtaggcttttagtacctgttgattgttctggttaaaggtagtttcccagtcacattttcttccatttaatagctaatggggcagtttagaagtctgtagtagacttcgcttttagatgctcattgctatagttcaggaggaaaaaatgaaaatggaagtgattgttgggaatggaaacttcccccccttttttttttctgagggagaaacctttttatgaatggtaagatttttttttgtccatttgctttttctcttgaataaaattccttttaaaatctgatctacatgttcactttttaaaatctcaatgctttattttcagtcaacttattaacaaagtacagctccaggggctctgtccagccaacaattttatttaatcacaaattataaatgtatatttggtatatgcatcacccccaacgttttaataaatcagcaatggcttctgccctctaagagcrcattgtctatacatcaataatgatcaggctttactgagcatgtcatgatgtgcagatactgtgctctgtgatttatctatagtatctcatttaagactcacaataaccaagctttacagatgaggaaactgagaacgaaaaacaaacttgccaaaagacacatgagtaaattttgaaatgagaatttttatagaatcttctctgacttcaaagaccagaaatataacctccatgaaacactgtattcccatgcttcctgtaatataacacttaccgaactcaattatggaaaactatctgtattctcttctattcccttgctaaatatgaacttcttgaggaaaggatttagcttattaatctttagtttcaacaacacaatgtaagacccatctagcaaccagttaa

SEQ ID NO: 711347 - DNA, 2375 bp, Homo sapiens
  misc_feature 379, 380, 381, 382, 383, 384, 385, 386, 387, 388, 389, 390,391, 392, 393, 394, 395, 396, 397, 398, 399, 400, 401, 402,403, 404, 405, 406, 407, 408, 409, 410, 411, 412, 413, 414,415, 416, 417, 418, 419, 420, 421, 422, 423, 424, 425: n = A,T,C or G
  misc_feature 426, 427, 428, 429, 430, 431, 432, 433, 434, 435, 436, 437,438, 439, 440, 441, 442, 443, 444, 445, 446, 447, 448, 449,450, 451, 452, 453, 454, 455, 456, 457, 458, 459, 460, 461,462, 463, 464, 465, 466, 467, 468, 469, 470, 471, 472: n = A,T,C or G
  misc_feature 473, 474, 475, 476, 477, 478: n = A,T,C or G
tgcatgataatttcctgggtatcatttatttctaaatgtttaataaacctgtacactcttttccccgattatatgacagttcaaacggtttcagactggattctagcacaccgctttgcagcacatgagtgtcttgcaattgggtgaaaagctgacacaatctgatgtacagaaagtggtcatgtgatagcggtccactctcatctttctaatccactcattcacgtcggggcagtcactcattcaactgacttcaatctttttttctttgctacaggagactccctttaagtctctaattcttactttccactcaacttttttatttaaaacttaatacacagcatttaacttgttggtattgctttgaactcaaacnnnnnnnnnnnnnnnnnnnnnnnnnnnnnnnnnnnnnnnnnnnnnnnnnnnnnnnnnnnnnnnnnnnnnnnnnnnnnnnnnnnnnnnnnnnnnnnnnnnnttcccttcccaccaaccttcacacccagaaactgatgcttcctcattatactggtgatgtctagaaatgttgagttacctgtgtctgtgatccttttttttttttaattaaaaaaataaggggggtgctgggtgcggtggctcacgcctgtaatcccagcactttgggaggccgaggtgggtgaatcatgaggtcaggaaatcgagaccatcttggctaacacggtgaaaccccgtctctactaaaaatacaaaaaaaattagccgggcttggtggcgggcgcctgtagtcccagctactcgggaggctgagacaggagaatggcgtgaacccgggaggcggagcttgcagtgagcacagatcacgccactgcactccagtctgggctacagagcgagactctgtctcaaaaaaaaaaaaaaaaaaaaagtgtagagacatagtctttctaagttgcctaggctggactgcagtggcatgatcatagctcactgcagcctcaacctcctgttctcaagtgattctccagcctcaacctgccaaagtgctgggattacaggcaggagccactgcactcagcaaagactctgctcttttatcacctaagtccagagcaccaagtattgtgagtccttcctttgcagattccatttgatttgcttctttcctttccattttaacaatgagattttatatactagctcataatctaaacaactgatcagaacaaaagccttggagctgctttcctggcctccgtccctctcactctgtccaccctgcttggtgttatgccactagttttatcctgactgccctgttcaagaatctaacctagttgaaatctgtccatgcatagttgtcaatggtacacacaaagggtccttttactcaggagaatggctttgcatgaatagtgatgacaaatgtgttatgaattcggatttattactaacattcgattcgaagccaaaggaggaaaaaaaaaaaaccagtattaatggacatttcctaatgaatccgtaggcttttagtacctgttgattgttctggttaaaggtagtttcccagtcacattttcttccatttaatagctaatggggcagtttagaagtctgtagtagacttcgcttttagatgctcattgctatagttcaggaggaaaaaatgaaaatggaagtgattgttgggaatggaaacttcccccccttttttttttctgagggagaaacctttttatgaatggtaagatttttttttgtccatttgctttttctcttgaataaaattccttttaaaatctgatctacatgttcactttttaaaatctcaatgctttattttcagtcaacttattaacaaagtacagctccaggggctctgtccagccaacaattttatttaatcacaaattataaatgtatatttggtatatgcatcacccccaacgttttaataaatcagcaatggcttctgccctctaagagcgcattgtctatacatcaataatgatcaggctttactgagcatgtcatgatgtgcagatactgtgctctgtgatttatctatagtatctcatttaagactcacmataaccaagctttacagatgaggaaactgagaacgaaaaacaaacttgccaaaagacacatgagtaaattttgaaatgagaatttttatagaatcttctctgacttcaaagaccagaaatataacctccatgaaacactgtattcccatgcttcctgtaatataacacttaccgaactcaattatggaaaactatctgtattctcttctattcccttgctaaatatgaacttcttgaggaaaggatttagcttattaatctttagtttcaacaacacaatgtaagacccatctagcaaccagttaa

SEQ ID NO: 711348 - DNA, 816 bp, Homo sapiens
ttttttaaaaatgatccatttttaaagttacattttaaatatgcatagcccactggaagacaattttgaccaagaagagtttttgagcttaggtatcactttgagaggtagcctattgtggttagtttaaatttgatacgacttagtagttataagatgatcagtcttttttaaaaaagatctattaacaatggcatgttttgaaataactccagtggattcttccaatctgggaaaagtgtaaacccgttatgggctacagaacccactgggaggtttagtctgtgtgaaccatttctagactgatgatagagatgtgttgagaagccagagttgttcttcagtgggttgcttgatggaaagcatctcattggtcagaatattaatagaggtaggaaagaaaaagcaggtaaagagtcaaatcagtggtaggatccatggagagtaaaatatgctatgttgcagagatacacacttaatgtggtcagaatccatactatcttcttttttaacagtcccttgttttcatctgaataatcaaatgatggaaaatacaattcaaattaacatctgctccctcaatccacaatcctctggaagagctacactccaccccactgcccacttctctgagaaaatactttccccccmacacgcactcagtccctcctgggataggctcgtgactctggtctagacaattagatcatcctgtttcccagtgacagtgtttaattcaggaattcagggggataaaagtgcaatccaattacccaaatggacttctgagagtcaggcccaggattttatttgaac

SEQ ID NO: 711349 - DNA, 640 bp, Homo sapiens
tgatcaaatccatgtaatttgtatacctatacatcaaatattttcatttttttatgttgggaacattcaaaaaagctctcttgaagctatttgaaaatatataataaatttttattaactatagtcactttacagtgctacagaacattagaacttattccatctatctaaccgtaactttgtacccactgaccgacctctcttcctatccgctgcccatcctttccagccttttataatcactatcctctctacttctatcagatcaactttattagcttctacataggagcaaagctcacttattattaagacaaaaactctgagtgaaataatagtcaagttaatctagaagcttttcaaaataattrtaaataggactcaactttgagctgctaagatggttcaatattgaaaattgtttatattaagagtataggggtatatgcttgtctctaccaaaatttaaaatagtcttttataaaatttaacattcattctaataaaacttacagtaaaaatgggaatcagtaagctaaacacacagtcacataaaaatacacaaactcatttagaaacattctcagtaaagacattaacgagccaagaatgcccacttcaaaatagatgatatttttag

SEQ ID NO: 711350 - DNA, 2024 bp, Homo sapiens
gtaagcagctctttaactcatcctttttggctgctttccttctaacatctcaattttccactctcccactcttcatgccatttctcttgggattacctccaaagggacttattgcattcaaattctttcttacttctggacctgattctgacactatgtgggtaaccaaaatacatgacgatatatggaatcataaaaagcaacaggagacataatagggcataaaaaacaaagtctatgatgagaaaagcttgcaaatgacataatttaagttggaaagttcagaagttggtctgcacaaagacatgctgtgtctttaaatgagtgtatctacctaaagagctgcagtgagcagacacccaaatacataatcacacacatttgaataaacattattttccaatcctgaagggaaatatgtttgcatttttccctatccaacaaaccttatttaagtattctgtgtttttctgtagttctgcaacttggcctctgtgggtaatgagcagatactcaatgaaagaaattgacaaaggcagcttgtatctctgaaaaaccatccaataacatattctgtagtagaacaatgaactttttccagtagacaatagcagaagagttacaataaacttaggcaaacttcgctctcagaaatctggaaggaaactgtcaagaaacctcaggctgaagtttaatagcttgtgaaccataacttgtttccagtaactagttctgtaggtaattatctgctataggaccaaaaagaacagaggctgctgaatttccattttttaggaagttggaaagacaatcccagaggagtaaaaaagcccaaagatatctatgcttgaaataagcagagatttaaatacctgttctcaggaataataggttcaatactggatggaaaacatttacaatgggataataatagagctagaaacagatagaggaaaatacatcagacatgaayatatcacccatagaaaaagataataacctttagtggggaggagaacattaactggtaagatgctccccaccccaaaacactttgttaatattttacttcaatttcaagataaagacaaacatcatatcttctgcctcctgaaaaaagaaataaacaataataaaacatattttaacggccagtgaccattatactttccactttgtaattctattaccttcatttttctggtccctgctctctctttaggttggcatattgatttgaaattcaatgaaaatctcattaaaaatatttttggaggcaatccagagagcaagaagaagagaatgacctgtgtggtagtctagaatgctatgctgattcacactcactctttctgaacaaagccttccctgatctgtagtttatgtacatcgtatttctgtgactcagatgacacatatgtcccctaaaagagaagggaaaatcttgagctcccagaggtctatgtgaccatttccttcagtgatcagcaataaactccgaaggcttgtcatagtgattggccccaacccaaacacgatcctgggcaaggtcccaagttgaaactctgccttcttacaatgcctgcactgaaaacacagtatgtgtattaataggttgcttggatcaacctcattccatagcatggaatgtgtgtacacatcataaaaaaagatgaaagaactccaatctatgtggggaaaaataagcacagaagatcacattgaacctaacttacataggctctgttagaaagtagaaagtacctatttcctttttttcattttcataaattgtattgttgtacagctatgagatcagtgcaacacacacacatacacacacacacggagacacacacacacaactgtaagatttcaatccaaagctaaatccattaactatttatgcctgtggttgcaatttttggatttctgcaatcagaccttggcgatgaccttgagcagtaggatataaataagttccacttgcttagcgttccaataatggaacactagtcataaat

SEQ ID NO: 711351 - DNA, 656 bp, Homo sapiens
tgatagcacaagaaaagcataatcagtgtcattggaaggaaggaggtgataaaagagattcctgtactgcgtatttaaaaaccctttaatattgaaatacacataaatacataaattttgataaattatttacaaaatgaacactcacatagaacattaccaggactctagaggcctgcctcttacctcttcccagtcattatctgccaaagatatctattaatgttattctgatttctattatgttcattttgcttgcttatgactaaatggaataaataatctttgttcttragggggatcaacctgtaacttcccttttttaaaaatacctttttcaggttttggtataaagattatggtggcatcttcaagttgtgaatgttatttcttttctattctttacaaacatccactcaaagttgtgctgtttcttctttcaatgtttgggagtgttcattggtgaagccatctggaagtttcttagtggaaggtttatattttaaggttcagtttaatagatatagaactattctgattgtacttgttcatgtattggttttagtaagttttatctttgtaggcattagtccattttatttaaaatttacatttgtataacattttttataatcctcctatcttgttagtctaca

SEQ ID NO: 711352 - DNA, 663 bp, Homo sapiens
tttttggagtccccccagattatttctacaatttggaagaattgtagaaatgatgaaatgtacaacaaaaatcacagaggtgagaattagtccccgtgggtgtgctgcgattgaatataagagagaaagtgataaatttggaaaagagaagaggaagcatgtctctttaggccacagaaaataacatacaaactagggaagagcgtaggaagcgtttttctcctacttcttgcctcccacaggaaatcactaatactttctgagaaaagggataagctgtccagtttctacttattaatgaracagcaatttctagacttaagcatattagtgagcactgttctttataatagctccagaaatttctgcttaggaacaacgacaacaaaaaaacaccaccacctgagagtaatccccattgtttctagggtagactcaccctaatttaagtgtgactcaaaagtgtgactctaaagaactgcaagcagattaatgtaagaaactcctgctaaaaccctgctaaaaacactccaatataatgtaatcctccttatccatgactaattgaagcaaaatgggcagcacacagaaatgtgtgctttcaaaaggagcatgttaagcttgaatgtgacatacaagccttttcgagaacctttactagac

SEQ ID NO: 711353 - DNA, 608 bp, Homo sapiens
ctctgccacttactagctgtgtgaccttgagctggttacttcatgtctctgtgccttctctcccatctgcaaaatgagatagcatcagccctcactttataaatatttttagagatggggtctcaacttatcttatctcaaataagataatgaatgaaggtgattagcagtgtgcctggtacactgtcattgatggtatcactgtatcctccctcgggaacagggactactcttttgctttctactcccactcacttctgagcatttgcagttcccataacagacagaagagaaatgcaatatttgttgaacaaattatttgactcttcctgtttccatctgagtactatttaacataggactgcttgccaggtgtacctgggtatactttcccacataagcaactttcccttttggggagaatttaaccaaaagtgccaatattacgtagtggttaataatgcatagtccagaattagactacctggatttgactgctgttctgccatttgatagctgtgtgaccttgagcaaattatttaaccactctgtgtctcagttttytcatctataaaagagaagcaataatagttctttctcatgtggtc

SEQ ID NO: 711354 - DNA, 1336 bp, Homo sapiens
tgggacctgatcctggcataaaaagcggatgcgggcgaccgaggaccacacacgtgggggcgttcgcgggcgctgaaaccagctacgaggcccacgcccccgccggggacagctggtgaccatcacctttggacaggggcattccccagccggccccggaacttgcgaaagacgcgcagcccttcggactcagccactcgcgcagggcccgggtcccgggcggctcggggcacctgaggagcgcggcgaaggcggggacagggacggggacggggacgactcgggaacagggaagcgcgcggcctcccgcaggacccacctggatctgcaacggcacgaggcgcaccttgcagcgctcgctcaccgcgaagcccttgggcaagtccacgtactggccccactcctcggcgaacagctgcaccacgaatttgcggtgcatgtcgatctggtcgccgtacaggctgaggaacttctggatgagcagctcgtagcccgccccgtgtggcaccgacgagggtcgcgcgaagactgagaaacagaagagcaccgggactgtgcccgacggcgcccccgcgcccccggcgccgctgttggggagcgcaaggaccgccggctccgcagccgccatgttcccccgagcgtctgcgagctccgaggccgcccagtcgcacccagccggctgccgcggccccgcctcccggcgmtgccagcccgcccgccagctcgcggaggcgaaggggcgtgtcctgacgaccgctgctcgcgcgctctcttacccgccccggagggcgggccgcggcgtaagggtgggtggtggggccggggtgcgcgcgtgagccagggagcgcctgcgctcgccggccgggtccgccccctccagcttcccgggccgctgcgttcccgcagttccccgctcgcgccctttctgccgcggttctgactgccggcagaacgcctagtggtctcgcagacccaagacccgcctgggctgcccgttgttcttgccccggtgctgcagctcacacaagggtttgtaccacccttcccctaacgctggccctcttcgcggcttcgctcgccttcgaatgagcagtgttcttggcagtctagggttgtggttgggtacacagagccgccaggacgagttacctgttggctctgtgcagaagcatgcagtcctcctcgagatggcagtggtatcttacaaccaaagggacagtccgatagataccctaagaagagcagcagaatttaatccttagagggccagtcaaggttcaagttttgtcttttttcggtcccacagaacacaatatctctaggaatggatttgata

SEQ ID NO: 711355 - DNA, 1819 bp, Homo sapiens
cagtagagacaaaacaggcatcttcattgtaattttttttaataaataaaagcacattaacaaaaaaggaaggtaagcagcaccggaagcctttgacgtttgtaactaaatgctggtactcaaatggtctagctggttaagtttcactaggaggcgcaaaaaaggagccgtttttgacttaacattttaattctagtagagataagaagagcttgtgtgggcttacagtccttcacctgactgtccttcaccagtgagtagcataccagttcttcaaatgtcctatactttggaaagcagacccgactctggagcactcgccttaattagattctgaatttccttgaattttggatggtccttatcagctaccagctgaagcagaacagcctcactcgtggtcactatgatcccggttcgagcgagacgcttgaacaaaaagataaaggcaaatcaagaaataagcatgagaatgaacactatttcagaagagtaacactatgctgggatgcaataattagtgtcctctactgaaaccgtggttcccagccataccatcaagttcagtgatggggatggatttcaagaccaggcataccacaaagtcaatatgattattcttaatattagtaaaatggagtagaacgagtaaaagggaacaggtagccaaagttatgacatatatgtgcccagaacaggaaagtcatcaaggcaaatgactgtaaaacatgagatgagagagagaaaaggaatggttgttactacgtgcccatcactgaacatctggacatttagttgctgctatttcctgaacactcctggcaggtttgtgcttcatgtcttactcattcattgactcaaatgagggctgcttgtgacttctaaatttattaaacttttatttctatttctactactgagattttttaaaaggtgcctctgtccacttttccccctctgyagtttaactgataatacatgagatcgtgatgcatattaatacttatgcctggcacccctggcattttgtagctcttcatgttttaaaaatcgaggggagcgtaatattttaaagctccattagctgtactacagatataattgtagctgctagaacattacattagtaatttactatcaaatttcatataaattgtttaattggattaaaactactataagaattaaaatgatggttcttaatttctttttactgcacccaaacatctgacctatagcatatgagtccttcctataattaacagttcccttgtctagaaatgactggtgctaaaagagctctctctgtgtcaggagactccctggatgataagagaaccaccactactgctgccatcatgaacattttaataccactaaacaagagtgtaaaattcaaggttgtgtaaagtttcactgacaggtcaaagaatatccttgccaaactgccccagtggaatcataatactaaggacagaaagctcaaggaggaaaagagagacagaaaggagaaggcaaaggggaaagaagggaaggaagagagcaaagaacagaaagtcgggggtaaagggtagagagaggaaaggaggaaaatagaagaattctatagcacagattcattctctggatttatgtgttatcagaaatcccagggaaaaaaaagacacaaactgttatcacaaaaagcatatatgtaaaaagcatgaaagaggaagtggttggaaacaattcctaggtaagtcagaggcaaaaacccaggaagcccttgcatagccaaaatatccttgcagagtgtaagtcagtcttccttcaatggctg

SEQ ID NO: 711356 - DNA, 542 bp, Homo sapiens
tttatttttwtttatttattttttggagatacggagtttcactcttgttgcccaggctggagtgcaatggtgcgatctctgctcaccacaacctccagctcctggattcaagcaattctcctgcctcagccccccgagtagctgggattgcaggcatgcaccaccatgcccagctaattttgtatttttagtagacacagggtttctccatgtaggtcaggctggtcttgaacccccgacctcaggtgatccgcccacctcggcctcctaaagtgctgagattacaggtgtaagccaccgcgtccggcctcaaaacacttttataaaagggcacaggggaacaaccgaaacccagaagaaatgcaaggaagcacacatatatcagtatcattttacaagctccataattgaagctttgtatcatcgtcgggtcagattcattatcaaggctttcattcaggactttgaacttgagcctcactcacaaagtgctgagtgaggaagcagttttaagtgcggaaggcaggcagcaatttgagatt

SEQ ID NO: 711357 - DNA, 880 bp, Homo sapiens
gagacagtgcttttttcatctgtacttcaatgccccttttgggaatcagattacattagaacaggttgagaggaaccagaagaaaaaaccagcacaatcactgctagttcagtactactatgaattcttgtcttttcccccaatcttctatttatttttcagagtcttcaaatagttcctgcaataattctttccaggtttgatagctgtattcagtagagagagaggatagaatatgcttacttcaccttatgtggcactggaatcagcttactaaactttaaagtattagtaataataagacaagcctcacataaagcttttaaaatacttaatacaattcttgaaattacagtgttagtgccattaattcagctttactattactacgagaaaaagagaggttgcaactatgcattagtgaattgtagaaatagatactttgagtgttgtccatgkagtgagtacttgcatcaagttcacagcagcttgtctgttctttaagttcacaaactgacttaagggaaacttcatagctgctgctgtaagtacttttagcagagaactctactagatgattatggttcatcatttttttgtgtaatgaactgacaaatgttacttttaacaaatctttaatacactatttactctgtgttttaaaggaaggaaaaaaagaatatccagttcattaagagagaggctcagaatatcaatctatttctattgttttatcttcagactcacttactatgtccttggtcatctccactctgctatttaggttaaccttgtgagattttacttccatttgctatattttttcagtttattattccaattaattcttctttatatcatctttttctttgaaagatga

SEQ ID NO: 711358 - DNA, 886 bp, Homo sapiens
tgctttatttttagaagtatagtaccaaaggttatgtttttagaagacaattgcattcatttcatcacaagtaatgccacactagagagtaaaattcctcaaattggttgattaaatgtaattctattgagaaaagtaatttcagataggagttagagaaaacatagtacctacattttgattgattggatcacagtcaatgttcttgtcttttagtttaaccatatattcaatcattttgtttatctttgttacacataaaccagagtatattaattgaattagataaataagcttaagaatattgcatttcttataatagtttccctgcttatttggctattttcctagctttttagagctactaagcatgacattacttagcatcataaattatgcaataacagcgtgatccattgggtgaaattttgaagatttccaaatggttccttgtagaattgcaatacacactgcccacttttcaagtagattgttgtaaatttcctcacttatttaactataacatattttgcaccactaatacaatatttccaaaaagataattgtgaaaagtcattgtggaattagttccttataataattttcccaagggtgttaagaaagaggtttgagctttccagctgtgtggaatcaggttttgctgtttttcctttggttcattctagtgcatttcttaggaagagagttttgtgtagacttataacaaaattaatgtaaaaacatgatattacatatgtattttaygtgtaatggaaagtaaaaatcaaccactggatttggaaaattaattttatgttaaagatttcatcaaaggccaatatgcagacataatttggaaacttgcctattattcttactactcttc

SEQ ID NO: 711359 - DNA, 1464 bp, Homo sapiens
tgtttataatcagctcataaatgcaaggtttgccttcccagtgatcccatgcttgccacaaaatccacattttaacctacttttatttagccacaggacaacacggtggctggcacatcactaaattgaataacccaaacattatggttgacagcatcaactttatgctcttaaatctcattccctcatttgtaaaatgaggttagtggtatttaataggaatctttgtgaagatcgaatgagataacttcagtaaaatgcctattatattatctgaattatagaatgcatgcaataaatgttaagtactattcttttgggatgttgtttttattaatgcacacaaagtcagctacatctaggaggaactgtctgaaacaacagatatgccaaaactgaaatctggaacttgtaagaagtctaaactcaagtggttatgaactttgtgcataccacatagtcaggaagagtgctggtagtctaggctttcgctgcacacaaaccctctctgctcctccactgtgactctggattggcatggccttggcaaggggtttatgcagatttatgcttcaagaagattgctaacagctatagcacactttattcactccatttataatattacaaaggaccctgagttttagagaaaaacaggatgttaaaatcaaaacaagtcaggataagcttgatactgaagcaacaaatgctgaacttctcccagaaggtcagctactttgaaggtaatgaacagaatttaggagtagaatacctggttcagagcttagaggtccccaagaaatagttgatacagagaatttcagctcagttcagcagaaatttgttgaatatctactatatgccaggccatctgctaaatttgatgaatacagaagggaagaataccaccaaggttcctaccccagtgaatctcagagtggaacgaggtttaagtaaacatccaaagtcacagactaagccagaggcaggaaacagagttcaaatcatgaaattatggggctactgtatcccattccctggagctgagtcatcactacctctcagaagccaaatgcccaactaactccctagatcccagcctcttacccacctagagacctccccaggtgccaactacctgtggcacagacctctcctgattgcattgcccacgtggtcccagagtcagtcttcatccagtttattccatttagtcacctatgctctccaagccctttaatggaaatgttcagatcttagtctaattggaaaagaagagacaaaaaaatagagtcgaaaggaggctgaggggtgtggtgacgcatgcctgtaatcccagctactcaggatgctgaagcaggaraataacttgaacccaggagacagaggctgcagtgagccaagatcgtgccactgcactccagcctggatgacagagtgagactctgtctcaaaaaaaaaaca

SEQ ID NO: 711360 - DNA, 1167 bp, Homo sapiens
attggatatttaaaatattccataatctgacaacctaataatgcaaaccagaaaagagagctacacgcaacatcactgtatttccaatgaaattaggttccaggaagctcaaaacaagacagtaggtagagacagctatcatccttggcgttcttccttttggattctggataaaaggtagaggaataacagcaccgttctgaatgttttggttattttatggctctaatttccatcgtgttttttttctgaagcatagctaattgttcattaacagttaacagatattgatggcttagctatttttatctttttatctatttcacaaaggtctatttagaatctagtagtgtatttcctctttattgttaagcacagaaaaggaacgcatttttttctgctcatgcctagtttcctttgatctttctcaaaggtaaattacccctaaaactttgagtagactgtcctagcagatattctgaagcttgacaaggaaattcatcccacttcaatccataaaatgatagtcttcgtaacttctcaaagaaggtcaagctatttattttaaagtcatcttttgcttttcttgatatttcgtaaatgatggctgacaagttgtgatagtctacttttcagcaggactggtctccatttacttagtttaagtaactatttacttgattactattattaatatatggttttaactttttatttgaaatagtcatttgatgattttggtgatattgatgaccacgaaatcaaatggagatatacaactacaagaaaaaaaactgtagaaataaatgtctttttcgttatttaagacgtaaatcaactgagttgctgtgtagcttatttatgtcaatgttaaatttgtgtttgttaatttttactgtttccttattaaacatcaaaaatgattaattctttggcaattaatatcatagcatatccagtacattaaatgtcatgtaaaacagaccgacaaaacaatcttatcttttttttctttatgtcagtgtttaatactctcctgtatggcttaggaawattaaagaagatacaacagaatatgcctcaaataagacctatttgttgatatttaatatatttatgatagttgctgataaaatgaaaacagacattattcaatacactggataa

SEQ ID NO: 711361 - DNA, 1096 bp, Homo sapiens
ccaccttttctctgaaatttaataatctcacatggtgccacattgttaataagcaaagtttaacagcaattaaatagctagaactttgggtttccaggtaccctttcaaatattccacacgttgttgcctcagatatatcacattctttctcatgttttggcctttacttaagttaccacctctgttggaatttcctgctcaggcaacacacaaacgtttatcccactggcatttcgtacttagctaacaaagtccaatttaaatgttaattgacagtctctctctgtagtcttccttgatcccctttagcagaattaattgcctcatattccaacatcacattgtatatatctctattacactttgtctcttactgtattaaaacttagggtttcctaaactggtattctcagagagtggcttagaattctttttgaaaatgttctgagtttatgttttcatttcaataataatttaaaacaataaatatcagcatattctaaatcatctggttgagcatttataagttagggctatagcacaatttaaatgttggtttgcatttgcatttttaattatgttgggaatgtcatactatttttattgctgtgtgttaatgagaaaagaacatggaacagatttaatatagaaatgatacatttctcccaagtgaaggtctacaaacatctctgcattgccatataaagaaatttgcttgtaattcaaggaaagaaaagtaacagsagaatagtatcattagtaattttttgcttcctttaagacttcacgtcattgaaggaaacaaatgttatatgaaatagtgacatttctaatttttgtttgctttatgattgtccaaaagttaaaatactgtttatggatattttacatatatatttacatatatatacttttacatatatatactatatatgagtaagcatataacaaaatgaatttatgtcatacattttaattattctttttaatttaaaattggttttaaatggttcgagtttgagaaataatattccttttttatagttttactttctactatattagaagaagttatataaacaagagaagaaaacc

SEQ ID NO: 711362 - DNA, 617 bp, Homo sapiens
tagaaaaagtcaagtgagttttaaaatgtaatattttaagtaaaatagagggcaatggagtgaaagtagagtaattgagctaaaatttcagagaggaggaaaaatgttctgagttcatttgactattagcagaaatttcttccctggggcacttgttgattcagggaactaactgaggattggtcctagccttggaaaagaatctctgttgaaaggaaaaagtaacctacaaggcttttattggttacatgagctagagtgacaaattaaaaacataaggggtcttaaatgcatgattggttctctcctggaaatatttacaccgtcctggttctgtgtaaggagctgtggagccagaccaaaagttctaaaaggtcctcatttttgtaagtctcagcgaaaccccagcataataaatataaggcaacccacacctgggaatataataggcaaatttctgaaagccaaagggaaaaaataagataaaacaaccaatggataaaaagacatattaccttcaaagaagcaataacaaaamttaaagctgacttctcaactgaaatgttgtaagtcagaagacagtagaatgccatctctaggtgctgaaagataaaaac

SEQ ID NO: 711363 - DNA, 1044 bp, Homo sapiens
tatcatccaaacagggacacttttcaaagtgaaaaagggagggctgtaattaattcagccaggacaacaggcataaattggggctgtctgaggcaaaccaggatggacgaggaccctagtcatgaaaatttacactgccacacaatgaacccaccaaaggactgttgtgttacaaggatgcttctctaagaagtgacagaaattacactgtctcgttgatggtgctggactccctccacaaagcagatggccaaattgtcatgatgccaaatcacactgcagaatttctgtagtaaaatcgtcatgcgccctttttctcagtgccttccccatctcagaaaagtgcaaaagctcagcaaatccttgcttttcctgagaatggccatcagataatatacaaagcctggtcagcatctgattaattaggataaaggcacaagggagaatgtacagtgtatggggaatagcactgatcttttttatctcaatgctaatgaactttgacatgaacttccccttctccagcaaagtcatttcttagagttttcagctttctccccactttctcatactttatagcttcactggtgtattcatttcatatggatgccataacaaataataaaaaaatttggtgtctaaaaacgagaaattattttctcataacactgggagccagaagtctgaaatcaagacgtcagcaggactatgctccctccaaagactttaggggagaattcttccttacctctcccaatttgtggtggctcctggtgttctttggcttgtggcaacataactgcaaactctgcccctctttccacatggccttcttcttgggtctctgtgtcctttcctcttttataaggatacctgtcattgaactttgtgcccaccttatatctgggataatttcgtcttgagatttttaaataactacatctgcaaagatcttatttccaaataacattctgagattctggtttgacacagatttgggggggaacattgttcaactcactacaattagtaaatgrcaaacaa

SEQ ID NO: 711364 - DNA, 582 bp, Homo sapiens
aaggggcaattttatttagaaaaagagacttacctcttggtcatttaaaatacattttaggccaaataatcatgatatgaggaaaaaatttgcaccatcatttaatgaatttcaggtttttacaagggttcccctccaactccccatttttcttcctaatgaatggctctagaatacagttttgaatgatttacaaacctgcatacccagcagccccctagaatttttcctttttgtaagtgcattatattgacgttatctgcagatcatttccttgaactgtatttttgctagatgtggtcctggggaaaaatatagtcaaacaaagaaacaaaacacagtcctgttctagacccacccagaatgatataatactaagtatcttccatattcagcrgtgatactgttttgagaactcacagccggtttgagtttagttcagttcaatgttttctttctgtttttgttcataatttcccaggggcctactacttctgtgcttagcttgaaacgtagtgttcttctagcagagaatgctatctggtatatttaaatcaattaggggcactgaatgagaagctc

SEQ ID NO: 711365 - DNA, 966 bp, Homo sapiens
gcagttaagsgctctacatcacagatctgttgtgggggttaaattaaataaaatgtgcaaagcacttggcatgttttctggtccacagctcacaacaaagataggaactttttctcctgctggcctgctctaccatttgacattccaagcatgagagaatcacctctgtgggtttaggcaccaccccttgtactcttctgaagagtatttttaaagtattagtgtttaagtattaatattaagtattaatgtattaatattgagtattaaagtgttcaaatatctatgggtttaggcaccaccccttgtattcttcccaagagtatttttaaagtattagtatttaagtattaatattaagtattaacatattaatattgagttttaaagtgttcagatatctgtgggttttggcaccacctcttgtactcttcccaagagtatttttaaagtattcctttaatatattatttcatattaatttatcagcattaggataggaatcactaagtctccccaggagtgaaaaataaaagagtgactatcatttattgagtatatattatattccaggcaacaagttaaacattctgtgttcaatatatcattaaatcttctcaacaaccttatgaggagctaatttaaagggctgaataacttatccgaggtcatttggtcagaagtggtagaattgagatgttaacccaggactgcctaacaccaaagccaatacccatgttacagagctctatgacccccactggtttgatgataaagaagaggtccggagaataccaaggcaggccaggcctatttcaagttccaaggtaaaggcatagggtcatctggcaggagcaagctgtaagagctccagcaatagaatagcagtgggaagcacagaagagaaagtcaagggaactgcatacaaactgcacttccttaaacacgcttgccttggctttcaag

SEQ ID NO: 711366 - DNA, 617 bp, Homo sapiens
tcgagagcagggcttagccatatagtttccagtaattctgacttttcctgcagagaaaaagattaagccatccactgcctaactctgaccaccacattgtgtttgcttttgcaggtttatcccacaacgttcctttttttttttttttttttttttttgkggtacttgttggccttttgtgtttaaaatgtcatttgaagtctgaaaaagaatcattttgctatcattcacaatgtcaaaagatggatggcttggcagggctggtgccacaagtcagatagatttagagggtggcatccccttgtggaagtaattcataatcactaaataaaaactttttaaatatttttctgtcccaaagtatatgaacaactcttgttcattttaagctgactgattgaagtcatatcccaaagatctttcacgcttaaagagaggggggaaaaaaatagatcccagaatctcacacccattatctgcttggccttttaaaagtctctttttttcttatagtcaatagcctttaggatctatgagttcataattgtatgtaattatctcagtgagccagctagcatttgtctatttattatttgttgtatgcattagcctatgca

SEQ ID NO: 711367 - DNA, 605 bp, Homo sapiens
cttttcatttttctctgtggcctcaatcctccagccctgcaaatctactcaactatctctggcacgcagcctgttccttcttattattaataagactgagaataatggataataaataagagcttgctatcaaagggctctcacgccatcgacccagagcctcacaagaaccatacactgyaaatgctgacatgcagagtgtaagtgacttgtctatgatcagcagctagttagtggccgagccaagtcaggaatctattttaagtggtcttacttgtggcttatcaggaaattatcatttttaaaaataagccagtgaaaaagacagctgggattttaaagtatgcttttattacatttcaagggcaagatttattccactccttagtattgtaattaaagtaaatgaaataggatttggtattatatttgcctttccaacaaccttttggagacacctgctttgctctacaaagggaaagccatctgctcatgtattcattgcattaaatacccactcactcactcagtccacaattatgtgttgccctcctactgtgtaccaggccctgggctcaatacaaggcacacactggtgagcaaaa

SEQ ID NO: 711368 - DNA, 1023 bp, Homo sapiens
tattttttgttaattccattactgttattatttgaccaggggaatcatcttaggctttatggaggagttgacattttcaatcagctttgagggtgggtaggctttggacagacagggatggggcagaagaacattctggactatgggcacaacaagagctaaggctaggaggtgggactgtgtaactttgagatggagaatagggaggagacctcaaagcagaaccttaggctctaagggaaacaagacagaaggattctgctgacaagacagtaaagtagcctgctcatctggtggtaggcactgtgtcagcrttctaggttgtaaatgtaggaagtaagcagatcagaggtttgctcaacaacctgcctagtgagccaaactgcttgctcttgaggccatgtagtccttctggggcagctcttcaaaccctagtccacagaggcaggtacccagttctttcagtgatgccccaagccagataagaaaatgatgttatggagatctggaatcctcacccaaaagtccagctttcattctaaatgcatccgtccatcaggacagtcttgtgtgtgttcagaggtgagggatgaaagagaaacttcacagcagaagaccctctcaaagtcatgtgcggatctgcactgagtctcctgtttctccctcttccctagctatacctctttttaagatccaaaagggcagggctgacttaagccttctctagggccagatattcctagacgaaaacaaggggcttcttgagaggaaatgaaaggagacggagatgcggttttgccttaaggtttttaatgtgagccactgagaagattcattttgaaatagaaggatgtgtctgacagtgtgatgtaaatgcaggcattttggagtccctgctggagaacacacagaggtgagtaggggttctccagtgaccttgtgggagtctttggctgggaagctagctgctggagctgaaagggcacaggaatagaaaccacaccacctggggtcttctgatcc

SEQ ID NO: 711369 - DNA, 1012 bp, Homo sapiens
cttaccatgagcacacagaatgaactggcttcaaacagcatctggcctcctgcctctaatcggttctccactaaacagccaaaacagacttggcagcattcagcaatgcccatcctatccctgctcctcagggaccccagagagagtccaagccccttacctggccttcagattttcatacaatctgcctccagcccccttccctgatgctttctctccataagatgttccctctgtccacccacctcaaacacacataccactgccactctggactacttacttccccaaatgtaaaccataggtttatatctttgtgctttttcccctttggtttgctcagtctggattgcccattgtattagtccattctcccgaggctgtaaagaaatacctaagactgggtaatttataaagaaaagagatttaattggctcatggttctgcaggctgtacaggaagcatagttccttctccttctggggaggtctcaggaagcttctaatcatggtggaaggcaaagggggagtgagacatctcacatggtgggagtgggagcaagagagaaggaggaggtgctacacactttcgaacaaccagatctcacaagaactcactcactatcgcgatgacagtaccaagggagatggtgctaaaccattcatgaaggaacacccccatgattcaaccaccgcccacmgggcccctcctccaacacagggaatgctcactcacctgtgcagtcattgccacatcataggtacagagggtggtcccgccatctggtgaagaagatgcatgggcaagatatggctggatgcatgccaggacttgtctagatgcacagacgatatgtggccaaatgctccacggtaccagacacagacaatgagtcttccaaatcctggagggctggggccacctgctttcaggagctggggcctcagaattgaacagacctggttcagtgtcaccctgtgttggcaggacccccagtcccctcttctctgtg

SEQ ID NO: 711370 - DNA, 1012 bp, Homo sapiens
cttaccatgagcacacagaatgaactggcttcaaacagcatctggcctcctgcctctaatcggttctccactaaacagccaaaacagacttggcagcattcagcaatgcccatcctatccctgctcctcagggaccccagagagagtccaagccccttacctggccttcagattttcatacaatctgcctccagcccccttccctgatgctttctctccataagatgttccctctgtccacccacctcaaacacacataccactgccactctggactacttacttccccaaatgtaaaccataggtttatatctttgtgctttttcccctttggtttgctcagtctggattgcccattgtattagtccattctcccgaggctgtaaagaaatacctaagactgggtaatttataaagaaaagagatttaattggctcatggttctgcaggctgtacaggaagcatagttccttctccttctggggaggtctcaggaagcttctaatcatggtggaaggcaaagggggagtgagacatctcacatggtgggagtgggagcaagagagaaggaggaggtgctacacactttcgaacaaccagatctcacaagaactcactcactatcgcgatgacagtaccaagggagatggtgctaaaccattcatgaaggaacacccccatgattcaaccaccgcccacarggcccctcctccaacacagggaatgctcactcacctgtgcagtcattgccacatcataggtacagagggtggtcccgccatctggtgaagaagatgcatgggcaagatatggctggatgcatgccaggacttgtctagatgcacagacgatatgtggccaaatgctccacggtaccagacacagacaatgagtcttccaaatcctggagggctggggccacctgctttcaggagctggggcctcagaattgaacagacctggttcagtgtcaccctgtgttggcaggacccccagtcccctcttctctgtg

SEQ ID NO: 711371 - DNA, 611 bp, Homo sapiens
atcccttgctatactgctgtccttattgcagtaaactgttttgcctgtttttgctataataagacttgatactgccaggatcagaaactttttatcttggtagaaagcatgaaaatgtcacctagagatcttagccttctgatgcccacactttcatatccaaatgacatgacttgaccttccattccacaaatcacaggaagtctggtgtcctcccgattgcagaggatcccaggacctctatgtccttatggtaactacttgctctgtatctctaattttgcaaagttctccatcggcacctcatttcatctttggatgctgctgcctcactccccaccactttggtgcagatgactccacagccactgcacaccygctatcttccttcattcctcaagcactttaaaggctatttagggtaacaaatgttttctgaaggtttggagtactggaggaggacaatggctaacacggcctatgaaatatgtcaggatactttcagttaagagagatgaaaatctaaatgaaacagcttaggtcaagcaagaaatgtgtaggctcatgcaattaggaggattcagggtgggtcgtaattcaggcacagcttt

SEQ ID NO: 711372 - DNA, 2124 bp, Homo sapiens
aatatatattttttattaatttgtatatgtacatgtctccagaatttctttatgcacatacaaggacatgtaaatatatatatattcatatccctcccaacacaaaaagatagcacactgagccttagattttgttttgtttttccagttaactttaagccttcctgatcctttcacatcagggtgtagaggagacctttgttttgcagctgcataatattccattttatggatatatccattttatttaactactgtatttgcagataattgtcagttattgtaaatagcatgttccccacccttcaatacgatgacccctttccacttccaggtaactattagttgtccttactttaaaaaatatgcaaaacttcattttatcctattctcttcattttacagctgaagcttttgaaaaaccgatccaaatctccaacttccttacctatttttgctccagttcagttttcatctctactgtctggtgaattctatagttttgaaggttgctagtgacttcctgttgtgtagtgctagacaggttttggtgattaatttaggtaggaggataaaaatgagaaaaggaatggggggtggcaatcaaatgggaaaagaggaagactggaaggaaatagaagaaggtgggatctgcatgggagaaagtaggagaacagaatgttttttggcagaagatgtaaagtgtatttttatttctagcttgtaacatacagctggcttctatgtgaggatgagctagcttgtggtgtgttgctgactgataggctagttgggccctcaggaaagttgcttcctgttttctgtctcctaaagcaaaatagagacacctaaccccttgtcccattattgtcatttctccctctgttgcccagggtggcatgcagtggcacaatcatagctcactgcagcctccractcctaggctcagttgattcttgggcctcagcctcccatgtagctgagactacaggtatgtaccatccccccccccccagctaattgttaggatattttgagttatctcagatttattctttgcttgcttttttcactgccaccatgctagtttggggaactacacattcacttagattttcgcaacagtcttctcacccttgtttttgccaatttattgcctattcttacccaacattttccctccctttttcaattccagtcagtgctggtccctgcaattgtcatgctgacaagtctccatacttcgcttgtgcccacacctttctgtgctcctaaaaaatcttgcctcttttgcaagagccagatcaacttcttactgctccataaagccttccacagttgaaacagctcttatacctgtcttacttcactaatcttgtttacaacctgtaccaaatgtttgcttgttttcttatttcagatgtgttcagttgtttctacaaaattgtaggaatttttttcctataaaaaaaatcatgtttcctagctgagtgcagtggctcacccctgtaatcccagtactttggtaggccgaggtaggaggattgcttgagcccaggagtttgacaccagcaccacctcattccagctcggggcaactgagtgagacttcgtctctaaataaataaataagaagtttagtgcttgaggtttctattgggagctggttctgtacactatggaaatctactccccgccccactttaaaattactgtgtagtattccttggtgtgattacaggatgatttaacttttccctattgattggtttttggttatgattttatgctgcggtgtctatctttgtacggttcctttttcagaggcttagatttgaattgatggatcataagatagtgacatttaaaaattcattgtgaatagatacttccaaattgctcaccagaagcttagtgctagtccatacatacttctgatagcaagtacaagagtacccttcagaagggattaattttaatgatattcagggctgggaatgtaggaaaaattgaccatcaagtgtcaggaggcgcaagagtaggaaggggcattctacctccaaggtgtaccctgctcccttgataggcccttgaaatagagacagactctcactatgttgccca

SEQ ID NO: 711373 - DNA, 2123 bp, Homo sapiens
atcgctagaggaaagatagcgaaaaggttgttactatcacaccattacaaagtgtgtgcttccaaatgacgacagcagatggacctacagaggcacgacgtgatctagccaatgccaacatgtctagcattatctagtaccatctcttccttggactctctggtttctagtcactgctgaaattcagtctttagttcaatctaaactttcacttcaacagagaaacttttcctaatcatcctactaacactagcaccctggacttggctgaggtttcctctcacagcattctgcacttcttcaagacattcttcacaaatgttcacgatctgtctcccccgatagactgtaagctccatgaggactatgactacgcctgttttgtttagtgcactatgtcccgcacagagtctagtgtttggcatacagtagatgctccataaatgtgtactaagaaagactatgactctgcttacctgtaactgggagatctgagaaagctggtttagctgggatagctggttcagcatggctacctgttgagggccaaagagtggattcaggccaccgttgtttggtgcatacttcagcaatgaaactggaaccttaggatcacaatggtaagttaatgatcttgataaaataactcacactaactacacgtactgtgtgttttcagttgtcaatagagcagttaaatttgtggactattcattgggggttatagtctttgtctctgtcttactaactgaccactcacttacactttttcgtgggttaagtaaaagatgacagaggtgcatcttaaactagtcaattttactttgcttttgtcctactctcaagaatgttttaaagaagaaaatggtaaattttggatttaaattatccttgacttttccttactacaaccttttttaatagttaattcaaaactagctgaatctcaaagatgccaataaatatgataatgcttagttagccattttattcaaatacaaaatcatgcaagatcctttttgcaggtaaacaggagaaygtaaggaaagcttatttacctgaggggagagtaatggaggaggcacttgagcacggagattaggctgagatgaactaagaggttgtgctggaggctgctgcatgccccggggttgtgctgctgtgtttccaacaccaaacatactgggattgccattctataaaaacaaacagcaacaagtaacagtgggattctttagggacaaacatctcattaccacactgtactatgatttaaacacagtaactacatgtaagagagatcttattactaatacaaatcattcaactgagagcctaaaatacacatctggacttacctgtctaacagaattcaagttttgcatacccagccctgctatggagccaagggcctggttaggtagtgcactatttgaagggggaagcttcatgctttgactggacataaactgcatgttttgggattcatctgctacaatgccatcctgattggacagacagaaagatgtgcaacaccagccaagcaaacaagtggaagggagaaatcattgcaggaacagaagagaagtcacatgacattccagcatcaacaggaaacaggtagaaaacagaagagatcggattagtgttaattctagagcacacaaaaagagccaaacatatttcatgggattaagaagaaaaatataaatgcaacctctatgataaattgagacataaaaagacagtgaacttcaaaatccagtaataagatttggtagtggattgtaacactttatattatataaaaggttttaaaatattagtgtgaaaattacgctatgaagtatactggtttatcaagtcagaggtaaaagtaaaaaaccttaccttatcaaaataaggattgcgctccatggaagactctttggaaatctgaggccgagaaccagggcctttcccgaccgttcgattgtaatcaccaatatttaggctatgtttatctatctccattcgtttgtcttgtaacattcctaataaaggcaggagactgttatcaaacaggaagacaacccaattggtttcagataaatttacaacaaaagcaaaacactcactttcca

SEQ ID NO: 711374 - DNA, 1689 bp, Homo sapiens
tacaggcgcccgacaccacgcccagctaaggtttttgcatttatttttttattttttttgtagggacgggctttcaccgtgttagccaggacggtctcgatctcctgccctcgtgatgcacccgcctgagcctcccgaagtgctcggattacaggcatgagccaccatgcacggcccagaaatggagatttttgagcaaacacattaaagaaaagaaacgcaaatagacgaaactcattttaacatttttatttaacccaaggaatacagatataatcaacaccaatacaattgatgtcacaatgatgactaagatacatgctacaatccttcattctcagatgcaaaatctagtatgtgttttacagcaaacgtcagttggaaactgaacgtcgatcacacatgcttgatgtgcatgtcaatttcatgagagttacaatctcaggagaagtctcacatagcgtaagagtccaaacataccttcaagtgtttcgacaagttcttcactactcattcttagaactgaatttaccaacaacaatcccagcctattcattgctgaactgcatcccattgaaagaatgggtcacagttcctctctctagacactgtggaacgacattgaaggcccttccatcttttggcgattgtgaggacaggtgctagaagcctctgccctcagccttgtccacgtgagttctaattcctttagaacaactatctcagggtgggaaagatggttccaatgctaagtgcctattgcattgattatgaatcaatgaaactctttctccctgggggttgtcccagttggattccaagcagcactgtcagagtgttccagcttctccacatgctccgcagcccttgggatggtgagtgattgtcacggtggcttctgggagagcttcttggttgttgttgaaggtgtatttgacgtgcatttccccaggggagggacagtgaacgctttttgaagtggttctttacatcccctttgaggaaatgtctgctcaagtctctggctgggttttgaacagaatcatttgtttgtyccattggagttttgacaactctgtgtattctgagtatgagcagtccttgcacgtatatgagatttgcaaatattttgtgccccaatctcaaggttgctctttgatacaaatcaagagcatctgaggcagagcaaaggttcaggtgagaggacggagcatttctccacctctccagcatgcgcagcatctctctcctccgagatgccgagacatgtgtgcagggagacaccatgaaaaagcaggtgtgcttcattctgaatagagcgtctctgattcccgtctggtgcctgagggtgcatggcccatgagccttagaagagacgtcttcgggccttgcacgttggcctccatagaaacttgtggcaaattctgggctccggactgggtgatggaggtagaggtctgagggcagaggtgggcaggggctccaggccgtggagatccaagtggaattcttcaggcagagcctgtctccagggactaggcttgggcatttgggatgagccctgggggacggccgctctgtagtcaggtttgaggtagaggacacgccaggaagaagggctgactccatgcacaaggtttgctgggggtcccatcaggggcaggaagccttggggagcctcaccctctt

SEQ ID NO: 711375 - DNA, 1084 bp, Homo sapiens
acaaacaaaaactaaaccaaacaaaaaaagactagctgttattcatttatttatttatttatttagagacggagtctcgctctgtcacccaggctggagtgcagyggcacaatcttggctcactgcaacctctgcctcccaggttcatgtgattctcccgcctcagcctccccagctgttgttattcatgaatgaacctcagagaaagcacacaggagggttggtgcacctgtgttttgagttctacccctccttcctctcttaacttcctcctgtcttctcactctgattcgttcttccttcctctccctctctctctgcaggttataaccatcggtcctggatctccaccaccagcagtgagtaaacatggccctgaagtccctatgccctgggaattcttcctccctaagcctgccttccaggaggaaagtatcccccattccctaggttctcatccccacagaaactccagaatagcaaaagtctcaggctgagccaaggcacagatgccagtgctcaccaagagtcctattctcccctcgctaaatgataggacccaacaaacccgattcacgctgcgttttctttcagctccgatgacctccatgttctctccaaggcctctcgtatctgtgagccccacccccagcgctacaggtaggaatctggcttccagctcccatgaaacgtcggctgccattcagtggctgattaattgctgtgtggtctgagtcctgatgcccaccaagtctcagcgtgttcccctctgtccaatctcatccaacaatttaagctaatgcttgtttaatgatgtcctcactataccaccttggacactttctttttgcctggatttaaagcttccatttctttccttccttccttcttttcttccttccttccttccttccttccttccttccttccttccttccttccttccttccttcctccttccttccttcctttcttcctttcttcctgtctttttctttctttccttcttttggcagagtctcactctgtcgcccaggctggagtgcaatggtgcaatctcggttcactgcaacctctgcctccc

SEQ ID NO: 711376 - DNA, 574 bp, Homo sapiens
gcagatatctttgcttatccctgtccccttccaggtctgtccccaacaggcaccacaccggggtggactccctgtgtaacttctcgccactggctcggagagtagacagagttgccatctatgaggaatttctgcggatgacccggaatggtacccagctgcagaacttcaccctggacaggagcagtgtccttgtggatggtaaagctccctgggtcattgggactgaggtggaagctcccacttcctcacctgggtccttccctgggaatctgaaggcttggggttgattcgtcatcgagctttctcagactgggagaaagtggcttagttctcctaagctttacccatcattgaaggaaagaaaaggacgccygagggatatgggaggcatttgccctcttctggccagctctgtgacctcaggctagtcacatctcctttctggacttcttatctctctgtacttagcaagccacttggtttttggttcccatcttgcctgccctagatggtattgctcctccacccccaggcagctgcagtgttaaacaattaccctgattagttattg

SEQ ID NO: 711377 - DNA, 546 bp, Homo sapiens
tctctctcctcctgggccagccccagttcaggcatcatcccgtctcaactgcaccgccactgcagccctacctgacctcgtggagaccttctccattcagctgggatgtttttggctaccaacgacggaaacggtcactaaactagcacataaaatgaagggcatttgggcctggcgccgtggctcaagcttgtaatcccagcactttgggaggctgaggcaggcagatcacttgaggtcaggagctcaagaccagcctggccaacatggagaaaccccatctgcactaaatatacaaaaaattagctgggyatggtggcacacgcctataatcccagctactcgggaggctgagacaggagaatcacttgaacctgggagacagaggttgcagtgagccaagactgtgccactgcactcctgcctgggtgacagagcgagacaccgcctcaaaaaaaaaaaaaaaggaatttattattttaattcctcaaggctcctgccctagcgggggaaaaaccataacatctttattaattcactgcctgg

SEQ ID NO: 711378 - DNA, 546 bp, Homo sapiens
tctctctcctcctgggccagccccagttcaggcatcatcccgtctcaactgcaccgccactgcagccctacctgacctcgtggagaccttctccattcagctgggatgtttttggctaccaacgacggaaacggtcactaaactagcacataaaatgaagggcatttgggcctggcgccgtggctcaagcttgtaatcccagcactttgggaggctgaggcaggcagatcacttgaggtcaggagctcaagaccagcctggccaacatggagaaaccccatctgcactaaatatacaaaaaattagctgggtatggtggcacacgcctrtaatcccagctactcgggaggctgagacaggagaatcacttgaacctgggagacagaggttgcagtgagccaagactgtgccactgcactcctgcctgggtgacagagcgagacaccgcctcaaaaaaaaaaaaaaaggaatttattattttaattcctcaaggctcctgccctagcgggggaaaaaccataacatctttattaattcactgcctgg

SEQ ID NO: 711379 - DNA, 382 bp, Homo sapiens
tgccctgaaagagcggggtcccatttaacaagaagacatcccctttaaaaggccgcgccacacccgttcagcaggctggacctcccctttaaggggatgctgccactggagccccatctccacttttgttgagctaaaccagggatcgctttgaagcaaccaggactcaggagtttttgcttcaatgtctgggaaacggtcactggcctttaatgagataaccgccttttaggggaaaaacattgttttaagtcagaaagcttctgtaaaaatgcaaagcctgacccgccctctcaatgtrgccccttgccctttaagagggcggacccggcctagctggcaaatgtcggaggtgaaatagtgactcccctttaaggtaccc

SEQ ID NO: 711380 - DNA, 382 bp, Homo sapiens
tgccctgaaagagcggggtcccatttaacaagaagacatcccctttaaaaggccgcgccacacccgttcagcaggctggacctcccctttaaggggatgctgccactggagccccatctccacttttgttgagctaaaccagggatcgctttgaagcaaccaggactcaggagtttttgcttcaatgtctgggaaacggtcactggcctttaatgagataaccgccttttaggggaaaaacattgttttaagtcagaaagcttctgtaaaaatgcaaagcctgacccgccctctcaatgtggccccttgccctttaagagggcggacccggcctagctggcaaawgtcggaggtgaaatagtgactcccctttaaggtaccc

SEQ ID NO: 711381 - DNA, 2587 bp, Homo sapiens
tccccaccgccctgggcattgcctctgaggctccccgcccgacgccatggcctcacatccaatgcagtgtgaccagatcacttggcgcctgatccccggatgacagggaacacagctgggaagtaaagactgtggtggtcccagctccagagatggaggttggggcttggggccagtgcagagctggtgatcgtaaccattcctgtttctgctgctgttaccacagtgagcaagactccatgccctgctctctggccccttgggagtgagccctggatgccctgggcttcctcaagctcccaggactcaggaatagcggtgactggagcaggaggagatggcagggcagaggggtcagaggccagaccagcaccttgaggctggggtgtgctgtgtgcaggagcagcctgggatcttgtttctgtggtaactgcagggaggagaccagggcagggagggcccctgggaggccgggcacacctgggtcttgttttcctgatatcctcaggctattgcagttcttggcatcatcatggggttcacctgagactgtgagtcactttccaactcctgtacccatcgccggactccttctcggagattgccaccctggtagtgccgacagcagctgtgagcgtggaaactgccctgtctttagtccaacagagtgtccactgcacagtcacagtgccaggatcccagggagtggggacatgtggctgagtacttcctgccatgggcagcatcacttacctagctccagaggggcccagggttggcgactcacccagcctcccccagccccaggagctcatccacactgtcccagctctagtcccagggccctgccttgccgacagctgataacgcaaggccccaatcacgtcttagcaagcagaggccccgcccaccccagggacagctaaagccactgagtcactctccaaaagctggctgagccccagcagcccctaggaggcctccaccagccaggattagcaagttgtgacgcattggaccttttttttttttttttttttttttgagatagagtctaactctgttccccaggctggagtgcagtggtgcaatcttgggtcactgcaacctccatctcctaggttcaagcaattctcctgcctcagcctcctgagtagctaggattacaggtgtgcaccaycatgcccagctaatttttgtatttttagtagggacggggtttcaccatgttggccaggctggtctcaaactcctgacctcagatgatccgcctgccttggcctcctaaagtgctgggattacaggcgtgagccaccgtgcccggcctagacactcagtgtgcacacacctcctcagcatcttccggggattaaactctcagcatgagcaagaaaaatcaaatttcctttttgttttttttgagacggagtctcgctctgtcacccaggctggagtgcagtggcgccatctcggcacactgcaagctccgccccctgggttcacgccattctcctgcctcagcctcccgagtagctgggaatacaggcgcccgccaccacgcctggctactttttttgtatttttaatagagacggggtttcaccgtgttagccaggatggtctcgatcttctgaccttgtgatccgcccgcctcggcctcccaaagtgctgggattacaggcgtgagccaccgcgcatggctgaaaaatcaaatttcactgtgtgcatggaagtcagcagcttccaggtcccctctcacctcctgaaacattcctgttggtctccaaacatggacgtcttcctggggaccctgtaggacaaggaggcagtgagcgcagggcagtggcagcagcacccaccccgaagctggacaaacctcagctctgtctcatgtgagctgtgtggccttagacccgatgatcaacctctctgagcctgtttccttaccacacatccctctaagaacctggatccatgggataagcatgtggtacactcagtgcagtgccgtcctgttagcacctcccctaactacttaccataaggctccaagatcctgccagggagcctgaaaacttgggatctgttctagatgggttcccttatactcaacgcacattcattcatttattcattgagtgagctaggctctggtcttcatcctgggggaaaaaggaacacatggttcctacctccaggtcctcgctgcccagtgcaggagaaagaccctgtgagagatgcaatagttatccactgctgtgtaacaagtgaccccaaatgtagccatttaaaacaacaaacgtattatctctatttattatgtattaattcttatggatcaggaattcaggagcagcttagctgggtgtttctgcctggggatctttgctgaggttgcagtcaaggtgttggctgttgctgtcttcatctgaaggctctactggggctggaagatttgtttccaaattggctccctcacatggctgttggcaggaggcctcagttgctcaccacatggacttctccatagggactacttgagtgttcttacaacatggcggctggcttcctctcacagtgagcaatt

SEQ ID NO: 711382 - DNA, 2587 bp, Homo sapiens
tccccaccgccctgggcattgcctctgaggctccccgcccgacgccatggcctcacatccaatgcagtgtgaccagatcacttggcgcctgatccccggatgacagggaacacagctgggaagtaaagactgtggtggtcccagctccagagatggaggttggggcttggggccagtgcagagctggtgatcgtaaccattcctgtttctgctgctgttaccacagtgagcaagactccatgccctgctctctggccccttgggagtgagccctggatgccctgggcttcctcaagctcccaggactcaggaatagcggtgactggagcaggaggagatggcagggcagaggggtcagaggccagaccagcaccttgaggctggggtgtgctgtgtgcaggagcagcctgggatcttgtttctgtggtaactgcagggaggagaccagggcagggagggcccctgggaggccgggcacacctgggtcttgttttcctgatatcctcaggctattgcagttcttggcatcatcatggggttcacctgagactgtgagtcactttccaactcctgtacccatcgccggactccttctcggagattgccaccctggtagtgccgacagcagctgtgagcgtggaaactgccctgtctttagtccaacagagtgtccactgcacagtcacagtgccaggatcccagggagtggggacatgtggctgagtacttcctgccatgggcagcatcacttacctagctccagaggggcccagggttggcgactcacccagcctcccccagccccaggagctcatccacactgtcccagctctagtcccagggccctgccttgccgacagctgataacgcaaggccccaatcacgtcttagcaagcagaggccccgcccaccccagggacagctaaagccactgagtcactctccaaaagctggctgagccccagcagcccctaggaggcctccaccagccaggattagcaagttgtgacgcattggaccttttttttttttttttttttttttgagatagagtctaactctgttccccaggctggagtgcagtggtgcaatcttgggtcactgcaacctccatctcctaggttcaagcaattctcctgcctcagcctcctgagtagctaggattacaggtgtgcaccatcatgcccagctaatttttgtatttttagtagggacggggtttcaccatgttggccaggctggtctcaaactcctgacctcagrtgatccgcctgccttggcctcctaaagtgctgggattacaggcgtgagccaccgtgcccggcctagacactcagtgtgcacacacctcctcagcatcttccggggattaaactctcagcatgagcaagaaaaatcaaatttcctttttgttttttttgagacggagtctcgctctgtcacccaggctggagtgcagtggcgccatctcggcacactgcaagctccgccccctgggttcacgccattctcctgcctcagcctcccgagtagctgggaatacaggcgcccgccaccacgcctggctactttttttgtatttttaatagagacggggtttcaccgtgttagccaggatggtctcgatcttctgaccttgtgatccgcccgcctcggcctcccaaagtgctgggattacaggcgtgagccaccgcgcatggctgaaaaatcaaatttcactgtgtgcatggaagtcagcagcttccaggtcccctctcacctcctgaaacattcctgttggtctccaaacatggacgtcttcctggggaccctgtaggacaaggaggcagtgagcgcagggcagtggcagcagcacccaccccgaagctggacaaacctcagctctgtctcatgtgagctgtgtggccttagacccgatgatcaacctctctgagcctgtttccttaccacacatccctctaagaacctggatccatgggataagcatgtggtacactcagtgcagtgccgtcctgttagcacctcccctaactacttaccataaggctccaagatcctgccagggagcctgaaaacttgggatctgttctagatgggttcccttatactcaacgcacattcattcatttattcattgagtgagctaggctctggtcttcatcctgggggaaaaaggaacacatggttcctacctccaggtcctcgctgcccagtgcaggagaaagaccctgtgagagatgcaatagttatccactgctgtgtaacaagtgaccccaaatgtagccatttaaaacaacaaacgtattatctctatttattatgtattaattcttatggatcaggaattcaggagcagcttagctgggtgtttctgcctggggatctttgctgaggttgcagtcaaggtgttggctgttgctgtcttcatctgaaggctctactggggctggaagatttgtttccaaattggctccctcacatggctgttggcaggaggcctcagttgctcaccacatggacttctccatagggactacttgagtgttcttacaacatggcggctggcttcctctcacagtgagcaatt

SEQ ID NO: 711383 - DNA, 2587 bp, Homo sapiens
tccccaccgccctgggcattgcctctgaggctccccgcccgacgccatggcctcacatccaatgcagtgtgaccagatcacttggcgcctgatccccggatgacagggaacacagctgggaagtaaagactgtggtggtcccagctccagagatggaggttggggcttggggccagtgcagagctggtgatcgtaaccattcctgtttctgctgctgttaccacagtgagcaagactccatgccctgctctctggccccttgggagtgagccctggatgccctgggcttcctcaagctcccaggactcaggaatagcggtgactggagcaggaggagatggcagggcagaggggtcagaggccagaccagcaccttgaggctggggtgtgctgtgtgcaggagcagcctgggatcttgtttctgtggtaactgcagggaggagaccagggcagggagggcccctgggaggccgggcacacctgggtcttgttttcctgatatcctcaggctattgcagttcttggcatcatcatggggttcacctgagactgtgagtcactttccaactcctgtacccatcgccggactccttctcggagattgccaccctggtagtgccgacagcagctgtgagcgtggaaactgccctgtctttagtccaacagagtgtccactgcacagtcacagtgccaggatcccagggagtggggacatgtggctgagtacttcctgccatgggcagcatcacttacctagctccagaggggcccagggttggcgactcacccagcctcccccagccccaggagctcatccacactgtcccagctctagtcccagggccctgccttgccgacagctgataacgcaaggccccaatcacgtcttagcaagcagaggccccgcccaccccagggacagctaaagccactgagtcactctccaaaagctggctgagccccagcagcccctaggaggcctccaccagccaggattagcaagttgtgacgcattggaccttttttttttttttttttttttttgagatagagtctaactctgttccccaggctggagtgcagtggtgcaatcttgggtcactgcaacctccatctcctaggttcaagcaattctcctgcctcagcctcctgagtagctaggattacaggtgtgcaccatcatgcccagctaatttttgtatttttagtagggacggggtttcaccatgttggccaggctggtctcaaactcctgacctcagatgatccgcctgccttggcctcctaaagtgctgggattacaggcrtgagccaccgtgcccggcctagacactcagtgtgcacacacctcctcagcatcttccggggattaaactctcagcatgagcaagaaaaatcaaatttcctttttgttttttttgagacggagtctcgctctgtcacccaggctggagtgcagtggcgccatctcggcacactgcaagctccgccccctgggttcacgccattctcctgcctcagcctcccgagtagctgggaatacaggcgcccgccaccacgcctggctactttttttgtatttttaatagagacggggtttcaccgtgttagccaggatggtctcgatcttctgaccttgtgatccgcccgcctcggcctcccaaagtgctgggattacaggcgtgagccaccgcgcatggctgaaaaatcaaatttcactgtgtgcatggaagtcagcagcttccaggtcccctctcacctcctgaaacattcctgttggtctccaaacatggacgtcttcctggggaccctgtaggacaaggaggcagtgagcgcagggcagtggcagcagcacccaccccgaagctggacaaacctcagctctgtctcatgtgagctgtgtggccttagacccgatgatcaacctctctgagcctgtttccttaccacacatccctctaagaacctggatccatgggataagcatgtggtacactcagtgcagtgccgtcctgttagcacctcccctaactacttaccataaggctccaagatcctgccagggagcctgaaaacttgggatctgttctagatgggttcccttatactcaacgcacattcattcatttattcattgagtgagctaggctctggtcttcatcctgggggaaaaaggaacacatggttcctacctccaggtcctcgctgcccagtgcaggagaaagaccctgtgagagatgcaatagttatccactgctgtgtaacaagtgaccccaaatgtagccatttaaaacaacaaacgtattatctctatttattatgtattaattcttatggatcaggaattcaggagcagcttagctgggtgtttctgcctggggatctttgctgaggttgcagtcaaggtgttggctgttgctgtcttcatctgaaggctctactggggctggaagatttgtttccaaattggctccctcacatggctgttggcaggaggcctcagttgctcaccacatggacttctccatagggactacttgagtgttcttacaacatggcggctggcttcctctcacagtgagcaatt

SEQ ID NO: 711384 - DNA, 2587 bp, Homo sapiens
tccccaccgccctgggcattgcctctgaggctccccgcccgacgccatggcctcacatccaatgcagtgtgaccagatcacttggcgcctgatccccggatgacagggaacacagctgggaagtaaagactgtggtggtcccagctccagagatggaggttggggcttggggccagtgcagagctggtgatcgtaaccattcctgtttctgctgctgttaccacagtgagcaagactccatgccctgctctctggccccttgggagtgagccctggatgccctgggcttcctcaagctcccaggactcaggaatagcggtgactggagcaggaggagatggcagggcagaggggtcagaggccagaccagcaccttgaggctggggtgtgctgtgtgcaggagcagcctgggatcttgtttctgtggtaactgcagggaggagaccagggcagggagggcccctgggaggccgggcacacctgggtcttgttttcctgatatcctcaggctattgcagttcttggcatcatcatggggttcacctgagactgtgagtcactttccaactcctgtacccatcgccggactccttctcggagattgccaccctggtagtgccgacagcagctgtgagcgtggaaactgccctgtctttagtccaacagagtgtccactgcacagtcacagtgccaggatcccagggagtggggacatgtggctgagtacttcctgccatgggcagcatcacttacctagctccagaggggcccagggttggcgactcacccagcctcccccagccccaggagctcatccacactgtcccagctctagtcccagggccctgccttgccgacagctgataacgcaaggccccaatcacgtcttagcaagcagaggccccgcccaccccagggacagctaaagccactgagtcactctccaaaagctggctgagccccagcagcccctaggaggcctccaccagccaggattagcaagttgtgacgcattggaccttttttttttttttttttttttttgagatagagtctaactctgttccccaggctggagtgcagtggtgcaatcttgggtcactgcaacctccatctcctaggttcaagcaattctcctgcctcagcctcctgagtagctaggattacaggtgtgcaccatcatgcccagctaatttttgtatttttagtagggacggggtttcaccatgttggccaggctggtctcaaactcctgacctcagatgatccgcctgccttggcctcctaaagtgctgggattacaggcgtgagccaccgtgcccrgcctagacactcagtgtgcacacacctcctcagcatcttccggggattaaactctcagcatgagcaagaaaaatcaaatttcctttttgttttttttgagacggagtctcgctctgtcacccaggctggagtgcagtggcgccatctcggcacactgcaagctccgccccctgggttcacgccattctcctgcctcagcctcccgagtagctgggaatacaggcgcccgccaccacgcctggctactttttttgtatttttaatagagacggggtttcaccgtgttagccaggatggtctcgatcttctgaccttgtgatccgcccgcctcggcctcccaaagtgctgggattacaggcgtgagccaccgcgcatggctgaaaaatcaaatttcactgtgtgcatggaagtcagcagcttccaggtcccctctcacctcctgaaacattcctgttggtctccaaacatggacgtcttcctggggaccctgtaggacaaggaggcagtgagcgcagggcagtggcagcagcacccaccccgaagctggacaaacctcagctctgtctcatgtgagctgtgtggccttagacccgatgatcaacctctctgagcctgtttccttaccacacatccctctaagaacctggatccatgggataagcatgtggtacactcagtgcagtgccgtcctgttagcacctcccctaactacttaccataaggctccaagatcctgccagggagcctgaaaacttgggatctgttctagatgggttcccttatactcaacgcacattcattcatttattcattgagtgagctaggctctggtcttcatcctgggggaaaaaggaacacatggttcctacctccaggtcctcgctgcccagtgcaggagaaagaccctgtgagagatgcaatagttatccactgctgtgtaacaagtgaccccaaatgtagccatttaaaacaacaaacgtattatctctatttattatgtattaattcttatggatcaggaattcaggagcagcttagctgggtgtttctgcctggggatctttgctgaggttgcagtcaaggtgttggctgttgctgtcttcatctgaaggctctactggggctggaagatttgtttccaaattggctccctcacatggctgttggcaggaggcctcagttgctcaccacatggacttctccatagggactacttgagtgttcttacaacatggcggctggcttcctctcacagtgagcaatt

SEQ ID NO: 711385 - DNA, 2654 bp, Homo sapiens
tgaaactaatttatgcaaagcacactttaccagaaaaacattccacaaataaaagaaataaaacctttagggcatattagaaattgtgtattgaagttatcctcacccaggaagaccaggtttctgtagttctctaacatcacatttctatataaattccgctgtgcagtgtccaggcattgccactccttcagagagaattctatggccacatccctaaatgtcaatggtccctgaaagatacacacacatacacatacacacacacacacacacacacacacacacacacacacacataattaccaactggttatgaaaagcatttttaattttactcaaggtgaaatgagagagtacaggtaactgtttctgacttacaggagtgactaaaattataaaataaaataatttttttaacacagaaatattctctaatatattttttaactctaagaaaagagagtggcataagatccacaataccagtgtatacatgatacttttctggatgatatagtataaaattaagggcataaaaatgtgtatttttggatgccatatacacattctacagaatgagttgtgtatatttttcagatggaaaagacaggttgagttagaaggtactttttaaattttaatgtgtacaataaactggagaacttgttaatgcagattattttttcagatgatctggaataaagtctgattgtctgaatttctaacaagctcaccagtaaggttaatgtttttggccaagaagaatattttgtcaaacatccagtaaggggaagaacctgtgtttttcctaatttttctggcctgtaaacaaagataagagctttgactttccaaagacagatgtatgcaaaaaaaaaaaactaagaaaaaagggcagctgctggattaactgtgatggtttatgcacattagctgcattaagataataatgaagaaaaaataattatctctatagtgacaaaatctgtcagagagctctttaaccaagtgaatcattaacatgaactgcactaggacaaattttttttttttttttttttgagacggagtctcgctctgctgcccaggctggagtgcagtggtgcaatctcagctcactgcaagctccgcctcctgggttcacggcattctcccgcctcagcctcccaagtagctggggccacaggtgcccaccaccatgcccggctaattttttttttttttgtatttttagtagagacggggtttcaccattcccaggatggtctagatctcctgaccttgtgatctgcctgccttagcctcccaaagtgctgggattacaggctgagccaccgcgcccatcctaggacatatttttatgatgtgttgatgcacatgaaatgacacagcatcacggctgtgatactgctcctccaaactatagtctgaattttaacattaaaaaatcagttttatgcaaagttcaggatacagatatcttccctgtctataatttgtaatagtaattttaaatcatctttctttagcaccctagagagcaggtatctcctgataattttttttttagaactttctgggtaataaatgtcatcttgtttaactaagcatttccttgatcctgttttgcacagaggtaatggagaatacagatggaacctcaacattacatgttttccatctttacaaatgactccagcyttcccccaatagaaatcttgagtatccacaccttttcatgttcaagagccacaaagggaacatttttaatagtgcagattataaatttgtggtaggaattctgcatggcatataaaaagccacaatgtaaagaatgtagaaagggctctggtatatagaaaaaaaatacttttcagacacccttgactatcataagaatttttacaagtagttaaactctttagggaggggtaatacaatagagaagtaatgatttgcatggcattctaggaggcaaagtggacacagctcttgatctgagacatgttttgctttaaaaaaagaagccatttttttcctctttttcctccttttctgggaatcctttccagatgagattctttgaacaaattacagctgcatgttgagaatatgtctttaaagatgtcaacatcaactgctcatctgctaccaccagacccacaggcagaaggatcaagacctgcagaaaaagctcactcatttatgtcctttataatggaagagattcaggaacaatgagctgctccatgggtatcaaaatatgtttcacttttcctgttctcaggtgccctcccctgtcacagacaccagcaatttctgctacaataatgaaaatatgggccatggccgggcttggtggctcacgcctataatcccagtactttgggaggccgaggcaggcagatcctgaggtcagaagattgagaccatcctggctaacacgatgaaacagcatctctactaaaaatagaaaaaattagccaggcgtggtggcatgtgcctgtagtcccaactactcgggaggctgaagcaagagaatcgcttgaacccagcaggcagaggttgcagtaagccgagattgcaccactgcactccagtgaaactgcacctcaaaaaaaaaaaaaaaaaaagaaaaagaaaaagaaaaa

SEQ ID NO: 711386 - DNA, 635 bp, Homo sapiens
tgttcccactgtgatgaatgagtgtgtgacagtggacagtttcccactgtggtgaatgagtggttgagagtgaacaggttctcactgtggagagtgagtggttgacagtgaacaatatctgactgtgatgaatatgtggttgacagtgaacaggttcctcctgtaatgaatgggtttgtgacagtaaacaggtacccactgcaatgagtgagtgggcgacagtgaagaggttcccactgtggtgaatgagagggtggcagtgaacatgttcccagtttgataaatgattgggtgacagtgaacatgttcccactgtgataagtgaatggctgacagtaaacaggtaaccactgtggtgactgtgtggctgacagtgtgcaggtttctactgcagtgaacaaatgggtgacagtgaactgtttccactgtggtgaatgagtggctgacagtgaacaggttcccactctggtgaatgaatggttgacagtgaacaggtttctactgtggtgaacgagtgggtgacagtgattaggttcctcctgtaatgaatgagtggrtgacagtgatctggcaccctctgtgatgagtgagtggctgacagtgaacaggataccactgtgatgtgtgagtgggtg

SEQ ID NO: 711387 - DNA, 3139 bp, Homo sapiens
agggaaggagggaaggagagaaagagaggaaggaaggaagggtccaaacccactgcctgaagcaacacctgctgcctgctgcagggtccatcattcaatcgttttaacagtgacactaaaactagatggggaaagtgtgacagtcagtatgtagaggtaattcaaactcaaacgcaacagctcaaattgatgagcagagaaagcacaccaagtaggtacacaggtggtctcaatgaattcatttagataatatacgggactttggaacaggtccaaggtcatgatgcttgcacattgctccatgagtcttaaagatgtagccttctaagttgaacatctgatatcaacctataatatgttccaaaaccttcccaagacctactcttctggggccaactttatcacctagtgttgaaatagtgtttttcaatgaattctttattaaacttgtttcttgacatatgacctgtcaaccaagcgggctgctgtctcctaaaatatagatctggcttttctaagtcccacaccttgactgggcactgctttgggaaaggtttctcttttgatggatatttttttgctgaaatagatcaagtcctttcagtctgtcttcttgtcatccctgaagcatttatgccttgcttaagcccttcattataatcagctgtccttagcttgctatttcctgcaagggctttgcctcaatcatagatgcattagaacaattgcccttttagctgtggaccaagttatctttggggtgccctatgtaaatgagaacacttgaaaatgctaatttataatgagccaaaaattgataacaatatctctatgagtgaactggtgagaaggccaaatggatggacgagagagaacgtggctgggaaaaaggagtgagctcatcaaaagcacggacaggaaaaaagtgaagacagagaaacatgggcaggtcatgattgccactggggggtggttcgaggcaggagagcaagagaaaaagaataatgttttgttactgtcctgacagccatgtaacgaatataagacttgaagtccccaaggggaaaaagtggatctgattagaataactgatgtgataaaggatggggaaaaattgtgtacataagaaaagcacagccgagcgtggtggcttgcacctataatcccagcactttaggaggccgaggtgggtgaatcacctgaggtcagaagtttgagaccagcctggccaacatggtgaaaccctgtctctactaaaaatgtaaaaattagctgggcatggtggtgtgcccctgtaatcctagctacttgggaggctgaggtgggagaattgcttgaacctgggaggtgagcctgcagtgagctgagcctgggcgacacagcaagaccctgtctcaaaaaaaaaaaaaaagaaaaagaaaagcaggccaggtgcagtggctcactccagtaattccaacactttgggaggttgaggcaggtggatagcctaaggccaggagttcgagaccagcctggcccacatggtgaaaccccatctctactaaaaatacaaaaataaaaaataaaattagtcggccatggtggcagatgcctgtaatcccagcttcttgggaggctgagacacgagaatcacttgaacccaggaggcagaggctgcagtgagccaagatcataccactgcacttcagtctgggcaacagagcaagcctctatctcaaaaaaaagaagaaaagaaaatagtacaaaattaaaaggaagaagacattaaggcaattagaaatcctggggagtgtgagagaaggaaagctttcaagaaaaaaatataatcataatacatctgttggctcttcggtgaacaatatttaccagtgacataattataaataaccgtatcattgtatgagaaggatgggagacaggcagtataagagagctaaatccaccaccattgtttcagaatgtaaatagataatatctgaaactgatgcatctagaaatacatggccaggcacggtggctcattgctgtaatctgagcactttgggaggccaaggtgagtggatcacttgagccaaagagttaaagaccagcctgggcaacatggcaagaccctaactctataaaaaatttttttaaaaaattagctaggcctgctggcatgcgcctgtggtcccagctacttgggagactgcagtgggaggatcgcttgatcctgagagcgcaaagctgcagtgagcctgtttgtgctactgtgctccagcctgggtaatggttggagacctgtctccaaaagaaaagaaaggaagggagggagggaaagaaggaaggaaggagggaaggaaggaaggagggaaggaaggaaggaaggaaggaagtaaggaaggaaggaaggaaggaaggaaacataagaaagaaagaaggaaggaaggaaggaaggaaggaaagaaggaaggaaggaaggaaggaaagaaagaaagaagagagagaaagggagaaagaggtaaagaagcttgtgatttattcttttaactgatcaaagagtttaaaatttttacctccgctggtcatcccagctagtcaggaggcagaggcaggagaatcgcttgaacctggaaggcggaggttgcagtgacccgagatggcgccactgcactccaggtgggcaacagagcgagactccgtctcagaaaaaaaaaaaaaatttttacctccagaragcaggaaaggaggggaaacaagacattgttgcttttattacaaggtttttggtgccgcttaatttttttttttttttttttttttttagttagcatagaatttagtgtcagaaaaaaattttactgagcatttgcaccatgctaggtattttctacacattcatttaaatctcacaaccacaacaacaaaaacacttccctagtgcttactatgtgccaagtactgttctaaaagcttaacatttattatctcattccatctttgcaataactttatgttagtcttattttgcccactgaaccaatgaggaaactgaagcacagagggaacaagtaacttgcccaaggtcatgagattgagagtcgcggtgctgggacctgagcctgggtaacctggctccaaagtctgtgttcctaac

SEQ ID NO: 711388 - DNA, 3139 bp, Homo sapiens
agggaaggagggaaggagagaaagagaggaaggaaggaagggtccaaacccactgcctgaagcaacacctgctgcctgctgcagggtccatcattcaatcgttttaacagtgacactaaaactagatggggaaagtgtgacagtcagtatgtagaggtaattcaaactcaaacgcaacagctcaaattgatgagcagagaaagcacaccaagtaggtacacaggtggtctcaatgaattcatttagataatatacgggactttggaacaggtccaaggtcatgatgcttgcacattgctccatgagtcttaaagatgtagccttctaagttgaacatctgatatcaacctataatatgttccaaaaccttcccaagacctactcttctggggccaactttatcacctagtgttgaaatagtgtttttcaatgaattctttattaaacttgtttcttgacatatgacctgtcaaccaagcgggctgctgtctcctaaaatatagatctggcttttctaagtcccacaccttgactgggcactgctttgggaaaggtttctcttttgatggatatttttttgctgaaatagatcaagtcctttcagtctgtcttcttgtcatccctgaagcatttatgccttgcttaagcccttcattataatcagctgtccttagcttgctatttcctgcaagggctttgcctcaatcatagatgcattagaacaattgcccttttagctgtggaccaagttatctttggggtgccctatgtaaatgagaacacttgaaaatgctaatttataatgagccaaaaattgataacaatatctctatgagtgaactggtgagaaggccaaatggatggacgagagagaacgtggctgggaaaaaggagtgagctcatcaaaagcacggacaggaaaaaagtgaagacagagaaacatgggcaggtcatgattgccactggggggtggttcgaggcaggagagcaagagaaaaagaataatgttttgttactgtcctgacagccatgtaacgaatataagacttgaagtccccaaggggaaaaagtggatctgattagaataactgatgtgataaaggatggggaaaaattgtgtacataagaaaagcacagccgagcgtggtggcttgcacctataatcccagcactttaggaggccgaggtgggtgaatcacctgaggtcagaagtttgagaccagcctggccaacatggtgaaaccctgtctctactaaaaatgtaaaaattagctgggcatggtggtgtgcccctgtaatcctagctacttgggaggctgaggtgggagaattgcttgaacctgggaggtgagcctgcagtgagctgagcctgggcgacacagcaagaccctgtctcaaaaaaaaaaaaaaagaaaaagaaaagcaggccaggtgcagtggctcactccagtaattccaacactttgggaggttgaggcaggtggatagcctaaggccaggagttcgagaccagcctggcccacatggtgaaaccccatctctactaaaaatacaaaaataaaaaataaaattagtcggccatggtggcagatgcctgtaatcccagcttcttgggaggctgagacacgagaatcacttgaacccaggaggcagaggctgcagtgagccaagatcataccactgcacttcagtctgggcaacagagcaagcctctatctcaaaaaaaagaagaaaagaaaatagtacaaaattaaaaggaagaagacattaaggcaattagaaatcctggggagtgtgagagaaggaaagctttcaagaaaaaaatataatcataatacatctgttggctcttcggtgaacaatatttaccagtgacataattataaataaccgtatcattgtatgagaaggatgggagacaggcagtataagagagctaaatccaccaccattgtttcagaatgtaaatagataatatctgaaactgatgcatctagaaatacatggccaggcacggtggctcattgctgtaatctgagcactttgggaggccaaggtgagtggatcacttgagccaaagagttaaagaccagcctgggcaacatggcaagaccctaactctataaaaaatttttttaaaaaattagctaggcctgctggcatgcgcctgtggtcccagctacttgggagactgcagtgggaggatcgcttgatcctgagagcgcaaagctgcagtgagcctgtttgtgctactgtgctccagcctgggtaatggttggagacctgtctccaaaagaaaagaaaggaagggagggagggaaagaaggaaggaaggagggaaggaaggaaggagggaaggaaggaaggaaggaaggaagtaaggaaggaaggaaggaaggaaggaaacataagaaagaaagaaggaaggaaggaaggaaggaaggaaagaaggaaggaaggaaggaaggaaagaaagaaagaagagagagaaagggagaaagaggtaaagaagcttgtgatttattcttttaactgatcaaagagtttaaaatttttacctccgctggtcatcccagctagtcaggaggcagaggcaggagaatcgcttgaacctggaaggcggaggttgcagtgacccgagatggcgccactgcactccaggtgggcaacagagcgagactccgtctcagaaaaaaaaaaaaaatttttacctccagagagcaggaaaggaggggaaacaaracattgttgcttttattacaaggtttttggtgccgcttaatttttttttttttttttttttttttagttagcatagaatttagtgtcagaaaaaaattttactgagcatttgcaccatgctaggtattttctacacattcatttaaatctcacaaccacaacaacaaaaacacttccctagtgcttactatgtgccaagtactgttctaaaagcttaacatttattatctcattccatctttgcaataactttatgttagtcttattttgcccactgaaccaatgaggaaactgaagcacagagggaacaagtaacttgcccaaggtcatgagattgagagtcgcggtgctgggacctgagcctgggtaacctggctccaaagtctgtgttcctaac

SEQ ID NO: 711389 - DNA, 3139 bp, Homo sapiens
agggaaggagggaaggagagaaagagaggaaggaaggaagggtccaaacccactgcctgaagcaacacctgctgcctgctgcagggtccatcattcaatcgttttaacagtgacactaaaactagatggggaaagtgtgacagtcagtatgtagaggtaattcaaactcaaacgcaacagctcaaattgatgagcagagaaagcacaccaagtaggtacacaggtggtctcaatgaattcatttagataatatacgggactttggaacaggtccaaggtcatgatgcttgcacattgctccatgagtcttaaagatgtagccttctaagttgaacatctgatatcaacctataatatgttccaaaaccttcccaagacctactcttctggggccaactttatcacctagtgttgaaatagtgtttttcaatgaattctttattaaacttgtttcttgacatatgacctgtcaaccaagcgggctgctgtctcctaaaatatagatctggcttttctaagtcccacaccttgactgggcactgctttgggaaaggtttctcttttgatggatatttttttgctgaaatagatcaagtcctttcagtctgtcttcttgtcatccctgaagcatttatgccttgcttaagcccttcattataatcagctgtccttagcttgctatttcctgcaagggctttgcctcaatcatagatgcattagaacaattgcccttttagctgtggaccaagttatctttggggtgccctatgtaaatgagaacacttgaaaatgctaatttataatgagccaaaaattgataacaatatctctatgagtgaactggtgagaaggccaaatggatggacgagagagaacgtggctgggaaaaaggagtgagctcatcaaaagcacggacaggaaaaaagtgaagacagagaaacatgggcaggtcatgattgccactggggggtggttcgaggcaggagagcaagagaaaaagaataatgttttgttactgtcctgacagccatgtaacgaatataagacttgaagtccccaaggggaaaaagtggatctgattagaataactgatgtgataaaggatggggaaaaattgtgtacataagaaaagcacagccgagcgtggtggcttgcacctataatcccagcactttaggaggccgaggtgggtgaatcacctgaggtcagaagtttgagaccagcctggccaacatggtgaaaccctgtctctactaaaaatgtaaaaattagctgggcatggtggtgtgcccctgtaatcctagctacttgggaggctgaggtgggagaattgcttgaacctgggaggtgagcctgcagtgagctgagcctgggcgacacagcaagaccctgtctcaaaaaaaaaaaaaaagaaaaagaaaagcaggccaggtgcagtggctcactccagtaattccaacactttgggaggttgaggcaggtggatagcctaaggccaggagttcgagaccagcctggcccacatggtgaaaccccatctctactaaaaatacaaaaataaaaaataaaattagtcggccatggtggcagatgcctgtaatcccagcttcttgggaggctgagacacgagaatcacttgaacccaggaggcagaggctgcagtgagccaagatcataccactgcacttcagtctgggcaacagagcaagcctctatctcaaaaaaaagaagaaaagaaaatagtacaaaattaaaaggaagaagacattaaggcaattagaaatcctggggagtgtgagagaaggaaagctttcaagaaaaaaatataatcataatacatctgttggctcttcggtgaacaatatttaccagtgacataattataaataaccgtatcattgtatgagaaggatgggagacaggcagtataagagagctaaatccaccaccattgtttcagaatgtaaatagataatatctgaaactgatgcatctagaaatacatggccaggcacggtggctcattgctgtaatctgagcactttgggaggccaaggtgagtggatcacttgagccaaagagttaaagaccagcctgggcaacatggcaagaccctaactctataaaaaatttttttaaaaaattagctaggcctgctggcatgcgcctgtggtcccagctacttgggagactgcagtgggaggatcgcttgatcctgagagcgcaaagctgcagtgagcctgtttgtgctactgtgctccagcctgggtaatggttggagacctgtctccaaaagaaaagaaaggaagggagggagggaaagaaggaaggaaggagggaaggaaggaaggagggaaggaaggaaggaaggaaggaagtaaggaaggaaggaaggaaggaaggaaacataagaaagaaagaaggaaggaaggaaggaaggaaggaaagaaggaaggaaggaaggaaggaaagaaagaaagaagagagagaaagggagaaagaggtaaagaagcttgtgatttattcttttaactgatcaaagagtttaaaatttttacctccgctggtcatcccagctagtcaggaggcagaggcaggagaatcgcttgaacctggaaggcggaggttgcagtgacccgagatggcgccactgcactccaggtgggcaacagagcgagactccgtctcagaaaaaaaaaaaaaatttttacctccagagagcaggaaaggaggggaaacaagacattgttgcttttattacaaggtttttggtgcygcttaatttttttttttttttttttttttttagttagcatagaatttagtgtcagaaaaaaattttactgagcatttgcaccatgctaggtattttctacacattcatttaaatctcacaaccacaacaacaaaaacacttccctagtgcttactatgtgccaagtactgttctaaaagcttaacatttattatctcattccatctttgcaataactttatgttagtcttattttgcccactgaaccaatgaggaaactgaagcacagagggaacaagtaacttgcccaaggtcatgagattgagagtcgcggtgctgggacctgagcctgggtaacctggctccaaagtctgtgttcctaac

SEQ ID NO: 711390 - DNA, 3139 bp, Homo sapiens
agggaaggagggaaggagagaaagagaggaaggaaggaagggtccaaacccactgcctgaagcaacacctgctgcctgctgcagggtccatcattcaatcgttttaacagtgacactaaaactagatggggaaagtgtgacagtcagtatgtagaggtaattcaaactcaaacgcaacagctcaaattgatgagcagagaaagcacaccaagtaggtacacaggtggtctcaatgaattcatttagataatatacgggactttggaacaggtccaaggtcatgatgcttgcacattgctccatgagtcttaaagatgtagccttctaagttgaacatctgatatcaacctataatatgttccaaaaccttcccaagacctactcttctggggccaactttatcacctagtgttgaaatagtgtttttcaatgaattctttattaaacttgtttcttgacatatgacctgtcaaccaagcgggctgctgtctcctaaaatatagatctggcttttctaagtcccacaccttgactgggcactgctttgggaaaggtttctcttttgatggatatttttttgctgaaatagatcaagtcctttcagtctgtcttcttgtcatccctgaagcatttatgccttgcttaagcccttcattataatcagctgtccttagcttgctatttcctgcaagggctttgcctcaatcatagatgcattagaacaattgcccttttagctgtggaccaagttatctttggggtgccctatgtaaatgagaacacttgaaaatgctaatttataatgagccaaaaattgataacaatatctctatgagtgaactggtgagaaggccaaatggatggacgagagagaacgtggctgggaaaaaggagtgagctcatcaaaagcacggacaggaaaaaagtgaagacagagaaacatgggcaggtcatgattgccactggggggtggttcgaggcaggagagcaagagaaaaagaataatgttttgttactgtcctgacagccatgtaacgaatataagacttgaagtccccaaggggaaaaagtggatctgattagaataactgatgtgataaaggatggggaaaaattgtgtacataagaaaagcacagccgagcgtggtggcttgcacctataatcccagcactttaggaggccgaggtgggtgaatcacctgaggtcagaagtttgagaccagcctggccaacatggtgaaaccctgtctctactaaaaatgtaaaaattagctgggcatggtggtgtgcccctgtaatcctagctacttgggaggctgaggtgggagaattgcttgaacctgggaggtgagcctgcagtgagctgagcctgggcgacacagcaagaccctgtctcaaaaaaaaaaaaaaagaaaaagaaaagcaggccaggtgcagtggctcactccagtaattccaacactttgggaggttgaggcaggtggatagcctaaggccaggagttcgagaccagcctggcccacatggtgaaaccccatctctactaaaaatacaaaaataaaaaataaaattagtcggccatggtggcagatgcctgtaatcccagcttcttgggaggctgagacacgagaatcacttgaacccaggaggcagaggctgcagtgagccaagatcataccactgcacttcagtctgggcaacagagcaagcctctatctcaaaaaaaagaagaaaagaaaatagtacaaaattaaaaggaagaagacattaaggcaattagaaatcctggggagtgtgagagaaggaaagctttcaagaaaaaaatataatcataatacatctgttggctcttcggtgaacaatatttaccagtgacataattataaataaccgtatcattgtatgagaaggatgggagacaggcagtataagagagctaaatccaccaccattgtttcagaatgtaaatagataatatctgaaactgatgcatctagaaatacatggccaggcacggtggctcattgctgtaatctgagcactttgggaggccaaggtgagtggatcacttgagccaaagagttaaagaccagcctgggcaacatggcaagaccctaactctataaaaaatttttttaaaaaattagctaggcctgctggcatgcgcctgtggtcccagctacttgggagactgcagtgggaggatcgcttgatcctgagagcgcaaagctgcagtgagcctgtttgtgctactgtgctccagcctgggtaatggttggagacctgtctccaaaagaaaagaaaggaagggagggagggaaagaaggaaggaaggagggaaggaaggaaggagggaaggaaggaaggaaggaaggaagtaaggaaggaaggaaggaaggaaggaaacataagaaagaaagaaggaaggaaggaaggaaggaaggaaagaaggaaggaaggaaggaaggaaagaaagaaagaagagagagaaagggagaaagaggtaaagaagcttgtgatttattcttttaactgatcaaagagtttaaaatttttacctccgctggtcatcccagctagtcaggaggcagaggcaggagaatcgcttgaacctggaaggcggaggttgcagtgacccgagatggcgccactgcactccaggtgggcaacagagcgagactccgtctcagaaaaaaaaaaaaaatttttacctccagagagcaggaaaggaggggaaacaagacattgttgcttttattacaaggtttttggtgccgcttaatttttttttttttttttttttttttagttagcatagaatttagtgtcagaaaaaaattttactgagcatttgcaccatgctaggtattttctacacattcatttaaatctcacaaccacaacaayaaaaacacttccctagtgcttactatgtgccaagtactgttctaaaagcttaacatttattatctcattccatctttgcaataactttatgttagtcttattttgcccactgaaccaatgaggaaactgaagcacagagggaacaagtaacttgcccaaggtcatgagattgagagtcgcggtgctgggacctgagcctgggtaacctggctccaaagtctgtgttcctaac

SEQ ID NO: 711391 - DNA, 620 bp, Homo sapiens
acaaaaacagctttgggaaaactgcccccacgatccaattacctcccaagtccctccctcaacatgtggggattgcagtttgagatgagatttgggtggggacacagagccaaaccataccaactagcattgaatttgttttcaattattgatgaagaacatctcatgtataaaacagactggcactgtttcctctcctcactcctttcagtacatccatcctcgtgttgctgctttctcttgtggtcactgaaactcctgagcagtaagagtcctgacagcacagaaactgaccaatcagaatggacactggacttatcgctggagcaggaytgagacgttaacgttttgatcactggatccggaagagtgtggctcccaagggagggcagcagtggggagccactcagagggttcaagaaagcagctgttttccaactgatatggaaatagcttaatattttaacaagtgttacagtaatgccagtgtctgcctgtgccttgatctaaataataattgaaaatacctactatttattgagaattatgtggcagatactgtgatacatactgaataaacattatttcattccatttggtcattgttgaaaacatttcct

SEQ ID NO: 711392 - DNA, 990 bp, Homo sapiens
ggtgtgtgtggggaaaatagggggatgtatctgggaactggcaagttggaggctgcgtctggggtttggggtctctctgtgggggaactggaggcttgtctagggttcggggtcttcctttggtaggattgaaggcttgtctgggggatgtgtcagggcaatagggtgtaccccaccaatactgacccgatgtccttttcctagggtccccctggtcccattggctctctgggccaccctgggcccccaggtgtggcggtgagtatgcagggaatcttttgtgggatgaggtcactgtggtggtccaggccaggacctcagctctccctgtctgtaccctacagggccctctaggacagaaaggctcaaaagggtctccggtgagtacaccctgcttccgtgggcttacacatcccagctccccacccccttcactgcaccagaaccctccacgtctctgccttcatttatttatttattcatgcaatcgtgcgttcgacaaatatttattcaacacctacggttgtatttcatcagatccaaaatgccatcaattataagatgtaccattattttacaaactgctaggaaagaaaacagttctgccaagtaaactatgacttgccaaagatgttaagaagctgatttcagagacattaaaacatgaaaagaaaatttgtgtctgatgcctaatgctgaaaactgcatgtctcttccccaaggctgtatgtgtgtgtgtgagtgtgtgagtragtgtgtatgtgagtgtgtgagactgtgtgtgtgtgagtgtgtgtgtgagtgtgtgtgtgtgtttgtgtgtatgttggtgggaagggtctccatagacagggttcattctccaagtgacttctccctacaggggtccatgggcccccgtggagacactggacctgcaggcccaccaggccccccggtgagttccccggggggcgggggaatggacaccaaaacctggggggagagcaa

SEQ ID NO: 711393 - DNA, 575 bp, Homo sapiens
cactgcattgcagcctgggccacagagtgagaccttgtctcaatctaaaaaataaaaaaggagacgctaagtcctcagcagccttagagatctggctaaaggcaggggaagggaagtcacagaaggggaagaaccagatgagggctttatacgagccaggcctgtctgaaggcctgcatgaggcagacctaaggggtgcagccaggctagttggaaggggtacaagaaaggtgaggagcgtcacccttggggctgagggaccaagaatgaaggtagggggtgctgcccaggtgatcctgccccatgttgaccccagtggttggtccctattgaatccagagcagaaacaatcatttaaagagccctattggcccagaccgccaccctgctgaggccacaaagggggcactcccactcctcctgggggaggctctcctcatctctaattaatggttaccctgattaaatcatctccgctccgtgctggcatctccgggaactcggataccrgggccatattgggaacgaaaccaacgaataataaatgggactgcctaatgtactcatttaaaacc

SEQ ID NO: 711394 - DNA, 1512 bp, Homo sapiens
tccctgattttctctccggtcggagcctcctgctttacaccctgacatccagggctcaggcttcccatccacttagcaatctgactcttgggacaaggcccagtaattccctggccacagctgcccatgaccatcaaagcttatttgttctgcaggaaagattggaagaagcatgagtgaggggagagagagaggaggggagagacagagaaggtgagagagagagaaaacacaaagagaaatagactgagacagaagccaaaacacggagggatacagctggaaagacagacccacaggcaaagttctcaagtcagagggacagaggcccagagacagacacagagagagacccagagagagggagacagagacccagaaagagagggagacagagacccagagagagagggggacagaggcccagagagagaggkggggggacagagacccagagaggaggacagagacccagagagagaggaggacagaagcccagagagagaggaggacagaggcccagaaagagagggggacagagacccagagagaggaggacagacccagagagagaaaggggcagagacccagacagagagggggacagagacccagagacagagagatagagacccagagagagacagaagcccagagacagggggtacagagacccagagagagaaagagagagagatatatatagagagagactcagagagagacagaggcccagagagagagagggacagagacagtgggttgggggtgcataaagacccagagagagtgatagttacctagaattagagtggaggggcagagaccagagagcgagagagaaacctagactcagataccctactccctgcaccaagagaaagagagagagagagagagaggctgactcagacagagtgggacaaagaccaagcagacacacacacataaaccagcctgagagagggcaggagattcatcaacctccaccgaagtttccaggactgcccccaaccctgacacacaggctggagccacgctggagctagctgggagctttgaccaacctggcctagccctgcggcctcccaactgtgcccaggactccctactcattcccctcagggcatctgcccaggctgtccctctgccagaacactcttccctctatctctccttggcctttgagcctcccctcgttccacaagctcccagatcccccacagccctgcagaggctcctcctgtgcctccccataaccctggcccctgacacaaggcccgaccatctagacctggagctgccgagggctgcctggggtccccaggccctgctcctgaaaaaaacagtggttgaagaaatgaatgaaggctgggtgcagtggctgatgcctgtaatcccagcactttgggaggctgaggtgggcggttaacctgagctcaggagttcgagaccagcctggccagcatggcgaaaccctgtctctactaaaaatacaaaaattagccgggc

SEQ ID NO: 711395 - DNA, 1512 bp, Homo sapiens
tccctgattttctctccggtcggagcctcctgctttacaccctgacatccagggctcaggcttcccatccacttagcaatctgactcttgggacaaggcccagtaattccctggccacagctgcccatgaccatcaaagcttatttgttctgcaggaaagattggaagaagcatgagtgaggggagagagagaggaggggagagacagagaaggtgagagagagagaaaacacaaagagaaatagactgagacagaagccaaaacacggagggatacagctggaaagacagacccacaggcaaagttctcaagtcagagggacagaggcccagagacagacacagagagagacccagagagagggagacagagacccagaaagagagggagacagagacccagagagagagggggacagaggcccagagagagagggggggggacagagacccagagaggaggacagagacccagagagagaggaggacagargcccagagagagaggaggacagaggcccagaaagagagggggacagagacccagagagaggaggacagacccagagagagaaaggggcagagacccagacagagagggggacagagacccagagacagagagatagagacccagagagagacagaagcccagagacagggggtacagagacccagagagagaaagagagagagatatatatagagagagactcagagagagacagaggcccagagagagagagggacagagacagtgggttgggggtgcataaagacccagagagagtgatagttacctagaattagagtggaggggcagagaccagagagcgagagagaaacctagactcagataccctactccctgcaccaagagaaagagagagagagagagagaggctgactcagacagagtgggacaaagaccaagcagacacacacacataaaccagcctgagagagggcaggagattcatcaacctccaccgaagtttccaggactgcccccaaccctgacacacaggctggagccacgctggagctagctgggagctttgaccaacctggcctagccctgcggcctcccaactgtgcccaggactccctactcattcccctcagggcatctgcccaggctgtccctctgccagaacactcttccctctatctctccttggcctttgagcctcccctcgttccacaagctcccagatcccccacagccctgcagaggctcctcctgtgcctccccataaccctggcccctgacacaaggcccgaccatctagacctggagctgccgagggctgcctggggtccccaggccctgctcctgaaaaaaacagtggttgaagaaatgaatgaaggctgggtgcagtggctgatgcctgtaatcccagcactttgggaggctgaggtgggcggttaacctgagctcaggagttcgagaccagcctggccagcatggcgaaaccctgtctctactaaaaatacaaaaattagccgggc

SEQ ID NO: 711396 - DNA, 1512 bp, Homo sapiens
tccctgattttctctccggtcggagcctcctgctttacaccctgacatccagggctcaggcttcccatccacttagcaatctgactcttgggacaaggcccagtaattccctggccacagctgcccatgaccatcaaagcttatttgttctgcaggaaagattggaagaagcatgagtgaggggagagagagaggaggggagagacagagaaggtgagagagagagaaaacacaaagagaaatagactgagacagaagccaaaacacggagggatacagctggaaagacagacccacaggcaaagttctcaagtcagagggacagaggcccagagacagacacagagagagacccagagagagggagacagagacccagaaagagagggagacagagacccagagagagagggggacagaggcccagagagagagggggggggacagagacccagagaggaggacagagacccagagagagaggaggacagaagcccagagagagaggaggacagaggcccagaaagagagggggacagagacccagagagaggaggacagacccagagagagaaaggggcagagacccagasagagagggggacagagacccagagacagagagatagagacccagagagagacagaagcccagagacagggggtacagagacccagagagagaaagagagagagatatatatagagagagactcagagagagacagaggcccagagagagagagggacagagacagtgggttgggggtgcataaagacccagagagagtgatagttacctagaattagagtggaggggcagagaccagagagcgagagagaaacctagactcagataccctactccctgcaccaagagaaagagagagagagagagagaggctgactcagacagagtgggacaaagaccaagcagacacacacacataaaccagcctgagagagggcaggagattcatcaacctccaccgaagtttccaggactgcccccaaccctgacacacaggctggagccacgctggagctagctgggagctttgaccaacctggcctagccctgcggcctcccaactgtgcccaggactccctactcattcccctcagggcatctgcccaggctgtccctctgccagaacactcttccctctatctctccttggcctttgagcctcccctcgttccacaagctcccagatcccccacagccctgcagaggctcctcctgtgcctccccataaccctggcccctgacacaaggcccgaccatctagacctggagctgccgagggctgcctggggtccccaggccctgctcctgaaaaaaacagtggttgaagaaatgaatgaaggctgggtgcagtggctgatgcctgtaatcccagcactttgggaggctgaggtgggcggttaacctgagctcaggagttcgagaccagcctggccagcatggcgaaaccctgtctctactaaaaatacaaaaattagccgggc

SEQ ID NO: 711397 - DNA, 586 bp, Homo sapiens
ggatggtctcgatctcctgacctcgtgatccgcccgcctcggcctcccaaagtgctaggattacaggcgtgagccaccgcgcccggcccttttttttttttttttttttaattgagacggagtctcactcttttgcttaggctggagtgcagtggtgtgatctcagctcactgactgcaacctccacctcccgggttgaagcgttgctcctgcctcaatctcccaattagctgggattacaggtgtgctccatcatgcccggctaatttttctattattagtagagacagggttttaccatgttggccaggctggtctsgaacccctgacctcaagtgatccgcctgcctcggcctcccaaagtgctgggattacaggcatgagccattgtgcctggccctacacgtggacacttctttagcatatggttagggacctttctagaaattccaaagacagactttaagaagccccgtcgggaaaccttaggccaatgatgtggttacattaaaaataaattatctgggaatttcacagacttcacaaatgtcaggcttacatggtaggtttaggggaccgtttgaga

SEQ ID NO: 711398 - DNA, 585 bp, Homo sapiens
taagtcaaatcttgtccttttgtcgtggagccccttgccccgcgcgcagacacaggctttcctgaagcgtggccagggcgcccctctcatcgctcctgagcgtgacccggggctggagccgcacggggattttcccgagctgagcaggggggtcggggggcccaagccaggagccctggaagagggagcagggcggcaactggggccgcaaacacccatcaaagtccccaggaccaattcccacagacaccacgtggccacaggcagtgccctttgcaggccccctccccaagggtgtcacccctcaccccctcctgggaccccgcctaaaccaggcacccttccacccaccagcaggaactgcgctaggagatgcaggaacacccatgtccccgccagccccgccttccagaccacaccctgccygggagtgcgctttgcgaggtcggggtcgggggggagggcgggggccaggcccctgaacaacagacagcagctcccacccagcaatgcagccgggtcacctcgcacccctggccaaggcaggggccctctccagcctggtgacccacggcctaccctgag

SEQ ID NO: 711399 - DNA, 1338 bp, Homo sapiens
ctcagcctcccaaagtgctgggattacaggcgtgagccacagcgcccggcctaggaaggagattctgacatatgctgtgacatgaatgaaccttgaggacattatgccaagtgatagaaaccagtcacaaaatgacaaatactgttccattaaacgtatatgaggtacttaaagtggtcagaatcatagagacaaagtagaatgatggttgccgaggctgaagaagaaaatggagagctattgtttaatgaggacagtttcagttttacaagataaacagttatggagatggatgtgacgatgcttgtacaacattataagtgtatttagtaccactgaattatacacttaaaatggttaagacggtaagttttgtattatgtgtattttaccacaataaatttcttgagacaaggtcttgctctgtgcccaggctgagtgcagtggctcaatcacagctccctgcagcctcgaccggccccccacccacacccaccggggctcaaggacctcctctagcctccccacctccgcctcccaagtagctggggctagaggcacacaccaccaggcccagctaatttttttagatttttgtagacatgatgtctcactatgttgcccaggctggtctcaaactcctggtctcaagtaatcctcccacctcggccttccaaagtgctgagattataggcaagagccaccacacccagcaaaaaaaaaaaaaaaaaaaaattagtaatatgctattgaggtaatgcacaagtttgtgacatatgtatgtgaaatatatgtatacattttttaaagggaaagtggtttgattccaaatcaaatatgtacatttcattcaaacgcatatgggacatttactaaacatgaccttatcttgggcataaagaaaaactaaaagagaaacaggtattctaaatcagagatcactggtctcattcaacaatcacaataaaattagaaaataaaggcaaaagcatggaaatccattgttaaatttatttatttatttatttattttgttttttgagacagagtctcgctctgtcgcccaggctggagtgcagtggcaygacctcagctcattgcaacctccgcctcccaggttcaagcaattctctgcctcagcctcctgagtagctgggattacaggcacctgccaccacgcctggctaattttttttatttttagtagagacggggtttcaccatcttggccaggatggtctggaactcctgaccttgtgatctacccgccttggcctcccaaagtgctgtgattataggcatgagccacggcgcccggcctccatagttaaattttaa

SEQ ID NO: 711400 - DNA, 1024 bp, Homo sapiens
ttttggatattaatccattgtcatatatatggctgcttgtttggtttcttttagttctgttttttktttttttttttttttttttccgctatgcagaagattcagttttacctggtacgacttatttgtattttgtgtcttgtccttttggtgtgctatcagggttttcaccacatgcagtttgcacagttggggaagtagaaggtcttcaaatggactccagcactgtccaatagaatcttaagataacccatatatgtaattgtaaattcattttctggtagtcacataaaatagaacaaaacaagcctaatgaattttaactcagaatataatcatttaagatgtgagcaacttgaaaccttctcaagcagatagtttacattctcttttccccattacgtcttcacaaagaggagtgtatttggctcacagcacatctccattcagatacgccccatttcaggtctcaatagccatttgtcactggtggctaccatatgaaacagcccaggtgtagactcctttactatttcaactcaaagtctttcggtgaatcatgccctttattccaatgagtattacagatattagaagttcagggcctcgagtcattgacatttgtattcatgttgtgtcttcatcactagcagtagtgatttaaagtatggtgccatgatagctccatgcatgtaaagataaaagccccaaacactatcagctgttcattcagctcgtggaaattctaattccgtgttcatttttttttctacagacatttgccatggctgagcacttcaaacagatcattagatgtcctgtctgtctaaaagatcttgaagaagccgtgcaactgaaatgtggatatgcctgctgcctccagtgcctcaattcactccagaaggagcccgatggggaaggtttactgtgccgtttctgctctgtggtctctcagaaggatgacatcaagcccaagtacaagctgagggcgctggtttccatcatcaaggaactagagcccaag

SEQ ID NO: 711401 - DNA, 1024 bp, Homo sapiens
ttttggatattaatccattgtcatatatatggctgcttgtttggtttcttttagttctgttttttgtttttttttttttttttttccgctatgcagaagattcagttttacctggtacgacttatttgtattttgtgtcttgtcctttkggtgtgctatcagggttttcaccacatgcagtttgcacagttggggaagtagaaggtcttcaaatggactccagcactgtccaatagaatcttaagataacccatatatgtaattgtaaattcattttctggtagtcacataaaatagaacaaaacaagcctaatgaattttaactcagaatataatcatttaagatgtgagcaacttgaaaccttctcaagcagatagtttacattctcttttccccattacgtcttcacaaagaggagtgtatttggctcacagcacatctccattcagatacgccccatttcaggtctcaatagccatttgtcactggtggctaccatatgaaacagcccaggtgtagactcctttactatttcaactcaaagtctttcggtgaatcatgccctttattccaatgagtattacagatattagaagttcagggcctcgagtcattgacatttgtattcatgttgtgtcttcatcactagcagtagtgatttaaagtatggtgccatgatagctccatgcatgtaaagataaaagccccaaacactatcagctgttcattcagctcgtggaaattctaattccgtgttcatttttttttctacagacatttgccatggctgagcacttcaaacagatcattagatgtcctgtctgtctaaaagatcttgaagaagccgtgcaactgaaatgtggatatgcctgctgcctccagtgcctcaattcactccagaaggagcccgatggggaaggtttactgtgccgtttctgctctgtggtctctcagaaggatgacatcaagcccaagtacaagctgagggcgctggtttccatcatcaaggaactagagcccaag

SEQ ID NO: 711402 - DNA, 1024 bp, Homo sapiens
ttttggatattaatccattgtcatatatatggctgcttgtttggtttcttttagttctgttttttgtttttttttttttttttttccgctatgcagaagattcagttttacctggtacgacttatttgtattttgtgtcttgtccttttggtgtgctatcagggttttcaccacatgcagtttgcacagttggggaagtagaaggtcttcaaatggactccagcactgtccaatagaatcttaagataacccatatatgtaattgtaaattcattttctggtagtcacataaaatagaacaaaacaagcctaatgaattttaactcaraatataatcatttaagatgtgagcaacttgaaaccttctcaagcagatagtttacattctcttttccccattacgtcttcacaaagaggagtgtatttggctcacagcacatctccattcagatacgccccatttcaggtctcaatagccatttgtcactggtggctaccatatgaaacagcccaggtgtagactcctttactatttcaactcaaagtctttcggtgaatcatgccctttattccaatgagtattacagatattagaagttcagggcctcgagtcattgacatttgtattcatgttgtgtcttcatcactagcagtagtgatttaaagtatggtgccatgatagctccatgcatgtaaagataaaagccccaaacactatcagctgttcattcagctcgtggaaattctaattccgtgttcatttttttttctacagacatttgccatggctgagcacttcaaacagatcattagatgtcctgtctgtctaaaagatcttgaagaagccgtgcaactgaaatgtggatatgcctgctgcctccagtgcctcaattcactccagaaggagcccgatggggaaggtttactgtgccgtttctgctctgtggtctctcagaaggatgacatcaagcccaagtacaagctgagggcgctggtttccatcatcaaggaactagagcccaag

SEQ ID NO: 711403 - DNA, 653 bp, Homo sapiens
atttatctgagtttataatagctctataggaaatggcactaaaatattcagtacacatcaacatatatgatcttaggattctggaagcccaggagttaactttattttcattcaagaagaatgcctactttgtttgaggtgctagtctaagcactaggatatatcaatggggggaaaaaagacaaatttccttgtttgctatctgatgagacagaatataggcagacataataagtacacgcattttaaagtattttaggataatggtgttacggggggaaaagaatggcaaggtcagggtgcataagtgggtatttaggggtgtgggagggtacaggctgtagtaataagttccacagagaaagtgagatttgagcaaagacttgaatgaggtgaaagaatgagccagataaactgttggtcatcccctgggatgggagggatccatgaaacaaaggctttgagttcagagacctacrtgtttagaccagtgtgaggcaggaagggtattacggagatggctcacaagtatgtatggcatgatcatggtgttgtaaaccagtgtcaggactgggttttctggagtgaggtgaggcattttgaggggttttgagcagagatgccataatttagcttgcattttaagaagctca

SEQ ID NO: 711404 - DNA, 1056 bp, Homo sapiens
atggcctcatgggaaaggaaagaccttaccatcccccagcctgacacccctaaagggtctgtgctgaggaggagtagtgaaagagggaggcctctttgcagttgagataagaggaaggcttctctctcctgctccttcctgggaatggaatgtctccgtgtaaactgaccattcccattcgttcaattctgagataggagaaaactgccctgtgactagaggcgggatatgctggcagcaatactgctctgttactctttgctacactgagatgtttgtgtaaagtgaaacttaaatcaggcctacgtgcacatccaggcacagtacctttccttgaacttattcgtgatacagattcctttgctcacatgtttccctgctgaccttctccccacctgttgccctgctacactcccctcactaagatagtaaaaataatgatcagtaaataccgaggaaactcagagacagccagcggtgcaggtcccctgggcccactgttctttctccatactttgtctctgtgtcttatttcttttctcagcctctcatcccacctgacgagaaatacccasaggtgtggagggggaggcccccttcactcggtgaggggacagacagaggttagatctcggtgaggggtgggcagagcagagtcatcgaggggacagacggaggcagggtcttggtgatggagagatgggggcgggttctcagagaaggatgagcgcgggttctcgatgaggtgagagacgggggcggggtctcagtgagggagagatgagggccagatattgtgaggctgcatattgcaatgatgcatatttcccagtctcactgacttcttatgtttaggtcagtatatgaaaaaatctacatgggcctggactttatttttttctttccttttttttttttcagacggagtcttttttcttattcttaaaaaaacaaaaattcttagctgggtgcggtggctcatgcctgtaataccagcactttgggaggccgaggtgggcggatcacctgagggtgggagttcaagactagcctggc

SEQ ID NO: 711405 - DNA, 1692 bp, Homo sapiens
tgtaggcactactcttgtttccatgttcctggcacctaagttgatatattttctcacagtcttgtgacaatctttgaagtatagttgttatcccattttcctataaggagaccaaggttgagcatggttgtgattgccgaaagtcatatccgtggttttatagacagtcagaatttagaccatgaggtttgttttacctgtggacttagttttcaacatatttaagatatatctgtagtctgggcgcggtggcttatgcctgtaatcccagcacattgtgaggctgaggtgggcagatcatttgaagtcaggagttcgagggcagcctggccaagatggtgaaatcccgtctctactaaaaaacacaaaaattagccaggcatggtggcacatgcctgtagtcccagctacttgggaggctgaggtgagagaatctcttgaacctaggaggcaaggttgcagtgagccgagatcgtgccactgcactccagcctgggcaacagaacgagactctgtctcaaaataaaataaataaaatatctctaaactaatatatctcattaaatttcagatctggagttctgtgagttagggaaacaggatcaccaccatagtagaaaaaactctggtgcagatagttttagacacaaagattatctgaattcaggcccagataattgtcttctttttccccaagaaacatttgaattgtatttctgttagataagcatcatagtaaaaagtcttcaaagtttttgaaggcagaaaaagttttctttgttaaacccttcccatttttttgtcttctaaatttctaggagaactactgttaagttttttagtatcttgttgaacaatggttaacaattataatcatttgtgtttatgtaatcaaactgtgaaacaccggttgggaacttgcttgtgtacacttgatggcgtaaatggtaggggaagagcatacatacaaaagtggcctcttttgctttcttggcagcatgatgttatattcctttggatgtaccgtcatctatgaccagtctcatcttgaaaggcatgcttattttccatttttcccagtgcttggaatttgtttccaaaattgtttctaggaacatgactaatgtgactgacgatgccttaggaattcctagtggggacaaggtgcttggctgggatgcatacctaagaatatctcacaaagaaacctgattttgtttcactattgcctaatggcgcacatagtaggtgctcaataaataaatattttttgcatgagtggtttttgcttgtctggtcatttgccctattgtagagggagagyagtgtgcccactggagtccccacagggtccttttgcctgcatgcctacccctgtggcacccatcaggcttttgattccaatgttgccctgggctctcactcacaggtagatgttttttattgccccattcacaattcagccacctgctgtccgcatgcatgtgcttgccatgtttagatattgggtgtttttccagtttacttaataagttagtggccagactgtacgcttcctgctgcatttttccactgtcttgagagttggcctcgccatctgtgagcaaaaggtctcttctttttattattctcccatggcatgttgcaaaacagtaagcgtgagctggtttcctgtggcaaaaaaatgacttt

SEQ ID NO: 711406 - DNA, 646 bp, Homo sapiens
tctaatgtgatggtattaggttggtgcaaaagtaatagcggtttttgccattacctttaatggcaaattaaatggccattgcttttaatggcaaaaactccaattacatttgaaccaatctaatattaggaggtggggcctttgggatgtaattaggattaaatgcagtcacgaagatggaaccctcatgaagaggagcagtggccttatagaagggaatccagcgacccccaccccccgccttgcttcgtcccccatgtaaggacacaacaacaaaaaacccagccaaatatgaaccaggaagcaggctgtcaccagacaccaaacctgtcaatgctttgatcttggatttcccagcctccaggactgtgagaaatacatttctgttgtttgtaagccaaccagtctatggtatttcattatggcaactcaaacagactaagacagtataaaactaagaaagggagacgctatgggagtttctttatcactcctttcctccctcccctctctccttcgctrgcctccctatatgaccatggttttctaatttctgttttgccctgggtaccagctccatttccttctctgcataaaaccatcctccacttagtaatggtgatgtggactactcaccacacattca

SEQ ID NO: 711407 - DNA, 1271 bp, Homo sapiens
tggtggtttgcgacacccmtcaccaggctgcagtgcaatgacgcgatcttggctccctgaaacttccgcctcccaggttcaagagattctcctgcctcagcctcctgagtagctgggattacaggcgccctggaccacgcttggctaatttttgtatttttagtagacggagttttacatgttggccaggctggtctcgaactcctgatttcaagtgatccacccaccctggcctcccaactcattaggtattttgcattgtctgctttgagagacagtcacccaaagtgatctttgtgtttcctctcttgtcaaatagatgcaccaaggagaaaacagaactttttttttttttttttgacaaggaatctcactcttgctcaggctggagtgcagtggcatgatcacggctcactgcagcctttgacctcctgggctctacccaatctcccacttcagcctttggagtagcttggactagcacaccactacatctggttaatttttgtattttttgtagagatgggggtctcactatgttgcccaggctggtcttgaactcctaggctcaagcgatctgccttcctcagcctcccaaagtgctgggattacaggcatgagccactgtgcccagcccacttcctctattcttcaaacatccctaaccaagaacattttttttttcctgagacagagtcttgctctgttgcccaggttggagtgcagtggcgcaatctcggctcactgcaacctccacctcctcggttcaagcgattctcctgcctcagtcggccgagtagctgggattacagatgcacgccacgaagcccagctgatttttgtattttttaataggaaaatgaaagaaaaagctcaatgccttctcttgtcctgccaccactacgccccaccacactcccaccccaaccccgggtggcccctgtgtgtacactttttctcttgaacttaaataaaataaaataaaatttaaaaaaccctaatcagcagcagtggtcaggggcgcacccactgcactccaaagaaggtctcatcagtgtttcgggaaggcaaaagtgtcccagtgaggttggtgcagagtgtgtcccctcgggccaggggcgtcaggcgctgggaggcaatggtacaaccttggtggaagctgagacgcagcaggctgatgctacgggaggcgggagagcagattcccacggccagggtggtggggtggtgcctggaggccgtcgtggaggagcagatggccagcgtcacct

SEQ ID NO: 711408 - DNA, 1271 bp, Homo sapiens
tggtggtttgcgacacccctcaccaggctgcagtgcaatgacgcgatcttggctccctgaaacttccgcctcccaggttcaagagattctcctgcctcagcctcctgagtagctgggattacaggcgccctggaccacgcttggctaatttttgtatttttagtagacggagttttacatgttggccaggctggtctcgaactcctgatttcaagtgatccacccaccctggcctcccaactcattaggtattttgcattgtctgctttgagagacagtcacccaaagtgatctttgtgtttcctctcttgtcaaatagatgcaccaaggagaaaacagaactttttttttttttttttgayaaggaatctcactcttgctcaggctggagtgcagtggcatgatcacggctcactgcagcctttgacctcctgggctctacccaatctcccacttcagcctttggagtagcttggactagcacaccactacatctggttaatttttgtattttttgtagagatgggggtctcactatgttgcccaggctggtcttgaactcctaggctcaagcgatctgccttcctcagcctcccaaagtgctgggattacaggcatgagccactgtgcccagcccacttcctctattcttcaaacatccctaaccaagaacattttttttttcctgagacagagtcttgctctgttgcccaggttggagtgcagtggcgcaatctcggctcactgcaacctccacctcctcggttcaagcgattctcctgcctcagtcggccgagtagctgggattacagatgcacgccacgaagcccagctgatttttgtattttttaataggaaaatgaaagaaaaagctcaatgccttctcttgtcctgccaccactacgccccaccacactcccaccccaaccccgggtggcccctgtgtgtacactttttctcttgaacttaaataaaataaaataaaatttaaaaaaccctaatcagcagcagtggtcaggggcgcacccactgcactccaaagaaggtctcatcagtgtttcgggaaggcaaaagtgtcccagtgaggttggtgcagagtgtgtcccctcgggccaggggcgtcaggcgctgggaggcaatggtacaaccttggtggaagctgagacgcagcaggctgatgctacgggaggcgggagagcagattcccacggccagggtggtggggtggtgcctggaggccgtcgtggaggagcagatggccagcgtcacct

SEQ ID NO: 711409 - DNA, 1446 bp, Homo sapiens
atgaatgtgttattagtaggcattaccaaaattgcccctcttaatagacactagtcaagtgcatttgaggatcaagggccatgcccctcagaaggaaaaggttagtgggtactttttctcattttaattttcgtattaaaaagaaaaataggccaggcgcggtggctcatgcctgtaatcccagcactttgggaggccttaggcgagcggatcatgaggtcaggagttcaaaaccagtctggccaatacggtgacaccctgtctctactaaaaatacaaaaattagctgggtgtggtggctcatgcctgtagtcccagctactcgggaggctgaggcagaagaatcacttgaacccgggaggcagaggttgcagtgagcagagatcatgcccctgcactccagcctcagtgacagagtgagactccatctcaaaaaaaaagaaaaatatggtcaggcacggtggctcacgcctgtaatcccagcatgttgggaggccaaggcaggcggattacttgaagtcaggagtttgagaccagcctggtcaccatggtgaaaccctgtctccacaaaaatacaaaaaagttagccaagtgtggtggcgcacaactataatcccagctaattgggaggctgaggcagaagaatcgtttgtacccaggaggcagaggttgcagtgaactgagattgtaccactgcactccagcctgggtgacagaatgagactccatttcaaaaaataaaagaaaaaaatacagagataaacattacatcttgtcgcctgcacattcttcagggtacaacacaatgagcttttacttttgtacaggcaggtcaagataaggcaagcgaatcacttgaggttgagaccagcccggccaacatggcgaaactccgtctctattaaaaatacaaaaattagctgggcatggtggcacacatctatratctcacctacttcagaggctgaggcaggagaatcacttgaacccaggaggcggaggttgcagggagccaagatcatgccactgcactccagcctggataaccgagcaagactctgtctcaagaaaaaaaatatatatatatacaaatattagccgagcatggtggcataggcctgtagtcccagctacttgagagattgaggcaggagaatcacatgaacccgagaggcggaggttgcagtgagtcgagatcgtgccactacactccagcctgggcaacagagcaagactctgtctcaaaaaaaaaaaaaaaaaaaaaaaaattctagcttcaagagagctaattcaagctcaaagtttaaggacaactgtgtggaaaacacagatcccaaagaatagaagtcagtgttctgaagtgtagaagtttgggatcatttgtatagacaaagtttagagaagcttaacagaatttcagcatctttctaggcaaggcttgataga

SEQ ID NO: 711410 - DNA, 1432 bp, Homo sapiens
gaaaaaggagggaacagggcatttttggaaggtgagtcacttggctttctggtagcaggttgacaatgagtgggagatgtattgattagtactgttctagtactagatgctttttgtacattgtcaccaatcctgacagcacctcactaaggtaacagactctgtggtccatgctttctttaccttgtagtccatgactactaacaggtcactgatgagtctccttaccctggttcttgtctgcatgctaacaccccttgattaggaactgaggatgagaagctctggaaaagtgatgatcacagtatttttcaatctgcaagataaagaatattacctgtttccttgttccagagtggtaaactcctaactgacagatctaggattcaagtccagctctgcctccaagcctctgtccattctttctttctttcctgcacaacctaatgggaatatctaacaaaacatttgaagccacaagcctggaaatcatcagaaaagtctaaggttgcctctactaaatctttccagtcttgcccttgccctctgagagcactaaccattccttcttttgaatctccttggtatagcatctgtaaaaattaggtgccctactttgttatatgtctgtgtccctctctggcctgtaaactctcaggagcagggatcatggctttgcaactccatcacccagtctgaaacctgtagcagaggtagatatgaaataagtgtttgctggatgactaagaaaggcaatttgagtcacaaaacacagacaaccaagcaccaagggccaactcttgggaagtccctcttcaggaagcagagagaagactacaggaggaacattaggagagccgagagacatcagaaggatgctgagctgccaaggccgaaggaaggtacaatatcaggaagggtagggtggtcaacattttactgagctcagcctcccaacttagttccctccaaactcaagtcagtccactaagatgagaggaagctcagggagagaggctactcctaggaactcctttcagcctctgagctggggaaagagctcggggtccctacaaaataggagcagctcaagatgccccagagggtttggaggaagcaacgttcccaggctggagagaatttggcagtaccctggcctttcctgggttctcccttgggcttcaggcttcagagtgatccayccagggtgtgccactcccatatagcagctatataatttatttctctttaaggaggaaataatggcatctctgggggaataattcactgccttttggcagaaaaaatatgatccatgatcccacacaccatgtgatgtgcagtaccagcctacagggataaatatcacattaatatcagccacataactgcctacatccctaccttataacggtagtgtgcccagtgttgg

SEQ ID NO: 711411 - DNA, 1432 bp, Homo sapiens
gaaaaaggagggaacagggcatttttggaaggtgagtcacttggctttctggtagcaggttgacaatgagtgggagatgtattgattagtactgttctagtactagatgctttttgtacattgtcaccaatcctgacagcacctcactaaggtaacagactctgtggtccatgctttctttaccttgtagtccatgactactaacaggtcactgatgagtctccttaccctggttcttgtctgcatgctaacaccccttgattaggaactgaggatgagaagctctggaaaagtgatgatcacagtatttttcaatctgcaagataaagaatattacctgtttccttgttccagagtggtaaactcctaactgacagatctaggattcaagtccagctctgcctccaagcctctgtccattctttctttctttcctgcacaacctaatgggaatatctaacaaaacatttgaagccacaagcctggaaatcatcagaaaagtctaaggttgcctctactaaatctttccagtcttgcccttgccctctgagagcactaaccattccttcttttgaatctccttggtatagcatctgtaaaaattaggtgccctactttgttatatgtctgtgtccctctctggcctgtaaactctcaggagcagggatcatggctttgcaactccatcacccagtctgaaacctgtagcagaggtagatatgaaataagtgtttgctggatgactaagaaaggcaatttgagtcacaaaacacagacaaccaagcaccaagggccaactcttgggaagtccctcttcaggaagcagagagaagactacaggaggaacattaggagagccgagagacatcagaaggatgctgagctgccaaggccgaaggaaggtacaatatcaggaagggtagggtggtcaacattttactgagctcagcctcccaacttagttccctccaaactcaagtcagtccactaagatgagaggaagctcagggagagaggctactcctaggaactcctttcagcctctgagctggggaaagagctcggggtccctacaaaataggagcagctcaagatgccccagagggtttggaggaagcaacgttcccaggctggagagaatttggcagtaccctggcctttcctgggttctcccttgggcttcaggcttcagagtgatccatccagggtgtgccactcccatatagcagctatataatttatttctctttaaggaggaaataatggcatctctgggggaataattcactgccttttggcagaaaaaatatgatccatgatcccacacaccatgtgatgtgcagtaccagcctacagggataaayatcacattaatatcagccacataactgcctacatccctaccttataacggtagtgtgcccagtgttgg

SEQ ID NO: 711412 - DNA, 713 bp, Homo sapiens
tgaaatgatcaagtgcctactttgtgccaggcattgtataaatttctagaagtgcaaagccaaaggattgtgatttggccccagaggagtgtctatctasttaatggtatagtctaacctttccaaacaaatactactaatataaagtggtgaatgttatacaggtacttgagatattcacaaaataatatctaggctcccaaataacatagagtggccatcatcttatgtggctaagccttgaactttatgcagacccctagcacaaatcaatccaaacaacacataattatcttagtaagatccgcagttagttgtagtcattcaaaactttgctaagtcttaagtttgcgaaagtcttgagtaggcaagagaccattattttgaaacagaaaaatagttaaatatgtagagtatttgagaaatgtgtgagaactgcctattcaactctgttgggccaggatgtagatctttccaaatcacatgacttctccctgttggcacaatcaatcatatctgaaaatgatgacatatggaaataattaaataacaaagaagagagataaacattgtcaagtgacttgggctgtagccaggaactgacaatgttaaaaaatattttgcagaagattgtacatttaaaagccgtaaactgtgactgatcataggaatttatttttaaataggtttcattagttcaagttagaatgaca

SEQ ID NO: 711413 - DNA, 3073 bp, Homo sapiens
tcagaaaagaatgaattaaaacagcccttaatcacaccctcggggatggtgtgaccatggttttattttaccctgctacattgtaaagtctgtattttaataagtagaattctatatacccatagccctctaacatggctgcatgaacaccatagacatgtacttttcaatgatgaaaatctgggtttaaatcatctttgtctcatcttcccctaccgcagttgttggtatgtaaattgtcttttgataatgtcatttgaaccccatgatttatgttttcttttgctctgttacaaagtagtggctttcttaccrtggcagaagggatgatacctgagaaactgtgtgatgtttgaatttaccattttgaaaatgatattattgacagagaataaacaaataatctctcttgtcctttgacatttggcctttgctgcttgtgttgagagcctctttccttgaatatgatctttttgctgatgcagagttgaccccaagtgtctgttcagaaagagcctcttggccttgactgccaggatctgctgctagttgactgctatcagctatcagtccacagctgggcacagcttctcacagggactgacccaagtaagacagagctacttacctgggttgtcaaacataccctgtcccttccccgtgtgctgatcgtcattgtaaaacttcctctgtcgtgcccatgtaaccttgtaatatcctgctcaaatcctgctggtatttgttttatggaacgtattcttgttcttatgtgcacccataattgtgttatggggctatttttctttactggactgtaagattttgaagggctatggtcctacccatgttttttctccctgttctttgtaactagtgcctttcacagaacaggtactcagtaaataagtattaaaggaaggaatgccattcgtcacactacttttatcccaggctatttacttattgactagaaatagggcagcggggggatcaagaagggttacggtcagcagtttaaatggctgggtagtatctttcttaatctcagttgggatgggctagggtttacaaaaaaggcatgaagccttaaaattaataaataattcttgatagcctggctgcccatgaaaactacaaaataattaacttttatgatgctgttatctcaagcaaatatgccacccataatttttaaaatgtcactgtttaaccacctaaatctgagctgaatagttatatttaattcattcatgcaaattgtgatgaactgttagcacaaaaagggtgtctgaaggattaggcatttggtggattcaagtaatcgacgtattatcagtaagacccttgggaaggagggaccagaagagtagcaatggaacaaaggggaaaaccaagctgccttggtttgatttgattttttttttcttttggagagtcattgctacatataatgcataaaaatctcagccaggtgtggtggctcacacctgtaatcccagcactttgggaggccgaggtgggtggatcacctgaggtcaggagttcaagtccagcctggccaacatgatgaaaccctctctactaaaaacacaaaaatcagcgagacatggtggtggcctcctgtaatcccagctactcgggtggctgaggcaggagaatcacttgaacccaggaggtggaggttgcagtgagccaagatcatgcgacagagtgagactctgtctcaaaaaaaaaaaaaaatctatcggaccaacagagacacatatggactatttgttaatgtctctatatttaaggaaatggcagttgcaagtatattttgcattaaaagcacaataatatatattaaatatatgtaaattccatcaccctaaatgcttcaagttaaattcccaagtccagtagatctgagatctactggatctcagatctcctgggtctgtggcctgtcctccctacaagtgtccaggcagatgcagtgaggtgaaggaatcctaagttgggtagaagttcccactgacctccaaggcaccctctagccctactctgtgagtcactgcttgaggcttgggatgccagagtgcgaaagattctgtgtaccctcactggatttggcctatcccaagatggctttccttggagtgaatggcaccttacagtacttactgttacagggagacggttgtgttttataaagtgcattgaattcctcagacaaaatgtgctgtataaatgttacagttaatctagatttcataatgcctctgttgattcacttcttaaaaacaaatggagtgtttactgctcagtaaacatctcatcttggatcctgctagtatttataaagagggtgattaaagaaagtctaaacaatgaaagaaggaacaaaagatttgctactgctgtgaggactagcagcccactcttcccatttttccagataaaccgttggcttaggaattgtagagtataataataaactaaagtggtatttaatccccattcttatttatggcttattgccagagtttagtcataatgtagatacagaaaaacatatgttggatttgggcaaattatttaataaatggcagactctctgttgaataaatctgtttagaaccatgaccttgtatttcaacaaaatgaataataatccaactttgtggttattaaaaccttagatgtagtttttgtctccatgaaagtttataaaagaaattaaggtaaaacttatgccaatatgacttcagttaaaatagtatatgacttcaagcatatactaaatatgacttattgtcatgtttgactaaatgtcttattattctttaaaaatgcattagacatccaaatatggtttgtccccagctcctttgtccccagtttcttgctttccatgtgaagatttttctgtatagtactttgcactattaggaagaagataaagcctgtgccacagaaaatgcatttttattttactggctcatgaaaaagaatttatttcttaaaactcactatttctttcttatttctatccttaccaggacagcagcttaataggtttctgaaattg

SEQ ID NO: 711414 - DNA, 3073 bp, Homo sapiens
tcagaaaagaatgaattaaaacagcccttaatcacaccctcggggatggtgtgaccatggttttattttaccctgctacattgtaaagtctgtattttaataagtagaattctatatacccatagccctctaacatggctgcatgaacaccatagacatgtacttttcaatgatgaaaatctgggtttaaatcatctttgtctcatcttcccctaccgcagttgttggtatgtaaattgtcttttgataatgtcatttgaaccccatgatttatgttttcttttgctctgttacaaagtagtggctttcttaccgtggcagaagggatgatacctgagaaactgtgtgatgtttgaatttaccattttgaaaatgatattattgacagagaataaacaaataatctctcttgtcctttgacatttggcctttgctgcttgtgttgagagcctcttkccttgaatatgatctttttgctgatgcagagttgaccccaagtgtctgttcagaaagagcctcttggccttgactgccaggatctgctgctagttgactgctatcagctatcagtccacagctgggcacagcttctcacagggactgacccaagtaagacagagctacttacctgggttgtcaaacataccctgtcccttccccgtgtgctgatcgtcattgtaaaacttcctctgtcgtgcccatgtaaccttgtaatatcctgctcaaatcctgctggtatttgttttatggaacgtattcttgttcttatgtgcacccataattgtgttatggggctatttttctttactggactgtaagattttgaagggctatggtcctacccatgttttttctccctgttctttgtaactagtgcctttcacagaacaggtactcagtaaataagtattaaaggaaggaatgccattcgtcacactacttttatcccaggctatttacttattgactagaaatagggcagcggggggatcaagaagggttacggtcagcagtttaaatggctgggtagtatctttcttaatctcagttgggatgggctagggtttacaaaaaaggcatgaagccttaaaattaataaataattcttgatagcctggctgcccatgaaaactacaaaataattaacttttatgatgctgttatctcaagcaaatatgccacccataatttttaaaatgtcactgtttaaccacctaaatctgagctgaatagttatatttaattcattcatgcaaattgtgatgaactgttagcacaaaaagggtgtctgaaggattaggcatttggtggattcaagtaatcgacgtattatcagtaagacccttgggaaggagggaccagaagagtagcaatggaacaaaggggaaaaccaagctgccttggtttgatttgattttttttttcttttggagagtcattgctacatataatgcataaaaatctcagccaggtgtggtggctcacacctgtaatcccagcactttgggaggccgaggtgggtggatcacctgaggtcaggagttcaagtccagcctggccaacatgatgaaaccctctctactaaaaacacaaaaatcagcgagacatggtggtggcctcctgtaatcccagctactcgggtggctgaggcaggagaatcacttgaacccaggaggtggaggttgcagtgagccaagatcatgcgacagagtgagactctgtctcaaaaaaaaaaaaaaatctatcggaccaacagagacacatatggactatttgttaatgtctctatatttaaggaaatggcagttgcaagtatattttgcattaaaagcacaataatatatattaaatatatgtaaattccatcaccctaaatgcttcaagttaaattcccaagtccagtagatctgagatctactggatctcagatctcctgggtctgtggcctgtcctccctacaagtgtccaggcagatgcagtgaggtgaaggaatcctaagttgggtagaagttcccactgacctccaaggcaccctctagccctactctgtgagtcactgcttgaggcttgggatgccagagtgcgaaagattctgtgtaccctcactggatttggcctatcccaagatggctttccttggagtgaatggcaccttacagtacttactgttacagggagacggttgtgttttataaagtgcattgaattcctcagacaaaatgtgctgtataaatgttacagttaatctagatttcataatgcctctgttgattcacttcttaaaaacaaatggagtgtttactgctcagtaaacatctcatcttggatcctgctagtatttataaagagggtgattaaagaaagtctaaacaatgaaagaaggaacaaaagatttgctactgctgtgaggactagcagcccactcttcccatttttccagataaaccgttggcttaggaattgtagagtataataataaactaaagtggtatttaatccccattcttatttatggcttattgccagagtttagtcataatgtagatacagaaaaacatatgttggatttgggcaaattatttaataaatggcagactctctgttgaataaatctgtttagaaccatgaccttgtatttcaacaaaatgaataataatccaactttgtggttattaaaaccttagatgtagtttttgtctccatgaaagtttataaaagaaattaaggtaaaacttatgccaatatgacttcagttaaaatagtatatgacttcaagcatatactaaatatgacttattgtcatgtttgactaaatgtcttattattctttaaaaatgcattagacatccaaatatggtttgtccccagctcctttgtccccagtttcttgctttccatgtgaagatttttctgtatagtactttgcactattaggaagaagataaagcctgtgccacagaaaatgcatttttattttactggctcatgaaaaagaatttatttcttaaaactcactatttctttcttatttctatccttaccaggacagcagcttaataggtttctgaaattg

SEQ ID NO: 711415 - DNA, 602 bp, Homo sapiens
cctgttctattattttttcctgagtcagccgtggttaatttatttggaatttttccagcaatagtctagtccaataggtatgtatgtatgtatatatacataatatgtatgtatacatattttcttacacaaatggtcatatattatatacactctgtattttgccttstttcctccaccctcctaacaagtccttggaaactgttccatatcagtgtagactacacttcctcattcttttcagcagctaagcaatagtttactatgtgaacatactataatttatttcaccagtaccctattaatgaatgtttaagttgcttcgaagcttttactacagatatatgtcttcatattcccagagactatcttagtatcttacgtgaagtaaatactaaaaagtattgtttagtaaaagaatgaatgtagggcaggaaggatatggtgagtaggctttaagtaacattatactaaaagaagcctaaatttccatgttaatgtatggaatgagaggaaggatataaatttctatccagtgtatgtacctaaaaattaaaagcgtatatatatttccttttataagaaagcatcctagcctacta

SEQ ID NO: 711416 - DNA, 642 bp, Homo sapiens
actgcactccagcctgggtgacagagtgagactctgtctcaaaaaagaaaaaaaaaaagaactcaatggatgtttgctatgtctctcttctctaagctataccatatttaggatcttttaattacagtgaggcaaagcataaaataacaaaatggctgggtgtggtgctcacacctgtaatcccagcactttgggaggctgaggcaggaggactgcttgcagccaggagtttgggaccagactctctacaaaaaataaaaataaagaaataaacaccaaaacaccaagaccaatcaaagagttttatactccttttattctctatcaaatgcaattctaagcaatgtccaggtactatccaaacagcttccagccctctgccaaaggtggaattcttcaacyatgtgaatagtgctgagtcctgatgtttgtgtggcttatctcgccagggggagggcagatacagagaagttgttctttcaccctatggccaaacttctgcaaggacaacagggcaagtgaatttgcagaaagatagatgatctagtcttttattattttcccaggatgaagttggggaagggggttgtaggtctcctttatcagtgtggttataaaggggcacaaaagcttggaatcttt

SEQ ID NO: 711417 - DNA, 657 bp, Homo sapiens
ctcaaatttaatatttaagtaaattgtaaaaatactgacgacataaattcacttttctaaaatgcatttttaacatttatttatttacgatatttttttttttaattttttgagatggagtcttgctctgtcacccaggctggagtgcaatggcacgatcacagcccactgcaacttccacctcctgggttcaagcgattctcctgcctcagcctcccaagtagctgcgattacaggcatgcgccaccatgccctgctaatttttatatatttagtacaggaggggtttygccatgttggccaggctggtctcaaacgcctgatctcagatgatccacctgccccggcctcccacagtgctgggattacaggtgtgagccaccgtgcccaaccaaaatttatttttttaaataaataatactagaattatgcttgagagatttcttttttatatcaactaaaaactgtgactttctgtgatctaaaattttgtttctttgggagacagtaacaatgaaggtaatcttcccaagtatactacatgaattatgttgaaatatttggtgtaactacataaatataaatgtaacaagagccttttatttccaaaatgagattcaatttattttaagaataagatatcaactagcaccctct

SEQ ID NO: 711418 - DNA, 590 bp, Homo sapiens
tattttatttttaatgatctctgtatttctttccttaactttttcacttcaaaatgaataaagacggggagaatgactattaacataaagaatcaaaatagagtaggatttgtaaaatctaactcagaagtttgtgtgattgtggcagacaaatttgtgtgcatgtcatatatgtaagatatcatcttatagcttggttatgtagatgaaaaatataggaagactatatattgtcttcccccaaatgtctgcactggcctcattaatttgttgttgactttatgtaaaaactgtgaaggttacaatatagaactagggtctaaaccaaactgtacctgraggacctatagttccaagcagggcatgaaataaataaatatgaatttgtagaaaagaaaatttagcctacttgccaggaaaattttttagacagtgaggtggttactttcttatcatatttattggatttgctcaacacttattacctcctaggcatagttgtgcatcacaaatctaaaaggttgaaaggccacgtctggcagtaaagctcatagtctatagtaaacacaacaagtaaactatggaagcaa

SEQ ID NO: 711419 - DNA, 654 bp, Homo sapiens
ttccattaggttttttgttttgttttgttttktttttgagacagagtcttgctctgtcaccaggctggagtgcagtggcgctatctcagcttgctgcaactcccacctcccaggttcaagtgattcacctgcctcagcctcccgagtagctgggactacaggcacacaccaccatgccaagctaagttttgtatttttagtagaaacggggtttcaccgtgttggccaggatggtctcgatctcttgacctcatgagccacctgcctcagcctcccaaagtgctgggattacaggcgtgagacaccacagccagccaattgtattagtatctttaaactattgttatgtacacaatagataacttttaaaaatgagactatactactctattgttctgaaaattgttttatattaatgtgtcttgggcaccttctcatgtcagaacttagaggactactctttaacagcttcataatgttacatcatatggtattctataattttttttttttttttgagacggagtctcactctgtcgcccagtctggagtgcagtggcgtgatcttggctcactgcaagctctgcctcctgggttcacgccattctcctgcctcagcctcctgagtagctgggactataggcgcccgccacc

SEQ ID NO: 711420 - DNA, 1122 bp, Homo sapiens
cgaaagcctgcctccagccttagcaaatagactagaaaaagtacagtcttattacaggctgaatagaaataaaatgcaatgagaagcaagtaaaaggctaccatatggcccagtctggctctccaggggaccatatcagtttttggttgaacatcttatggtaataaagattatgcattggcctggccttttcgtctatgtctttgaaagctcatggggtaggggtgggggccaaggggaagttgtgtgttgcmcgaaaagctctccatctctttccattagccacatagcatcccataaatatctacttcccatactagcctgtgtgccaagactgggaaaatggatgtcaataccccttcctctccaaccctccctcttatgtggcagcaacaaaccaacagaggtcttcattcttactaagagggtatgttgtttgtacttagctgggcatgaaggaaataaacagaactgaaaaacagaaaaaatgtaattcgatagttggactggaaatactgctccctccactaggcatttcaccaagatgaaacttgcttcacttttataacacaacccatcaaggaactgagagagctcataatattatccatcatgctatggtagtgtccttggatgctacaaaggaacacacatgggtagattgccaatttgttatttttagttcttgaaaaatttgactatggggggaaatttcaagaaaatcacccagtccccagcctgtatatacagcacttaaagcacatctatcagtaagaaccgccaattacagctgcaggcatttgcgggtgaccaaaggatatttgccggccttctctcatccattctctcacgtgggcttgtagaagagattttataggagtgtggagcctggcggctatgaggaacacactttctacctcaaacctctgcatttgttcccctctggtgaaagcattcatctccctggttttcacagggctggctccttctcatgctgcagaactcacctcagattgcacctccatgaaagagtcttttccatcgccatatgggaagttgtgcccatccccgacaatcaccctgtcacctcaccctgtcagtccagctttataacttaccacc

SEQ ID NO: 711421 - DNA, 970 bp, Homo sapiens
atagctgagacagaccctgaaagaacaaacagctggagtgcccacccacagctgggcagcaagtcctcctttgaaggagatctggcctgtgtatcctatttcaacatcatgcagcttgcagccatggccacatatggtgtaagccacatgaagctgaaatgtcagagcctcatccagctatgattactgcttgttgaagtagccaactattagttctttgctcctgtatcagcattataaagctatttctctgtcattacatatatgaaacaattttccaaggcaagaaaacattgaattacggtcccatcacattggttatgtgggtgtaaaaacctggactagacaagaatgttgtaattacatttacttttggaattaagtgctggatgtattttataactaaggcaaaagaagaaaataaatttaagtataaggcaataaagcagttgaacygttccaataatatctaaaacaaagttttggttacatagcttgagaggactgtcaattaataacacttttccaaaaagtgctctataattgcagagccctgagaaaatagaatgaagcaatcatatttggttatatgttgcatttataccatttgatatctcctcctttgcaaaataaatttccccttgccagctgtaattaggcactgagataaaactgccttaatattctgcatattttattagggctgccagcagctgtcggatcactggctctgttctcatgtacaatgaaaacatcaaagacatctgtggtttgccctaaaattagtgccagaattggccttctctccattgtgtaaccagctttgctatttgcataactaacaagggaacctccagacattgctgctcggttcatgagggaaaactacgaaaggcagactttggaaagtggccggtacggcttgtccccataaggcttaagtgcatggggtttggaatcacacagacct

SEQ ID NO: 711422 - DNA, 757 bp, Homo sapiens
ctaataacccctgattagctctggtaattatcctaaagtttggtctcattataaccagcattttgccatgagtttgccctctaggaatttggaaagatgtatgatgaattctgttttcaaatcactccagctttggtgtcttacaattcttcaattaagaatagaacaaatgtttctaattaagaataaaatagaattatatattttcttttctcttgtacagaaaaaaattatgagactttggccttgaaagtctcatagtgagtgcctgtcatgttataacagggcaaaaagtaagtataatattcaaaccttactaacctgtaaattgggggagaaaaaccaatgtgaattagaagaaaagactgaatcataatatattgtaaataaatgaaatgatttcaccttttaaagtacatggactgaagatttatttaattatagtgatgatgatgatggtaatacaattataatggctaacacwtatatagtgtttcctatgttccaggcactgttctggcagctttacatttattaagttattcgatcctcacaacaactccatgaagtagataataatatctccatattacagatcagaaaaatggcgcacagagaggggaagtaacttgctcaagagattgagtaattttgcacagtgatgagtggtatttagttaccttacttttaatgaattaattctaactttaaatgagcatttgaaatgcttcactttgttggtgaaatgaaataaata

SEQ ID NO: 711423 - DNA, 757 bp, Homo sapiens
ctaataacccctgattagctctggtaattatcctaaagtttggtctcattataaccagcattttgccatgagtttgccctctaggaatttggaaagatgtatgatgaattctgttttcaaatcactccagctttggtgtcttacaattcttcaattaagaatagaacaaatgtttctaattaagaataaaatagaattatatattttcttttctcttgtacagaaaaaaattatgagactttggccttgaaagtctcatagtgagtgcctgtcatgttataacagggcaaaaagtaagtataatattcaaaccttactaacctgtaaattgggggagaaaaaccaatgtgaattagaagaaaagactgaatcataatatattgtaaataaatgaaatgatttcaccttttaaagtacatggactgaagatttatttaattatagtgatgatgatgatggtaatacaattataatggctaacacatatatagtgtttcctatgttccaggcactgttctggcagctttacatttattaagttattcgatcctcacaacaactccatgaagtagataataatatctccatattacagatyagaaaaatggcgcacagagaggggaagtaacttgctcaagagattgagtaattttgcacagtgatgagtggtatttagttaccttacttttaatgaattaattctaactttaaatgagcatttgaaatgcttcactttgttggtgaaatgaaataaata

SEQ ID NO: 711424 - DNA, 2985 bp, Homo sapiens
actcctaactatattctcaatgccctcacccggataccccagtcgctgattgtaacctttctttactgtctccaacttcttcctgtttgctagtttcttcttatcaacacttaaacatgtttgtttttactattttataataaaacacaaaaacaaatctttccatgaccctacattctcctctagctacttcccgcatcatttccctttcttcaaagacaaaattcttatcaacaataactcttcaaaccatgtcctcttcaaaccactcttcaattcactgaagtccaccactgcttctgccagctcactgaagtttcttttgccaaaatcaccaatgatctacttgttcctaaatcaaatggacatttttcttttaacataattgaaccctttggatcacttaattgttttaataaaatggtccygtcctttggcttctgtgacatttcactcactcccctggtatgttttctacttcatcagccacttcttcataattttcagcttgttctgcctctccttatatgtttgccttcctgaagatcatgttttgggtcttctttttgtctcattttatacattcaccctgtgcagtctcattcactatcatggcttcagttataaagccataacaacatttatcttttacgcaataaccacattaaaaccataactagtactactaataaagcacaaactttattagaaattataattaggagtctgaatatcatggttccaattttgtgtttactattattaataaaaacgtgaccttagacaagtaataagccttccctttaagattcaatttcttttttataaaaaagcaattaaataccctctgaagcaatacacaaactggttttggaaatatagtaagatgacaaaaggatatagaggtatgtgcatttaaataatttttatgattatatataatatgtatatgatttttatatatttatataaagctataaaacatgattcattatatggaacattactgtgctgcttagacttttgaaatacgtatttttttctaacatggttggttttattttattccccatgtgcttagaacataatacattttggagcacaatgaagtagatattagaatacctattgactttccattagaaattatgaaatgttttagcttccatttttttaaagagatagggcctcactctgtttcccaagctggaatgcagtgctgtaatcatagctcactgaagcctcaacctcctgggctcaagaaatcttcccacctcagcctctcaggtagctgagaaagttgttttattcactggcatagtaaattaaaagttatttattgcttttgcggctctgtcttcctggagatctttactatcctctgcatctagctagtagaaggaaatatagagtgtaaaaaaaagccacatccacctcttaaaacccttggcatggaagtataataacacacacatcactctccacattccactggcaggtgctagtggcacagccatacttagaagcagaaaatgggagcatatttatcttcagctttagagtagctcttaaatttacagtgtgtaagagaatgacaatcatgtaatcttctcccaccttttcctctttgccttgcaccttataactgttgccaaacctagaattacttttatattttcaagatgtataaaatttaccttatgtcttgtagctatatttacatttactatgcttgtctaggcggattctaaaacctataaaccaataacttaagaagaaaatatgtgattgtatttaacaaaacaacaacaacaacaaaaaatcatagtattaaccccgtgcacctcaaggaaaaagctgcaagcctgtggtctgctgattccaccttcactctggtgatcaactactcaaaaccagaccacatttaaatttgcttcatattgggagcatggctttcttatattagcttttagtatactttgtatttatttgatttctattttcttgttaagaaaaatctgacttcatttgaatgctgagatccttcagcttcctattcacaaaatgtgtgtaacgggatccattttcttagacaatcttcttggaactctgtggccttcttataactctaggatagctcccttagacttctctaaagctttctaaactttcttttgcttttatttacaatttaggtttatctttccttggatttcttctttcttttaaatgcctctttttcattttacctcaataatccttaagtgttttttaagaaaggtgcgttgtagaaaactttctcactttcttacacatctggaaaagctttattttaccttgacaatctgttgactttttgattaagtagaaaattcaaagttgatttttttctttccatctttgaaggcagttatctattttcttgtagcattcatgttgaggaaaagtccaattcctattatttttcagatgatttttttaggctctgactgagtttgagattatcttattttgtctttggtgttctgaaagtctataaagttttaaaatttaaataagtgtattctgagtgttgatgacttttaaaatattacacttacatgtactttccatcttcaaaaatgctttattttcttctaagtttcttctttttcaagtggcttttttatatggctgtaatatctttgcacatattttatatggtacaaaacatatataactattttaagcattctcttctatttcaatatgtctccactttcccaagtgttacttaatccatctgtttatcttgaattttatattttgtgctgcattttttcccagatgactcatggttcttgttttctttttgttttattgatgaatgaatgattaggcttcttagtgttgtttcctccacaattatatatgcctgctttgccagcgagcttccaccctgattgggagcattggctttgaaattagtttcgcaggtagagttta

SEQ ID NO: 711425 - DNA, 648 bp, Homo sapiens
ttgtcttgaaggcccaatgggaaatttcagtaagggcacatgagaaaacactttaagaacctattcttccaaagatctttccagtatcttatgacaacacagtaaattatatcccactccaactgcaaaagctgaaactactctgctttctcacttacctacacttttgactttccaaatatatttctctytttggatatgatctgcaaactccttacacgaaggctccaactctgcagccctagttattatagttggcacaagaaaaatcctaattgttttatccaaggagacggaattttccaatactgtagaggcatgtgtgtgtgtttgctttaaggaagctgttttggtactaaaaagtcactgagggtcataaattcatgttaacacatccagtgtacatgaagtaggcaccgagttaaactatttgtctactatatagcatgtcatcttaaaagccttattttttcctcaaaatattaactttatttttctccctgtaaaatcaagacaccgttaaaatgtagcctccctcattttctgggaatactttctaacaagatatgcttctttccaattggacttctaaatttctagcaataataacagtgcataaaacaggcaaccccaaaagtgtagcaggta

SEQ ID NO: 711426 - DNA, 2126 bp, Homo sapiens
ataggactttgtaaatttaggctgatatggaaatgtatatttatatcaaatttaaatttttagaatgatggtgctactatattctaattgttaatttgataattgtaattgtaatttgttaatttgttctaataatgttttcatgacattattcatttgctgcttggcttgatggcacaacaagtatgggttatttaccctgaaaaggaaacagtattacccttccagaatctctatttacagctacaaaagatgcatcacacctgtttccggaccacttccagatcagatgtgacacatgctttagataatttactttgatctaggaattactgtctggcattttgtggtgtagggtaggtgtctccagcactatataggtgtctggaattgagataacaatcaatttcaatacaaaatacattttttgcttaaagcatgcaaggattctatgaattcaggtaaattcacagggtggaaaacaggaactaatgttatatattcctgtacttatcttcataatgaagcagaaagaaaaacaaaaaagttacaaaawtaaatgaaaagaactgtattttctagaattgaaaaatattcttttagatgatagataagatgtttacatcaacctgcaaaaagtcaatgttgaagaggtctcattgtatctcacagaattttgatttgcctactcacccacaggagacatttctggaacagtagcaacataaggtccatccaaaaactttggctcattatcattaatatcctgcactttgatgatgaattctgattcaggctccaggggctttctggtttctatgtccacagcctgagcacgaagagtgtagaaaggtttctcttctctatctaggctccttattgcatgaatgtcccctgtggtttcatcaatggtaaaaacggtgccagcgccatctcctgagagggtgtatttcacagtgccctctcccttgtctaagtcggaatggagctttagggaagagaaggagagagagaggaagagaaagagaaggacaaagaaagaacaccattaaaaggatgtgccaaattaaaaagtcataatttgcaatacaattcctttaatcaaaaatgttaaataaaaatcttatggttctgttttctcgttttttatttctccaacttctttttataaaaatttcaacacaaaaagttgaaaactgtgcgatgaacgcatatatacctatacatccaaacattcctccattcgtctattaatctgcttgccttatcagatagatctcatatctattcttctgttcatccttctcttaacccatttttttttgaggtgttacgaagatcagaacaaaagtacaacctcagatatagcaacaggcaaaaaaaccaacaaattttgaaaatttgtatttagttcttctgtatccctttgggataacattttcataaaatgaaatgcacaaaacttcagtgtacttattgtttcattttaaataaacattgcaataaaaataaattagctcataaacaccacaaaataaactttccaagtgttctgaagatgaaatcaatgacctgaatccagtgggagatagtgcaaaggaactcagaaaacactaagcattttcatttgtaaagaagggaaaaatctggcaaatcaagaggttttcagtgatatagggcagagcatctcattttaacaggctgagtttgaatgagtttaccactatgattggtagaatcactgattatcctttcagattcacaaatagcttgttccaattcattctatatatagaatatttatgttgagtaatatgggaaagcattgaaattctactaatttattttaaaattcaacacatgtatggtacattatgttatagtatggaataagatacacatgaataagcgataaggaagagaactaaagagtagagagaattatcagtgtaatgccgtaaggcagtgttgttcaaactggagaccaagaataaatgaaaaatggacacagtcttaaacgtatataaattacgtgtaaataaataaatatatacataaaatattacataaaataaaatagtgcatcatatataattttctagtagtatatatttgtataaatatat

SEQ ID NO: 711427 - DNA, 527 bp, Homo sapiens
gttggttaaggggtataaaaatacaagtggatagaaggaataagttctaggccgggcacagtggctcatgcctgtaatccgaggactttgggaggccgaggcgagcgaatcacaaggtcagaagttcgagaccagcctggccagcatggtgaaaccccatctctactaaaaacacaaaaaattagctaggcgtagtggtgggcgcctgtaattccagttactcgggaggctgaggcaggagaatcacttgagcccaggaagcagaggttgcagtgagccaagattgtgccactgcactccagcctgggtgacagagcagggcttcatctcaaaaaaaaaagtattgttttataatgtrttataaattgacttgcttactataaacaatttacatacagaagtgaataaaggagaaactagcatttcaaataatcccaatcctacagctaactattgtgaaaaacttgatatatatgtgtacatatatgacatatagtatctaatatatatctattacattttatcta

SEQ ID NO: 711428 - DNA, 651 bp, Homo sapiens
tcttctttatctttgcagaatttcaggtaygtacaagcaaatacaaatgtatatgcacttcttttttttttattacacagttctgtatcctgccttttaaaacttatatcctgcttatctttctgtatcagggtatagtgagttctttcattcttacttataattatatgtttttctattataatggctatattatgtcttatttaattatttctctcttgatgaacaattgggaaagttctcatcttttgctattacaaaccacaatgcgatgaataacattgcatgtatgtcattgtgtacaggtgtacgtatattctaggataaatttccaaaagtagaattgctgagttacagggtgaatgcatttctgattttgacagtgctcaaaggtctgggggcacatagagatggtgctttagcagtgagcttaggctgacagcggttaagagagacctgcctcaggttgccagttaaaaaagaaatctgcataatgtgttgcttaaagaatgtggtaaggtgaaagtttggaaatactggtgtcattggaaagacagaaataagacagagattgtgttgggaagagaacatggaatttcgagtaatttctgcctgggtttgcatcttgaccctgccactcctgggtgcatg

SEQ ID NO: 711429 - DNA, 651 bp, Homo sapiens
tcttctttatctttgcagaatttcaggtatgtacaagcaaatacaaatgtatatgcacttcttttttttttattacacagttctgtatcctgccttttaaaacttatatcctgcttatctttctgtatcagggtatagtgagttctttcattcttacttataattatatgtttttctattataatggctatattatgtcttatttaattatttctctcttgatgaacarttgggaaagttctcatcttttgctattacaaaccacaatgcgatgaataacattgcatgtatgtcattgtgtacaggtgtacgtatattctaggataaatttccaaaagtagaattgctgagttacagggtgaatgcatttctgattttgacagtgctcaaaggtctgggggcacatagagatggtgctttagcagtgagcttaggctgacagcggttaagagagacctgcctcaggttgccagttaaaaaagaaatctgcataatgtgttgcttaaagaatgtggtaaggtgaaagtttggaaatactggtgtcattggaaagacagaaataagacagagattgtgttgggaagagaacatggaatttcgagtaatttctgcctgggtttgcatcttgaccctgccactcctgggtgcatg

SEQ ID NO: 711430 - DNA, 651 bp, Homo sapiens
tcttctttatctttgcagaatttcaggtatgtacaagcaaatacaaatgtatatgcacttcttttttttttattacacagttctgtatcctgccttttaaaacttatatcctgcttatctttctgtatcagggtatagtgagttctttcattcttacttataattatatgtttttctattataatggctatattatgtcttatttaattatttctctcttgatgaacaattgggaaagttctcatcttttgctattacaaaccacaatgcgatgaataacattgcatgtatgtcattgtgtacaggtgtacgtatattctaggataaatttccaaaagtagaattgctgagttacagrgtgaatgcatttctgattttgacagtgctcaaaggtctgggggcacatagagatggtgctttagcagtgagcttaggctgacagcggttaagagagacctgcctcaggttgccagttaaaaaagaaatctgcataatgtgttgcttaaagaatgtggtaaggtgaaagtttggaaatactggtgtcattggaaagacagaaataagacagagattgtgttgggaagagaacatggaatttcgagtaatttctgcctgggtttgcatcttgaccctgccactcctgggtgcatg

SEQ ID NO: 711431 - DNA, 651 bp, Homo sapiens
tcttctttatctttgcagaatttcaggtatgtacaagcaaatacaaatgtatatgcacttcttttttttttattacacagttctgtatcctgccttttaaaacttatatcctgcttatctttctgtatcagggtatagtgagttctttcattcttacttataattatatgtttttctattataatggctatattatgtcttatttaattatttctctcttgatgaacaattgggaaagttctcatcttttgctattacaaaccacaatgcgatgaataacattgcatgtatgtcattgtgtacaggtgtacgtatattctaggataaatttccaaaagtagaattgctgagttacagggtgaatgcatttctgattttgayagtgctcaaaggtctgggggcacatagagatggtgctttagcagtgagcttaggctgacagcggttaagagagacctgcctcaggttgccagttaaaaaagaaatctgcataatgtgttgcttaaagaatgtggtaaggtgaaagtttggaaatactggtgtcattggaaagacagaaataagacagagattgtgttgggaagagaacatggaatttcgagtaatttctgcctgggtttgcatcttgaccctgccactcctgggtgcatg

SEQ ID NO: 711432 - DNA, 3674 bp, Homo sapiens
ttccttctgctctggtgatgtaagacatgcctgcttctcctctgccttctgccatgattgtaagtttcctgagacctccccagccatgcttcctgtacagcctgcggaatcgtgagcctattaaacctcttttctttgtaaatttcccagcttcagatatttcttcatagcagtgcaagaactaatacaacacctttagcaactcagccacatgaggagttgagagtatgcaactctcaactctaactcaagtgtagatggggctgagtcttttttatttctgagcagacaaggtagggatcccaggctgtaattttcataaaaggaagtatgggaaggctttcttcgaattgaagttgagccttgcgcaagcatgagaggtaaaaaaaaaatccattctggagggatctaagatgaccagaaagaactcaaccatctgggggagagtggatgctgcgtgggagatgagaccaggaaatttgccactgcatcattggtttttggacttttggcagatctgatataatggaaggcatttagagcatctgaatctattgactgtccaattcagtcgattgattgttcagtgttgccaacattttgactttagttcacagcatttctcttgaaatgggttggctatattcccaatcaaatactgattgacacattggcatcaagcattcttatgtgcccagctcagtggtggtcacttggtggaagaatatgatctatcaccaaggagttactacttagtttgggaggaatcttaagtaacatggaataatttggtctatcttagccccccaaaagattgctttcatttatttatttagccacgctttggcataattctttaacttgctattgggagatattttggttacccattgtcaataatggggcatagtgaatcttccccaaactctgtggcatgcaacagtgaacatatatttagctcatgcatctgcgactggggggtggctgaacccagctgggcttgcttatgcaactgcaggtcagcagggggtgtgctgagctaggctgggctcagctgtgtggttctgctgtaggctacaggtctgtgggttaagttgaatgagcttgactccaggtatttttttaccttctttgaaccagagggctagccagggcatgctcttctcatggtgatgggagagattcaggaattcacatccagctgcacaaacacatctaaagctcctacttgtatcatgtctatcatcatttcattcaccaaaacaagtcatgtggccaagctcaaacttaagagatagaaagaaactatcaaattacatgggaaagagaaagagaatgagttctggaagaggaaaagaactcagaggaagttataacaactagttgtgaaagactcctggtgtattggtgctattgaaagggttgtccagatgggtgcggtggttcatgcctgtaatcccagcactttgggaagctgaggcgggtggatcatttgagctcaggagttcaagactagcctgaccaacatggtgaaaccccttctactaaaaatataaaaattagctgggcgtggtggcacacgccggtgatcccagctacttgggaggctgaggcaggagaatcacttgaaccagggaggtggaggttgcagtgagccgagattgcgccactgcactccagcctgggcaagagagtgagactccatctcaaaaagaaaaaaaaaacaaaaaaaaagaaagaaagggttgtccacttcactctcactatggcccagtgccccacacctctcaactttagagagagctgtgcttcccttgagcaactgggacatttttattgcatggatgccaaccagaagcccagagtcaaatttcagcttatctctaccttgtggctataaaaataatcctaataactgctctcaacccacctatagcttcatcatagctgctgcttctacgataccttcactgattttatcctgttgcattgagtaagttyttttaagtatctacacgtcttttctggaataaaatagggcagaaatgaacacacctgaatgccagatgtaaggtacggataattcattccactagtatttaccaaatactgtgtgtcaggctctgtatgtggtatctgaggttatgcaggtgagtgttacacattccctgccttcgaggaactcacatgacaatagactatagcagagtttttcaagttcagttacactgatattttgggccagatagttcttgttgggggcggtgggggctgtcttgcgcattgtaggatgtttaagcattcctagcctctacccagtaggtggcagtagtgacccccccaatatgacaattaaaatccccagaattgccacatgtcccttgaaaagcacaatcatccctggttaagtgcaactgtaggaggcttgggagctcagaagagacacggaacccagaaaagcttgccactttgatacctgagtgaaggttgggaggctggttgcagaagccaagagaaggagtagggaaaggccatttctgttacgtggagtagccggggttggtggacctgcacagggtgggggcatgaatgttgagagatgaagccagagatgcaggcagagccaggccttgtgccacagaccttgcatgaatgtgactctgtagatccctaccttcagcgtgtctgagaaaagacacttgttcaacacgtgaattcttgggaccccttccagggggttaaatccgggaatctcaatttaatttcctggagggagtcccgagaatctgcatgtggaatgaacctgaactcattaattccctggcaggggtctgcaaggatctgaatgtctccaacggggtccgggaatctgattttttgaggcatctgtgacgattctgatacagaaagtcccagactcacctgagtccttcatctgcgttatttaacttgaatttagaatgtctgtagaggtaatggtgagctactgaagcctcatctgcaggggtgacacagggttagggttatagatgacagctgctgtggatcagggctcttcgtcttggtttgtacaatggtatcactcgaggagtcttgagccagacctttgtcaggctctccctcagatcaattgcgtctgaatctctgggggtggggccctggaaacagtattttatttttgctgattcttacaggtactcatatattcacacactggcacttacttattcagtagccttttgtgccatgctcaaagcactgggaatatagaagtgaatgcgccacaggctctgctctcattgaaattacctttactgttgtggtagacaataagcgaataaacacgtattaaatcagtgtatttatttatgaagaaatatatgaagccatattgaacaatgaggaagtgataggaatgggaggtttatttttttaaaaatataagttttattcagatacataattcacattccatacaattcacccatttaaagtacacaatttaatagtttgtcgtatattcacagaattgtgcaaccatcaccacaatcgactttttttattttttagagacagggtctcacattgtcacccaggctggagtgcagtgatgagatcatggctcactgccgcttcaaattcctaggctcaaaggatcctcctgcctcagcctc

SEQ ID NO: 711433 - DNA, 3674 bp, Homo sapiens
ttccttctgctctggtgatgtaagacatgcctgcttctcctctgccttctgccatgattgtaagtttcctgagacctccccagccatgcttcctgtacagcctgcggaatcgtgagcctattaaacctcttttctttgtaaatttcccagcttcagatatttcttcatagcagtgcaagaactaatacaacacctttagcaactcagccacatgaggagttgagagtatgcaactctcaactctaactcaagtgtagatggggctgagtcttttttatttctgagcagacaaggtagggatcccaggctgtaattttcataaaaggaagtatgggaaggctttcttcgaattgaagttgagccttgcgcaagcatgagaggtaaaaaaaaaatccattctggagggatctaagatgaccagaaagaactcaaccatctgggggagagtggatgctgcgtgggagatgagaccaggaaatttgccactgcatcattggtttttggacttttggcagatctgatataatggaaggcatttagagcatctgaatctattgactgtccaattcagtcgattgattgttcagtgttgccaacattttgactttagttcacagcatttctcttgaaatgggttggctatattcccaatcaaatactgattgacacattggcatcaagcattcttatgtgcccagctcagtggtggtcacttggtggaagaatatgatctatcaccaaggagttactacttagtttgggaggaatcttaagtaacatggaataatttggtctatcttagccccccaaaagattgctttcatttatttatttagccacgctttggcataattctttaacttgctattgggagatattttggttacccattgtcaataatggggcatagtgaatcttccccaaactctgtggcatgcaacagtgaacatatatttagctcatgcatctgcgactggggggtggctgaacccagctgggcttgcttatgcaactgcaggtcagcagggggtgtgctgagctaggctgggctcagctgtgtggttctgctgtaggctacaggtctgtgggttaagttgaatgagcttgactccaggtatttttttaccttctttgaaccagagggctagccagggcatgctcttctcatggtgatgggagagattcaggaattcacatccagctgcacaaacacatctaaagctcctacttgtatcatgtctatcatcatttcattcaccaaaacaagtcatgtggccaagctcaaacttaagagatagaaagaaactatcaaattacatgggaaagagaaagagaatgagttctggaagaggaaaagaactcagaggaagttataacaactagttgtgaaagactcctggtgtattggtgctattgaaagggttgtccagatgggtgcggtggttcatgcctgtaatcccagcactttgggaagctgaggcgggtggatcatttgagctcaggagttcaagactagcctgaccaacatggtgaaaccccttctactaaaaatataaaaattagctgggcgtggtggcacacgccggtgatcccagctacttgggaggctgaggcaggagaatcacttgaaccagggaggtggaggttgcagtgagccgagattgcgccactgcactccagcctgggcaagagagtgagactccatctcaaaaagaaaaaaaaaacaaaaaaaaagaaagaaagggttgtccacttcactctcactatggcccagtgccccacacctctcaactttagagagagctgtgcttcccttgagcaactgggacatttttattgcatggatgccaaccagaagcccagagtcaaatttcagcttatctctaccttgtggctataaaaataatcctaataactgctctcaacccacctatagcttcatcatagctgctgcttctacgataccttcactgattttatcctgttgcattgagtaagttcttttaagtatctacacgtcttttctggaataaaatagggcagaaatgaacacacctgaatgccagatgyaaggtacggataattcattccactagtatttaccaaatactgtgtgtcaggctctgtatgtggtatctgaggttatgcaggtgagtgttacacattccctgccttcgaggaactcacatgacaatagactatagcagagtttttcaagttcagttacactgatattttgggccagatagttcttgttgggggcggtgggggctgtcttgcgcattgtaggatgtttaagcattcctagcctctacccagtaggtggcagtagtgacccccccaatatgacaattaaaatccccagaattgccacatgtcccttgaaaagcacaatcatccctggttaagtgcaactgtaggaggcttgggagctcagaagagacacggaacccagaaaagcttgccactttgatacctgagtgaaggttgggaggctggttgcagaagccaagagaaggagtagggaaaggccatttctgttacgtggagtagccggggttggtggacctgcacagggtgggggcatgaatgttgagagatgaagccagagatgcaggcagagccaggccttgtgccacagaccttgcatgaatgtgactctgtagatccctaccttcagcgtgtctgagaaaagacacttgttcaacacgtgaattcttgggaccccttccagggggttaaatccgggaatctcaatttaatttcctggagggagtcccgagaatctgcatgtggaatgaacctgaactcattaattccctggcaggggtctgcaaggatctgaatgtctccaacggggtccgggaatctgattttttgaggcatctgtgacgattctgatacagaaagtcccagactcacctgagtccttcatctgcgttatttaacttgaatttagaatgtctgtagaggtaatggtgagctactgaagcctcatctgcaggggtgacacagggttagggttatagatgacagctgctgtggatcagggctcttcgtcttggtttgtacaatggtatcactcgaggagtcttgagccagacctttgtcaggctctccctcagatcaattgcgtctgaatctctgggggtggggccctggaaacagtattttatttttgctgattcttacaggtactcatatattcacacactggcacttacttattcagtagccttttgtgccatgctcaaagcactgggaatatagaagtgaatgcgccacaggctctgctctcattgaaattacctttactgttgtggtagacaataagcgaataaacacgtattaaatcagtgtatttatttatgaagaaatatatgaagccatattgaacaatgaggaagtgataggaatgggaggtttatttttttaaaaatataagttttattcagatacataattcacattccatacaattcacccatttaaagtacacaatttaatagtttgtcgtatattcacagaattgtgcaaccatcaccacaatcgactttttttattttttagagacagggtctcacattgtcacccaggctggagtgcagtgatgagatcatggctcactgccgcttcaaattcctaggctcaaaggatcctcctgcctcagcctc

SEQ ID NO: 711434 - DNA, 3674 bp, Homo sapiens
ttccttctgctctggtgatgtaagacatgcctgcttctcctctgccttctgccatgattgtaagtttcctgagacctccccagccatgcttcctgtacagcctgcggaatcgtgagcctattaaacctcttttctttgtaaatttcccagcttcagatatttcttcatagcagtgcaagaactaatacaacacctttagcaactcagccacatgaggagttgagagtatgcaactctcaactctaactcaagtgtagatggggctgagtcttttttatttctgagcagacaaggtagggatcccaggctgtaattttcataaaaggaagtatgggaaggctttcttcgaattgaagttgagccttgcgcaagcatgagaggtaaaaaaaaaatccattctggagggatctaagatgaccagaaagaactcaaccatctgggggagagtggatgctgcgtgggagatgagaccaggaaatttgccactgcatcattggtttttggacttttggcagatctgatataatggaaggcatttagagcatctgaatctattgactgtccaattcagtcgattgattgttcagtgttgccaacattttgactttagttcacagcatttctcttgaaatgggttggctatattcccaatcaaatactgattgacacattggcatcaagcattcttatgtgcccagctcagtggtggtcacttggtggaagaatatgatctatcaccaaggagttactacttagtttgggaggaatcttaagtaacatggaataatttggtctatcttagccccccaaaagattgctttcatttatttatttagccacgctttggcataattctttaacttgctattgggagatattttggttacccattgtcaataatggggcatagtgaatcttccccaaactctgtggcatgcaacagtgaacatatatttagctcatgcatctgcgactggggggtggctgaacccagctgggcttgcttatgcaactgcaggtcagcagggggtgtgctgagctaggctgggctcagctgtgtggttctgctgtaggctacaggtctgtgggttaagttgaatgagcttgactccaggtatttttttaccttctttgaaccagagggctagccagggcatgctcttctcatggtgatgggagagattcaggaattcacatccagctgcacaaacacatctaaagctcctacttgtatcatgtctatcatcatttcattcaccaaaacaagtcatgtggccaagctcaaacttaagagatagaaagaaactatcaaattacatgggaaagagaaagagaatgagttctggaagaggaaaagaactcagaggaagttataacaactagttgtgaaagactcctggtgtattggtgctattgaaagggttgtccagatgggtgcggtggttcatgcctgtaatcccagcactttgggaagctgaggcgggtggatcatttgagctcaggagttcaagactagcctgaccaacatggtgaaaccccttctactaaaaatataaaaattagctgggcgtggtggcacacgccggtgatcccagctacttgggaggctgaggcaggagaatcacttgaaccagggaggtggaggttgcagtgagccgagattgcgccactgcactccagcctgggcaagagagtgagactccatctcaaaaagaaaaaaaaaacaaaaaaaaagaaagaaagggttgtccacttcactctcactatggcccagtgccccacacctctcaactttagagagagctgtgcttcccttgagcaactgggacatttttattgcatggatgccaaccagaagcccagagtcaaatttcagcttatctctaccttgtggctataaaaataatcctaataactgctctcaacccacctatagcttcatcatagctgctgcttctacgataccttcactgattttatcctgttgcattgagtaagttcttttaagtatctacacgtcttttctggaataaaatagggcagaaatgaacacacctgaatgccagatgtaaggtacggataattcattccactagtatttaccaaatactgtgtgtcaggctctgtatgtggtatctgaggttatgcaggtgagtgttacacattccctgccttcgaggaactcacatgacaatagactatagcagagtttttcaagttcagttacactgatattttgggccagatagttcttgttgggggcggtgggggctgtcttgcgcattgtaggatgtttaagcattcctagcctctacccagtaggtggcagtagtgacccccccaatatgacaattaaaatccccagaattgccacatgtcccttgaaaagcacaatcatccctggttaagtgcaactgtaggaggcttgggagctcagaakagacacggaacccagaaaagcttgccactttgatacctgagtgaaggttgggaggctggttgcagaagccaagagaaggagtagggaaaggccatttctgttacgtggagtagccggggttggtggacctgcacagggtgggggcatgaatgttgagagatgaagccagagatgcaggcagagccaggccttgtgccacagaccttgcatgaatgtgactctgtagatccctaccttcagcgtgtctgagaaaagacacttgttcaacacgtgaattcttgggaccccttccagggggttaaatccgggaatctcaatttaatttcctggagggagtcccgagaatctgcatgtggaatgaacctgaactcattaattccctggcaggggtctgcaaggatctgaatgtctccaacggggtccgggaatctgattttttgaggcatctgtgacgattctgatacagaaagtcccagactcacctgagtccttcatctgcgttatttaacttgaatttagaatgtctgtagaggtaatggtgagctactgaagcctcatctgcaggggtgacacagggttagggttatagatgacagctgctgtggatcagggctcttcgtcttggtttgtacaatggtatcactcgaggagtcttgagccagacctttgtcaggctctccctcagatcaattgcgtctgaatctctgggggtggggccctggaaacagtattttatttttgctgattcttacaggtactcatatattcacacactggcacttacttattcagtagccttttgtgccatgctcaaagcactgggaatatagaagtgaatgcgccacaggctctgctctcattgaaattacctttactgttgtggtagacaataagcgaataaacacgtattaaatcagtgtatttatttatgaagaaatatatgaagccatattgaacaatgaggaagtgataggaatgggaggtttatttttttaaaaatataagttttattcagatacataattcacattccatacaattcacccatttaaagtacacaatttaatagtttgtcgtatattcacagaattgtgcaaccatcaccacaatcgactttttttattttttagagacagggtctcacattgtcacccaggctggagtgcagtgatgagatcatggctcactgccgcttcaaattcctaggctcaaaggatcctcctgcctcagcctc

SEQ ID NO: 711435 - DNA, 3674 bp, Homo sapiens
ttccttctgctctggtgatgtaagacatgcctgcttctcctctgccttctgccatgattgtaagtttcctgagacctccccagccatgcttcctgtacagcctgcggaatcgtgagcctattaaacctcttttctttgtaaatttcccagcttcagatatttcttcatagcagtgcaagaactaatacaacacctttagcaactcagccacatgaggagttgagagtatgcaactctcaactctaactcaagtgtagatggggctgagtcttttttatttctgagcagacaaggtagggatcccaggctgtaattttcataaaaggaagtatgggaaggctttcttcgaattgaagttgagccttgcgcaagcatgagaggtaaaaaaaaaatccattctggagggatctaagatgaccagaaagaactcaaccatctgggggagagtggatgctgcgtgggagatgagaccaggaaatttgccactgcatcattggtttttggacttttggcagatctgatataatggaaggcatttagagcatctgaatctattgactgtccaattcagtcgattgattgttcagtgttgccaacattttgactttagttcacagcatttctcttgaaatgggttggctatattcccaatcaaatactgattgacacattggcatcaagcattcttatgtgcccagctcagtggtggtcacttggtggaagaatatgatctatcaccaaggagttactacttagtttgggaggaatcttaagtaacatggaataatttggtctatcttagccccccaaaagattgctttcatttatttatttagccacgctttggcataattctttaacttgctattgggagatattttggttacccattgtcaataatggggcatagtgaatcttccccaaactctgtggcatgcaacagtgaacatatatttagctcatgcatctgcgactggggggtggctgaacccagctgggcttgcttatgcaactgcaggtcagcagggggtgtgctgagctaggctgggctcagctgtgtggttctgctgtaggctacaggtctgtgggttaagttgaatgagcttgactccaggtatttttttaccttctttgaaccagagggctagccagggcatgctcttctcatggtgatgggagagattcaggaattcacatccagctgcacaaacacatctaaagctcctacttgtatcatgtctatcatcatttcattcaccaaaacaagtcatgtggccaagctcaaacttaagagatagaaagaaactatcaaattacatgggaaagagaaagagaatgagttctggaagaggaaaagaactcagaggaagttataacaactagttgtgaaagactcctggtgtattggtgctattgaaagggttgtccagatgggtgcggtggttcatgcctgtaatcccagcactttgggaagctgaggcgggtggatcatttgagctcaggagttcaagactagcctgaccaacatggtgaaaccccttctactaaaaatataaaaattagctgggcgtggtggcacacgccggtgatcccagctacttgggaggctgaggcaggagaatcacttgaaccagggaggtggaggttgcagtgagccgagattgcgccactgcactccagcctgggcaagagagtgagactccatctcaaaaagaaaaaaaaaacaaaaaaaaagaaagaaagggttgtccacttcactctcactatggcccagtgccccacacctctcaactttagagagagctgtgcttcccttgagcaactgggacatttttattgcatggatgccaaccagaagcccagagtcaaatttcagcttatctctaccttgtggctataaaaataatcctaataactgctctcaacccacctatagcttcatcatagctgctgcttctacgataccttcactgattttatcctgttgcattgagtaagttcttttaagtatctacacgtcttttctggaataaaatagggcagaaatgaacacacctgaatgccagatgtaaggtacggataattcattccactagtatttaccaaatactgtgtgtcaggctctgtatgtggtatctgaggttatgcaggtgagtgttacacattccctgccttcgaggaactcacatgacaatagactatagcagagtttttcaagttcagttacactgatattttgggccagatagttcttgttgggggcggtgggggctgtcttgcgcattgtaggatgtttaagcattcctagcctctacccagtaggtggcagtagtgacccccccaatatgacaattaaaatccccagaattgccacatgtcccttgaaaagcacaatcatccctggttaagtgcaactgtaggaggcttgggagctcagaagagacacggaacccagaaaagcttgccactttgatacctgagtgaaggttgggaggctggttgcagaagccaagagaaggagtagggaaaggccatttctgttacgtggagtagccggggttggtggacctgcacagggtgggggcatgaatgttgagagatgaagccagagatgcaggcagagccaggccttgtgccacagaccttgcatgaatgtgactctgtagatccctaccttcagcrtgtctgagaaaagacacttgttcaacacgtgaattcttgggaccccttccagggggttaaatccgggaatctcaatttaatttcctggagggagtcccgagaatctgcatgtggaatgaacctgaactcattaattccctggcaggggtctgcaaggatctgaatgtctccaacggggtccgggaatctgattttttgaggcatctgtgacgattctgatacagaaagtcccagactcacctgagtccttcatctgcgttatttaacttgaatttagaatgtctgtagaggtaatggtgagctactgaagcctcatctgcaggggtgacacagggttagggttatagatgacagctgctgtggatcagggctcttcgtcttggtttgtacaatggtatcactcgaggagtcttgagccagacctttgtcaggctctccctcagatcaattgcgtctgaatctctgggggtggggccctggaaacagtattttatttttgctgattcttacaggtactcatatattcacacactggcacttacttattcagtagccttttgtgccatgctcaaagcactgggaatatagaagtgaatgcgccacaggctctgctctcattgaaattacctttactgttgtggtagacaataagcgaataaacacgtattaaatcagtgtatttatttatgaagaaatatatgaagccatattgaacaatgaggaagtgataggaatgggaggtttatttttttaaaaatataagttttattcagatacataattcacattccatacaattcacccatttaaagtacacaatttaatagtttgtcgtatattcacagaattgtgcaaccatcaccacaatcgactttttttattttttagagacagggtctcacattgtcacccaggctggagtgcagtgatgagatcatggctcactgccgcttcaaattcctaggctcaaaggatcctcctgcctcagcctc

SEQ ID NO: 711436 - DNA, 1539 bp, Homo sapiens
catttattgagtacttgctgtgtgctgagccccatgtcgaaggctttacctgtaatttcttcacttcacagccacaacctaatgaaaggaagacactatgtttgtatttcccttctagagatgaagaaaccgaggcttagagatatcactaattgctcaaggttttgcagctgttgtgctgtggatctgggattcaaacccaggtccggttgacttttgagctaagactatcgctcttttgcctcctgaatttctagtcatttaaaaatcaaggctgaggctatcaagctgcgcaaaagctgttttggcttataagacaatcaggttgggagactgagactacttgggaggaaaaagggggaaatacaagttgcaagtgtgcaagttgctacactggccctgtgtatctttgagtttttgcaggtactctattcaccatctgtctctcctcatctcttgtgaaatggagttggtggcctttaaaaagctgccagctttgagaaaggggggctcagtttcccaatcttggcccagaggacttctctccatctggatgagcattgagatcaagggtgagctagtcccaaggttaattggatgaaccgatcttttcttttgttggcttgtggaggtcaattagtaatgtggatgattggattcagttaaatgccttcaatgaactaggtctataggggacagtgattggttcccaaatggggtgagggacccatttggactaaacgtttcaccttgccctggctttggtggcttcaaaaccaaatgaatggccctttaagccattaagcagtcgcaaagaagcaggtctaccagcactcctgttcattggtttgtttttatttatttgagcattttatttttatttatttatttatttatttttgagatggagaaagactccgtctcaaaaaaaaaaaacaacaacaaataaaaaaaaacccacaaagaaggcattccctgttgctaaaatataaaattatttatttatttgtatttttttatttgagcattttattcatttgagcagtttattttccccagtttcatcccttgtagtggaaaaagcacagtctagagtcaggaagacatagctrtgacttctaaccctgtcttttgctatatgcatgaagttgggcaatgatattagtgtttctgagccttaatttccttgcctgaaaaatggggcctccgggcacagtgactcacgcctgtaatcttagcactttgggaggccgaggcgggaggaccgcttgagcccaggagttcgagagcagactgggcaacatggtgaaaccctgtccctacaaaaaatacaaagattagccgggtgtggtggcatggacctgtcatcccagctactcgggaggctgagaggtgggaggacggcttgagcctgggaggttgaggctgcagtgagttgtgattgcactactacattccagcctgggcaattaaaaataaaatggagccgatagaatttaccttgccgtagtgcttattgtggatatgaaatggaataac

SEQ ID NO: 711437 - DNA, 1539 bp, Homo sapiens
catttattgagtacttgctgtgtgctgagccccatgtcgaaggctttacctgtaatttcttcacttcacagccacaacctaatgaaaggaagacactatgtttgtatttcccttctagagatgaagaaaccgaggcttagagatatcactaattgctcaaggttttgcagctgttgtgctgtggatctgggattcaaacccaggtccggttgacttttgagctaagactatcgctcttttgcctcctgaatttctagtcatttaaaaatcaaggctgaggctatcaagctgcgcaaaagctgttttggcttataagacaatcaggttgggagactgagactacttgggaggaaaaagggggaaatacaagttgcaagtgtgcaagttgctacactggccctgtgtatctttgagtttttgcaggtactctattcaccatctgtctctcctcatctcttgtgaaatggagttggtggcctttaaaaagctgccagctttgagaaaggggggctcagtttcccaatcttggcccagaggacttctctccatctggatgagcattgagatcaagggtgagctagtcccaaggttaattggatgaaccgatcttttcttttgttggcttgtggaggtcaattagtaatgtggatgattggattcagttaaatgccttcaatgaactaggtctataggggacagtgattggttcccaaatggggtgagggacccatttggactaaacgtttcaccttgccctggctttggtggcttcaaaaccaaatgaatggccctttaagccattaagcagtcgcaaagaagcaggtctaccagcactcctgttcattggtttgtttttatttatttgagcattttatttttatttatttatttatttatttttgagatggagaaagactccgtctcaaaaaaaaaaaacaacaacaaataaaaaaaaacccacaaagaaggcattccctgttgctaaaatataaaattatttatttatttgtatttttttatttgagcattttattcatttgagcagtttattttccccagtttcatcccttgtagtggaaaaagcacagtctagagtcaggaagacatagctatgacttctaaccctgtcttttgctatatgcatgaagttgggcaatgatattagtgtttctgagccttaatttccttgcctgaaaaatggggcctccgggcacagtgactcacgcctgtaatcttagcactttgggaggccgaggcgggaggaccgcttgagcccaggagttcgagagcagactgggcaacatggtgaaaccctgtccctacaaaaaatacaaagattagccrggtgtggtggcatggacctgtcatcccagctactcgggaggctgagaggtgggaggacggcttgagcctgggaggttgaggctgcagtgagttgtgattgcactactacattccagcctgggcaattaaaaataaaatggagccgatagaatttaccttgccgtagtgcttattgtggatatgaaatggaataac

SEQ ID NO: 711438 - DNA, 606 bp, Homo sapiens
tggacaattgcaatagaaaaaactgatatgcagggtgatatggtttggctgtgtccccacctaaatctcaaattgtagctcccataatttccacatgtcatcggagggacatggtgggaggtaattgaatcgtggggcgggtttttcccatgctgttcttgtgatagtgaataggtctcacgagatctgatggctttaaaaaggggagttcccctgcacacactctcttgcctgccaccatgtaagacgtgactttgctcctcattcgtcttctgccacaattgtgagatctccaaagccatgtggaactgggagtccgtgaccactctttttctttataaattactcagtcttgggtatgtctttattagcattgtgaaaacagagtaatacwtgggggggtggagagagagagagggagagagggagatggggagtgagaagatgggggagggagagtgagagagagagagagagagaaagaaagaagagattgaggacacaatacagacttaggaaggacagaccgggagctcccagaaagacagagacaggctgtgttgactcctgctatctttctatccaaaacctgctgtgctttctgac

SEQ ID NO: 711439 - DNA, 606 bp, Homo sapiens
tggacaattgcaatagaaaaaactgatatgcagggtgatatggtttggctgtgtccccacctaaatctcaaattgtagctcccataatttccacatgtcatcggagggacatggtgggaggtaattgaatcgtggggcgggtttttcccatgctgttcttgtgatagtgaataggtctcacgagatctgatggctttaaaaaggggagttcccctgcacacactctcttgcctgccaccatgtaagacgtgactttgctcctcattcgtcttctgccacaattgtgagatctccaaagccatgtggaactgggagtccgtgaccactctttttctttataaattactcagtcttgggtatgtctttattagcattgtgaaaacagagtaatacttgggggggyggagagagagagagggagagagggagatggggagtgagaagatgggggagggagagtgagagagagagagagagagaaagaaagaagagattgaggacacaatacagacttaggaaggacagaccgggagctcccagaaagacagagacaggctgtgttgactcctgctatctttctatccaaaacctgctgtgctttctgac

SEQ ID NO: 711440 - DNA, 606 bp, Homo sapiens
tggacaattgcaatagaaaaaactgatatgcagggtgatatggtttggctgtgtccccacctaaatctcaaattgtagctcccataatttccacatgtcatcggagggacatggtgggaggtaattgaatcgtggggcgggtttttcccatgctgttcttgtgatagtgaataggtctcacgagatctgatggctttaaaaaggggagttcccctgcacacactctcttgcctgccaccatgtaagacgtgactttgctcctcattcgtcttctgccacaattgtgagatctccaaagccatgtggaactgggagtccgtgaccactctttttctttataaattactcagtcttgggtatgtctttattagcattgtgaaaacagagtaatacttgggggggtggagagagagagagggagagagggagatggggagygagaagatgggggagggagagtgagagagagagagagagagaaagaaagaagagattgaggacacaatacagacttaggaaggacagaccgggagctcccagaaagacagagacaggctgtgttgactcctgctatctttctatccaaaacctgctgtgctttctgac

SEQ ID NO: 711441 - DNA, 606 bp, Homo sapiens
tggacaattgcaatagaaaaaactgatatgcagggtgatatggtttggctgtgtccccacctaaatctcaaattgtagctcccataatttccacatgtcatcggagggacatggtgggaggtaattgaatcgtggggcgggtttttcccatgctgttcttgtgatagtgaataggtctcacgagatctgatggctttaaaaaggggagttcccctgcacacactctcttgcctgccaccatgtaagacgtgactttgctcctcattcgtcttctgccacaattgtgagatctccaaagccatgtggaactgggagtccgtgaccactctttttctttataaattactcagtcttgggtatgtctttattagcattgtgaaaacagagtaatacttgggggggtggagagagagagagggagagagggagatggggagtragaagatgggggagggagagtgagagagagagagagagagaaagaaagaagagattgaggacacaatacagacttaggaaggacagaccgggagctcccagaaagacagagacaggctgtgttgactcctgctatctttctatccaaaacctgctgtgctttctgac

SEQ ID NO: 711442 - DNA, 606 bp, Homo sapiens
tggacaattgcaatagaaaaaactgatatgcagggtgatatggtttggctgtgtccccacctaaatctcaaattgtagctcccataatttccacatgtcatcggagggacatggtgggaggtaattgaatcgtggggcgggtttttcccatgctgttcttgtgatagtgaataggtctcacgagatctgatggctttaaaaaggggagttcccctgcacacactctcttgcctgccaccatgtaagacgtgactttgctcctcattcgtcttctgccacaattgtgagatctccaaagccatgtggaactgggagtccgtgaccactctttttctttataaattactcagtcttgggtatgtctttattagcattgtgaaaacagagtaatacttgggggggtggagagagagagagggagagagggagatggggagtgagaagatgggggagrgagagtgagagagagagagagagagaaagaaagaagagattgaggacacaatacagacttaggaaggacagaccgggagctcccagaaagacagagacaggctgtgttgactcctgctatctttctatccaaaacctgctgtgctttctgac

SEQ ID NO: 711443 - DNA, 794 bp, Homo sapiens
tccaacgttgtgtctttgcttatactatgttcacccttttaggtatgtttgtacaaaatgaaaaaggaataaaaaccaacattttagaggataattcatgctactcaaaacaatcacgaggaaaagctgggctgaaactagtgacaagcttttgcattgtgccacattgctgtcacatttttgcccatattatttatgagatttcttcaaaatttttataccaggtcattcttaaggaattctttgctcaggaaaaagtccaagttagcatccttcagacccctgctgtctctccagctcctctccacacacatccatttatagggaaaggcaagggcagaaagcagatttagaagagaaaaaggatagaggagcatgagtgtgtgtgtccacgtgtgtgtgtttgtgtgtgtgtgtgtgtgtgtgtgatgtgtcctgctttaccacagtccagggagcttacagggaagtccatgttcaatatcagcactgcaggcctctccagcaggcccttgttccttcctggtcttcactgcctagtgcacggcaactaagccacaacacccaaacctgagacaaatcatcccatcccagggctaaaaaagtgacwctaatgatgtgtctgcgtaacaatcaataattcatttaaattgattgcctgatacataaataatttccttataaccttctgacttttagcaccactgatctaagaatcacacctaaaaaagtgctgtcagaatgcaaaaatagttttctgtttgaataatacttattttttatgaccatatgaa

SEQ ID NO: 711444 - DNA, 794 bp, Homo sapiens
tccaacgttgtgtctttgcttatactatgttcacccttttaggtatgtttgtacaaaatgaaaaaggaataaaaaccaacattttagaggataattcatgctactcaaaacaatcacgaggaaaagctgggctgaaactagtgacaagcttttgcattgtgccacattgctgtcacatttttgcccatattatttatgagatttcttcaaaatttttataccaggtcattcttaaggaattctttgctcaggaaaaagtccaagttagcatccttcagacccctgctgtctctccagctcctctccacacacatccatttatagggaaaggcaagggcagaaagcagatttagaagagaaaaaggatagaggagcatgagtgtgtgtgtccacgtgtgtgtgtttgtgtgtgtgtgtgtgtgtgtgtgatgtgtcctgctttaccacagtccagggagcttacagggaagtccatgttcaatatcagcactgcaggcctctccagcaggcccttgttccttcctggtcttcactgcctagtgcacggcaactaagccacaacacccaaacctgagacaaatcatcccatcccagggctaaaaaagtgactckaatgatgtgtctgcgtaacaatcaataattcatttaaattgattgcctgatacataaataatttccttataaccttctgacttttagcaccactgatctaagaatcacacctaaaaaagtgctgtcagaatgcaaaaatagttttctgtttgaataatacttattttttatgaccatatgaa

SEQ ID NO: 711445 - DNA, 648 bp, Homo sapiens
atgttcaaaatgtaacaacaaaaaaagctaacaccagtcatttatattaactttttttttttaaatcaaaaattgttaatgttagaaacatactatgaagtgcctttatctgcttagacctaaggaagattttaaagttgggttgcacaggaaatgatgatgcttcaatttcttaatagttaaaaagtgctaaatactacttgaaattattgtttacagattagtgacaagagctggggttaggatccggttggactctgacatcggatgccctcaaacatacagaacttccaaactcaagtccagccataagctattttgccaacatgtcagagtaatctgtatttttgtatgtgatttctacttttatagacttgttttaaaacaataaaacacatttttataaaaatgagtgcttaaactaagttgtattccttttttctttctctttttttaagtgctgtggttaaaatttgaaagcatttagtgtggtatgccatttggcttagatacctctaaataagactcttcaaaacagagccctgagatggtcctttttgasccatctacttcatatgcttgtcacattaaaaaaaaaagtttataatgcctttataaaaggggctaatacagtcttgttatcttttt

SEQ ID NO: 711446 - DNA, 1712 bp, Homo sapiens
tattttggtaaaaattatcttgttaatatgtttcaattttatagcataaagttgtttatagtgttccttttctaatgcatttgttaagtctctaatctactttttactattaacattaaatattttgccctttcctttttcttattcaatattactagaaatttttctgtttcaaaagaaaatattttgatatacatgtgttttctccattttctatattatcagtttgtatttttgttacttccttttttcggtattttggggggaatttattctgctctttttctaattgatttagtaaaatgccagaatcattacttttccatctttctttgttttcatatgagaattttatggcatatattttcccataaatgttcttttcgttgtagtacaccaattttgatatgaagaactatctgtatcagttgtcagtaaattctaaactattttctattttccataatagcccttttaattgtttttggttttaatgcttataatccctatttccttattttcaagttatatatttgtatcattttttaaacttacagtttgtggcattatctaatgagtttttgatgtgatcaataacaacttaactggtatcaatcaccttcacacctccctaccattctctgtttatgcagcttcagatttgtcaaatgcattggaggaaaatcagccatatatatgaggttcctgaagcctctcacttatgaatctgaatttgcagcctcttgtcccaaatcagcaaatgctcccacagaaaaatcagctgtggaatatcaggttacatcttagcagttctcctttctctggaattttgacccctctggttgttattaatgtggccactctccaatatctttaaatagatttttttaaaagttatctggcttttctaggtattttcatggaagcaataatctgatgcatgccaatccattatctagaaggaaaaagtatcatttctattctctgaattatttttatttccttccaggtcagtctttctcttttgtttacttttggtttctttttatattttaagattttatcaaatattaagtaacccttctctgttttaaattcacatttatcaatagctaacagcattgcatatrtcaccaattggcaaccttaattttaaaattagcaggtaggtgctgatatgctagggtctgcacttaccagttccagaatgcagagggctttatcttccatcattgtcactcatactagcaatccttttttttctaggtgtttgtttaacctttcaaattaaaaaactctccctttacccacactcactaagcctagtggacatccattctagatgtaaaatagggaagaggtgagatatggagggggtgagtaaagtggtaaatgtcttaggttttgctaggcatgtaataatctctgccacaattacccagttctgcccttgtcatgcctaagcatacataaacaatatgtaaatgaatgaggcattaggcagctgaatggatttggcctgtgggtcataaattgccaactcatgactctgaagaaatgatacatttatgaggatctctggatactttagattattctgacttgtcattactatttatttaaaaaatgtaagaattggagataagtaaattatagacatgattctactacatatcatcccatacatatttataattttatcagagtgtaga

SEQ ID NO: 711447 - DNA, 793 bp, Homo sapiens
tcctggtgggaacaagtccccaagcggagagcagagccagaaggtggggctctgcggggctggtgccctgagtggagctcaaacttggcttcacattagggttttcaggcattttgcaaatatagcttctatgctgttttatcagagattgctattatcacagtatgggacccaccctcaataatacctacaatggtgcaggtgattctcatctgtctccagcattgaacatcaaggcagtttcctccatgttgagagctgagatcagcctgtgatccacagggaggtgagggggctgtgctctgcatggggtttggttagggccagatctgtgccctgaagatctgtgtcctgctgcagcgtgtgtgtggacttttgcaggagggagcaagacctcaaaacaggtcaaaattgcccttgtaggtcttcctgtggcaccttcttatctccacataatctctggtgcagtgggcagcagagaaccatctttmtccctggtgaggtctcccctgtgtgtgtgttttgtcacaggaaaggagggagtgatttctaaaaattaaatctcgtatttttttttacatacaggattgattttccaaagactcatgttacgtgaggaagacaccaagaggagcaaagaaaaggagccagggatggctcttcctcaggtggagtaatattcctcggtggattcttctgtctctttcctttctgaaatgccaggtattgtagtagccagtcttctgtgagtctgaagcatcctgcctcacacgtttgctcacactaacccatg

SEQ ID NO: 711448 - DNA, 679 bp, Homo sapiens
ggagcaaaggagtaggctccaactgggtgaagatgttggtgtggtgcgttatgtaaaatatacaaattattattggaaataaccacgtctcagcagtgctagttctcagtttggagaatgggaaatcgaaaggatcagattcagagacggcaacttactcaaggtcacagcattttaaacccaagtgaaatctcctaggcccttcatgccacactcatccatccctacctacttgtgttgcaaccaagggccccactgtagtgcctaggggagcaggtctagggcayagtgccaggcctgattaatgtcttccttaccattttccagtgaggggctgtgattaggcctatttataggggcctggtcccttaatattctgcctggtgcatctcttgccaatcaaatcagtgctgtctgcagtgtgattgctgctttagtggcaccagggagaggagttaattaaacccaatataaatagactctgccctcactttgcaattccaggagtgtttttccttcctgtcctccacccccacaggcacctctttcctcttgtccccctaagctctagcctgggtgagcagggctggatactcctatacctagagtcactagccactgcccagtctgtttcaggagcaggcctcagattcctcaggggttaaagtgggaagaaccc

SEQ ID NO: 711449 - DNA, 679 bp, Homo sapiens
ggagcaaaggagtaggctccaactgggtgaagatgttggtgtggtgcgttatgtaaaatatacaaattattattggaaataaccacgtctcagcagtgctagttctcagtttggagaatgggaaatcgaaaggatcagattcagagacggcaacttactcaaggtcacagcattttaaacccaagtgaaatctcctaggcccttcatgccacactcatccatccctacctacttgtgttgcaaccaagggccccactgtagtgcctaggggagcaggtctagggcacagtgccaggcctgattaatgtcttccttaccattttccagtgaggggctgtgattaggcctatttataggggcctggtcccttaatattctgcctggtgcatctcttgccaatcaaatcagtgctgtctgcagtgtgattgctgctttagtggcaccagggagaggagttaattaaacccaatataaatagactctgccctcactttgcaattccaggagtgtttttccttcctgtcctccacccccacaggcacctctttcctcttgkccccctaagctctagcctgggtgagcagggctggatactcctatacctagagtcactagccactgcccagtctgtttcaggagcaggcctcagattcctcaggggttaaagtgggaagaaccc

SEQ ID NO: 711450 - DNA, 679 bp, Homo sapiens
ggagcaaaggagtaggctccaactgggtgaagatgttggtgtggtgcgttatgtaaaatatacaaattattattggaaataaccacgtctcagcagtgctagttctcagtttggagaatgggaaatcgaaaggatcagattcagagacggcaacttactcaaggtcacagcattttaaacccaagtgaaatctcctaggcccttcatgccacactcatccatccctacctacttgtgttgcaaccaagggccccactgtagtgcctaggggagcaggtctagggcacagtgccaggcctgattaatgtcttccttaccattttccagtgaggggctgtgattaggcctatttataggggcctggtcccttaatattctgcctggtgcatctcttgccaatcaaatcagtgctgtctgcagtgtgattgctgctttagtggcaccagggagaggagttaattaaacccaatataaatagactctgccctcactttgcaattccaggagtgtttttccttcctgtcctccacccccacaggcacctctttcctcttgtccccytaagctctagcctgggtgagcagggctggatactcctatacctagagtcactagccactgcccagtctgtttcaggagcaggcctcagattcctcaggggttaaagtgggaagaaccc

SEQ ID NO: 711451 - DNA, 627 bp, Homo sapiens
tgggagatgtctcccggtcaggaggcacggagatctgtgccttagcagagcttgagcaccatgctgggagatcccctgctctcttcagagctggcaaggaggaacatttacatctgctgaagctgtgcccacagccgccccttcccccasgtgctctgttccagggagatgggagttttatatataagcccctgactgggtctgctgcctttctttcagaaatgccttgcgcagagaagaggaatctacagaggcagtctggctaccgtggtgggctccgcccattttgaacttccaagtgtctttgtttacactgtgagggcaaaaccgcctactcaagcttcagtaatggtggacgcccctccccccaccaagctggagcatccaaggttgacttcagactgctgtgctggcagcaagagtttaaagccagttgatcttagcttgctgggctacgtgggggtgggatcctctgcgctagaccacttggctccctggcttagccccctttccaggggagtgaacgcttacgtcttgctggctggcgttccaggtgccactcggcacatttcttttaaaggtgcttgaagatgaattcccagaagtatgtagatttatgacctccat

SEQ ID NO: 711452 - DNA, 627 bp, Homo sapiens
tgggagatgtctcccggtcaggaggcacggagatctgtgccttagcagagcttgagcaccatgctgggagatcccctgctctcttcagagctggcaaggaggaacatttacatctgctgaagctgtgcccacagccgccccttcccccaggtgctctgttccagggagatgggagttttatatataagcccctgactgggtctgctgcctttctttcagaaatgccttgcgcagagargaggaatctacagaggcagtctggctaccgtggtgggctccgcccattttgaacttccaagtgtctttgtttacactgtgagggcaaaaccgcctactcaagcttcagtaatggtggacgcccctccccccaccaagctggagcatccaaggttgacttcagactgctgtgctggcagcaagagtttaaagccagttgatcttagcttgctgggctacgtgggggtgggatcctctgcgctagaccacttggctccctggcttagccccctttccaggggagtgaacgcttacgtcttgctggctggcgttccaggtgccactcggcacatttcttttaaaggtgcttgaagatgaattcccagaagtatgtagatttatgacctccat

SEQ ID NO: 711453 - DNA, 627 bp, Homo sapiens
tgggagatgtctcccggtcaggaggcacggagatctgtgccttagcagagcttgagcaccatgctgggagatcccctgctctcttcagagctggcaaggaggaacatttacatctgctgaagctgtgcccacagccgccccttcccccaggtgctctgttccagggagatgggagttttatatataagcccctgactgggtctgctgcctttctttcagaaatgccttgcgcagagaagaggaatctacagaggcagtctggctaccgtggtgggctccgcccattttgaacttccaagtgtctttgtttacactgtgagggcaaaaccgcctactcaagcttcagtaatggtggacgcccctccccccaccaagctggagcatccaaggttgacttcagactgctgtgctggcagcaagagtttaaagccagttgatcttagcttgctgggctmcgtgggggtgggatcctctgcgctagaccacttggctccctggcttagccccctttccaggggagtgaacgcttacgtcttgctggctggcgttccaggtgccactcggcacatttcttttaaaggtgcttgaagatgaattcccagaagtatgtagatttatgacctccat

SEQ ID NO: 711454 - DNA, 627 bp, Homo sapiens
tgggagatgtctcccggtcaggaggcacggagatctgtgccttagcagagcttgagcaccatgctgggagatcccctgctctcttcagagctggcaaggaggaacatttacatctgctgaagctgtgcccacagccgccccttcccccaggtgctctgttccagggagatgggagttttatatataagcccctgactgggtctgctgcctttctttcagaaatgccttgcgcagagaagaggaatctacagaggcagtctggctaccgtggtgggctccgcccattttgaacttccaagtgtctttgtttacactgtgagggcaaaaccgcctactcaagcttcagtaatggtggacgcccctccccccaccaagctggagcatccaaggttgacttcagactgctgtgctggcagcaagagtttaaagccagttgatcttagcttgctgggctacgtgggggtgggatcctctgcgctagaccacttggctccctggcttagcyccctttccaggggagtgaacgcttacgtcttgctggctggcgttccaggtgccactcggcacatttcttttaaaggtgcttgaagatgaattcccagaagtatgtagatttatgacctccat

SEQ ID NO: 711455 - DNA, 627 bp, Homo sapiens
tgggagatgtctcccggtcaggaggcacggagatctgtgccttagcagagcttgagcaccatgctgggagatcccctgctctcttcagagctggcaaggaggaacatttacatctgctgaagctgtgcccacagccgccccttcccccaggtgctctgttccagggagatgggagttttatatataagcccctgactgggtctgctgcctttctttcagaaatgccttgcgcagagaagaggaatctacagaggcagtctggctaccgtggtgggctccgcccattttgaacttccaagtgtctttgtttacactgtgagggcaaaaccgcctactcaagcttcagtaatggtggacgcccctccccccaccaagctggagcatccaaggttgacttcagactgctgtgctggcagcaagagtttaaagccagttgatcttagcttgctgggctacgtgggggtgggatcctctgcgctagaccacttggctccctggcttagccccctttccaggggagtgaacgcttacgtcttgctggctggcgttccaggtgccactyggcacatttcttttaaaggtgcttgaagatgaattcccagaagtatgtagatttatgacctccat

SEQ ID NO: 711456 - DNA, 591 bp, Homo sapiens
cttgcaagtaataatagggatcaaacaagggagggagagtaaaactagagcacacagatgagaaagaagcagggagaagtacttggaaatgcctttcctgttaacctcatgtaaaagagcagctctcctatcttcaccatctaaacccttactctgctttattcttctgtgtggtactattaccacttgatatttatatttttagctaatttattttttgtatgcttccccctttaaaatgtaagctctatgagggtagaatattgtgtgtattttgttcattgactgtaccccttgtgtctagtactgagcctggcatatayatgcttcaatacgtgtgttcatcaacagaagagaggccattacctgagtaacccaagtcagtctacacagacctggaaattaggacgtctattcagggccttgaaagatgtcagaaaaaatgagcaattttttttttgacagtcattactttctcataattgtagaggttgaagaatggttaaaagtgagaagaggaaataaacatattaataggaggaaggtgcttgattgtactcctgacaaaagaaacatgaattaaaattaaaa

SEQ ID NO: 711457 - DNA, 591 bp, Homo sapiens
cttgcaagtaataatagggatcaaacaagggagggagagtaaaactagagcacacagatgagaaagaagcagggagaagtacttggaaatgcctttcctgttaacctcatgtaaaagagcagctctcctatcttcaccatctaaacccttactctgctttattcttctgtgtggtactattaccacttgatatttatatttttagctaatttattttttgtatgcttccccctttaaaatgtaagctctatgagggtagaatattgtgtgtattttgttcattgactgtaccccttgtgtctagtactgagcctggcatatacatgcttcaatacgtgtgttcatcaacagaagagaggccattacctgagtaacccaagtcagtctacacagacctggaaattaggacgtctattcagggccttgaaagatgtcagaaaaaatgagcaattttttttttgacagtcattactttctcataattgtagaggttgaagaatggttaaaagtgagaagaggaaataaacatattaataggaggaaggtgcttgattgtactcctgacaaaagaaacatgaattaaarttaaaa

SEQ ID NO: 711458 - DNA, 3898 bp, Homo sapiens
  misc_feature 2679, 2680, 2681, 2682, 2683, 2684, 2685, 2686, 2687, 2688,2689, 2690, 2691, 2692, 2693, 2694, 2695, 2696, 2697, 2698,2699, 2700, 2701, 2702, 2703, 2704, 2705, 2706, 2707, 2708,2709, 2710, 2711, 2712, 2713, 2714, 2715, 2716, 2717: n = A,T,C or G
  misc_feature 2718, 2719, 2720, 2721, 2722, 2723, 2724, 2725, 2726, 2727,2728, 2729, 2730, 2731, 2732, 2733, 2734, 2735, 2736, 2737,2738, 2739, 2740, 2741, 2742, 2743, 2744, 2745, 2746, 2747,2748, 2749, 2750, 2751, 2752, 2753, 2754, 2755, 2756: n = A,T,C or G
  misc_feature 2757, 2758, 2759, 2760, 2761, 2762, 2763, 2764, 2765, 2766,2767, 2768, 2769, 2770, 2771, 2772, 2773, 2774, 2775, 2776,2777, 2778: n = A,T,C or G
ttgttattttcttaagcctttccaaaaggccccttcattcttatttttagatttggttaaagctttcccatagccttgaaatagaagccctaccgacatcatacattttaaatataccaagatgttttactgtaacaatatgagccacatctttttctcagtagccattttcctttattcctaatatcaaatgtaaactactcaaaaatgaataatgtcttggctaaaataagtttttgtttttgtaatcatagttacactcttaaacttccagaaacaaattgttagggatattaaacaatgctgattgaattctagttattttaatgaggaataccccctcattcttttcaccagcctgctatttactgagcatccactgtattcacagcactattacaagcacttatggattttaactaaaagaaatatccatcgcactgtttcatgtgacaaagaaaatggagctctaacacattgtgtttatctacttgtgttagatgacacttactgagaaaattaactaagtcatgccttacagaggtaaaaggaaaatgaaaatgtagttagagaaataagggtgaaaaatatggtgaattttggagaactgagctataaagttgccaataaattgagtgatttaaaatatgtcatgttattagaagattacctgactcttaatgactgtataatgaatgtaagttaactttaaaattattaatatttttcttagcatgaaaactaaatgttaaacattcgaaacatacttcactatttgccttatatttgtgatttttttctactattcataagttcattcgcttaatgaaatatgagttttaagtcaactatctgcaaagtgtggtgttagtgtggcgaaaaagcaagaaatgatccttgcttttatgacttctcagtataatcaggaagattgacagcaacataaaattatttagataaattagggtataattctgacattttctctaaaaaaaaatgaaagaaatatggaaataggcccaggatatcttggttgaagtagaatatttaaactggactcagaatcaaaaagtgtccctggctaaggaaagagcaatcatgaaagacctgaagcagaaagaaaggagccttgtacatttgaggggatagaaatataccattgtgacagcagcctctttcagaattctgagaatgaaacagaaaaagctgagaagttgacatgaggcagttagcaccttatagaacaggttaatgattttagacttgaggcttaaaacagaaaattgctgcagggttttaagtttagaagtgacatgatctgagtctttttatgaacactttgggtatgcatagaaattcaattggtctggaggtggagtaattgtgggaagcctatctagaatagtatagttataggggctcaagctgagttaagtaagtggctgtttagataaagaaaagacttcaggaatatttaatatgtagtaaaaacaggaatattgrattattagatatgctactggagggaaatgcaatggttataagggcaaactaatggtataaaatcaaattaaccagggagacagtatacagtaggataaaggaagaaaaagtctgtggtattcattatgaaaaaactggataatggaaagttttccatagtggattcaggcccacagctctgaatttctatgaaaacagcgtagaaaataggtaggaaaatggagagaagtttgtggagaggaaagaaatggtaacgagtgaatgttaagagtatagagtgaggcaggaaagtgtccaataattttagcctcagatgttattaatgagttgatttaaaaatttagtaaaatgctgccagattgaagtaggccatgagggaattaggcaaagaggaagttcggggtacatggggacaattgtttgtagaagtttgcatgtgaaggatgataaatcagtgggaatggtaagcaaaagaggagtttgcctaagatgttacaaatctgtcagggtattagtgtttgaaaataggtcacccattacataaagtgtttccaaatttcctagcattcagaagacactgagtaatgtcccacatcaatagcttgacttttatttatgtgtatagtttaccaatatttctgacaaatcccaaataattttttaagtttctgcaaatacctcttggccatttattaactagcttctccctcttctatggtaaactacgccattttgaatcaaatgtggatttgggtaacttaaagtacacaaaaattaaagttatggtgtttaacaaaacttaataaaggtctctggtcaacataggcaaagcacaattcaaacactgaaatttttatattgcatactagataatactggaaattcttaattgatactccactagagatcttctaatgtggccaattttgcttacttccttacctgctacctttttagaaccgctaacctgttttctcccagagatagtcgtattgattattcccctgaatttgtaatcctgtctttccaatgacaggcattggaccaaagagaagagaacaaaattaacattttatttttttcatctctgcttgtaggctcaacttctatccaacttaagagatctgtaaaaattcaactaacatcaaaaacagacaaattcttcaccattattannnnnnnnnnnnnnnnnnnnnnnnnnnnnnnnnnnnnnnnnnnnnnnnnnnnnnnnnnnnnnnnnnnnnnnnnnnnnnnnnnnnnnnnnnnnnnnnnnnntatagggacactatagtactcgcttgaatatatttatgtagattatctaaaatagtcacacaccacatgcatgaaattacaaatgtgaataatttgctttaccaggaggactctttatttttatgattctttcatagtcagaattatttattaaatttataaatatgttgatattttattttgtgttatttttataagctttctgagagcatatatagtttcataaagtgaaaaataatggaccagcagcaacggaaacatttcatgttccaatgcaaaaaattatctgtactcaaaatcctaatcagtaacaatttttttctaacatctaaatagtttttttctaacatctaagtagattatctcaatggtatataatagaaaacaatataaatgtatttgtatttactatctgttagatttttaaaagataaaggtatggtaacagctaatgttcatataaaactcagcattttaatggaacactttcccatataaaggacaaatctacacattatatgaacattttcaaaatttgagccttggaatgtaaaattacaatgttatacattatagtaatattttgtaaaagtcataaaaagaatccacacaatattgtgtatatacaaaatttcacatggaaatttgtgcttataaatgactataatttactttaaaaaaatgccaacctttcaggaatacactgtgtatacagggagcagagtattaatacccaaaatgtcctgagatatacttcacatcccatccaggattttaaacgctaagatcaacagaattggttttattcaacatgctcagcttcccaggaacttgtttctttttaaaaaaaaatgtggtaaaagacacttaacataaaatgtaccttcttagtcattttaaagtgtagagttcagtagtgtttagtatattcacattgttgttgcaagtaatctcaagaactactgcagatgcctcatatgtgtggactcacaagctatttttctttctgcaactggcttacctcacttagaatagtgtcctcaagtttcatctatgttgtcaaatgtgttagaatgtcgtcttttaaggctgaataatattccattgtatgtgtatatca

SEQ ID NO: 711459 - DNA, 3898 bp, Homo sapiens
  misc_feature 2679, 2680, 2681, 2682, 2683, 2684, 2685, 2686, 2687, 2688,2689, 2690, 2691, 2692, 2693, 2694, 2695, 2696, 2697, 2698,2699, 2700, 2701, 2702, 2703, 2704, 2705, 2706, 2707, 2708,2709, 2710, 2711, 2712, 2713, 2714, 2715, 2716, 2717: n = A,T,C or G
  misc_feature 2718, 2719, 2720, 2721, 2722, 2723, 2724, 2725, 2726, 2727,2728, 2729, 2730, 2731, 2732, 2733, 2734, 2735, 2736, 2737,2738, 2739, 2740, 2741, 2742, 2743, 2744, 2745, 2746, 2747,2748, 2749, 2750, 2751, 2752, 2753, 2754, 2755, 2756: n = A,T,C or G
  misc_feature 2757, 2758, 2759, 2760, 2761, 2762, 2763, 2764, 2765, 2766,2767, 2768, 2769, 2770, 2771, 2772, 2773, 2774, 2775, 2776,2777, 2778: n = A,T,C or G
ttgttattttcttaagcctttccaaaaggccccttcattcttatttttagatttggttaaagctttcccatagccttgaaatagaagccctaccgacatcatacattttaaatataccaagatgttttactgtaacaatatgagccacatctttttctcagtagccattttcctttattcctaatatcaaatgtaaactactcaaaaatgaataatgtcttggctaaaataagtttttgtttttgtaatcatagttacactcttaaacttccagaaacaaattgttagggatattaaacaatgctgattgaattctagttattttaatgaggaataccccctcattcttttcaccagcctgctatttactgagcatccactgtattcacagcactattacaagcacttatggattttaactaaaagaaatatccatcgcactgtttcatgtgacaaagaaaatggagctctaacacattgtgtttatctacttgtgttagatgacacttactgagaaaattaactaagtcatgccttacagaggtaaaaggaaaatgaaaatgtagttagagaaataagggtgaaaaatatggtgaattttggagaactgagctataaagttgccaataaattgagtgatttaaaatatgtcatgttattagaagattacctgactcttaatgactgtataatgaatgtaagttaactttaaaattattaatatttttcttagcatgaaaactaaatgttaaacattcgaaacatacttcactatttgccttatatttgtgatttttttctactattcataagttcattcgcttaatgaaatatgagttttaagtcaactatctgcaaagtgtggtgttagtgtggcgaaaaagcaagaaatgatccttgcttttatgacttctcagtataatcaggaagattgacagcaacataaaattatttagataaattagggtataattctgacattttctctaaaaaaaaatgaaagaaatatggaaataggcccaggatatcttggttgaagtagaatatttaaactggactcagaatcaaaaagtgtccctggctaaggaaagagcaatcatgaaagacctgaagcagaaagaaaggagccttgtacatttgaggggatagaaatataccattgtgacagcagcctctttcagaattctgagaatgaaacagaaaaagctgagaagttgacatgaggcagttagcaccttatagaacaggttaatgattttagacttgaggcttaaaacagaaaattgctgcagggttttaagtttagaagtgacatgatctgagtctttttatgaacactttgggtatgcatagaaattcaattggtctggaggtggagtaattgtgggaagcctatctagaatagtatagttataggggctcaagctgagttaagtaagtggctgtttagataaagaaaagacttcaggaatatttaatatgtagtaaaaacaggaatattgaattattagatatgctactggagggaaatgcaatggttataagggcaaactaatggtataaaatcaaattaaccagggagacagtatacagtaggataaaggaagaaaaagtctgtggtattcattatgaaaaaactggataatggaaagttttccatagtggattcaggcccacagctctgaatttctatgaaaacagcrtagaaaataggtaggaaaatggagagaagtttgtggagaggaaagaaatggtaacgagtgaatgttaagagtatagagtgaggcaggaaagtgtccaataattttagcctcagatgttattaatgagttgatttaaaaatttagtaaaatgctgccagattgaagtaggccatgagggaattaggcaaagaggaagttcggggtacatggggacaattgtttgtagaagtttgcatgtgaaggatgataaatcagtgggaatggtaagcaaaagaggagtttgcctaagatgttacaaatctgtcagggtattagtgtttgaaaataggtcacccattacataaagtgtttccaaatttcctagcattcagaagacactgagtaatgtcccacatcaatagcttgacttttatttatgtgtatagtttaccaatatttctgacaaatcccaaataattttttaagtttctgcaaatacctcttggccatttattaactagcttctccctcttctatggtaaactacgccattttgaatcaaatgtggatttgggtaacttaaagtacacaaaaattaaagttatggtgtttaacaaaacttaataaaggtctctggtcaacataggcaaagcacaattcaaacactgaaatttttatattgcatactagataatactggaaattcttaattgatactccactagagatcttctaatgtggccaattttgcttacttccttacctgctacctttttagaaccgctaacctgttttctcccagagatagtcgtattgattattcccctgaatttgtaatcctgtctttccaatgacaggcattggaccaaagagaagagaacaaaattaacattttatttttttcatctctgcttgtaggctcaacttctatccaacttaagagatctgtaaaaattcaactaacatcaaaaacagacaaattcttcaccattattannnnnnnnnnnnnnnnnnnnnnnnnnnnnnnnnnnnnnnnnnnnnnnnnnnnnnnnnnnnnnnnnnnnnnnnnnnnnnnnnnnnnnnnnnnnnnnnnnnntatagggacactatagtactcgcttgaatatatttatgtagattatctaaaatagtcacacaccacatgcatgaaattacaaatgtgaataatttgctttaccaggaggactctttatttttatgattctttcatagtcagaattatttattaaatttataaatatgttgatattttattttgtgttatttttataagctttctgagagcatatatagtttcataaagtgaaaaataatggaccagcagcaacggaaacatttcatgttccaatgcaaaaaattatctgtactcaaaatcctaatcagtaacaatttttttctaacatctaaatagtttttttctaacatctaagtagattatctcaatggtatataatagaaaacaatataaatgtatttgtatttactatctgttagatttttaaaagataaaggtatggtaacagctaatgttcatataaaactcagcattttaatggaacactttcccatataaaggacaaatctacacattatatgaacattttcaaaatttgagccttggaatgtaaaattacaatgttatacattatagtaatattttgtaaaagtcataaaaagaatccacacaatattgtgtatatacaaaatttcacatggaaatttgtgcttataaatgactataatttactttaaaaaaatgccaacctttcaggaatacactgtgtatacagggagcagagtattaatacccaaaatgtcctgagatatacttcacatcccatccaggattttaaacgctaagatcaacagaattggttttattcaacatgctcagcttcccaggaacttgtttctttttaaaaaaaaatgtggtaaaagacacttaacataaaatgtaccttcttagtcattttaaagtgtagagttcagtagtgtttagtatattcacattgttgttgcaagtaatctcaagaactactgcagatgcctcatatgtgtggactcacaagctatttttctttctgcaactggcttacctcacttagaatagtgtcctcaagtttcatctatgttgtcaaatgtgttagaatgtcgtcttttaaggctgaataatattccattgtatgtgtatatca

SEQ ID NO: 711460 - DNA, 599 bp, Homo sapiens
tgccttgtaatatcttattgccttgtgamgcatgtggtctctgtgacccccaccctattcatacaatccctcccctttgaaaattgctaataaaaacttgctggttttacggctcagggggcatcacaaacctgccaacatgtgatgtctcccctggacacccagctttaaaatttctctcttttgtgctctttccctttatttcttaaaccagcagacacttagggaaatagaaaagaacctacgtgaaataacattgaattgtcaggggcaggttcccccgataattaagctaattttttaataggttctcaaatcacttttaatgtcctgatataaattctgtacgacatatagccctacatacactttagcaagcccaccaaacaagatttgtaatgatgattcaaccaacttcagggcacctaggaggaaaaaaattcaggcttatgtctaattaatgctgatagtaaaacgtttaggggtaggaagattgctctttatagctagcttttaaaatgttctttttcttctctgatattattttatttcagatttagttatatttatttcataattttactcaaaaatgagaaaag

SEQ ID NO: 711461 - DNA, 644 bp, Homo sapiens
aaaaataaaatacagtgacaagctaattatgagaagaaagtgagaaaagttgcatgggagagagaagtaggatgttgcagaaactgaaaaaggcccataagacaggcttgagaggaaagtaaatggtattatgaagtaatctgtagggatgggtaggacatggttggcaaagataakaatttttaacttaattatcagcaatgtaaagtaagttataagcatttatgacaatgtgagtggttaggtcatataaacattttggaaagatcactttgatctcaacctgtagcaaataggtttgaatacagctaaagtaacgtggaaaaagggaaacactgccatgaggtaagaagcaattatacatttaacaaccaaggtggcaatggagatgcagatacaggttacacttatgaattaaactagtcaagactaagtcatgacttaaatatgaatgaataaaaatactgttttcagggagaatctcagatttctgagaaaggactggctggagatagaatttaggactgatttatattcagttgaacttcaaagtgggatagtgactataatagcatagggagaaaataaattgtgaggagaggaagcacaacacagcatgttaagtaactgcaatggcatgtaga

SEQ ID NO: 711462 - DNA, 644 bp, Homo sapiens
aaaaataaaatacagtgacaagctaattatgagaagaaagtgagaaaagttgcatgggagagagaagtaggatgttgcagaaactgaaaaaggcccataagacaggcttgagaggaaagtaaatggtattatgaagtaatctgtagggatgggtaggacatggttggcaaagataagaatttttaacttaattatcagcaatgtaaagtaagttataagcatttatgacaatgtgagtggttaggtcatataaacattttggaaagatcactttgatctcaacctgtagcaaataggtttgaatacagctaaagtaacgtggaaaaagggaaacactgccatgaggtaagaagcaattatacatttaacaaccaaggwggcaatggagatgcagatacaggttacacttatgaattaaactagtcaagactaagtcatgacttaaatatgaatgaataaaaatactgttttcagggagaatctcagatttctgagaaaggactggctggagatagaatttaggactgatttatattcagttgaacttcaaagtgggatagtgactataatagcatagggagaaaataaattgtgaggagaggaagcacaacacagcatgttaagtaactgcaatggcatgtaga

SEQ ID NO: 711463 - DNA, 1000 bp, Homo sapiens
tgtataattctgcatataacgtttgctaaagtaagatgtgttttagataaagaaaaaaattattttaaaataacataacatattcttaataaaaataattttgtctaattcaaaaattatttatataacaaaataaaagaaaccagtaagaaagagagaygcaaaaaatgttatagaggtattttttgctaaaaacttaaaaaagtaattttgtatgagaaagaatcttatgtgataaagcaaaatgaaatgatttaagaaaataaaattcaggacaaaacaaagtcagagcatgtcatagatagtctatgtaagctgtaaaaatgtttataaagaaaattcataaaagaaatttgtttttatcaaatgttttgaatcttttaacatctttgacactgaattatatgttatctatggcttattgctgccatttatcaaactataaaaatttatcactgcaaggttatgaaatcattttacagcttccagtcaggtcatggactccagtatcactacctttagccccttaaaaacgtccttatgaggttctattatctaatccttatactatgaagtttcagagcattgactcctggttgcatgtatctcatctaaataagacaatgacttctatgaatatctgacaccaaattccagttaatcaaatcctcatccttagatctgggagaagatgactatcaagataaactacctgcagttgacactggaccaggcctgtatacaacggcatacatactcatttaatgattttgcctctatttaacttactataatttattatatgccttgatgctaagtgatttaactgtttagctacctgtgagcttcttttcctgccattctcagaacaaggcagcacttctaacttttttctttaaaacattgcttgttctttatgctttgttttacttctaggatttaagaccatttacttaagtctccaggccctgagactatcatggaaaaagtgagtgcatga

SEQ ID NO: 711464 - DNA, 1000 bp, Homo sapiens
tgtataattctgcatataacgtttgctaaagtaagatgtgttttagataaagaaaaaaattattttaaaataacataacatattcttaataaaaataattttgtctaattcaaaaattatttatataacaaaataaaagaaaccagtaagaaagagagacgcaaaaaatgttatagaggtattttttgctaaaaacttaaaaaagtaattttgtatgagaaagaatcttatgtgataaagcaaaatgaaatgatttaagaaaataaaattcaggacaaaacaaagtcagagcatgtcatagatagtctatgtaagctgtaaaaatgtttataaagaaaattcataaaagaaatttgtttttatcaaatgttttgaatcttttaacatctttgacactgaattatatgttatctatggcttattgctgccatttatcaaactataaaaatttatcactgcaaggttatgaaatcattttacagcttccagtcaggtcatggactccagtatcactacctttagccccttaaaaacgtccttatgaggttctattatctaatccttrtactatgaagtttcagagcattgactcctggttgcatgtatctcatctaaataagacaatgacttctatgaatatctgacaccaaattccagttaatcaaatcctcatccttagatctgggagaagatgactatcaagataaactacctgcagttgacactggaccaggcctgtatacaacggcatacatactcatttaatgattttgcctctatttaacttactataatttattatatgccttgatgctaagtgatttaactgtttagctacctgtgagcttcttttcctgccattctcagaacaaggcagcacttctaacttttttctttaaaacattgcttgttctttatgctttgttttacttctaggatttaagaccatttacttaagtctccaggccctgagactatcatggaaaaagtgagtgcatga

SEQ ID NO: 711465 - DNA, 1719 bp, Homo sapiens
ctctcactatttttttgatgttttgctgattttggttttcagttgttttattattatgtatccaggtgtgctttgctggatgtttatcttgtttgatgcttccagaatttcttgaatcctttgattgatttttttcatcagctattgtctattgaaatctttttttaccttactttctcactcatcatcaactgaatttaagttgcatgtagtcaagctttttgtttttttccatgtcatttagtctttactattttttattagtttgatttcttcrcttcagtttgtatattttctattttcttgcttttcatttcactaaacctgtctttatgtctaatctatttttaaaaccatccattaaagatgtatagaagcaataaggactaacattccagcaagaagaaacctcagagagatgaactacgactggagatttgtactttcttaggggcaaatgcattctcaccttgaactagaggctgagaattcctgcttggccttgtgccaaagttgccacagcagaagaaagcagtctattatcaatttattttccattatgaccaattcgtagaaccgtaggacgtatcccttttgacccttaggctctttcgcaattagaaacaatttaataatttgtgggaatgaatactccgcttagttcttgttggccaggaaaaaaatgttctatgttacacataagaaagaaaatatcctcaaaacttaaaaaaaagttaatcccacattacatttatgtctgcctttctgaggtataaaagtaaaatccatgaatcatattcttcaaatattctattcacataataagctgttctcctgttattttttcatacatgttgaaaaagcataaacataacttaaaaatctcccatatgaaaattgcaatcgttgaaatgaattttgggcacataaagtattgcagagatcaaatacttgaagacagtctctaaactaagacaactcttagagataagtacaagaaagtattggtctgccttaaacaaaaacatgaaagcatgttgaataggactatttatctataaggtaccttcacagatgccgtctatgtggctttgaaatttgataagactcacctgtatcattatgaaagcagtaaacctaaaatatattccagccaagcagtgaagaatggagaaaaatataaaaatctaataaaatggtgagactttttttttcaataacatccatagagatgttccctttggactgaaaaacgtatgaaatattagttgaatgtattaatttcgcagtatttacattgcattatctaattagatgggtgatgtgctgttgcatataaatgtcaacatatatgagataactgggattattttttaggatctacaattctgggatgcagtaacttcctgatatccttcggaaaagctatattttaattaaccatttgttttcccagataactcaatactgagaaagaaacagaggtggttagtctcaactaaaataagcattcctagttaatatcaaagtttctactagacagtcttatttacatgtgtttgttaaacattcagtacaaatgatatgactatgtatattaattgaatgaattaatcaatcaataaagcagaataggttatttattatgtagagaatatattaaatcctaaaattaggctgagttacataagtttttaattatatgtataaaaagtgtac

SEQ ID NO: 711466 - DNA, 1004 bp, Homo sapiens
tctgtctctgaagatgcttttctgtgctaagtttttgacttttttttttttttgctttaagttttcttttcttaaattcttatcgaattagttttggatatttgtatgtttttctttagaaaattgtattttcttgaggtaattaaatatattagcataaatttttctcagaaaaatcttaccttataacatattttataattgttaaaaatattctttttcattttcaaaataatttgatcagttttttctgtataattaatgtctcatattgatcatatccattgttttgttttatayttatttctgcttaaagcatcattatttccttctgacttatttagattttgtttatttttcttcctatttattaagtccttaataaaatatttcatttatttcaaaaatagtgaaaataacatttactctgcgtatagctttggttgcatctcatatatctgacgcaagtgttatctcttactcattctgctcatgtaaactcaactattttcttgaataatagttacttgcaaaaggtgcatagaaaaattgtggatgtgacaatctttcagaaatagaagaagaaatacagacctactgaaatatagtatcttaattcaccataagatgtaaaagagagtaatgacatttggggtcacataggtaagtactactgaactagagcaaaaattttaagcatctattgatggaacaaaaatgcatatggacaattactggcatatgatcaattcccagtgattattacacagcaaccaagctctctgattctatctctaaaatcttttaaaaatagtttaaattttttttcatttaataattctgctaatgatgtacatacacttaggacaccaataaaaaccttatttttttcttaagtaaatgagataataaacctttctcttttttggctttttcgtttaataccagatataaataaattattgaaatttcccagataatgcatgcaattgttttggataaat

SEQ ID NO: 711467 - DNA, 1080 bp, Homo sapiens
tttcagcctttaaagtataaacaaagacactattcaaaaaaattcataaatttttttaacatgccagatgtaaaatcaattaactgtagtagaaatatggcctcatattttaagggctgcaacattctaattgcgtggtctgcagttttgtgggggttttttaaacagtaatatgaggggatttgkacttaaacatttttcatttctagaatgttcctgattgactttggaaagtgccctaacataaatgcaccgagaatcttctctggaaatttaaaaacacaaaaacacattccattttcaaaaggacttctcagaaacaatattcaccccataataaataaaagatcataaacagaagtttatcaaagatccctaaatacttgttattagtgttcacaattggaaatgtttattgtagggatgctctaacattactgatttaaaatgttcaaccgagattgttcagttagattagacctcacctaagaaaagagacaataataactacagaacataaagtcacaggctataatgctaatacaacagacaagagctcactgagtgacaaattaatgacttcagactggagagctcagcagaatttattgaacttagttccacatacctagtctatttaaaccccaatcattgtcaggaaaaataaagtaatatagacaaactacctgactcaaatgggtagtttacaactaatactattagcaaagacttttttaaattggaaggtatgttaacactagctttttatcagctccttactgtctctttccagatcaactacgtgctgattatttgggcaaaactggaagtaattcctaccaaagacacttttatctatgtttctaatctagatcagaagcaagaaatttattttcctgctaaaatttgatataatttgacaaccatttatctgaaacccttgaagccagctatgtttgggaatttttgattttctgtattttagaaataaattgtgttccatatatagttatacttcataatactcccagcagggtgtgaggtaggatattgtaatgaaaaatattaatatgtcttcaa

SEQ ID NO: 711468 - DNA, 1630 bp, Homo sapiens
ctgaaaatgaatgctacttcccacaatcaagtggaaatgttaatattatcaacatgtcttaaaggccatgaagtcctatgcctgtatatgtaacaggaatagcaaacaggaacttttcttaaagggaagattaaactagtgttatttttatgtattcgttaattgcatgctccccatttttaaaactgtacctgaaaatatactgtaataaaaaattaaatttgaaatattataccattgaataaggtcctctggatagttttgagatttaatattctttatttcaatttacatgtatactgaatcacgtaaaagttatttaggtcagtacttccccacatttgttccttcatgacatacgctgataactatatttctacgaaaactgcagtaaataaaggatgtggcttgtgttcagtctcccacccactagcgacaagagccaagggaaatcaatagcttggctcacctgtcatctccactctttggcacaccattgagaagtctaatatgtgcaaagaaaagttaattttactttcaagggttatacctttkcttattccaaagaacggtgggggagtgtaccagggccattattataatgtatattattaaactttttacattttaactgatttctcttatagtaaaattaattatatattagctttggggtatacaaaattgcactttgataataatatttaggaattggcaactttgtgggcaaagttgtgggaactatcagaaaagtaaaaaataaaggtgggacccgaaagaaggaaggattgtaggttggagccatacgcgactagaaactaagacatgtatccttaaaaaccctcaaatctgtgttctgatgggaaaaccctgctaagtcaatggttcccagactttggaatttcaaaacaaaaaactgtgaggcccaacatacaattaccaactcttcatttttgccaaacaaaactattttcaacagaacacactaacatatactggaaccatgatttcatattatgacatttattttccacattctatatacttttaatatgcaaaacaaggacaaaaagggcagtcatctcccatggggggcttagaaatctctcattaatgtgtgtgtgtgtgtgtgtgtgtgtgtgtgtgtgtgtgtgtgtgtgtgttttaaattggccttattatttctttaaatttaaccaagggccagtaaaactcccttttggaataccacacgcccgtgctgttcaggaatgattatgataaagtcattcatgaggacatagagttatttcatatgctctcaaaaatgacttgcagtgcgaaacacagctactattggacaagacaacaacccaactttatataacaattttttaattcactagtacttgtgtatcagtcaataaagtacctggtacttgtgtactaggcactgggatggagttggggatacgaaagtgaaaaatatagtcacaatttctaccttatactctagtaggggaaagaaaaacaaaatgtatgattgaactgccttaagcaccatgaaggcaacatacaaattgctgtgagagcatataaccaactcagaaatcagccttaaactgagacctaaaaaggactccccctgtgc

SEQ ID NO: 711469 - DNA, 583 bp, Homo sapiens
tataaattagctaaacaagtttcttcaatccttgaactgggggatttaaaatattagctgaataggcattttatattcctaatctcatactttcaaaaaaatcataaaaatgaaatcctgatgtttagacattttaaatggtaatgtttttaatgccacagtataaaaataaagcattgattttaatgcactgctacagtgagatggtgccagcacctctaagtatcattgccagtgctctaacctttaaaataaygaattaattgagttatatgtagtaatatatcttggctattactgccaaagtaatagatatatactgaagtcttaggagagatagagggataaatgttagttataaaaagttgttaaagcagagggaaaaagaagtgaaaactgaccaaacatatacgtaattcattgtttctatgacaagcctgctgcaattcgaactctaggactttgtgctaatatttagcataccattttattttctagatttcctttatactcactatgttcctcagtatttgcactcacttcttttgtttgtttgttttgagatagagtctcactctgttgc

SEQ ID NO: 711470 - DNA, 583 bp, Homo sapiens
tataaattagctaaacaagtttcttcaatccttgaactgggggatttaaaatattagctgaataggcattttatattcctaatctcatactttcaaaaaaatcataaaaatgaaatcctgatgtttagacattttaaatggtaatgtttttaatgccacagtataaaaataaagcattgattttaatgcactgctacagtgagatggtgccagcacctctaagtatcattgccagtgctctaacctttaaaataacgaattaattgagttatatgtagtaatatatcttggctattactgccaaagtaatagatatatactgaagtcttaggagagatagagggataaatgttagtyataaaaagttgttaaagcagagggaaaaagaagtgaaaactgaccaaacatatacgtaattcattgtttctatgacaagcctgctgcaattcgaactctaggactttgtgctaatatttagcataccattttattttctagatttcctttatactcactatgttcctcagtatttgcactcacttcttttgtttgtttgttttgagatagagtctcactctgttgc

SEQ ID NO: 711471 - DNA, 580 bp, Homo sapiens
tgattcaggagaaaaaccatgatgcatttttaaatctgaaaatgtagcctttatttctctttttttctgagcgaatggccaagacaaagataagaggaacgaggctgagttagaaattcaactcatggaaacataggcaagaaaaaaatcartcttatgaaagcaaacatatttgccaactttgccttttcaacatactgcaaatgatacattcaaagtattaaaaataataccttgttgagagaaaattgataaaaagaaatgaaaaggaaagaagaacaaataaaaggagaaattggagaaactgcatagacaaaaacttccttaaatgcaatcatttcttttgcttctatccactctctgtgaaactcacttcaggccaaaagaaatatgaatgcatttgaaggtgaaaacagattataatggaagtatctctttgattacttttgaagcttcaagcctccactatttatttttattttttgaatgttattgtggcagatacaacattaacacttgcagaatctgatagagacaccaacagtggaataatgcaattgcatgcaaatagaatgtccca

SEQ ID NO: 711472 - DNA, 1720 bp, Homo sapiens
ttttggtcaatgcaaatttgtgcctccattactgattcaaaccaaatcggcttctttgggtatcagaatagtaggattcaatctattcacggctaaactcgattctgttcagtgagaacaaagtgctgtaactctgcctcatcacatgatgaccctgggagaatcagaacctttcctgctgggcactcacagagccactagaacatttccaagctcatccttggattttatggaaggcatgtgctcctttgcacaagccaccctttttatttgctgcagaaaaggagtctaggaagaatgcattccaaacccagcccctgggtgggtattcagatgcacattgctgacttgttaacacattactgcttcttgtcaccttgggttttttgtttttgttttgcccttgagattttttattccagaagtgagttctggctcatctgtcattagaggaggtatcgaggcaaccatggatcaaagtattaatattttctgcttgccattacttgttcagatatcaagttcctgagtaccagttaattgtaggattgatagtaaaaggagataattagaattgagtcaaccatttggttttccaaaactgtagaagagtgtgaaaatatttatttaataccattcccagacaaaatcaatggtttctaaattttcacagagcaaggactaaaaaggagtaatcaggatatcaattatttgaatgataaactcttagccagaaggtaacagataacaccctgttacacacagcaagaccccatctctaaaaaaaaaaaaattaattagccaagcatggtggcatgcacctgtagtcccagctacttgagaggctgaggtggtggggggaatcactagagctcaggagttcwaggctgtagtgagctatgatcacaccactgcactccagcctgagcaacagagtgagaccctatctcaaaactttaaaaaaaaaaaaatttaagaagaagaagataattactggtatatagaccagagctatttcagagcagctgcttaaaatattaatattttggtttatcgagtttaaattctccccatttttcccccaaccattttattttataactaaaaaaaactaaaataattcagaagtaaaatttggtgcattttcaatcaaacacaaaattttaatcccaaatcgataccaataaccttaggagcaatgaaagggagccagaggctgagtggaaccagtgagaatttacaaaatcccaggctgctttccccaactttcccccaccctgctaagaaattcatcatctcagcaaggcatatttgaagagattgatgccattggcacatatgtgaggctgtgcatgcaggttccacaaaaacatctcaaactaaggcagcaaagcagagcatagaccctaggatcacattcgtttagttcaaatctcagcttcgttacttaaaacaagttcttcaaattctcaaagttttgtttttctcattggtaaaatgagaacaatgaaacttacttccttaaggcttattgtaaggattcaatgagataattcatttaaagtacttatttagcaatgtctgatccacaagaagtgtttattaagtgttcacccttggtagaggcaatatatatataattattatatacctaatatatatatatatatatatatatatatcagacatctttgaatgtatctaaaagtgttttttaatc

SEQ ID NO: 711473 - DNA, 810 bp, Homo sapiens
ctttcagtgaagtgagccaacatatatctttattattgaggccatttggawttgtgttttctgttacctgcaggcaatggcatagtgactgataaaacagtatggatgggaagcacgcctttttcctcagcatctaacacactatttaacacatataatgattcaataaatgtttcacgaataaatgaactagggaatttaattaaaatatcagataacaatgaaactatcaactttatttccaaatataactgaaaccaaattgttttcaaccacaatttttaaaggtggattaaaactctattcagaaagcctgacatttttagagggttttgcatgttgtaaagaaaataaagcttgactatttacaatagcaaagacttgaaactaacccaaatgcccattaatgatagactggataaagaaaatgtggcacatatacaccatggaatactatgcagtcataaaaaagaacgagttcatgtcctttgcagggacatggatgaacctggaagccatcattctcagcaaactaaaccaggaacagaaaatcaaacactgcatgttctcactcataagtgggaattgaacaatgagaacacatggacacagggtgggaaacatcacacaccaaggcttgtcaaggggtgaggggcaagggaagggagagcattaggacaaatacctaatgcatgcggggcttaaaacctagatgatgggttgatgggtgaagcaaaccaccatggcatatatatacctatgtaacaaacctgcacgctctgcacatgtatcccagaacttaaagtaaat

SEQ ID NO: 711474 - DNA, 676 bp, Homo sapiens
tcatttgcattcactatttggcaaactatttggcacaagagacctgctttcagtctatctcaactttcaacatgccttcctcactgagcttaatcatttctagcttttgatttaaagtgagagacatgggactcttcctttctcttgaacacttagagactattgtagggttattattggcctaattttaatattatctcgtcttagggaataaggattcctgaagaaagggagagagatgggggaatggctagtcagtggggcagtcggaatacacacaacatttatcctttaagtttracatcttatatgggtgcagtatgtggcacctcaaaacaattataatagtaacattaaaaatcactgattacagatcatcataataaatacagtaataatgaaaaagtattgcaagaattaccagagatacagaagtaaaatgtgacacagagacataaagtgagcacattctgttgggaaaatggtgctgatagactcactcaatgcagggttgccacaaaccttcaatttgtaaaaactgcaatgtctgcaaaatgcaaaaaggtgaagcacaataaaacaaagtaagcctgtagttagaagcatttctgtttccttgattacaccctgaataataagtagataaaaattaattacaaattatataagcttctat

SEQ ID NO: 711475 - DNA, 676 bp, Homo sapiens
tcatttgcattcactatttggcaaactatttggcacaagagacctgctttcagtctatctcaactttcaacatgccttcctcactgagcttaatcatttctagcttttgatttaaagtgagagacatgggactcttcctttctcttgaacacttagagactattgtagggttattattggcctaattttaatattatctcgtcttagggaataaggattcctgaagaaagggagagagatgggggaatggctagtcagtggggcagtcggaatacacacaacatttatcctttaagtttgacatcttatatgggtgcagtatgtggcacctcaaaacaattataatagtaacattaaaaatcactgaytacagatcatcataataaatacagtaataatgaaaaagtattgcaagaattaccagagatacagaagtaaaatgtgacacagagacataaagtgagcacattctgttgggaaaatggtgctgatagactcactcaatgcagggttgccacaaaccttcaatttgtaaaaactgcaatgtctgcaaaatgcaaaaaggtgaagcacaataaaacaaagtaagcctgtagttagaagcatttctgtttccttgattacaccctgaataataagtagataaaaattaattacaaattatataagcttctat

SEQ ID NO: 711476 - DNA, 625 bp, Homo sapiens
gaaatcagaggctagggataaaggccacaatatccaggcagaggccttggtggctgaatgcaggagcttcccagataaactgaagcctccgatccctgcgatgccgtgcgccatcactaagaatttctgtaacactttacaatttcatggtatttttagtcattgccccaagattttccaaaatagccatyccaactgccctagaattgctgttttttaaatttttatttctatttcaatagtttttggggtataggtagtttttggttacatgcataaattctttagtggtgatttctgagattttggtgcacccatcactcaagcagtgtacactctacccaatatgtagtcctttatccctcagcccccacaaccttctccctgagtccccaaattccattatatcattcttatgcctttgtgtcctcgtaccttagctcccacttttaagtgagaacatatgatatttggttttacaaagagagagggaaaaaatgggatcttgaacaagaggggatttcaaattttctgttcccattggggataaaatactgatccctaaattctgatcagcatttatttaaatgtgtcagttggggctaggtgaacattggggatggat

SEQ ID NO: 711477 - DNA, 625 bp, Homo sapiens
gaaatcagaggctagggataaaggccacaatatccaggcagaggccttggtggctgaatgcaggagcttcccagataaactgaagcctccgatccctgcgatgccgtgcgccatcactaagaatttctgtaacactttacaatttcatggtatttttagtcattgccccaagattttccaaaatagccatcccaactgccctagaattgctgttttttaaatttttatttctatttcaatagtttttggggtataggtagtttttggttacatgcataaattctttagtggtgatttctgagattttggtgcacccatcactcaagcagtgtacactctacccaatatgtagtcctttatccctcagcccccacaaccttctccctgagtccccaaattccattatatcattcttatgcctttgtgtcctcgtaccttagctcccacttttaagtgagaacatatgatatttggttttacaaagagagagggaaamaatgggatcttgaacaagaggggatttcaaattttctgttcccattggggataaaatactgatccctaaattctgatcagcatttatttaaatgtgtcagttggggctaggtgaacattggggatggat

SEQ ID NO: 711478 - DNA, 622 bp, Homo sapiens
gttctttttaatcttgaggattgatttcttttctagaagggcaggtaacagcagtagagcatgctggccctggagttaaatacttagggattgaatctcagcttcatttctttactagctttgtgaccttgggtaatttaattaatctatttcctcatctgtaaaatagaccaataatagttcaggttgagcatccctgaaattgaaaatgctccaaagtctaaaatgttttgagtgccaaagtgatgctccagggaaatgctcattggagcatattggatttcaaattttcaggttagagatgctcagccagcatgtattctgcaagtattcaaaaatgtgaaaaaatccaaaatgtgaatcatttctggtctcaagtatttcagataagagatgctcaacctctrtctagctcattagagggttgtgaagattaaatgagtcaatacatgtaaaacacacttaaactggtgtcttgggccttgtgcagtggctcacgcctgtaatcccagcactttgggaggccgaggtgggcggatcacctgaggtcaggagttcgagaccagcctggccaacatggtgaaaccccgtctctactaaaaatacaaacattatctggtcg

SEQ ID NO: 711479 - DNA, 1523 bp, Homo sapiens
tgaaaacaccaaaaatggtaaataaatagttaaatgctaaaaactagcttttttctacttgatttccttaaaagacaaaagactcatatatatctatatgtagagagagagagctgtttttttgtttgcttgttttwgtttttgtttttgagacagagttttgctcttgttacccaggctagagtccaatggcatgattttggccatcgcaacctccacctcccgggttcaagcgactctcctgcctcagcctcccgagtagctgggattacaggcatgtgccaccacgcctggctaattttgtatttttagtagagacagggttcctccatgttggtcagcctggtctcgaactcccaacctcaggtgatccgcctgcctcggcctcccaaagtgctcggattacaggcgtgaatcaccgcacccggctgtttatttttgtttttaaggccagtagagtaggataaaagaaatttatctgggccaggtatggtggctcagcctgcaatccctgcactctgggaggctgaggcggcagattgcttgagcccaggagtttgagaccagcctgggcgacatggcaaaaccccatctctacaaaaaatagaaaaattaggtgggcatagtgacacatgcctgtagttgggcacttgggatgctgagatggaaggattacttgagctcaagaggctgaagctgcaggtagccacaatcacactactgcactccagcctgggcaacagagagtgagaccctatatcaaaaaaaaaaaagaaaaaaaaaagaaaaaatttgtctgaacatgggtcagctggtgtttaaaaaaaatttttaatattaaaaaagaaatctgtaatcagttgtgatcatttagttgtaaacaccagtgcacttggaccagctgcctcattaaactattataaaataagttcactgtaaggtgaatttaaaaatatatagggctaagtgcagtgtctcatgcctgtaacgccagcactttgagaggctgaagcaggaggattgcttgagcctaggaatttgagacaagcctaggcaacacagtaagacctcttctctacaaaaaataaaaaatttagtcaagcacagtagcgcacacctgtggtccaggaggctgaggcaggaggattgcttgagcccaggaggtcatggcggcagtgagctatggttgcaccgctgcactccagcccgagcaacaaagaccctgtctcgaaagaaaaaaaaagaaaaggaaaggaaaaagaggctgggctcggtggctcatgcctataatccccgcactttgggaggctgaggtaggcagaccacttgaagtaaggaagtttgagacgagcctggccaacatagcaaaaccccatctctacttaaaaaaaaaaaaaggtgggggggccgggcacgatggctcacgcctgtaattcccagcactttgggaggccgaggtgggcagatcacgaggtcaagagatcaagaccatcctggctaacagggtgaaaccccgtctctac

SEQ ID NO: 711480 - DNA, 1523 bp, Homo sapiens
tgaaaacaccaaaaatggtaaataaatagttaaatgctaaaaactagcttttttctacttgatttccttaaaagacaaaagactcatatatatctatatgtagagagagagagctgtttttttgtttgcttgttttagtttttgtttttgagacagagttttgctcttgttacccaggctagagtccaatggcatgatttyggccatcgcaacctccacctcccgggttcaagcgactctcctgcctcagcctcccgagtagctgggattacaggcatgtgccaccacgcctggctaattttgtatttttagtagagacagggttcctccatgttggtcagcctggtctcgaactcccaacctcaggtgatccgcctgcctcggcctcccaaagtgctcggattacaggcgtgaatcaccgcacccggctgtttatttttgtttttaaggccagtagagtaggataaaagaaatttatctgggccaggtatggtggctcagcctgcaatccctgcactctgggaggctgaggcggcagattgcttgagcccaggagtttgagaccagcctgggcgacatggcaaaaccccatctctacaaaaaatagaaaaattaggtgggcatagtgacacatgcctgtagttgggcacttgggatgctgagatggaaggattacttgagctcaagaggctgaagctgcaggtagccacaatcacactactgcactccagcctgggcaacagagagtgagaccctatatcaaaaaaaaaaaagaaaaaaaaaagaaaaaatttgtctgaacatgggtcagctggtgtttaaaaaaaatttttaatattaaaaaagaaatctgtaatcagttgtgatcatttagttgtaaacaccagtgcacttggaccagctgcctcattaaactattataaaataagttcactgtaaggtgaatttaaaaatatatagggctaagtgcagtgtctcatgcctgtaacgccagcactttgagaggctgaagcaggaggattgcttgagcctaggaatttgagacaagcctaggcaacacagtaagacctcttctctacaaaaaataaaaaatttagtcaagcacagtagcgcacacctgtggtccaggaggctgaggcaggaggattgcttgagcccaggaggtcatggcggcagtgagctatggttgcaccgctgcactccagcccgagcaacaaagaccctgtctcgaaagaaaaaaaaagaaaaggaaaggaaaaagaggctgggctcggtggctcatgcctataatccccgcactttgggaggctgaggtaggcagaccacttgaagtaaggaagtttgagacgagcctggccaacatagcaaaaccccatctctacttaaaaaaaaaaaaaggtgggggggccgggcacgatggctcacgcctgtaattcccagcactttgggaggccgaggtgggcagatcacgaggtcaagagatcaagaccatcctggctaacagggtgaaaccccgtctctac

SEQ ID NO: 711481 - DNA, 1006 bp, Homo sapiens
taaacacctagtagaaaaaatgaacaagaaaaaaagaaaaaggtatggctaaatgtgaatatgtgttgaaatggtcagtgcgtggctatcagttatattattgttagttgaaatttattttgtgacagagtcttgctctrtcgcccaggctggaatgcagtggtgcaatctcagctcactgcagccttgacttcctgggcttaagcaatcctctcacctcagtcttctgagtagctaggactacaggcacgtgctaccacacctggctgatatttgaaatattttttaatatagtagttctcactttgcgtaggactatgttaactcaacttgagcttattggagctgtatctttgctttatttgacttttggttacacagtaccctgcatagcaaggattgcctatataaattttaatgaaagctaattcctaaatattagtattattttacgcatgtttgatttgtgaaccacatttaataatttctcattttgaagccttttctttttttgaaacagagctttgctctgtcacccagtctggagtgcagtggtgtgattccacctcccgggttcaagtgattcttttgcctcagcctcctgagtaggtgggattataggcctgcaccaccatgcccagctagtttttgtatttttagtagagatgggatttaaccatgttggccaggatgttccaaactcctggcctcaagtgatctgcccgccctggcttcccaaagtgctgggattacaggcgtgagccaccttgtccggccttcattttgaaacttcttgagcatgttcctaagcgtgtaaatttgtggctgctgctttctctggaggtacagtttttataacatgatgcaagatggatcatagaaaagctaatgtagcagtttgtattactctataatgtgaagcagcatcttgcaaaatggtgattttgtgtgtttaacatttttaaaaataattataaaatatatatcattaggaattcttttctct

SEQ ID NO: 711482 - DNA, 1006 bp, Homo sapiens
taaacacctagtagaaaaaatgaacaagaaaaaaagaaaaaggtatggctaaatgtgaatatgtgttgaaatggtcagtgcgtggctatcagttatattattgttagttgaaatttattttgtgacagagtcttgctctatcgcccaggctggaatgcagtggtgcaatctcagctcactgcagccttgacttcctgggcttaagcaatcctctcacctcagtcttctgagtagctaggactacaggcacgtgctaccacacctggctgatatttgaaatattttttaatatagtagttctcactttgcgtaggactatgttaactcaacttgagcttattggagctgtatctttgctttatttgacttttggttacacagtaccctgcatagcaaggattgcctatataaattttaatgaaagctaattcctaaatattagtattattttacgcatgtttgatttgtgaaccacatttaataatttctcattttgaagccttttctttttttgaaacagagctttgctctgtcacccagtctggagtgcagtggtgtgattccacctcccgggttcaagtgattcttttgcctcagcctcctgagtaggtgggattataggcctgcaccaccatgcccagctagtttttgtatttttagtagagatgggatttaaccatgttggccaggatgttccaaactcctggcctcaagtgatctgcccgccctggcttcccaaagtgctgggattacaggcgtgagccaccttgtccggccttcattttgaaacttcttgagcatgttcctaagcgtgtaaatttgtggctgctgctttctctggaggtacagtttttataacatgatgcaagatggatcatagaaaagctaatgtagcagtttgtattactctataatgtgaagcagcatcttgcaaaatggtgattttgtgtgtttaacattttwaaaaataattataaaatatatatcattaggaattcttttctct

SEQ ID NO: 711483 - DNA, 601 bp, Homo sapiens
tgagtatcatgtattactcataaatgcttgagacacattctggctaattttgaatattataacctctaaggaattttttataaagaaaaatgaaaattgtgatggcaaatatattcataatcctgctcaatcagcagttttgctgctagtaatgtttggatgctcacaacaagtctactgaattgctggagtgcaacacagctcgttggttatttttgattttttaatgctttcttttaaataagtggcattcagctaattatatgactaaaaatctgactcaaccacagagttgttaatttaccagcaacatgtggacattgtattactctattttccagggaaaatgtatatatattcttccccaggaaaatgaacaagctggactcctaaaaccacaaagcgttgtattttatgaagtgtcttctrtcttgttatttcctgtacctcagttactatccttgacaaagtctgattgtgctctgctcagatcctcaagactctgcatgtggatttgttactctttgatctccaattgctcctttagttagcaccatactcatttagcattcattaattaaatcaaatatgttggtttgtt

SEQ ID NO: 711484 - DNA, 1192 bp, Homo sapiens
ctcaaaagatgtaggcattctaataccaatcaagcattgggaaaaatatcatgagtgtacaaaaatgagtttcaatttctgatatcataaggtaggccaaggcaatttcacatttattacaccatacttattctaaggggatcattctcaagctctattttaacagattcatactttgacctagctgtaatgcctgatccccataatgttcttatcctctgtatctgattcattacaaagccctaaaaattcctctcagaatttcccctgaatatatttcctcttgtatgttcttattgatacattctcagctgaggtaccaccatgtttctttgaactagtattgtaataatgtccttattatttttcaaacaattaactagactcattggtagatcatgaattaattgtgtgctcattgataaccaattttgaaagaataaaaaaggatagagcggattataacagaaaatgacagtgttccttgaacataattttaagaaaatttgttgaagacttccatatttgtgtgcatgtgtagtagccagggaaataatacaaggagtaaaccatgatataaaatctattctattactaatcatctttgtgaaaagatattaaaagacactgctctaaccagttgcttgccacagggactgtcaactttatcaattctctgtttcagagatggtgttttgttgtttaaaatgtacgtttaatcatgttatgaacctaaccaaacatcttcagtrgtttcagtcaagattcctaattgggtctttcataactattccctcccctacccagaatttttgttttatacatcctattgcatatcttagattcaaatattatcagactacctatgtctttgtttatctgtattcctttatttatgctgatgtctctacctgaaactgcctcttttcctcagacaccctagccctaaacctgaaaaagtcatatttgttcttaaaaatcaatgattaatatccatttcaatgctttacataatttcccaggcaaaattgtttccactgctctggtgtaaaagtacttactcttatctgtattctactatatattaaactctggcatattttgttacttgtatagggattgacatctttaataagttagtaaagctacacataataataatgagagcttatgtcctccttttgcctcatta

SEQ ID NO: 711485 - DNA, 1192 bp, Homo sapiens
ctcaaaagatgtaggcattctaataccaatcaagcattgggaaaaatatcatgagtgtacaaaaatgagtttcaatttctgatatcataaggtaggccaaggcaatttcacatttattacaccatacttattctaaggggatcattctcaagctctattttaacagattcatactttgacctagctgtaatgcctgatccccataatgttcttatcctctgtatctgattcattacaaagccctaaaaattcctctcagaatttcccctgaatatatttcctcttgtatgttcttattgatacattctcagctgaggtaccaccatgtttctttgaactagtattgtaataatgtccttattatttttcaaacaattaactagactcattggtagatcatgaattaattgtgtgctcattgataaccaattttgaaagaataaaaaaggatagagcggattataacagaaaatgacagtgttccttgaacataattttaagaaaatttgttgaagacttccatatttgtgtgcatgtgtagtagccagggaaataatacaaggagtaaaccatgatataaaatctattctattactaatcatctttgtgaaaagatattaaaagacactgctctaaccagttgcttgccacagggactgtcaactttatcaattctctgtttcagagatggtgttttgttgtttaaaatgtacgtttaatcatgttatgaacctaaccaaacatcttcagtagtttcagtcaagattcctaattgggtctttcataactattccctcccctacccagaatttttgttttatacatcctattgcatatcttagattcaaatattatcagactacctatgtctttgtttatctgtattcctttatttatgctgatgtctctacctgaaactgcctcttttcctcagacaccctagccctaaacctgaaaaagtcatatttgttcttaaaaatcaaygattaatatccatttcaatgctttacataatttcccaggcaaaattgtttccactgctctggtgtaaaagtacttactcttatctgtattctactatatattaaactctggcatattttgttacttgtatagggattgacatctttaataagttagtaaagctacacataataataatgagagcttatgtcctccttttgcctcatta

SEQ ID NO: 711486 - DNA, 656 bp, Homo sapiens
tttagtamcttttgctttcgctacttgtagtagataaaagttggatatttttgcacgtgaacattgaatgaaattcagggacaaaacgtttagagttacactaaattcaaacatcttcctttttgcattatctaggaatactaaacaggataattcatacagtctttctcttttaaatactttagggttttattttgcattaattgccttcctggttcagagaataaacgtgtggggttgaggatgggaaatacactaaaaattatagagcatcagtctactagagtcctacaaacctttaggggaacaaggtaattcatatattaattgaagcatatgaatttgctgttatttggccatgtttaacctacaaaatggcaattgtatgtggttcaatttaatagttcagaaatacattcctcgagaattgactggaaatctgaatacatcttttctcttcaaaagacagtaacccattcactccttgctatgccattgttggctcatttgtactcctagtttacaatagtccacaagaacataatttattcaaacaaccactttctttcaagctccaaaacactggaaagagtctaaatcacacacctttgcgacctcaatggtattatggaagctgttcaaagacaaagacaagt

SEQ ID NO: 711487 - DNA, 2523 bp, Homo sapiens
cttctttcttccgccattattttcctttaacacttagtcccttgcaaggggtctgactatacctaacaaaaataaagacctactaaatccctgccatctggctggaaggtgtagcagtgtattaatgtaactaatagcaacaggtgtgcagcagataagacaggagaagacactcagctatggttgagttgtgaaagctaattagatccagcatttcttatgttgattcagattgaatgaggtagtgaaaagggacctgtgcttttgtaaattctagaaaggcaagaggacaatattgaataaagctgtgtttaaacttcattgctcatatatcttttagtaactggtaaaccggcgaagctgataagccaataagagtgctgtctagaacgcatttgcaaaccgttaagagtagcttctttttgaggcctggacttctgattcatctatagaagtctattatgattccatcaattgcatagcttgtgtacctggtagaaattgtgtcttggaatgaccctttcgagttattgacatggctctgatgaatagaacatgagccccaaaactaaatccaaaaggaattttctatctttcatcccccacatgtggcaagacaagttggccctttcttacccagaggtcttttgtgtgactgcatctttctcctccgttctccattgtgtgctttccattttgtctttagtgcctatactgttaggtgttttcttcactggcattcacaaatttaagccattgctgcctcattagccttgtattttgtgtgcatatcatgtatccagacctgtatgttcgctttaagcattcttatatcacactgtctcctcatctaccatatggtaaatgttaaaactccacatttgtctgcatcagggaaaatgcatgggcacacatcctccctccctccctctctgctctcctcccttccttcaggcctcttagcattgtttgttttcccatttctgatactactactccatgctgaagatttgccatattactattttggaaacattgagtgatagaactcctagaaaatttgcaaagaaatgttacatactgtatatcaaactctcagattctagtgttgaaaaagtagcctatactttgctattacttatacctgctgccatagaaaaaaataagtttattcatgacacatttacatttgatcataaataaaagaaaaaagggcacctttttggagttagtcatggtagtcattagtgatatttctgaacagttcttaatttaaaatacttcaaaggaagtaaaggtcatggcttagctgaaggaaatgctccagaaattggactgtgtaaaccatcagtacaataatacgctgtgtatgtatgtgtatataaaatgagaattatggcataattggagcatttgcattaatcaacaaactcacattgagacaaaacttagttttacagctgtcttgattaaagccaagtgttccatgttgctgtgaagaatagcctctttcaaatactttggaaagtagttacttggaaacttgtaaaggtattacatttttatatttaaacacctatagagatcttcaattccttgagtctgagcttgtgggtggaattctaaatttgtatcataatctgtcttttgtgaaacattttgaaaatatgtatatataatattgtatatgcaaattgtgttgtttcacttgtaaagggaaaaggcttatttttctttatatttctgataacttgttttgcatatgaccagcactgactgaaaggcatgtgtagctgcaaacactgttgctttttttgtgaaatgaaaataaaagtatttaaatacaaacattgtgtggactctttggattaatgtatatataaagtggtatctcttcttaggttatgacctctaccagggcagctcctgtactcattgtcttctgtggttagttttttatttcaccagtatccagtgtctttattgcatatacctcagttgacatttgacattcggaggtggctaattctttgttgtgggggctgttctgtgtatcataggacatttagcaggatccctcccatgccaattgcaactagttgccaatagtaactcttgtccccagctgtgacaactaaaacctctcctccagacattgccaaatgtcccctgaggttagggttaaaactttgagtggatgcatagggcggatagctaacagtcacgggagctccatcaggaccattatttactttttggactaaagcagttcttgtaaacactcaggtcacctaagtagccaactgatgsagtagtcatacagtacctaaatcagtgtgagaaatgtcatacgtgtcgtatgccagtgaaaccaaggaacgctgtcttactttgaaggtgagacattggatgttatcagggaaataccccttgcgttgattcacatataagtaggagtatgagtgcacctttttagaggcacactgccacggttacattcctggtcaggtctacaaaaggagt

SEQ ID NO: 711488 - DNA, 582 bp, Homo sapiens
attagttaactctgtgttgtaggattatgggtgattaaaactttttttttaattttcccaagctttccacaatgattttactatttctgattcagggaaaaaaagattaaacaagttttttttttttttgtagtgtggttgtgttgtgtttggtttttcttataaacatatgaaagaaaaattgagctgaaaagcaagaaattcatggtaagatctgttggactctagtacctttgaaggtaaggcattcaccctttcttagagaataatcaaattaattactaataaggctgggtgaggtggctcaagcctgtaatcccagcactttgggaggccgaggcgggcggatcacaaggtcaggagatcgagaccgtcctggctaacacggtgaaacyccgtctctactaaaaatacaaaaaaattagccgggcatggtggcaggcgcctgtagtcccagctactcaggaggctgaggcaggagaatggcgtgaacccgggagacggagcttgcagtgagccgagattgtgccactacactccggcctgggcgacagagcaagactccgtctcaaaaaaaaaaaa

SEQ ID NO: 711489 - DNA, 726 bp, Homo sapiens
cataaaagagtttgaaaagtatttcttattgagatgaccaagtcgcttttctttaaccatcaaaatggtaatcatgattaaaatctgtgatcaattttaattgtagcaatgaaatgacaaccaacttctccatttccactagaaaaattttagagagtaagaacataaaaagagaacctagtgtcggaacatctcaaattgtaaggctagccagaatgaagtaagttttgttagagccaggtgtattctctttgtagtctctacatcaaggggctataatgggtgtctgaagaaaaatcacgggttgattttatcctttatatttaacatgctgtcaaatttatatttccacattactgcaatatggggatcactgggaactgtgactaacacttttgtctatgtacaatagtgtggcatctataataattctctaactcctattcacatcaacaaatgtgtattgagaacatactctgtgaaagatacgctgaaaagagtggtggggcatgccaagaagcagtaggtgatttacctagaagctaatgtaamtttagggctcttcccctaaatgactcccttgcaagaacctagcagggatgctagcagtttttaaattcatagttattattttccattaaaaacacttccacaattgcatgatctttaggctccacaaaatctaaatgggctgccctatcatctcccactaaagtttagtggaag

SEQ ID NO: 711490 - DNA, 1173 bp, Homo sapiens
gcaaaataatctcctagaacacccattaatcagcycacaaaggcttaaagccaaaagcgctagtaaggcttcatatgtttcagcgaagtttactccataaatttgctagacatttaacattctctttttatttcattatctcatgaaaatcccagctaagtaaagactttctcttcttatttttcccagttctaaaactttaggagtagtttataccaatccctctgcccattcttaattatccctgggtaagattgttttacctgaagaaatttggaccggttttccaggagcagtttgttgtcggtcttcactgcttgttgaaacaggtagtcgcagaactgctccctcacaaatcctgggctggccaccaggatgcactttacaacatcaaagtgtatgtggcgctggatagcctggaccacctgttcatagaaccgctccaaggcccggtcatgctgagagcaattgcctttccttttcctagggatgttcacctccaccttggcccgagtgagggtcatgctgggagtgactaagcagatatgggcgaggccttcctgcatgaccacagccgccacatcagcgctccaggctgggtcacaggcctgctcgatgcgctccagtaccacactatcccactgcttcttggccagggtgaactggcggttgggctccagctcgatggtgtggtaagcccccatcttgacatactcattctcttggatgttggtccccttaacccgcagctggcaggcttgagagtcgaagtcgatggcctccacgcagagagtgagggtagtgcggacccggttgctgcccacgctgcccgtggaggactctgtctgtaccttgcggatggtggaggcgcgcaggctgtcgcccacctgcacgaggttgtaagtgtgccacatgtcctcaggctcctcggggaccagggtcacctggcccgcattgtccttctcgatgttcttcctcacgagcttcatggccaaggaaggggctcactgacagaaccaaaggaaccaaggaggtcctcacctccgccccgggagaggggatgggaatgcaggccaggaagggggcggggcccggtttctaagggcacttgcctggcgggaaggaaacacgcttgcttcgactcatgcagcctagggcagcacttcctctatc

SEQ ID NO: 711491 - DNA, 1173 bp, Homo sapiens
gcaaaataatctcctagaacacccattaatcagctcacaaaggcttaaagccaaaagcgctagtaaggcttcatatgtttcagcgaagtttactccataaatttgctagacatttaacattctctttttatttcattatctcatgaaaatcccagctaagtaaagactttctcttcttatttttcccagttctaaaactttaggagtagtttataccaatccctctgcccattcttaattatccctgggtaagattgttttacctgaagaaatttggaccggttttccaggagcagtttgttgtcggtcttcactgcttgttgaaacakgtagtcgcagaactgctccctcacaaatcctgggctggccaccaggatgcactttacaacatcaaagtgtatgtggcgctggatagcctggaccacctgttcatagaaccgctccaaggcccggtcatgctgagagcaattgcctttccttttcctagggatgttcacctccaccttggcccgagtgagggtcatgctgggagtgactaagcagatatgggcgaggccttcctgcatgaccacagccgccacatcagcgctccaggctgggtcacaggcctgctcgatgcgctccagtaccacactatcccactgcttcttggccagggtgaactggcggttgggctccagctcgatggtgtggtaagcccccatcttgacatactcattctcttggatgttggtccccttaacccgcagctggcaggcttgagagtcgaagtcgatggcctccacgcagagagtgagggtagtgcggacccggttgctgcccacgctgcccgtggaggactctgtctgtaccttgcggatggtggaggcgcgcaggctgtcgcccacctgcacgaggttgtaagtgtgccacatgtcctcaggctcctcggggaccagggtcacctggcccgcattgtccttctcgatgttcttcctcacgagcttcatggccaaggaaggggctcactgacagaaccaaaggaaccaaggaggtcctcacctccgccccgggagaggggatgggaatgcaggccaggaagggggcggggcccggtttctaagggcacttgcctggcgggaaggaaacacgcttgcttcgactcatgcagcctagggcagcacttcctctatc

SEQ ID NO: 711492 - DNA, 965 bp, Homo sapiens
tgtgtccttgaggaatctcagaaggctatagctggaaaagtccctattcgaccatctaatgagacagtgtcctcaaatgatgagaacactgatgcccaagcagttgaaatattttgcctaatatactgtggctagtttaagtgaccaaacctagagcagaaaacaattttcttgctctgattcaagttcccagtccactatctcacactatgaagcacataaaaagcagtgatgaaccatcttcattatgtgtccctggggtgtaattaccgatcatacgaagcagaaagattagaagtaataggccttctgcagctcttgcagctgtgtttccactgggtgagacagtgtcaagggtagaggctacaatacgaactggcgagggaggagagccaagtgacagacttccagtcagcaacaggcttgggccacttggccaggagccacctaagtgtcccatatcccctatgcagagcagtccggatactcagcctccagctcttctaggaaactagcaatgcagatgcctctatgagtttgagattgtctagctctgcccagtccaaacggaagtgtccctgaatcagtgggaggaagaagagaggcaactggttggatgaggactgagtttcattttaattatctttgtatccccagtgccctaagtaaaatcgaagctcaaatatgtttatttgartagagtaactaattatagccagaatgttgtcaccaatctactgtaggcaaaacatttgtctcctctgagccttgatttccaagtctatcaagtagaaatgttaataatgatccttgtagtattgttcaaggattgacataaaattccacatatgaacaccatttggaaactctaaagcactctagcatataaaggataaaaggtcaggaaacggcctccacatggcaaattctcaaatagtcccattgccaattttgttgttgacatt

SEQ ID NO: 711493 - DNA, 1317 bp, Homo sapiens
ttctatgtataaagttttggttttttttttcaaaccatttgagagtaagttacaggtgtcatgtctcttacctcttattgcctcatcatttatttttatgagcaaggacattgacctacatgaccccaaaacaattatcagaatcaagaaatgtaacatcaatagatgactactattgacagactacttatgtgttaccaattgttaattatatagtttattattcaaatcagggcaattttgaaagtgaaagagtgatattaaaaattatgccaggacaacaggtataaactgaggccatgctaagaaaactaggatgtatggtcagtcattctgggcttgaatggtctgttaaagatcttattcaagagagctgcccccttcaggagtgagggaaatcaccagaaaggggccagaagtgcacactgagagctgaggctgagggtgactcccaagggctagccagggttcagaactaagggcaatatggtggcccttgccttgtgagggtgtgaggaatgcacaaatgcattcagcgtgatacagcagcatttgaatgcctgctttggcagcgtacaggacagctgagagagtgagacagcctgtgccagctgagaaaaaccattttgtccctttctgcctcagtcctctaccactatggtggtcctggaggaaagagaggcagttcagggaagagagggaaagaggtaagacaaggggaatgaaaaggcagactaggtcccttctttgtcacttctgttccccaccattgagattagaattgcaccaggggagggagaggctttattatgatgagagattaaggtttgcaattatattggagagaaacttttaaaattaaaaacaaaattattcaaatacatgaaagtgatgggaaaaacaatgcaattttctctcacggggaagaaaatcccataggtcatgttgaaggaggtgatgggagaaaaatgacacaaattttcaaatccagcatgtctaataagctgactacacatggtttagaaaaaatcaaacattkcctaagtaaaatagaaccaaaattcaccacttcttcttctctccccagccctctggaaagctgtgctttacttgtttacattattcttctgttctcccttttatttttttaaaaatatgcattatatatatatgtatatacacatgcatgtatatatatgcatgtatatatatgtgtgtgtatacatatgcatgcatatacatgtgtgtgtgtatatatgtatgaaatactgcacatcctatactaaatttgctttcttcactactttactatatgca

SEQ ID NO: 711494 - DNA, 1317 bp, Homo sapiens
ttctatgtataaagttttggttttttttttcaaaccatttgagagtaagttacaggtgtcatgtctcttacctcttattgcctcatcatttatttttatgagcaaggacattgacctacatgaccccaaaacaattatcagaatcaagaaatgtaacatcaatagatgactactattgacagactacttatgtgttaccaattgttaattatatagtttattattcaaatcagggcaattttgaaagtgaaagagtgatattaaaaattatgccaggacaacaggtataaactgaggccatgctaagaaaactaggatgtatggtcagtcattctgggcttgaatggtctgttaaagatcttattcaagagagctgcccccttcaggagtgagggaaatcaccagaaaggggccagaagtgcacactgagagctgaggctgagggtgactcccaagggctagccagggttcagaactaagggcaatatggtggcccttgccttgtgagggtgtgaggaatgcacaaatgcattcagcgtgatacagcagcatttgaatgcctgctttggcagcgtacaggacagctgagagagtgagacagcctgtgccagctgagaaaaaccattttgtccctttctgcctcagtcctctaccactatggtggtcctggaggaaagagaggcagttcagggaagagagggaaagaggtaagacaaggggaatgaaaaggcagactaggtcccttctttgtcacttctgttccccaccattgagattagaattgcaccaggggagggagaggctttattatgatgagagattaaggtttgcaattatattggagagaaacttttaaaattaaaaacaaaattattcaaatacatgaaagtgatgggaaaaacaatgcaattttctctcacggggaagaaaatcccataggtcatgttgaaggaggtgatgggagaaaaatgacacaaattttcaaatccagcatgtctaataagctgactacacatggtttagaaaaaatcaaacattgcctaagtaaaatagaaccaaaattcaccacttcttcttctctccccagccctctggaaagctgtgctttacttgtttacattattcttctgttctcccttttatttttttaaaaatatgcattatatatayatgtatatacacatgcatgtatatatatgcatgtatatatatgtgtgtgtatacatatgcatgcatatacatgtgtgtgtgtatatatgtatgaaatactgcacatcctatactaaatttgctttcttcactactttactatatgca

SEQ ID NO: 711495 - DNA, 1105 bp, Homo sapiens
cttgccttcccttaaaccagtcactggcaaaggggaatgagattgccttgggcttaaagtaatgatgactcattctctggaagttaggagagggacttgcccttcccaataggaaggaaaatccacctattacaaaatcagggagtgaaacacggggcaaatgccagtgagtaggccatgaacattgcctgccccaggaagaaaccagttcctacttgtagagaaggcagcagaatgccaaagcccaatttcacctatgccacagtgcagccaagtccagcccttccacccaccccctggtacctccccatgatttcttcactttacaacaggaacagtaatttgatgtttactttgagttcaggaaggctgtggggggcacagaatgtgcagtgggcattgtcagaagaatgatctgaggtgttgagagagaggcagagatgtagagaaaggtgctcagaagcaatgggtaataaagcaaagtgtttaatataaacattatttcatttaaatctcaaaacaatcctatgaagtagggtccttttccacagtttatggatcagaatgcagggagactaagttttgcccaaattcacatcatttgttcagtatgtcctcacctaatgtcaccaataggttcttagaaattgggacaggggccaggcacagtggctcatgcctgtaatcccagcactttaggaggccaaggcgggtgaatcacytgaggtcaggagtttgagaccagcctgcccaacatggtgaaaccccatctctactaaaaatacaaaaattagctgggcatggtggcgggtgctactcaggaggctgaggcaggagaatcacttgaccctggaggcggaggttgcagtgagccaagattgtgccactgcactccagcctgggcaacagagcaagactccatcttaaaaaaagaaaagaaaagaaaaagaaaaagaaattgtgacaggaagctaaacgctgtacagcaggtgccgaaataacaacatttagctcagtgtcatttcattataacattgatgaggaaaaaaatggttataggtctttttgcttaaagtcacaatttccaagaacttattgaccatgt

SEQ ID NO: 711496 - DNA, 672 bp, Homo sapiens
accccactagttaacttattttgggaggtgatttactttattggagtgtaaaaggtcattcctactacttgctaattaaggcagcaacctggcagcatgaatgatgccagttttatgaatgatcaaatcagtttgtattgtggctgataaagctttggaaaactattgtagcagttcgtcaatgcgataaaaaaagcagaaaccacaagtaaaaatcttccagatattagagaaaaaagtaatgaaatttaattgttcagattgaaggagaatggaaaagtaaatgaaaactgtattgatgttttaaaatttaagtagaaaaagggttatgttaactcagtgatttaattctattatctggctctagatgatttttaaaattgtgaatgattggtgaatgagmgaatacatttattataaacttgatgctaacaatgtgacagtggtataaataataaatgcagaataagatttccatagtggaaaatcactgttttggcacagacagaacttctttccatattacttgcccagggttagagaaacattactattaaaaacgattttaaaattcttttaccaagttatgatgttaagtcatattggtgatgaggtagcttctctctgtagcaaccatctggttttgggttgtgatagttcaatagggtaaag

SEQ ID NO: 711497 - DNA, 672 bp, Homo sapiens
accccactagttaacttattttgggaggtgatttactttattggagtgtaaaaggtcattcctactacttgctaattaaggcagcaacctggcagcatgaatgatgccagttttatgaatgatcaaatcagtttgtattgtggctgataaagctttggaaaactattgtagcagttcgtcaatgcgataaaaaaagcagaaaccacaagtaaaaatcttccagatattagagaaaaaagtaatgaaatttaattgttcagattgaaggagaatggaaaagtaaatgaaaactgtattgatgttttaaaatttaagtagaaaaagggttatgttaactcagtgatttaattctattatctggctctagatgatttttaaaattgtgaatgattggtgaatgagcgaatacatttattataaacttgatgctaacaatgtgacagtggtataaataataaatgcagaataagatttccatagtggaaaatcactgttttggcacagacagaacttctttccatattacttgcccagggwtagagaaacattactattaaaaacgattttaaaattcttttaccaagttatgatgttaagtcatattggtgatgaggtagcttctctctgtagcaaccatctggttttgggttgtgatagttcaatagggtaaag

SEQ ID NO: 711498 - DNA, 633 bp, Homo sapiens
ccactgggaaaaatggtctagggatctttgctgcacccagtttcctcttgctttatcccagaatataccctttttccaattcatyataaagaagggggactagtgaaactcaggaattctggaagttaagctatctgcaaacttattctgaggaatcagtgcaaacacacagggccagctatgggacaatgcctgggctttctacactgacttctttccattcgatggtcatcagttttatcaggggcatcagggcttctgtgtaagtcactaaaacatggccgaaggtacttgagcaaccacaaaaaaatttgacgctaaaaatataggcaggaaatctccacatgcaaacaattctcaggaagaggagaggggtgcgtcataaaagtccggctgacattctacactcctctcaaattacatgcagccagtgccgtcggcctgaaaatattgagcaatattccagccgtcctcttgtcacatgtacttcatgaatgctgggctcatcaggcagaagcacccaggcatcaaaacactcgcctgagaattgaggaacgtggccaccgtcttcttggcgagacctcgactgtaggaagcacctgacctcagctcctctgaaaatggaatgaagca

SEQ ID NO: 711499 - DNA, 633 bp, Homo sapiens
ccactgggaaaaatggtctagggatctttgctgcacccagtttcctcttgctttatcccagaatataccctttttccaattcatcataaagaagggggactagtgaaactcaggaattctggaagttaagctatctgcaaacttattctgaggaatcagtgcaaacacacagggccagctatgggacaatgcctgggctttctacactgacttctttccattcgatggtcatcagttttatcaggggcatcagggcttctgtgtaagtcactaaaacatggccgaaggtacttgagcaaccacaaaaaaatttgacgctaaaaatataggcaggaaatctccacatgcaaacaattctcaggaagaggagaggggtgcgtcataaaagtccrgctgacattctacactcctctcaaattacatgcagccagtgccgtcggcctgaaaatattgagcaatattccagccgtcctcttgtcacatgtacttcatgaatgctgggctcatcaggcagaagcacccaggcatcaaaacactcgcctgagaattgaggaacgtggccaccgtcttcttggcgagacctcgactgtaggaagcacctgacctcagctcctctgaaaatggaatgaagca

SEQ ID NO: 711500 - DNA, 1722 bp, Homo sapiens
ctaattccccataaaagaccaatacattatatgttttatacaattttatttttaaaaatcttaatgtgcaggcattggcacattttaaaaacgaactgcataaacagatctttcctcctatctaggaaaaatggaatgtcagaagtcaacaaaatggataaacttaaagtgctaaaacagaaggcacttcaccaaatctgttcactgaaacagttatatatccttgcttgcatctttcacgttataggctgcagtgaatgtctgtctggatagaagaacatacagaaatagtttcacggcagtaaaaatgtaagtcgaagaagtgatgagtactttgccaacgtattttgtttttgataaccttcctttgtttttgataactttccttttataagtggagaaaacaggattcagaattgaaagaaaagttgaaatcgcagaatgcagttatttgggggatggggaggttggtagatattaaatcggttttcccctgaagcaaaatgaaaagaaaaaaagcgctttctaccacaccctactgcgtgtcaataggttgaactcagtgattccctctggtcttcacagtcagctagtctcactctccccttctaatgcacaaactctagctacatctaattccttgcccttcacttataaatacaagaactactgtgattgccttctttcactgactttcttcccctgagctcccacaaacactgatataacttggtcttagagctctatctccaagagcagaaactgtatttaatttttttttagtaaaaaaaaatttttttttttgagacggagtttcgctctagtcgcccaggctggagtgcagtggcatggtcttggctcactgcaacctccacctcccaggttcaagcgattctcctgcctcagcctccgaagtagatgggattacaggtgcccactaccacacccagctaattttttgtattttcagtagagacggggttttgtcacgttggacaggctggtctcgaactcctgacctcctgatccgcccacctcagcctcccaaagtgctgggattataggcgtgagccaccgcgccaggccaaatatttttatagagatgaggttttgctacattgcccaggctggtctcaaactcctgagctcaaatgatcctcccacctcagcctcgaaagtgctgagattacaggtgtgagctatcgcatccagtcaatatttaatttttattctaattattgacatttaatagattactgttaacacgatcattaacttaacaaaacaactgaaggtaactaaatgcattagtttaggaagttagggtttaacatggtcttaatataaggttatatataatacagcagatacatcgaataatagaaattaaaataattaaatagaaattagtggaatcctttttcgtttttgtacaatattttctggtaatagaaaaatattgttaccagaaaataatgaggtcttataagttcaataataacttcttttgaaaacaaaatgacttcgagaagtgtttgtaatgtctttgcccactttttaatctagttgttctttgcttattcgattgttcaagtttttttttttttttttttttttttgagacagagtcttgctctgtcgcccaggctggagtgcaktggcgcaatctcggctcactgcaagctccacctcccaagttcacgccattctcctgcctcagcc

SEQ ID NO: 711501 - DNA, 1088 bp, Homo sapiens
aggtgtccccagccccctggccacaaactgatactggccttggtctgttggaaacagggttgcacagcaaagaggtgagcagtgggcaagcaagccaagcttcatctgtatttacagccactccccatcgctcacattatcacctgagctccacctcctgtcagatcagctgcggcattagagtctcataggagcaggaatcctaacgtcaactgcacatgagagggatctaggttgcaagctccttatgagaatctaatgcctgatgatgtgtcactgtctcccatcacccccagatgggacagtcaagatgcaggaaagcaagctagggttcccactgattctacattatggtgagttgtataattatttcattatatattacaatggaataataatagcaataaagtgcataataaatgtaatgcacttgaatcaccccaaaaccttcctccaccccagtccatggaaaaactgtcttccatgaaaccggtcctggtgccaaaaaggttaggggctgctgccttgtatcatatgggaaactagctctacatctaatttaccatttagtaacacagaactaattcaccacatttgtgattaccctttcttgtatgtgtattgtatcatgccgatatgggttgagttgtgtccccataaaaaaaaaagatgttcaattcttaacttccagtacctgtgaatgtgacgaattggaaatagggtctttgcagatgatctagttaagatgaggtcattagggtagaccataatccaatattactgtgtccttataaaraggggaaacttggacacagagacagacacacaaagaggaagacaggaaagatgatgtgaagacacaaggaaccatgtataggccaaggaacatctgaggctatcagaacaggttctctctcacagccttctgaaagaaccaaccctgccaatatactgatgttggacttttagccttagaactctgagacaatacatttctgtggtttaagccacccggtttgtggtactttgttacagcagccccaggaaactaatatgcaggttgtagatgaagtcggcccaagcttgca

SEQ ID NO: 711502 - DNA, 1255 bp, Homo sapiens
aaacatctgcacactgcctagtcagggattgatgagctacctatgaacaaagaacttaaaggactcctgttaggtcaaagcaaaacacaaataaaattccaatagatkctgaattcccatctaatgtaccgcagactacagcaaactaccgtctttcttcgctcaactccattaacctaaatagttagactccatccgttgatggaaaaaaatcaaaattccagaattctcttttggctgaaggaagtatatcactttcttcacttctgcagaaagtatgtacgctaaaaccattattagtttaaagaatgggttcagtatttagtatagtcaggaaaatttcagcccaccaacatttaagagtatttgagttttccaccctcattttgcagctgggttctcaccaggatggcctcagacatccatcccgtaaccaatgtgttttctgaacgggacataaaggcacactgcaagagatgctcacgctactgaaatgtcactcaggttgagtgcttgggaaattcagcaaagaagaatctagcaggacttgcttcccccttcccagtttttattaattaagcctatatgggaaggaggaggtgcaatgagatgaccaagtaaaaataaagctatcaggaaagtatattaaaatataataatttgctggagaaacttacgatggggttgatagttaaactgcagccagcagtttaacacagcactgtccaatagaactttcagcactgatggaaaagttctatcatttctgttgaccaatattcagttccttagtcacattagccatatttcaagtgtgtaacagttggggttggggaggtgacggaattgagatgctctttacaaccacaagtcctgaatacgctcagaaagcttttatcctggcttatgatgtttgtctcatctatactcctaaaaatggcctacactagcatccttgataaacactggttataggcaaatgcttttagccttatgtatcgcacactgtcactttaaatggtagtattttctaaagatgtgtcatccagggacacaggttcactgtacattacacaccaaggttacagcagaaacaaactatactgaatatcaactgctgttctttccaaagttcctagagattatgtttagtgctcttgaatctgttaagccacataaaatgatactggttttaatgaaggaagtttttcaaatcccaagtgactagagacaaatccagttctataatttaaaa

SEQ ID NO: 711503 - DNA, 1255 bp, Homo sapiens
aaacatctgcacactgcctagtcagggattgatgagctacctatgaacaaagaacttaaaggactcctgttaggtcaaagcaaaacacaaataaaattccaatagatgctgaattcccatctaatgtaccgcagactacagcaaactaccgtctttcttcgctcaactccattaacctaaatagttagactccatccgttgatgraaaaaaatcaaaattccagaattctcttttggctgaaggaagtatatcactttcttcacttctgcagaaagtatgtacgctaaaaccattattagtttaaagaatgggttcagtatttagtatagtcaggaaaatttcagcccaccaacatttaagagtatttgagttttccaccctcattttgcagctgggttctcaccaggatggcctcagacatccatcccgtaaccaatgtgttttctgaacgggacataaaggcacactgcaagagatgctcacgctactgaaatgtcactcaggttgagtgcttgggaaattcagcaaagaagaatctagcaggacttgcttcccccttcccagtttttattaattaagcctatatgggaaggaggaggtgcaatgagatgaccaagtaaaaataaagctatcaggaaagtatattaaaatataataatttgctggagaaacttacgatggggttgatagttaaactgcagccagcagtttaacacagcactgtccaatagaactttcagcactgatggaaaagttctatcatttctgttgaccaatattcagttccttagtcacattagccatatttcaagtgtgtaacagttggggttggggaggtgacggaattgagatgctctttacaaccacaagtcctgaatacgctcagaaagcttttatcctggcttatgatgtttgtctcatctatactcctaaaaatggcctacactagcatccttgataaacactggttataggcaaatgcttttagccttatgtatcgcacactgtcactttaaatggtagtattttctaaagatgtgtcatccagggacacaggttcactgtacattacacaccaaggttacagcagaaacaaactatactgaatatcaactgctgttctttccaaagttcctagagattatgtttagtgctcttgaatctgttaagccacataaaatgatactggttttaatgaaggaagtttttcaaatcccaagtgactagagacaaatccagttctataatttaaaa

SEQ ID NO: 711504 - DNA, 1255 bp, Homo sapiens
aaacatctgcacactgcctagtcagggattgatgagctacctatgaacaaagaacttaaaggactcctgttaggtcaaagcaaaacacaaataaaattccaatagatgctgaattcccatctaatgtaccgcagactacagcaaactaccgtctttcttcgctcaactccattaacctaaatagttagactccatccgttgatggaaaaaaatcaaaattccagaattctcttttggctgaaggaagtatatcrctttcttcacttctgcagaaagtatgtacgctaaaaccattattagtttaaagaatgggttcagtatttagtatagtcaggaaaatttcagcccaccaacatttaagagtatttgagttttccaccctcattttgcagctgggttctcaccaggatggcctcagacatccatcccgtaaccaatgtgttttctgaacgggacataaaggcacactgcaagagatgctcacgctactgaaatgtcactcaggttgagtgcttgggaaattcagcaaagaagaatctagcaggacttgcttcccccttcccagtttttattaattaagcctatatgggaaggaggaggtgcaatgagatgaccaagtaaaaataaagctatcaggaaagtatattaaaatataataatttgctggagaaacttacgatggggttgatagttaaactgcagccagcagtttaacacagcactgtccaatagaactttcagcactgatggaaaagttctatcatttctgttgaccaatattcagttccttagtcacattagccatatttcaagtgtgtaacagttggggttggggaggtgacggaattgagatgctctttacaaccacaagtcctgaatacgctcagaaagcttttatcctggcttatgatgtttgtctcatctatactcctaaaaatggcctacactagcatccttgataaacactggttataggcaaatgcttttagccttatgtatcgcacactgtcactttaaatggtagtattttctaaagatgtgtcatccagggacacaggttcactgtacattacacaccaaggttacagcagaaacaaactatactgaatatcaactgctgttctttccaaagttcctagagattatgtttagtgctcttgaatctgttaagccacataaaatgatactggttttaatgaaggaagtttttcaaatcccaagtgactagagacaaatccagttctataatttaaaa

SEQ ID NO: 711505 - DNA, 1255 bp, Homo sapiens
aaacatctgcacactgcctagtcagggattgatgagctacctatgaacaaagaacttaaaggactcctgttaggtcaaagcaaaacacaaataaaattccaatagatgctgaattcccatctaatgtaccgcagactacagcaaactaccgtctttcttcgctcaactccattaacctaaatagttagactccatccgttgatggaaaaaaatcaaaattccagaattctcttttggctgaaggaagtatatcactttcttcacttctgcagaaagtatgtacrctaaaaccattattagtttaaagaatgggttcagtatttagtatagtcaggaaaatttcagcccaccaacatttaagagtatttgagttttccaccctcattttgcagctgggttctcaccaggatggcctcagacatccatcccgtaaccaatgtgttttctgaacgggacataaaggcacactgcaagagatgctcacgctactgaaatgtcactcaggttgagtgcttgggaaattcagcaaagaagaatctagcaggacttgcttcccccttcccagtttttattaattaagcctatatgggaaggaggaggtgcaatgagatgaccaagtaaaaataaagctatcaggaaagtatattaaaatataataatttgctggagaaacttacgatggggttgatagttaaactgcagccagcagtttaacacagcactgtccaatagaactttcagcactgatggaaaagttctatcatttctgttgaccaatattcagttccttagtcacattagccatatttcaagtgtgtaacagttggggttggggaggtgacggaattgagatgctctttacaaccacaagtcctgaatacgctcagaaagcttttatcctggcttatgatgtttgtctcatctatactcctaaaaatggcctacactagcatccttgataaacactggttataggcaaatgcttttagccttatgtatcgcacactgtcactttaaatggtagtattttctaaagatgtgtcatccagggacacaggttcactgtacattacacaccaaggttacagcagaaacaaactatactgaatatcaactgctgttctttccaaagttcctagagattatgtttagtgctcttgaatctgttaagccacataaaatgatactggttttaatgaaggaagtttttcaaatcccaagtgactagagacaaatccagttctataatttaaaa

SEQ ID NO: 711506 - DNA, 1255 bp, Homo sapiens
aaacatctgcacactgcctagtcagggattgatgagctacctatgaacaaagaacttaaaggactcctgttaggtcaaagcaaaacacaaataaaattccaatagatgctgaattcccatctaatgtaccgcagactacagcaaactaccgtctttcttcgctcaactccattaacctaaatagttagactccatccgttgatggaaaaaaatcaaaattccagaattctcttttggctgaaggaagtatatcactttcttcacttctgcagaaagtatgtacgctaaaaccattattagtttaaagaatgggttcagtatttagtatagtcaggaaaatttcagcccaccaacatttaagagtatttgagttttccaccctcattttgcagctgggttctcaccaggatggcctcagacatccatcccgtaaccaatgtgttttctgaaygggacataaaggcacactgcaagagatgctcacgctactgaaatgtcactcaggttgagtgcttgggaaattcagcaaagaagaatctagcaggacttgcttcccccttcccagtttttattaattaagcctatatgggaaggaggaggtgcaatgagatgaccaagtaaaaataaagctatcaggaaagtatattaaaatataataatttgctggagaaacttacgatggggttgatagttaaactgcagccagcagtttaacacagcactgtccaatagaactttcagcactgatggaaaagttctatcatttctgttgaccaatattcagttccttagtcacattagccatatttcaagtgtgtaacagttggggttggggaggtgacggaattgagatgctctttacaaccacaagtcctgaatacgctcagaaagcttttatcctggcttatgatgtttgtctcatctatactcctaaaaatggcctacactagcatccttgataaacactggttataggcaaatgcttttagccttatgtatcgcacactgtcactttaaatggtagtattttctaaagatgtgtcatccagggacacaggttcactgtacattacacaccaaggttacagcagaaacaaactatactgaatatcaactgctgttctttccaaagttcctagagattatgtttagtgctcttgaatctgttaagccacataaaatgatactggttttaatgaaggaagtttttcaaatcccaagtgactagagacaaatccagttctataatttaaaa

SEQ ID NO: 711507 - DNA, 991 bp, Homo sapiens
gttaccttgcatctgagtttaggcagtgagcacctggttaaaacacaggcaagttatgaagggagatctgacattgtgtttgcttttattctaagatgcacattttttttttcttttttgagatggagtcttgctctgtcatccaggctggagtgcagtggcatgatcttggcttactgccatatcggcctcctggattcaagagattctcgtgcctcagcctccctagtagctgagattacaggcgcctgccacttcgcctggctaattttttgtatttttagtagacacagggtttcaccatattggccagtctcgaactcctgacctcaggtgatccacctgcctcagccacccaaagtgatgggattacaggtgtgagccaccgtgcctggccaagatgcacatttctttaatcttttaatacttttgaaattgggatgtggttttacaatcagagtgaatagttaatgtaataatgcaatagtctatttctcctgaagaagtaagttgttattaaatagataagaaccacctggaaaatagggaagcagtatggacacactccagtgagtgggtgttgaaaactgacccgagccagataggtcatgtgyggatgattgcaacctaggagttgttaagtcagaactgctagctattcttctccacaaatgttacacaatcatgaacaaagcaagccactggccaaattctgctgcatacacagacgcttgttaactaaatatttgttagtgagcaagcaaaaaagtggttcatataatcttccttgcaaagttctctaagacaatttctgggattccagaggcagaataatgctgccagtttagccagcattgagcaaccagaatctcccacagtttatggctaggcccaagaccaggtaaaggcatcattctaagagtgctggatattttattcatgcaagagtggagagtctctaagctcttttaactagtctacttatctttat

SEQ ID NO: 711508 - DNA, 1046 bp, Homo sapiens
  misc_feature 684: n = A,T,C or G
ctttcaaatttctatgggaagaaagcaggctgagacagttaatcacctacaaacatgagccattctctgtagaaaaggaagaaagtctcagagtgcagagccgcctggctggagagtggagttaagaaccacagggaaccactcccagggagcacagctgggccctaatcaaggaactggaattgttgcactggctggatcagaactgctatgaactagtaagtactactcattcctcattcctcctttttaaatggaaacgttcactgtagttatcctgataccacacctaccccaagaccatcttgctgcaaggaagcccaatgtctacatggacaggctgagtggaaagacagaggtgacacagaaacccagctgggccgggctcccagcccacgtgccagtgtctgttgcaccaatatggagaacaaccaaggaattcaactgacagggacaaccaaggactcctgaaaaccctcatcccagtcagctccagctgtttgcatcaccccagctgaggtgccagcatcatgtggaagagatgacctatatttgcagtgccctgtctgaatttatgacccaccaaatcaggaatacaataaaatggttgttgctttattccaccaagttttgggatggaatcaacacrtagctgaaacaatatgcagtctgtacttttaaaanatatgtacttattttataaagaaattttaaaaatggatggataatgtcccttttttccatttgctagtttggcaatttaaaatttaaaacttagaggagtaaacacctgaatgttctgaatcaaaaggtggtaattcatctagaattcaatgccattacccaataagcatttctgtgtggcttcaagctggaagttgccttcccttcctctttcttcccataactcttaatttaatgtaccattcatctggcattccccataaactgcttggttaataggtattagtgatttcatattacattgtaatgatcaatgcaatgtgctgcagaagattaaaaaatatataaggtattatttatgt

SEQ ID NO: 711509 - DNA, 1046 bp, Homo sapiens
  misc_feature 684: n = A,T,C or G
ctttcaaatttctatgggaagaaagcaggctgagacagttaatcacctacaaacatgagccattctctgtagaaaaggaagaaagtctcagagtgcagagccgcctggctggagagtggagttaagaaccacagggaaccactcccagggagcacagctgggccctaatcaaggaactggaattgttgcactggctggatcagaactgctatgaactagtaagtactactcattcctcattcctcctttttaaatggaaacgttcactgtagttatcctgataccacacctaccccaagaccatcttgctgcaaggaagcccaatgtctacatggacaggctgagtggaaagacagaggtgacacagaaacccagctgggccgggctcccagcccacgtgccagtgtctgttgcaccaatatggagaacaaccaaggaattcaactgacagggacaaccaaggactcctgaaaaccctcatcccagtcagctccagctgtttgcatcaccccagctgaggtgccagcatcatgtggaagagatgacctatatttgcagtgccctgtctgaatttatgacccaccaaatcaggaatacaataaaatggttgttgctttattccaccaagttttgggatggaatcaacacatagctgaaacaatatgcagtctgtacttttaaaanatatgtacttattttataaagaaattttaaaaatggatggataatgtcccttttttccatttgctagtttggcaatttaaaatttaaaacttagaggagtaaacacctkaatgttctgaatcaaaaggtggtaattcatctagaattcaatgccattacccaataagcatttctgtgtggcttcaagctggaagttgccttcccttcctctttcttcccataactcttaatttaatgtaccattcatctggcattccccataaactgcttggttaataggtattagtgatttcatattacattgtaatgatcaatgcaatgtgctgcagaagattaaaaaatatataaggtattatttatgt

SEQ ID NO: 711510 - DNA, 1046 bp, Homo sapiens
  misc_feature 684: n = A,T,C or G
ctttcaaatttctatgggaagaaagcaggctgagacagttaatcacctacaaacatgagccattctctgtagaaaaggaagaaagtctcagagtgcagagccgcctggctggagagtggagttaagaaccacagggaaccactcccagggagcacagctgggccctaatcaaggaactggaattgttgcactggctggatcagaactgctatgaactagtaagtactactcattcctcattcctcctttttaaatggaaacgttcactgtagttatcctgataccacacctaccccaagaccatcttgctgcaaggaagcccaatgtctacatggacaggctgagtggaaagacagaggtgacacagaaacccagctgggccgggctcccagcccacgtgccagtgtctgttgcaccaatatggagaacaaccaaggaattcaactgacagggacaaccaaggactcctgaaaaccctcatcccagtcagctccagctgtttgcatcaccccagctgaggtgccagcatcatgtggaagagatgacctatatttgcagtgccctgtctgaatttatgacccaccaaatcaggaatacaataaaatggttgttgctttattccaccaagttttgggatggaatcaacacatagctgaaacaatatgcagtctgtacttttaaaanatatgtacttattttataaagaaattttaaaaatggatggataatgtcccttttttccatttgctagtttggcaatttaaaatttaaaacttagaggagtaaacacctgaatgttctgaatcaaaaggtggtaattcatctagaattcaatgccattacccaataagcatttctgtgtggcttcaagctggaagttgccktcccttcctctttcttcccataactcttaatttaatgtaccattcatctggcattccccataaactgcttggttaataggtattagtgatttcatattacattgtaatgatcaatgcaatgtgctgcagaagattaaaaaatatataaggtattatttatgt

SEQ ID NO: 711511 - DNA, 706 bp, Homo sapiens
tgggattgctgagtcaaatggtatttctggttctagatccttgaggaattgccacactgtcttccacaatggttgaactaagttacactcccaccagtagtgtaaaaagcattcctatttctccacatcctctccagcatctattgtttcctgacgttttaatgattgccattccaactggcgtgagatggtatctcattgtgattttgwtttgtatttctctgatgaccagtgatgatgagctttttttcatgtttgttgactgcataaatgtcttcttttgagaagtgtctcttcatatccaggagcaaaaaaattatattcccagccaagctgcctttgtttggaaacgtaaaaaaactcataaatatagaagaataccagaaaaatttacataaatagttatgagatgaaacataataatgagctctcaaggtaaatagttaatccttagtacattaaaaaaaaaaaacagaatggacgaatggggtaattttgccaatgcaggaatgattcaatattaaataatctgttactatgacaggtcacttattcagaatgtttgcggatctcagataattgaaattaagtgtttttggagtttaggtaattccagaagagcagaataggaacttgagctaattccaattatcttgtttagcctttcagtatggactaaggaaggagtggaatttataatatacat

SEQ ID NO: 711512 - DNA, 706 bp, Homo sapiens
tgggattgctgagtcaaatggtatttctggttctagatccttgaggaattgccacactgtcttccacaatggttgaactaagttacactcccaccagtagtgtaaaaagcattcctatttctccacatcctctccagcatctattgtttcctgacgttttaatgattgccattccaactggcgtgagatggtatctcattgtgattttgttttgtatttctctgatgaccagtgatgatgagctttttttcatgtttgttgactgcataaatgtcttcttttgagaagtgtctcttcatatccaggagcaaaaaaattatattcccagccaagctgcctttgtttggaaacgtaaaaaaactcataaatatagaagaataccagaaaawtttacataaatagttatgagatgaaacataataatgagctctcaaggtaaatagttaatccttagtacattaaaaaaaaaaaacagaatggacgaatggggtaattttgccaatgcaggaatgattcaatattaaataatctgttactatgacaggtcacttattcagaatgtttgcggatctcagataattgaaattaagtgtttttggagtttaggtaattccagaagagcagaataggaacttgagctaattccaattatcttgtttagcctttcagtatggactaaggaaggagtggaatttataatatacat

SEQ ID NO: 711513 - DNA, 706 bp, Homo sapiens
tgggattgctgagtcaaatggtatttctggttctagatccttgaggaattgccacactgtcttccacaatggttgaactaagttacactcccaccagtagtgtaaaaagcattcctatttctccacatcctctccagcatctattgtttcctgacgttttaatgattgccattccaactggcgtgagatggtatctcattgtgattttgttttgtatttctctgatgaccagtgatgatgagctttttttcatgtttgttgactgcataaatgtcttcttttgagaagtgtctcttcatatccaggagcaaaaaaattatattcccagccaagctgcctttgtttggaaacgtaaaaaaactcataaatatagaagaataccagaaaaatttacataaatagttatgagatgaaacataataatgagctctcaaggtaaatagttaatccttagtayattaaaaaaaaaaaacagaatggacgaatggggtaattttgccaatgcaggaatgattcaatattaaataatctgttactatgacaggtcacttattcagaatgtttgcggatctcagataattgaaattaagtgtttttggagtttaggtaattccagaagagcagaataggaacttgagctaattccaattatcttgtttagcctttcagtatggactaaggaaggagtggaatttataatatacat

SEQ ID NO: 711514 - DNA, 706 bp, Homo sapiens
tgggattgctgagtcaaatggtatttctggttctagatccttgaggaattgccacactgtcttccacaatggttgaactaagttacactcccaccagtagtgtaaaaagcattcctatttctccacatcctctccagcatctattgtttcctgacgttttaatgattgccattccaactggcgtgagatggtatctcattgtgattttgttttgtatttctctgatgaccagtgatgatgagctttttttcatgtttgttgactgcataaatgtcttcttttgagaagtgtctcttcatatccaggagcaaaaaaattatattcccagccaagctgcctttgtttggaaacgtaaaaaaactcataaatatagaagaataccagaaaaatttacataaatagttatgagatgaaacataataatgagctctcaaggtaaatagttaatccttagtacattaaaaaaaaaaaacagaatggacgaatggggtaattttgccaatgcaggaatgattcaatattaaataatctgttactatgacaggtcacttattcagaatgtttgcgratctcagataattgaaattaagtgtttttggagtttaggtaattccagaagagcagaataggaacttgagctaattccaattatcttgtttagcctttcagtatggactaaggaaggagtggaatttataatatacat

SEQ ID NO: 711515 - DNA, 636 bp, Homo sapiens
gtgttgtttattcttgacatgtagaaaagttatcaattttatattcattttataactagtcaccaggatgaactcttagttctaataaatttttagttgatcctcttgagtcataactaccattgacacttctgatttttttttaaatctttaattttgtcaaggaatagattcacatagccttaataatatagtaagctttaaggacttaaaaattatttgagcttgcctctgcttctggggaaatggaatgcatgttcttttccctattcttccttaaatacaactaaaagcctccaatattatatataaacaaacataacactcttaaaagtgaagagaaaaaagtcagactaagtagtgaaccttgggacccaaggaatgacatagtggtgagttctttgagttttctttttgtttatatttttctgacctggagctgragaggctggccacccagaaatgccaatgggtacaggctctgatatggtttggctctgtgtccccacccgaatctcatcttgaattgaacttccataattcctgcatgttgtgggagggacccagtgggagataatttgaatcatgggggcggtttcccccatactgttcttgtggtagtgaataagtctcatg

SEQ ID NO: 711516 - DNA, 1504 bp, Homo sapiens
ctactctaaactgggttgagtctgcatttagcaaaaggcagcagatttaagtggagacaatgctgagctcatgagataaagagcaagatgaggctataaatggcaaatagagcatgtgatgagaactgggaaagatgtggagaagtttaggaagcattttgtgaggagaaataagacagacaagcggtttaggaawaggctgccattttccagcactgagtcagaggtggtaactttaagtaactatagaagtcttcgggaatccacatcaaggaaagatctgttttcttcttaggaaggagtggctgaagctttgggtatttttgtttgtttgtttcccattttgttttataatttttttttattttactttaagttctgggatacatgtgccgaacatgcagttttgttacataggtatacatgtgccatggtggtttgctgcacccatcaacctgtcatgtaggttgtaagccctgcatgtattaggtctttgtcctaatgctgtccctccccttgccccccatgcccggacaggccccggtgtgtgatgttgctctccctgtgtccatgtgttctcattgttcaactcccactttgcaggggcatgaatgaagctggaaaccatcatcctcatcaaagtagcacaggaacagaaaaccaaacaccgctttgggtatattttttaagcagcaacaagagattcaatcacaaatgagtgggagatgatgattccaaagataaaagataacctaatgttcaaactcccagaaaggggtgaaattctgggagaattaactttgtgaaggaggggacaaaggggagcaatattttgttctgagtaggatgagatactattaacttgggaaaagaagtgaacaagcatggttgtaagacagggaatgcaagatttttctgttaaattaggaattgataatgaaaaagatagaaaaagaattgacgatttgagaaaagaagatacagtttaaaatgacttctgcaggtatatggaaacttgaataaaaaataaatgagataaattagttttttaaattaagattactctacagtatcaagggtccaacttagatcacacatttacattgaacttaatccacttctgtaattttctccaactctatccaaattgcttgtgagcggaattagagaaaattgatcatttggttgagctaggtttggggaattaactgacaaactgaaataaatgtgtcagtttgctcgggttaggaaatggaaaatgataaggaagatagaggtgaaataactgagcatggcatccattatagtttgcatatgaagtgaaacaagaaacggacttataaaatcaaattggattaagaaactgatgttaagtgtgaggtcaaaagcaatgtttagtaaacatgagagacagagaatggtagcaagctgtagtgtcaagaaaatttcaaaatattacagatatcgaatactttgggatgctgataaagtccataaattaaaa

SEQ ID NO: 711517 - DNA, 1504 bp, Homo sapiens
ctactctaaactgggttgagtctgcatttagcaaaaggcagcagatttaagtggagacaatgctgagctcatgagataaagagcaagatgaggctataaatggcaaatagagcatgtgatgagaactgggaaagatgtggagaagtttaggaagcattttgtgaggagaaataagacagacaagcggtttaggaaaaggctgccattttccagcactgagtcagaggtggtaactttaagtaactatagaagtcttcgggaatccacatcaaggaaagatctgttttcttcttaggaaggagtggctgaagctttgggtatttttgtttgtttgtttcccattttgttttataatttttttttattttactttaagttctgggatacatgtgccgaacatgcagttttgttacataggtatacatgtgccatggtggtttgctgcacccatcaacctgtcatgtaggttgtaagccctgcatgtattaggtctttgtcctaatgctgtccctccccttgccccccatgcccggacaggccccggtgtgtgatgttgctctccctgtgtccatgtgttctcattgttcaactcccactttgcaggggcatgaatgaagctggaaaccatcatcctcatcaaagtagcacaggaacagaaaaccaaacaccgctttgggtatattttttaagcagcaacaagagattcaatcacaaatgagtgggagatgatgattccaaagataaaagataacctaatgttcaaactcccagaaaggggtgaaattctgggagaattaactttgtgaaggaggggacaaaggggagcaatattttgttctgagtaggatgagatactattaacttgggaaaagaagtgaacaagcatggttgtaagacagggaatgcaagatttttctgttaaattaggaattgataatgaaaaagatagaaaaagaattgacgatttgagaaaagaagatacagtttaaaatgacttctgcaggtatatggaaacttgaataaaaaataaatgagataaattagttttttaaattaagattactctacagtatcaagggtcyaacttagatcacacatttacattgaacttaatccacttctgtaattttctccaactctatccaaattgcttgtgagcggaattagagaaaattgatcatttggttgagctaggtttggggaattaactgacaaactgaaataaatgtgtcagtttgctcgggttaggaaatggaaaatgataaggaagatagaggtgaaataactgagcatggcatccattatagtttgcatatgaagtgaaacaagaaacggacttataaaatcaaattggattaagaaactgatgttaagtgtgaggtcaaaagcaatgtttagtaaacatgagagacagagaatggtagcaagctgtagtgtcaagaaaatttcaaaatattacagatatcgaatactttgggatgctgataaagtccataaattaaaa

SEQ ID NO: 711518 - DNA, 1504 bp, Homo sapiens
ctactctaaactgggttgagtctgcatttagcaaaaggcagcagatttaagtggagacaatgctgagctcatgagataaagagcaagatgaggctataaatggcaaatagagcatgtgatgagaactgggaaagatgtggagaagtttaggaagcattttgtgaggagaaataagacagacaagcggtttaggaaaaggctgccattttccagcactgagtcagaggtggtaactttaagtaactatagaagtcttcgggaatccacatcaaggaaagatctgttttcttcttaggaaggagtggctgaagctttgggtatttttgtttgtttgtttcccattttgttttataatttttttttattttactttaagttctgggatacatgtgccgaacatgcagttttgttacataggtatacatgtgccatggtggtttgctgcacccatcaacctgtcatgtaggttgtaagccctgcatgtattaggtctttgtcctaatgctgtccctccccttgccccccatgcccggacaggccccggtgtgtgatgttgctctccctgtgtccatgtgttctcattgttcaactcccactttgcaggggcatgaatgaagctggaaaccatcatcctcatcaaagtagcacaggaacagaaaaccaaacaccgctttgggtatattttttaagcagcaacaagagattcaatcacaaatgagtgggagatgatgattccaaagataaaagataacctaatgttcaaactcccagaaaggggtgaaattctgggagaattaactttgtgaaggaggggacaaaggggagcaatattttgttctgagtaggatgagatactattaacttgggaaaagaagtgaacaagcatggttgtaagacagggaatgcaagatttttctgttaaattaggaattgataatgaaaaagatagaaaaagaattgacgatttgagaaaagaagatacagtttaaaatgacttctgcaggtatatggaaacttgaataaaaaataaatgagataaattagttttttaaattaagattactctacagtatcaagggtccaacttagatcacacatttacattgaacttaatccacttctgtaattttctccarctctatccaaattgcttgtgagcggaattagagaaaattgatcatttggttgagctaggtttggggaattaactgacaaactgaaataaatgtgtcagtttgctcgggttaggaaatggaaaatgataaggaagatagaggtgaaataactgagcatggcatccattatagtttgcatatgaagtgaaacaagaaacggacttataaaatcaaattggattaagaaactgatgttaagtgtgaggtcaaaagcaatgtttagtaaacatgagagacagagaatggtagcaagctgtagtgtcaagaaaatttcaaaatattacagatatcgaatactttgggatgctgataaagtccataaattaaaa

SEQ ID NO: 711519 - DNA, 2392 bp, Homo sapiens
ggcctcggaggattttttgtcacatgaggttactgtagtttcacatcctctaaagcaaagctctgtcgaaactctctattctcacatggcttcagctcaaacaaccaccctactcagctgccttcctaaccctttcaagccgtgaatcaggagacctgggttccagtttcagctcagtctgcgtgccccagagcaatgacggggcctcaacttctttatcatgaaaattaagaggccaaagtacctttcactcaggttcctttcaactctctctcccctatcttaaaaaaaaaaaaaaaacaacagcttatttttcctgttgcttttagaagaaactcttaacctgagactctctaaaaatgaatagagattattgtggtttaaaaaataaatggctacacacagcaacctgactgtatctcaaaaatattatggtaaatgaaagaagcttcacatacaaaagagctcatactgtatggtattattaacatggaattcaaaaataggcaaaactaatctacagttttaaaaattagaatagtggttgcctctggctgtgaggtaggagcagggattacctgggaaggggcaagaaagaattttctgagatgaaggttatattttatatccggttaggactgggtcacacaagtaagccttcatcaaaactcacagactgctactcttgagaggatcaatagaggtaataaagcaattatagcaaaatattaattgcaggatccaagttgtgagtaaatgggtataccctgtttaattccttcaactttcctgtaatttgggaatcttcatactaaaatgttagaaaaaaacacgttctaatacatttcaaaattcctgtctcactcattctctcctttcttccatcccctccctctttcttgacatgtgaccttcttttcccattaaatgagtcaatggaaatgggaatatttattgatttgagcagttaagtcaccagtgctctgtgatgactaactactttatcattcattgcccatggctttcaagggaagaggacaagctctgtgcatctttctcaaagaaagcgttcctacctgtaaaagtctgttagaaaggactgcagatttaataagcatctttcaagagctctgtccccattccaactcaccccaaccctccagccccaacacatttgttaaaaattcacattcagagatgcaggaccctcaaccttggacttcccagactccagaactgtaggacataaacctcttgtctttactttaaaaaataataataacattcagtcccttttttgaaggtttttatcaggatatctcaaacttaacactgaaaggaggtagcaaaatttctgtttcctccatgtctttgtacttgtagaaatggaggcacaaaggtaagacacaggtgtgaccaggcccttcgagtggttcagctgactgaatatacacctagagaccctaaaacaagccacaggggtgagaaatcagagaattaggaatgcgcaatttaaaagcactgcggtttccaatgtgaattgactggaactgaggttaaagaagaatttcagcattttttggtcaccagtttctcaatggaccatttcctgtcctctcactgtcaagtttagagaataaaacaaacctcaaggatgtatctctgctccacaccctgtctcaaggcaaagttagtggtcaccaacagcaagatagcacacactgcatctacaaatgtatgtgacatatcttcacattttgtgtgtgtgtgtgtgtgtgtgtgaccacaacttcaaagaaacgaacaaaagaagcaaccaataatcataatgaagaggttaaattttaccagagccaattgggcagagaaaaaaaatccaaaaacacaatgaaaacaaagaatattagacctgttaaaaaataataataaaaaccttagagttcattttagtcaaacttttcattttgcagaaaaagaaactggatctcaaatttccaatttaatgaaagttatgtctgagaatmtaaatctgagacctgatctcaccaccagaaaatagggttggaattgaccttataaataatatatctaagcccctcagttcactggtgaggaaactgaggttcaaagaaatttcagggactacttcgagtccacactgttacttagtaggactaactcccatgtgtttatgcttctgaggaagacagcttcggtaccttccttccctgtccaaatcctatcggcagcctttatcactctttcgttctttgaaatgagcagttgatgtttttctcatgttcttatacaaataaccaccttaattcagcttagagacccacatctcctttccaaccagattagtatcccttacagaaattcaggcactgag

SEQ ID NO: 711520 - DNA, 1788 bp, Homo sapiens
caactgttaaaggaagcccttcctcatctacagattaattgctcccatttcaccaccattgccaggccaactattggcaacaaaaagaaccaggagatatggggcatcaaatgccgactgacactgcaaaagcccagttgtctatgaagtatttattgcaggatggtgtctcttctttagaacagggaaaataggcaggaagcccaattgctggagtacttagctagtttttattcttggttttccctttgccttcattctgcaagtatactagggagccatttgagagggaaaactatgaaatcttgctttttgaaatgattctaaaagcttctatcactgctttgctcttaagagccaaagttgtaggccttttgaaattttaggagagtgagcctataatttcaagataccttaaagagcaaaatttgagccacctcttccaagtgcccttcttactaagtctattcagaatcaagcttaaaaattaccaccagcaaacaatcttcatagcccatataacttttatctatttaattttatagtattgctttataagacagcttagaagaacaataagctatttgtattatgagctgaacaaaaagagaatcataggatagtagcgtctgaggccatcttttctaggaataggaaagagaaaaatgtatttgaattttgcctttagatttgaaattaggttaatagaaataagtaaccccatgtaattcaccttaaaacttaacaaaagaccaaacattacaaaacccagagatatagaatcaatataggatttgaaggcccagcagacagttttctatgacaggttaatctgaagtatcctgtaatgttcattaagttactgtgtttccagaatctaaattagatgagaaatataattgtggttttctaacttgataatcaaattatgttaacatgggtcctttagcttttaaaatgacttgctttgttttagaaaggtggtattaatccactctctattcttgaaaatttggatgggagaattctgaagttgcctgctgttttcctttagcgctgaggttcttaaggttacttttatattactctggaatcaagtattttaaattgtattttttttttaaatgatctctcagcaataattgtttgaaactatccatatataaggttatcagacctacagttccctaagaggaactgcatgttctcttcaatcagaaatatacagtagaagcaggtatatcttccatgcagtttcagtagtaagcactacttatacctacataagagttaaaatccagatgtgggaccttttgataccatcagtgatatatatttttttaaactggtacagagaagtgaaaagattaaattctacttctattttttttttttttttttgagacggagtctcgctctgtcaccaaggccggagtgcagtggtgcgatctcggctcactgcaagctccgcctcccaggttcacgtcattctcctgcctsagcctcccgactagctgggactacaggcgcccaccaccacgcccggctaatttttttgtatttttagtagagacggggtttcaccatgttagccaggatggtctcaatctcctgacctcatgatccgcccgtcttggcctcccaaagtgctgggattacaggcatgagcaactgcgcccagccaaattctacttcttaaaaatcacaaaaactagtttaaattgatgacttgttcgtatgttcaaaatgtaacaacaaaaaaagctaacaccagtcatttatattaac

SEQ ID NO: 711521 - DNA, 675 bp, Homo sapiens
gaatgctggtatcaaagaagttcaataatttgcccaaggacatgctccctatagtagtgaagatgggatttgaacccagacattctggctccagagcctattgtgttcttacacatttcctcccttatagaagattctagttttatctgtcaataaacaatgtcttgtttgtagtagccataggattgctgtcagcaatgacaaaaatagaaggaaattagcattttacctgaaaaaaaaaacctttctttcaagattgatactttctggatttttagacctgaataagtcctaggatgttttcacattgattaactgaggatcatcacttagtccaacattattatttcaaaaattacttacagctatttactctggcagaaaatcagtaggagttgtcattacttaaatcttgtggctggagcactacactcatggagctatttcctgagtgggtgctcartgagagaagacagctattcaatcacctggaccccagaaaacagaagtgaaaaatgcaaagttgtataagactaggtcacaatagatatgcaattaactctggacatctatcctttgaattgggttgtgtctatacaatgccagaaaaaaaacttaattttctcattcaaatcagtcaaaaactcaaagtataaatttactgacaagtggttt

SEQ ID NO: 711522 - DNA, 1229 bp, Homo sapiens
cacccagcactaagaaagcactcaaaatatagtggcagctattattatttatccttcttcctctccgttttctcctccagatttatgagtgatagggacagaaaatttcttatcagagtgccctttattttaatctcaaggttttgaagtagaatttaggacaaaaatagatttttctgaaccaaaacactgaagattctgtttgggaagtgagaaagcaagctgctaaacacctactctacttgtgcagtgacaagaaaattgaatttctcattcgtttcctgcccctagcccttgccttcagtttctctgcctcagtatgaaagtatctgtattcctttggggacagttgcctcactgaagccacaaagagcagtctccaggagttgtgtggcaagctaaytataaccttttggaagaacatctggatacagttttcatttttaaaatgtatcgttttttaggtcattagatttatatagttcaaatttattggtgtcagttctcttcctaggttgtaccatccattttgaaaagatgtatgtcttttatccagaagatgtaaagtatatagggtcataatcaataaaaatctctatcttcagttaaactactggagttttcccttcttcaagttttcagaatataatcattataccaaacacacgtgtgcgtatgcatatatatccatccatacaaatataactttcctttattatgattactcagttgcaagcagtgtagaagttataatatttgttttattataatcatttcagcaatatggatagggctactggaccctggaatttgaaaagagaggatcttttttatgttttttttttttaattttgataaaatatgcataacgaaatttaccatcttaaccatttttaagtgtacagttcagtggcattaagtttattcacattgttttaccaccgtcaccccgatccatctgtaaagctcttttcatcttgcaaaaccaaaactctacacccattaaacaacttaaaaagagaggatcttaacatcagaatcacataattactactctataaacatctgatgggtgtttacttctaaaacaactgctttcttttttaattgacctttcactatacttagcctcttctaggaattattatatgtaatctactcagtcatattttctttaatttttctctttctacaactttacttttccaaaggtgatgtaaattacatgt

SEQ ID NO: 711523 - DNA, 629 bp, Homo sapiens
ccggcatgagccactgctcctggcctgaaggaaactttctatcaataccataactgagaagctcatatcacttgcatgattatacttctataatcatgcaattatatttctataattagaaagcaaccatatatctttctttaatggctttgagaaaaaaaaaaaagaaagcagccatataaataaatacgatgagagcaaaacagtggttttaaattccagcttaaatctattggctagagaaggtgctagacctgggacttattctcgctgttcaaaagggagacttgacagttatgatcatgaaagatgaacttattagcaccacactgagattttctctttcagatttttgattttttgaagtagaaagaacagacctctttcactagtgctatgcaaaattttagccaagaaagaatcaagttatttttcttctcaccagttgtgtgtaccccaacccatgtgggacatagccacacagccataaagctttctcttagagccttcttagggtcgcggaattaactccatgcctcctgttgagggctggctcccaagagagtgggtatgggkaagaaggaactcagccccagaccctcacatagcacaatttctaaaagctcaga

SEQ ID NO: 711524 - DNA, 1445 bp, Homo sapiens
gacatggaatctcctggcaccttgatctgagacttctcacgtccagaactgtaagcaataaatgtctgttgtttataaattacccactctaaggtattttgttatagaaggctgaatgctctaaaacactgaaatatagcataattatatatttttcacaattagaacacacctaaaatggagagagaattagaattgtccccaagagccctgcaatttggaaacccaagccagctggtttttaaaatatccatgccctccataaccaccctgtgaccttcctgttccctcaccgtagtcagtcaatcaaggggaacactcgctccccacccctccatcttttgcacacttctccactccttggaagtcatctgtgacttcttttctgatcccatgctgacagtggtgttccttttcatctgatttcatctgcacacaaatgctgggacagacaacccagcactttctcccagaactttgaacaagaaatatttacatgcagggcgattagtctctggctcatgagacagtcaatccagacaacamcactcttgatggaaggtacagaaatgagatgtttttctgtctctgctgtggccaaggagtctttcatttaaatgtcaggcttctactcaccagttgacaggcatgcttgatcctctccacaaacccatcaagtcccaagtattgtaaagataaccacagaggcagggcacggagtttgtctgtgggcttatttgatataagaccagcaactaaagtctaaaaaagccaaaagaggtttattaatcaaagccattgcaatctcataatagaactaaccagctaccatttgctacccacttagtgtgggctagatgccatactagtcactaggcttgcattatccatgtgatcttccaacaactctgtgagctaagtattctaggtaacttcactcagagacctcggtttgtccaagggttcacagctcaggagtggcaaagccaggaaaagccagtggaaaacccagatgggtcacatcccagaacctaggagactccccacttcgaaggtagctctgagcatcctcaaacacctggccattattaactgagcaagacagcattgttttagcagaaatcacttaaaccttattttgcacgctgacctatattatcaagaaccacattattattattttttgtgtgtgacaggtttcgttttcattctgtcacccaggctgcagtgcagtggtgtgatcatagctcaatgcagccttgatctccagggctcaatcagccctcccacattagcctcatgagtagctgagactacaggctcacaccaccatgcctagccaattctttgttgttgtttttttttatagagacgaggtttcaccatgttgcccaggctggtctcaaactcctaggctcaagcgatctgcctgcctcaaccttcca

SEQ ID NO: 711525 - DNA, 1445 bp, Homo sapiens
gacatggaatctcctggcaccttgatctgagacttctcacgtccagaactgtaagcaataaatgtctgttgtttataaattacccactctaaggtattttgttatagaaggctgaatgctctaaaacactgaaatatagcataattatatatttttcacaattagaacacacctaaaatggagagagaattagaattgtccccaagagccctgcaatttggaaacccaagccagctggtttttaaaatatccatgccctccataaccaccctgtgaccttcctgttccctcaccgtagtcagtcaatcaaggggaacactcgctccccacccctccatcttttgcacacttctccactccttggaagtcatctgtgacttcttttctgatcccatgctgacagtggtgttccttttcatctgatttcatctgcacacaaatgctgggacagacaacccagcactttctcccagaactttgaacaagaaatatttacatgcagggcgattagtctctggctcatgagacagtcaatccagacaacaacactctkgatggaaggtacagaaatgagatgtttttctgtctctgctgtggccaaggagtctttcatttaaatgtcaggcttctactcaccagttgacaggcatgcttgatcctctccacaaacccatcaagtcccaagtattgtaaagataaccacagaggcagggcacggagtttgtctgtgggcttatttgatataagaccagcaactaaagtctaaaaaagccaaaagaggtttattaatcaaagccattgcaatctcataatagaactaaccagctaccatttgctacccacttagtgtgggctagatgccatactagtcactaggcttgcattatccatgtgatcttccaacaactctgtgagctaagtattctaggtaacttcactcagagacctcggtttgtccaagggttcacagctcaggagtggcaaagccaggaaaagccagtggaaaacccagatgggtcacatcccagaacctaggagactccccacttcgaaggtagctctgagcatcctcaaacacctggccattattaactgagcaagacagcattgttttagcagaaatcacttaaaccttattttgcacgctgacctatattatcaagaaccacattattattattttttgtgtgtgacaggtttcgttttcattctgtcacccaggctgcagtgcagtggtgtgatcatagctcaatgcagccttgatctccagggctcaatcagccctcccacattagcctcatgagtagctgagactacaggctcacaccaccatgcctagccaattctttgttgttgtttttttttatagagacgaggtttcaccatgttgcccaggctggtctcaaactcctaggctcaagcgatctgcctgcctcaaccttcca

SEQ ID NO: 711526 - DNA, 1445 bp, Homo sapiens
gacatggaatctcctggcaccttgatctgagacttctcacgtccagaactgtaagcaataaatgtctgttgtttataaattacccactctaaggtattttgttatagaaggctgaatgctctaaaacactgaaatatagcataattatatatttttcacaattagaacacacctaaaatggagagagaattagaattgtccccaagagccctgcaatttggaaacccaagccagctggtttttaaaatatccatgccctccataaccaccctgtgaccttcctgttccctcaccgtagtcagtcaatcaaggggaacactcgctccccacccctccatcttttgcacacttctccactccttggaagtcatctgtgacttcttttctgatcccatgctgacagtggtgttccttttcatctgatttcatctgcacacaaatgctgggacagacaacccagcactttctcccagaactttgaacaagaaatatttacatgcagggcgattagtctctggctcatgagacagtcaatccagacaacaacactcttgatggaaggtacagaaatgagatgtttttctgtctctgctgtggccaaggagtctttcatttaaatgtcaggcttctactcaccagttgacaggcatgcttgatcctctccacaaacccatcaagtcccaagtattgtaaagataaccacagaggcagggcacggagtttgtctgtgggcttatttgatrtaagaccagcaactaaagtctaaaaaagccaaaagaggtttattaatcaaagccattgcaatctcataatagaactaaccagctaccatttgctacccacttagtgtgggctagatgccatactagtcactaggcttgcattatccatgtgatcttccaacaactctgtgagctaagtattctaggtaacttcactcagagacctcggtttgtccaagggttcacagctcaggagtggcaaagccaggaaaagccagtggaaaacccagatgggtcacatcccagaacctaggagactccccacttcgaaggtagctctgagcatcctcaaacacctggccattattaactgagcaagacagcattgttttagcagaaatcacttaaaccttattttgcacgctgacctatattatcaagaaccacattattattattttttgtgtgtgacaggtttcgttttcattctgtcacccaggctgcagtgcagtggtgtgatcatagctcaatgcagccttgatctccagggctcaatcagccctcccacattagcctcatgagtagctgagactacaggctcacaccaccatgcctagccaattctttgttgttgtttttttttatagagacgaggtttcaccatgttgcccaggctggtctcaaactcctaggctcaagcgatctgcctgcctcaaccttcca

SEQ ID NO: 711527 - DNA, 3128 bp, Homo sapiens
gattatttatgtgtatctattcatgcatctatgtttttattaatttaggtatgagtgagtcctcagctcagtctgattcacatcagagcttttttaaaaaaataaatatcaggaatttttagagcatgtaaattatgattcaattcacacttgtctttttatgagttactgccatggtgtgaataaagcacacaagtgtcacaaagatattaacataataataagcattaatctccactagtagagtgttactaggcagggttccttccagctgccatatcaggaatccttccagcctgggtactaatgtcatcttcctttggagaccaggcatgaagagtcactcacttcctgaagtcactgggactgaaatccaggcagtctggctctagtctccaactccgctgccaatgaccaccagcattgcaaacccgtacacatgcgtatcaggcagacctggccgctggcaggcaagctaaccagctgtgaaccatggtcaccgctgcagggtagggctcgatgatcagaatgtgttccttcatttcttaaccatgctggaaaaagtatgtagagggactaagggtgtttttattttctttggcttttttccttccttccctcccttcctatcacccttccttctttccgttctccctttttccctctctctctccctttcttccttccttttagaaaaaacaaacctaacagtatgtatgtctaatacatacaaaatctggtatttaattttaaaaatttattcatacgcttggtaagatttttaccaagccatttggttttttattcactctctctgatgtggatcatgcctattctccttcttgggatattaggagaaaaaaaggatactatgattttcttaaaatggagctgtttaaatgaaggaagcatgtataagcctacccctttaatgggagggttcaataaatcctagaatttgcctgtaatgtgtagaggtctaaagagatttgtcctatgagaaagttcactaatttcaattatctgggttttattatcaccttctaagggttagagagacaggattttayagaatgccatcacctgaggctgtgacaatggggtttcacaccattaaattcagaaagcataagagaagagataagaaatgagagggcttgaagtgcatgccagttccgttgtggaaaatatgacctactaagcagctatgagaaatgaaagcaggcagtgtcatctcatgatctattgctattgtatgtgaaatgctttctatattagctgttgttaattaccatcatccccaccatcacatcattgtatttaatagcaggagaaaggaagcagctgttgtaggcaaagctctcacacttgagtgtctatcagagtcacctgggggaacgtgtgcaaatgcagattgccaggccctttgcctagtggttcacaatgagtatgatcaggctggaacacaggaatctgcatgttttccatcgactatctcagctgattctgattcaggtggtatgaggattacactgaaatagcaaacccatgctttgtctcctgttagtctagacagtaggcatctttctgttacctcttgggtgtaatgtttagtttaaatttcagttcctcatctctacgagggagtcataaatttgcatcttgctcacagagctgctgtgaggattagctgagctcgtgcccagaatggagcagcctctaatatttgctgtgctgtctctagagagcaacagggaggcatttcatggtcttccccatcttggtcctcactgtatctttctgtccttactctgtgcctgggacagctttagggcttaatgaacataacagaatgctgaagagctcagccactggagcccagctgcttggatgcaaatcttggctctccaacttaatgcctgttcatgagcaagttatttaacctcctagtacctcagtttcctcctctgtaaaatgggcttgattatcatacccccatcataggtgtttttttttgggtgtatgagatgaattattatgactacaacacttaaaaccaataatgaagtgccatgtagatgttcattaggtgaataaatacaaatattgttgattgaatgcatgtctgcatgcacgctgtttctttccttatgctgtttctttccaacataatacagatgtattctactagctgacagacttttaaagtagaggccacttttaaaagcctgggctcccatgagaaggaaatctgcaggtataagatgggtttgtcagtcagcagaggcatgctattgagaaaaggaggcaacctggggagggggtgttagaagagagcttgggattcagttcttctaaccaggagagctgacaagtaacaaaatgagactccttctgttgtctgttgcagtagacaaagcaagatgcttagttaacagcagcaacccagtgcctgtaattttcaagtccttggaggcacaccatgtcacccaaggtaagccaggggacacaggagggaagcaagagaagccagggagaatctatttcctgtgtcccctgtaggtgtttgactcacctaaagttaacactaatagaacatttgctcagaaatgtcatcgctgaaataaacgtgttaaatttaaacttgactgccccaattcatctgttatgcaattgaactggaaacagctcagacttaaaaggcatctccaagtttttctcagccaacaagacttaggccactttgttttctcagatttttcagccttgtccaatttttggataaaaatcctttttgaaaacttcagcagccatattattttcttctccagtcatcaacttataacgtaaagacaaagctgtggggaaaatctaaagttgcgtcaaatttttattttctagccagctacagctctagtctaaagctctttcttttggggagaaaatcccatttgcacatttcctcttagttgggtggacttacccatatatacttgggtgacattcaggaggctactttgtgttttggctgtgtattctaatttttcttccggtactatatacagcaagagaaggggatgttgttcagctcttgttctacctagaacccaactgcacttttgcaagag

SEQ ID NO: 711528 - DNA, 1391 bp, Homo sapiens
aaaaaaaacagaaaggagatatttctgcaggagagctggagcagcattttattaagatataaagagggtgggagaggccgggcacatttgcttaccctgtaatcccagcactttaggaggccaaggcaggtggatcatctgaggtcaggaatttgagaccagcctggccaacatggtgaaactctgtctctactaaaaatacaaaaattagctgagtgtggtggcgggtgcccgtaatcccagctatttggaaggctgagacaggagaatcactggaacctgggaggcggaagttgcaagtgagccaagatcctgccactgcactgcagcctgggcaacagagcgagactccatctaaaaaaaaaaaaaaaaaaaagaaagtgggagagagtttaaaggtggggtcaccatatggttttccctgggcaatcttggtatcttggtttatgccttttgtcctaatatatattattattattttaataaatttgtttgtttatttatttattttgagacagagtctcactctgttgcgcaggctggagtgcagtggtgtgatctcagctcactgcaacctctgcctcccaggctcaagagatcctcctgcctcagcctcctgagtagctgggattacaggtgcccacgaccacacctggctaatttttgtatttttagtagagatagcatttcactatgttggccaggatggtcttgaactcctgacctcaaatgatccacctgcctcgcctcccaaagtgctgggattacaggcatgagctactgcccccggccctgatacattattaatggtactcattttcactcttgaaaacattcaagtttaaataacaagttatattgtcctccctttacagtaagcttgagagacccaataaccaaacacagtggatgaaccgtgtatgagatcttatttgggaaaacaaactctaaartatatatgtttttagacagctgggtaatttgaatatgaactggttattagatgaaattataattttgtgaggtgtgaaaatagcaacatagttaaaaaaatatcattttttataagatcttactaaagtattgggtgcatagccagatctctgggatttactttaagataattcagcaaaaaataggatatagatgaaagagtttacagtaaaatgttgatggttgttgaagctgggtgatggatatgctggggtttgttatatatattttcttcctttatatatatttgacaattgtcatggtaagaagtttgaaaacagtgtctggcatacagctttggtaattcagggatgatccggacacttagcttttttttttcctcctcttctcatattggactggtctcacatgtctggctagaggtcagattgggacat

SEQ ID NO: 711529 - DNA, 368 bp, Homo sapiens
agaggagggtacggtgagatgacagaacacatccagtatgagaatttctatagcaccaactttccagaaagtgtttcagaagcttasagaattaaaatgtgaaccagacaggaagttaaacttgacaaggaagagaaaccaactaggaagagttggggatggagttaactgacactaaatttggcctgagcttctcattggcttgccgtacacaattgccactgtgcgataagagcaacgtgttaattgcagtggtagttcctaaatgctgctgcacgtcagaaccacttaggaaacattttcaaactacgaattcctgagctcagtgccctagaaactttcatttgtgctctggattacgacttgag

SEQ ID NO: 711530 - DNA, 368 bp, Homo sapiens
agaggagggtacggtgagatgacagaacacatccagtatgagaatttctatagcaccaactttccagaaagtgtttcagaagcttagagaattaaaatgtgaaccagacaggaagttaaacttgacaaggaagagaaaccaactaggaagagttggggatggagttaactgacactaaatttggcctgagcttctcattggcttgccgtacacaattgccactgtgcgataagagcaacgtgttaattgcagtggtagttcctaaatgctgctgcacgtcagaaccacttaggaaacattttcaaactacgaattcctgagctcagtgccctagaaactttcatttgtgctctrgattacgacttgag

SEQ ID NO: 711531 - DNA, 1144 bp, Homo sapiens
gcttcccagcctttcttccagctgcaggatcatcctacccctgggactcccttattggtgtcctcattaggccaaccaatgcaaattaacccctgattcacagatagtggggatatacagtcaccacgacacatatggcctctgtcatccagtttcactcagtctagagaaagaaagagatgaataaacagacccttttagtataaaagctatgatgaaagtgacatttgaggtgaaaacactacaatataacagcagcagagagaaaggcacatcagtcaaagtcaaggaaggaagggacagctgggctcagacttgcaggtagaccaggrcaaggatgttcaggcagaggaaatgggataaacaaaggcatggtggccaagagagctagatccgttcactcaacacacaggcaggactgcaacgggtcttgtgtatcctgtggatctaatctatccttaggcgtcagtctgggaaacatgagttccgtcttctccactaatctgggaaggagggtcaagtggtacctctgtctccacctcctccaggcctacacagtttgtgactgacatactgagcaccaggtctgcatcacccaccttatcacacgtgggcacaggatctctgccgggggcaagcggtatgatgtgtcctggtcacggtctggctggtgatttggttacatccagacacggaagtcgacctagaataacctaagacaaaggcagtcgtttctctggctgacattgtcagaacgttaaacaaccaaaaacagcaacaaagtgatgggccaagcaggcaagtttgggaacagctttaatgactaatttctaatgagagtttcaaaacactaattttccagaacagagaatcaagttgtgctcatttataacccgtcatctgcaatgagacagaggatatttctttctgtgttgtcagttaactttctgagctggacagaatacaaactagaagaggtgggccgtaaatcagctcctttggaactgataaatggatattgtacaaatcctgcatttgcattggctctgaggacataaatcaattctcatgatcttactttggaaaaaaatttccctttgaagtcagactgagcgatttatgtagcattctttcctgactttat

SEQ ID NO: 711532 - DNA, 640 bp, Homo sapiens
aaaaagaagttcattgtataggcagagaccctgcaggaaatatttgtctggtgctgtgcaccccttaggggtgaccctgttttagcttaagtgagagcagatcgcattaaytgcctcgaaaagacccattttaggaataagcagatctcacctcattaaacttttctaccatctcttctagtggtattaacacatcctccattttccaaatgaacctttcccagcctcagagagggtaaataactttatcaaagttgcatggctggaattggcaatgctgcactttgagcctgatgatctaatgccatactattttagttacagtggtctcggtttctagaggtagaaatcttaaaagtcaggacccttggtgatccagtgtgtatggctgagctcagttaggtttttgtgcatttattttgaattttatctctaacaagattaagggccaaacttaacatacttatttcctctgggccccagtagctgtaagatatgggatgattggagtcaggtgagacagcagtggtctcgttaagagccctgatgcttaaagtgtggtccacagatcagctgcagcagcagtgcctggagcttgttagaaattctgattctcaggccccttcccccagacctgctg

SEQ ID NO: 711533 - DNA, 1300 bp, Homo sapiens
gcatgccaagagaatgaaagtgaaagctgaaaggacttttgaggtctagccttgagaatcacacaatatcaattcctctacattttgttggtcaaagtaaaacaaagggttagcccagatccaagaggggttgggaaatagattctacctcttgttgrgggagcagcagtcacattgcagggggacagggcaaagggatggaaaggtttattgtggccatcttctcaaaaaaatatctaccacaatttccctctattttccccctacccaccctaaacacatcaccccacctcattcgagaagctaggttttctctgctccaaaaggagccatagaagagaggaaatgaaagagtggaaagcagagaagaaaagtgaatgtcttccaggtttttcttttaagggactaagcctttaggatgtgggagaaacacggagaagacaaaatgttataaaaaaaaaaaaaagtgcattgagtcagcttctccttagattaggtaaaatttccttgggctaggaatggaagtgagggtcaaggaggacacagaggggaggatttggataactcaaagaagggcctgaaacaggctagcagagataaccatgccccagtgtcatggaagaagtaaaataaatctcacaatgttaagcatgtctcaagtagcctgagagccacccaacctgaaggaggcatgagccaaagggaaaatcgagacctatgtggaacaatggccaaaaagcggaaggtggcttgtgtctaagagaatttctgcatggacagaaaataatagaaccagatgcctctcttccctctcccttccatgctatcaatagcttcaaattacttactcccagtcaactcctcaaaccttccctaggttagggaggagaggaagagtcaagatggtggaaattacgcttccactgcctgaatgagtcaggggcttaatatctgcatattttggaggattttatggtcagatctcttgaagctctgctgtcagagagtcttatcaagcatgatatcagtggaattctcggtaaacaccactaaggagagctcctttttgaagggaactcttggtctcctaagaactaggaatgagtggtatgctttcttgccatttaattgaagaagaatgagactgtcccagaacccaaacataaatttcccctgcacatgacaatgaagcacatagtttatcttgtgacatctgatccagaagttcagttcaatatgatttgtccatactcagcattcttatattgaaaaaatatttttgagcacctattttgggcca

SEQ ID NO: 711534 - DNA, 623 bp, Homo sapiens
acttgtgattggagccccacagagagaggacacagaaaatggggcataaaaagtatttaaagaaataatagctgaatgatataaatgtgtaaatccaagaagctcagcacactgtaagcagtaaaagtaagagaaaatgttatctgggcacattgtagtcaaactaccgaataccaaagacaaagatagcacctggaaggaaaaagaygttacactcaaagaataaagattcaaatatgtctggcttcttataaccactggaggccagaggatgatggactggcatctttagagttctaaagaaaaacgattgtcaacccagagttctatccagtgacaatatccttcaaaaacaaaagcaaaataaagacattttcagataacggaaaactgagagaaggctttgccagcagacacactatagaaatgttaaaggaatatcttcaggctgaaggaattattgcttggcagaaagaattattgctaggcagaaagtcatctatagaaaggagtaaaatccactggacatggtaaaggtagggaaatatgaaatgttctctatttctttttttcttaatttaatacagacacaactaaggcaaaaactgtaatactgtaatata

SEQ ID NO: 711535 - DNA, 623 bp, Homo sapiens
acttgtgattggagccccacagagagaggacacagaaaatggggcataaaaagtatttaaagaaataatagctgaatgatataaatgtgtaaatccaagaagctcagcacactgtaagcagtaaaagtaagagaaaatgttatctgggcacattgtagtcaaactaccgaataccaaagacaaagatagcacctggaaggaaaaagacgttacactcaaagaataaagattcaaatatgtctggcttcttataaccactggaggccagaggatgatggactggcatctttagagttctaaagaaaaacgattgtcaacccagagttctatccagtgacaatatccttcaaaaacaaaagcaaaataaagacattttcagataacggaaaactgagagaaggctttgccagcagacasactatagaaatgttaaaggaatatcttcaggctgaaggaattattgcttggcagaaagaattattgctaggcagaaagtcatctatagaaaggagtaaaatccactggacatggtaaaggtagggaaatatgaaatgttctctatttctttttttcttaatttaatacagacacaactaaggcaaaaactgtaatactgtaatata

SEQ ID NO: 711536 - DNA, 648 bp, Homo sapiens
aatgaatcgagacccagacccaacaaagagggtgggagacatcaggaaacacctacacattaaaaaaaaaacaaaaaaaaacctctaaccctaggctgagcgcagtggctcacgcctgtaatcccagcactttctgtgaggccaaggtgggaggatcacttgaggtcaggagttcaagagaccagcctggacaacatagcgagaccccaatctctacaaaaaattaaaaaacttgtggggcatggtggcacacacctgcagtcccagctactggggaggctgaggtgggaggatcacttgagcccaggagtttgaggttgccttgaggcgtgatggcrccactgcactccagtgtgggggacagagcgaggccttgtctcaaaaacatgcctggtgtggtggctcacgcctgtaatcccagcactctgggaggctgagataggcagattgcttgggtcaggagttcaagaccagcctgaccaacatggtgaaaccccatctctactgaaaacacaaaaattagccaggcgtggtggcacgtgcctgtagtcccagctacttgggaggctgaggcaggagagtcccttgaacccgggaggcggagcttgcagtgagccgagatcacaccactgcactccagcccgggca

SEQ ID NO: 711537 - DNA, 648 bp, Homo sapiens
aatgaatcgagacccagacccaacaaagagggtgggagacatcaggaaacacctacacattaaaaaaaaaacaaaaaaaaacctctaaccctaggctgagcgcagtggctcacgcctgtaatcccagcactttctgtgaggccaaggtgggaggatcacttgaggtcaggagttcaagagaccagcctggacaacatagcgagaccccaatctctacaaaaaattaaaaaacttgtggggcatggtggcacacacctgcagtcccagctactggggaggctgaggtgggaggatcacttgagcccaggagtttgaggttgccttgaggcgtgatggcaccactgcactccagtgtgggggacagagcgaggccttgtctcaaaaacatgcctggtgtggtggctcasgcctgtaatcccagcactctgggaggctgagataggcagattgcttgggtcaggagttcaagaccagcctgaccaacatggtgaaaccccatctctactgaaaacacaaaaattagccaggcgtggtggcacgtgcctgtagtcccagctacttgggaggctgaggcaggagagtcccttgaacccgggaggcggagcttgcagtgagccgagatcacaccactgcactccagcccgggca

SEQ ID NO: 711538 - DNA, 648 bp, Homo sapiens
aatgaatcgagacccagacccaacaaagagggtgggagacatcaggaaacacctacacattaaaaaaaaaacaaaaaaaaacctctaaccctaggctgagcgcagtggctcacgcctgtaatcccagcactttctgtgaggccaaggtgggaggatcacttgaggtcaggagttcaagagaccagcctggacaacatagcgagaccccaatctctacaaaaaattaaaaaacttgtggggcatggtggcacacacctgcagtcccagctactggggaggctgaggtgggaggatcacttgagcccaggagtttgaggttgccttgaggcgtgatggcaccactgcactccagtgtgggggacagagcgaggccttgtctcaaaaacatgcctggtgtggtggctcacgcctgtaatcccagcactctgggaggctgagataggcagattgcttgggtcaggagttcaagaccagcctgaccaacatggtgaaaccccrtctctactgaaaacacaaaaattagccaggcgtggtggcacgtgcctgtagtcccagctacttgggaggctgaggcaggagagtcccttgaacccgggaggcggagcttgcagtgagccgagatcacaccactgcactccagcccgggca

SEQ ID NO: 711539 - DNA, 659 bp, Homo sapiens
tttttaaattatttatttccttaacatttaaacattgagagatctcacataaaaacccagacttctggttccttttgagaagccagaaattggccacacagaccctcattcttgcattcttgcaagacagccgtgagctggaggcacacttcagccaaactgctggttggcactccacatgttccccacagccacagtccctagccaggccccctttcctctttgcctgccaggtccctggaatccattcctctctgtctcagctgagacaatacttcctcaggtaagccttctggaccccttcagactagatgaggtcatttggttataaactggcatagtcccacgaactttcttcattgtaattaacycattatttgattgatatccatgtttttgggcaggagtggtggctcatgcctataatccctgcactttgggaagccaaggcaggcagatcacctgagatcaggagtttgagactagccttggccaacatggcgaaaccttggctctactaaaaatacaaaaattagccaggcgtggtggcgaacacctgtagtcccagctactcgggaggctgaggcaggagaatcacttgaacctgggaggcagaggttgcagtgagccaagatcgtgccattgcactccagcctggg

SEQ ID NO: 711540 - DNA, 991 bp, Homo sapiens
gtctcaaaaaaaaaaaaaaaaaaaaaaaagctgggaagtgattccaacaaactttatcttttttcttctttatattcacccctctcttcctaccccacttcaatccttccttctatccattattttggtctagttgtagtataaatacatgtaatagagatataattgtaactctcttttaggtgtagtctcttgccctacaaaatttggtttcctggccgttgtcttccatggaaaatttagacataacaagaagtgtcacaaaatcatgatactgctataccatgtgcctgatttcaataccaggttgaatgagatgatggaaccttcctcatggaatttggagagatttatccctaggggcattgtagatttaatctaaggctgaactatcaaatgaaactattggcaaaattaacccacagttctacttttacctaaatctatgactaaagaaaactaaggagctcttagttttttccctggtcacctcctaagacatgctatgatgaataagaaaatattttctgaaaactggtttgttggaagaatgtgatcagcttatttatttttgttatctaaggaatttaaaaactggtcaactcctgaaaaagatgcacattgatgattcttaccaagcttcagtctgtcacaaagcctattctgaaatggtaagtaatgactggctgggaccactttgtgtgttactgttggtctcattaagtgagagcagtaagtcataagcagtaatgaacaaaccttccccgtggcrtcttttttcaaaattggatagcaatgtttgtcctttcttgaaatttaggatgaaaataagtgttggtacagtgattgcttggtaaattttctggctgtaggacctgagggcaaatatttatttctagctgtggatttgaactgagaactattatgcctgttatcagacttgactcccagccacattgccatgtttaagtagccttaggaaggatgatta

SEQ ID NO: 711541 - DNA, 633 bp, Homo sapiens
cgatgtgactgtacctgtgatatacataaccacaggttaatgtcttgaacatttaaatagttcctgaacacataaaaattcttaccattcacaaacgtaaagacaccaagatagaaatcagtcacagaacatkaatagatcatttgcaaaagaaagaaattgttaacacatcaataaaaaataatgtttagcttcactaataatcaagaaaatgcacagtaaaattagattctacctttctcttactactcagctttagaaaaacgttacttattcctagtgaagatactggaaaatagtagcctcaatatttcaagaaagcaatttggcaattaatctcaaagccttatcttattcttggaaccagcacttccaagcgcaccaaggaatcactcactggtgtgtactacaaaaacattcattgcaattccacttacaatagagaaaagctgtgaataacctgtatgtccaacaacaggggattggttaagtaaatcatgactcacccatccattaggacattgggcagctattaaaaataatgctgttgaaggatttagtgacacagaaatactattacatgaaaaaaggcagtttcttgaacacttccattttctttttttggctggcttt

SEQ ID NO: 711542 - DNA, 2043 bp, Homo sapiens
ccttgttttatctgctgctgggtcatggcacatttaactgggacacagtcctgggaaaacctttcttcctagccctcatctaaattgtttgtagataaaaagaaactctctatttcctaagccaagatagcagagcctcacaccatctctcctattacagaagcagagagaggatagtgtagatgtcaggatttggtgcttcagcatcaggttacctgaattcagatccagtctacacaagtcactctttgtagccttaagtaaattacttaacactctgttctggctgggcgtggtggctcacgcctgtaatcccagcactttgggaggctgaagtgggtggatcacgaggtcaggagattgataccatcctgaccaacatggtgaaaccctgtctctactaaaataaaaaaaaattagctgggcgtggtgacatgcacctgtagccccagctacttgggaggctgaggtagaggaattgcttgaacccaggaggcagaggttgcagtgagccaagatcatgccactgcactctggccaggcaacagagcaagactccgtctgaaaaaaaaaaaaaaagatccatgttgttatgaggctttaatgatttcacacatacaaggctatggttggtgcatagaattagcactccacaaaagcaagctgtgatttttccctcccctattccctcactggggcccccagcttccacttccattcttggatttcctcctttttatcagtgtactacttggaaatcagttctatctctatggctgtgggtgagtactttttaatcgttcatctctatcagctcttcctttggtaattaacagcaaacagagcacatcttccttgtataaaagctgatagggctgggggcagtggctcacgcctgtactcccagcactttgggaggccaaggtgagaggtttgcttgaggccaggagttcaagaccaacatgggcaacatagccaaacccccgtgtctacaaaaaattaaaaatgttagccggacatgatagtgtgcctacctatagtcctagttactcagaaggctgaggtggaaggatcatttgagcctgggaggtccaggctgcagtgagctatgattgtgccactgcactgcagtctgggtgacagagcgagacactatcttgaattaaaaaaaaaaaaaaggcctctgtaatagttttactttctgagtacagaacggggccccatatgcaaagaggacctagcctgccttctgtgctcttttcttgcagacaacctcaccatcttaaacactaggagtgcttactaagaatttatggcctatggaactggtcagagcattttataatataattccgctgcagagactcagaaacaatgcactatttcaagtaaatgttgccttcttcatttgtagggatagactctggagacgccggtgaaaagaaaacataatttgcctggatgcaaaatgyttcagtctgttctttcctctaaacatctcccactttcaatgctctattttattacaccagggaagaaaactcaattgcgtgctattgtgacttttgtggctacattctcaatttgctctctttgttcctgagctaggggaggtctgtgtctcatgacagaagcagtggggactcactagggtccttcatggggcaaatagtaaaatccccaaggcctaaatcctacaaatgaacggtttttgtatgctaggctgacacacaaaatatattctgagccaaatactttttttctcatatagtaatggcttaaaaggagtaaagtacctttttctcaaaatcacatgttgatgatggtaataggaaaagatcctgaggatgagggatatatcccatagggctgtcacaagtaactctgtggtccaaaatattttctgggcaagtgttgaggccctgagggtgtcaggagcatgaaaacggaaacattgtttctttaacacagggcataagagaatcacattttcataacctttctaaattttctgagttaatttatgttagcaacccaaactca

SEQ ID NO: 711543 - DNA, 1224 bp, Homo sapiens
tcctgtaaactttttttccccttttttgtgaacttaaagttgagttttctgaactaggattaatcaagaagatattttttacttcattgtttccctgctggaaaaaatgtcaactcccacccctgtcttcagtagaaatctaagactggatagtgctccatgaaagtaaaacacaatgttagttaaggtcaagaagcctatgtttgagtcttggttgcatgcccttagtgtcagaatctcaacttctctcagccatcatttccttataaataaataactcccatggatataaatttactctatcttaacaggcaattacaaagacatagaggttttgacaaagattcctttgcatctatctatctctggtgtataagaattacatctgaatcatcttttaatcatttagcttgggcccaaagcataacaggacttgagaaaatgttcatcataaaaatacagttttgtggatgtagagtagataaggttgtgggattggaagacgcagatctgaaatacagctagaaggattttggccaaactctttatgtccctggtgtcatagagaaagaagggaaggcaaatagtgtgtaagatgtgatgcaataaatgggatttataaaatccctgttatctaaatgmagatacgtgaattttataactattgggtgtttaataattacctaagagcacactgtcttctgtacttagagtgaatgcttaaaatgtcattacaaactggacagattacacattaactcaaatgaatcattacgggggaagaaactttgttgtttttttctgggtgagaggtatcagcttttttttttaatgttttttaatgtttatttcaatagcttttggtgtacggtagtttttttgttatatggatgaattatatagtgcattcataacctgagtagagtacattgcccctaatgtgtaattttctatccttagccccctcccaccttctatcttctgagtctttaaggttcattatatcactttgcttactcatagcttagctcctctttatgagtgagaacatgtggtttttggttttctactcctgtgtcagtcaacttagaataatggcctccagctccatccaagttgctgtaagagactttatttcattccttttaatgactgagtagtatttcatggtgtatatataccacattttctttatccactcattagccaatgggcacctaggtt

SEQ ID NO: 711544 - DNA, 223 bp, Homo sapiens
cttcacagactacgtttagggaagcagaaagcgtggaaggaatctgtagacaagagacccaagatacatcaaatcaattgaaaaacgtagttgaggccgaggcrggcagatcacgaggtcaggagttcgagaccagcctggtcaacatggtgaaaccccatctctacttcagataaaaaattagccaggcttggtggcaggtgcctgtaatcccagctctcgg

SEQ ID NO: 711545 - DNA, 2231 bp, Homo sapiens
tgtgacagaggttcacattaaactggcataagtgaaaaagggcattggctcatgaaactgacaagaccaaaagggataaattgagggacagctagctccaggctttccaatgtcgtcaatgtcgtcagagagctgacattgtatattttccagctttccttctcaagtaggttctggatggcatagcaaagacagccaccaccagctcagccacctgaccccgcacccagcttctctattccaagtgttcccccaggccagactcccactggaccaactggaattctgcactcatttctgaaccaatcagtgttgtggcaagatgggtggaatggctgactagcagatgtgagtcgtctgaccattcccagcatgagaggagaggagagtcagcctcacctttcctgatgggactgacagtggccacggaggggtttcccaaaggagaatcaggaggtttggtacccaaagactaagggggccacacaggatggggagggagagggatgtgaggtgagagtgaaaagtgaccagaatgcaggttggattgaataaaaagaggctcccaagagtactggagtatgagattgaacaggaaagacatgatcttagtctggcggaaatgttcaaaagatgtgatggctagtagggcacatgccagtgagagcagataatagccttagtgctgggtgcccaggagttttgggggttgtggggaatcccggagaggggaagggccaggatggtcgtggggactatgggaggctcattgcagccccatttaccaaggagcacagcagtatttccacctgctgctactgatatggccataggaagcacatcaggacaccatccagaggcctcgacctcagacactgcatcccataccccacactaaggatgcagcccaccccgagagaaaactctgccctggtgcagctctgagcagaacacaggaaccttttagcccagaaagacagagcagatggaccttcccgagggtctggaggtccccaagcccaggcaggcaaaagggttgttatcccaatggggagggctaggcacgggactcagagatgaagactcctggggaaggcaagggtcatgaatggccttcccaggggggaacccaggcttcctgagctccactagagaggcacaaaaagctgacttgaagagcccagagaattgactcagtcgtctgtccgtccgtccatccatccatccatgcatccctttgtccgttcacccactcatgtactatttatttaccaagctcctgctatgtgacaggaatgccctacctgccaggaataccctggtgaactagatggccaaggtccctgccttcgcagagcccagagcctagtcagggagaaacacgatcaacagataagccagccaatgaacacggtgacttcggatctcaaatagggtggccagatagcaaatgagtgggaggagaggtgggggctgctttagccacgcgctgaggaagagtcatttgaagaagatggctctagacagaggaaacggccagtttcatagaccctgcagagggagtacgttttgtattggaaaaccagataaatggaggtgggagatgaaggtgggggaagaggtcggaaagctggtcacggctgactcaggtgaggcagtcaggatgcactgtggttgtggggagggcaggctagagattctctccacaaagtcagattggcaggtcaaactggccccatagtattcaccaggcacaagaactgtcatattaggctgggcacagtggctcatgcctataatstcagcattttgggaggctgaggtgggaggtgtgcttgaggccaggagttcaagaccaccctaggcaatatattgagaccccatctctacagaaatgtttttttgcaaaaattagccaggcgtggtggcttgtgcctgtagtgctagctactcgggaggctgaggtggaaggatcacttgagcccaggcagtcgaggctggagttagttgtgattgcaccactacactccagcctgggtgacagagtaagatcttgtctcaaaaaaaataaaataaaataaaaaagtcacattgttttattttgctgggctaacacataaagcatttactctgctccaggcactctaagtgctcagcatgtattaacttatttgatcttctcaaaaatcctctaagatagatattagtactaagcccattttacagatggc

SEQ ID NO: 711546 - DNA, 2872 bp, Homo sapiens
ccttaccgcctccactgccagccacaggacccacagatgctccacagtcagcccaaattgtccaaggccaaggtatctatgtccatccatcagaattgcaaccaatgcaagcacagactatgtccagacagacatcccatccaactggagacaaattgtcttggccaccttgtggttgccaccatgcctctcatccctggtccctgttaagcaccatctcaaaacagaagcttctctacccggctagtctttmcataatctcatctctacgtgaccaatttatttcccgtggcccaagctctctttgctttcctctccttcaagctcctctactgcaccctctagaatacctttcccaaaggtaaacacccacccctttgctgacatcctctctaccctctgtcccaatggcaacacagctctcctggggaactgctgctgccaaatggccagccccatcccattgacctcactgtcaacctcctggcttctgacccgtgaccactcggttatacttgaaaactgtcctgctccttggtggcttaggctagcacatgttaagccacaggtagacctctgtctgtattcaggttcagagcccagctattcctctctcaaccttcaacttcacctcctttcttccctcattctaagcagataacctggctcatctcattccctgaaacccttcctatagacccacttacatctgcaaccatctcttccttcttttatccactggaaagttaatctcccccaagggccctggatcccacttcctcctctcttctcttgaccctagctccatcaactgctgtctctctttcctgtacctgcaatgtttccctccgtttttgctccttttcctcagcaatttttttttttttgagacggagtctcgctctgtcgcccagttgggagtgcagcggtgtgatctcggctcactgcaacctctacattccaggttcaagcaattctcctgcctcggcctcctgaacagctggcactataagtacgcgccaccacgcccagctactttttgtatttttagtagagatagggtttcgccatgttaattaggctggttttgaactcctcacctcgggtgatccactggccttggcctcccaaagtgctgggattacaggtgtaagccaccacacccaccttaatgactttctgatgccctcaggaaaaaggcaaaactcttttcatatcaagtgcaagatccttcacagtctggttcttatctgtggtctcatttctcctttcctcacactctgaccaagccagactgaacaacctgtaattcgtcaaacatatcaggtgaggtgtgaatgttctattcggctccaggttctgtgcatgctgttccctcctggcaggttcctgccacccctcccgcaaatacaggtaatctcctcaggtcacagcctctttgacatcttatttatttattttttttgagatggagtctcgctctgtcgcccacgctggagtgcagtggtgcgatctcagctcactgcaagctctgcctcctggattgatgccattctcctgcctcagcctcctgagtagctgggactacaggcacccgccaccatgcctggctaatttttttttttaatttttaggagagacggggtttcaccatgttagccaggatggtctcaatctcccgacctcgtgatccgcctgccttggcctcccaaagtgctgggattacaggtatgagccaccgtgcccagccctgtctttgacatcttatctgacaatctccccctccttctccaacacttggttaggtggcttttctatgttctcctataacacactacacttctcccagcacagaacttaccacactgcacaatggtctgtttgccaatcagagaagcaacatgccagcatggcagggaatccaggctttgggggcggacagttctgggtttgaaaatatccccacctctcactagctgtatgactatcagcaagttactaaatctctaggctttgaactcctcatctgtaacacgggctagaaacacctacctcacatggttgctgcaaagactaaatcagacaaggcaggaagaacatggtacaagcacctaagaagcactcagtaagtggtagttattttttattattttttgagacgaggtctgtcatgcaggctggagtacagcggcatgatcatggctcactgcagtctcaaccacccagactcaagcgatcctcccacctcagcctccagagtagctgggaccacagatgtgtaccatcacactcagctaattttaaaattatgaatatttgtagaggtgaggtctcactacgttgcccaggatggtctcgagctcctgacctcaagtgatctgcccacattggcctcccaaagtgctggaattacaggctaagccaccacacccggcctattatttccctattataatggaactaagagcagaaaccttataaattgctcaattttcccagcgttcagcataggtacctaggaaatatatgttgatgcatgaatgagaacagagaacaaagaagatggggggaaaaaatcaaaggtaggacccccagatttgaggagatatctaaatacctgagagaattatttttatttttatttattgtgaaacagagtctcactctgtcgcccaggctgaagtgcagaggcgtgatctcagctcactgcaacctctgccttccaggttcaagtgtttctcccgcctcagcctcccgagtagctgggattacaggcgcacgccactgtgcccgactaattttttgtatttttagtagagatggagtttcaccatgttggccaggctggtctcgaactcctgacctcaggtga

SEQ ID NO: 711547 - DNA, 2872 bp, Homo sapiens
ccttaccgcctccactgccagccacaggacccacagatgctccacagtcagcccaaattgtccaaggccaaggtatctatgtccatccatcagaattgcaaccaatgcaagcacagactatgtccagacagacatcccatccaactggagacaaattgtcttggccaccttgtggttgccaccatgcctctcatccctggtccctgttaagcaccatctcaaaacagaagcttctctacccggctagtctttacataatctcatctctacgtgaccaatttatttcccgtggcccaagctctctttgctttcctctccttcaagctcctctactgcaccctctagaatacctttcccaaaggtaaacacccacccctttgctgacatcctctctaccctctgtcccaatggcaacacagctctcctggggaactgctgctgccaaatggccagccccatcccattgacctcactgtcaacctcctggcttctgacccgtgaccactcggttatacttgaaaactgtcctgctccttggtggcttaggctagcacatgttaagccacaggyagacctctgtctgtattcaggttcagagcccagctattcctctctcaaccttcaacttcacctcctttcttccctcattctaagcagataacctggctcatctcattccctgaaacccttcctatagacccacttacatctgcaaccatctcttccttcttttatccactggaaagttaatctcccccaagggccctggatcccacttcctcctctcttctcttgaccctagctccatcaactgctgtctctctttcctgtacctgcaatgtttccctccgtttttgctccttttcctcagcaatttttttttttttgagacggagtctcgctctgtcgcccagttgggagtgcagcggtgtgatctcggctcactgcaacctctacattccaggttcaagcaattctcctgcctcggcctcctgaacagctggcactataagtacgcgccaccacgcccagctactttttgtatttttagtagagatagggtttcgccatgttaattaggctggttttgaactcctcacctcgggtgatccactggccttggcctcccaaagtgctgggattacaggtgtaagccaccacacccaccttaatgactttctgatgccctcaggaaaaaggcaaaactcttttcatatcaagtgcaagatccttcacagtctggttcttatctgtggtctcatttctcctttcctcacactctgaccaagccagactgaacaacctgtaattcgtcaaacatatcaggtgaggtgtgaatgttctattcggctccaggttctgtgcatgctgttccctcctggcaggttcctgccacccctcccgcaaatacaggtaatctcctcaggtcacagcctctttgacatcttatttatttattttttttgagatggagtctcgctctgtcgcccacgctggagtgcagtggtgcgatctcagctcactgcaagctctgcctcctggattgatgccattctcctgcctcagcctcctgagtagctgggactacaggcacccgccaccatgcctggctaatttttttttttaatttttaggagagacggggtttcaccatgttagccaggatggtctcaatctcccgacctcgtgatccgcctgccttggcctcccaaagtgctgggattacaggtatgagccaccgtgcccagccctgtctttgacatcttatctgacaatctccccctccttctccaacacttggttaggtggcttttctatgttctcctataacacactacacttctcccagcacagaacttaccacactgcacaatggtctgtttgccaatcagagaagcaacatgccagcatggcagggaatccaggctttgggggcggacagttctgggtttgaaaatatccccacctctcactagctgtatgactatcagcaagttactaaatctctaggctttgaactcctcatctgtaacacgggctagaaacacctacctcacatggttgctgcaaagactaaatcagacaaggcaggaagaacatggtacaagcacctaagaagcactcagtaagtggtagttattttttattattttttgagacgaggtctgtcatgcaggctggagtacagcggcatgatcatggctcactgcagtctcaaccacccagactcaagcgatcctcccacctcagcctccagagtagctgggaccacagatgtgtaccatcacactcagctaattttaaaattatgaatatttgtagaggtgaggtctcactacgttgcccaggatggtctcgagctcctgacctcaagtgatctgcccacattggcctcccaaagtgctggaattacaggctaagccaccacacccggcctattatttccctattataatggaactaagagcagaaaccttataaattgctcaattttcccagcgttcagcataggtacctaggaaatatatgttgatgcatgaatgagaacagagaacaaagaagatggggggaaaaaatcaaaggtaggacccccagatttgaggagatatctaaatacctgagagaattatttttatttttatttattgtgaaacagagtctcactctgtcgcccaggctgaagtgcagaggcgtgatctcagctcactgcaacctctgccttccaggttcaagtgtttctcccgcctcagcctcccgagtagctgggattacaggcgcacgccactgtgcccgactaattttttgtatttttagtagagatggagtttcaccatgttggccaggctggtctcgaactcctgacctcaggtga

SEQ ID NO: 711548 - DNA, 2872 bp, Homo sapiens
ccttaccgcctccactgccagccacaggacccacagatgctccacagtcagcccaaattgtccaaggccaaggtatctatgtccatccatcagaattgcaaccaatgcaagcacagactatgtccagacagacatcccatccaactggagacaaattgtcttggccaccttgtggttgccaccatgcctctcatccctggtccctgttaagcaccatctcaaaacagaagcttctctacccggctagtctttacataatctcatctctacgtgaccaatttatttcccgtggcccaagctctctttgctttcctctccttcaagctcctctactgcaccctctagaatacctttcccaaaggtaaacacccacccctttgctgacatcctctctaccctctgtcccaatggcaacacagctctcctggggaactgctgctgccaaatggccagccccatcccattgacctcactgtcaacctcctggcttctgacccgtgaccactcggttatacttgaaaactgtcctgctccttggtggcttaggctagcacatgttaagccacaggtagacctctgtctgtattcaggttcagagcccagctattcctctctcaaccttcaacttcacctcctttcttccctcattctaagcagataacctggctcatctcattccctgaaacccttcctatagacccacttacatctgcaaccatctcttccttcttttatccactggaaagttaatctcccccaagggccctggatcccacttcctcctctcttctcttgaccctagctccatcaactgctgtctctctttcctgtacctgcaatgtttccctccgtttttgctccttttcctcagcaatttttttttttttgagacggagtctcgctctgtcgcccagttgggagtgcagcggtgtgatctcggctcactgcaacctctacattccaggttcaagcaattctcctgcctcggcctcctgaacagctggcactataagtacgcgccaccacgcccagctactttttgtatttttagtagagatagggtttcgccatgttaattaggctggttttgaactcctcacctcgggtgatccactggccttggcctcccaaagtgctgggattacaggtgtaagccaccacacccaccttaatgactttctgatgccctcaggaaaaaggcaaaactcttttcatatcaagtgcaagatccttcacagtctggttcttatctgtggtctcatttctcctttcctcacactctgaccaagccagactgaacaacctgtaattcgtcaaacatatcaggtgaggtgtgaatgttctattcggctccaggttctgtgcatgctgttccctcctggcaggttcctgccacccctcccgcaaatacaggtaatctcctcaggtcacagcctctttgacatcttatttatttattttttttgagatggagtctcgctctgtcgcccacgctggagtgcagtggtgcgatctcagctcactgcaagctctgcctcctggattgatgccattctcctgcctcagcctcctgagtagctgggactacaggcacccgccaccatgcctggctaatttttttttttaatttttaggagagacggggtttcaccatgttagccaggatggtctcaatctcccgacctcgtgatccgcctgccttggcctcccaaagtgctgggattacaggtatgagccaccgtgcccagccctgtctttgacatcttatctgacamtctccccctccttctccaacacttggttaggtggcttttctatgttctcctataacacactacacttctcccagcacagaacttaccacactgcacaatggtctgtttgccaatcagagaagcaacatgccagcatggcagggaatccaggctttgggggcggacagttctgggtttgaaaatatccccacctctcactagctgtatgactatcagcaagttactaaatctctaggctttgaactcctcatctgtaacacgggctagaaacacctacctcacatggttgctgcaaagactaaatcagacaaggcaggaagaacatggtacaagcacctaagaagcactcagtaagtggtagttattttttattattttttgagacgaggtctgtcatgcaggctggagtacagcggcatgatcatggctcactgcagtctcaaccacccagactcaagcgatcctcccacctcagcctccagagtagctgggaccacagatgtgtaccatcacactcagctaattttaaaattatgaatatttgtagaggtgaggtctcactacgttgcccaggatggtctcgagctcctgacctcaagtgatctgcccacattggcctcccaaagtgctggaattacaggctaagccaccacacccggcctattatttccctattataatggaactaagagcagaaaccttataaattgctcaattttcccagcgttcagcataggtacctaggaaatatatgttgatgcatgaatgagaacagagaacaaagaagatggggggaaaaaatcaaaggtaggacccccagatttgaggagatatctaaatacctgagagaattatttttatttttatttattgtgaaacagagtctcactctgtcgcccaggctgaagtgcagaggcgtgatctcagctcactgcaacctctgccttccaggttcaagtgtttctcccgcctcagcctcccgagtagctgggattacaggcgcacgccactgtgcccgactaattttttgtatttttagtagagatggagtttcaccatgttggccaggctggtctcgaactcctgacctcaggtga

SEQ ID NO: 711549 - DNA, 677 bp, Homo sapiens
gggacaggaccctgctcccattgcattctcagcaccacaccacacactccttgttggaggccactccagacagcatgtgctgaaggatgccctgtggtcagaaacaagttcattaactttccctttgaagtgttttcgcccctgtttcctagcgttctgggaattttacacatccttcctataaaaccaagtatcaggtgagatccttaggatcaggaccatgaatcaagtggtgtgagggcaacacagcaaacttaccctttttaggccatttcctttttctgccctcaaactctgtgaactgaaccttgttaaagtcagtcaacaccagggtggatggtttgccgttgtcacctattttcaggacataacaccctgacttaggagccattcygatcatttctaattcaatagatgcacccagcattcagattgccttttctctcaaccaggatctttaaagtcgatgacaagagttccagtcctgaatcatggcaaagtgcagtagtgaactgcggggttaatgacaccatattctggaaggatctctctatggctgatggtctcagttctggcatcagcctctgactgagaagcaggtctcacacaggaagagtcagatgaggagcaatcctctgcttccgatggagttagttgtgatgagttggtgaggtctg

SEQ ID NO: 711550 - DNA, 677 bp, Homo sapiens
gggacaggaccctgctcccattgcattctcagcaccacaccacacactccttgttggaggccactccagacagcatgtgctgaaggatgccctgtggtcagaaacaagttcattaactttccctttgaagtgttttcgcccctgtttcctagcgttctgggaattttacacatccttcctataaaaccaagtatcaggtgagatccttaggatcaggaccatgaatcaagtggtgtgagggcaacacagcaaacttaccctttttaggccatttcctttttctgccctcaaactctgtgaactgaaccttgttaaagtcagtcaacaccagggtggatggtttgccgttgtcacctattttcaggacataacaccctgacttaggagccattccgatcatttctaattcaatagatgcrcccagcattcagattgccttttctctcaaccaggatctttaaagtcgatgacaagagttccagtcctgaatcatggcaaagtgcagtagtgaactgcggggttaatgacaccatattctggaaggatctctctatggctgatggtctcagttctggcatcagcctctgactgagaagcaggtctcacacaggaagagtcagatgaggagcaatcctctgcttccgatggagttagttgtgatgagttggtgaggtctg

SEQ ID NO: 711551 - DNA, 677 bp, Homo sapiens
gggacaggaccctgctcccattgcattctcagcaccacaccacacactccttgttggaggccactccagacagcatgtgctgaaggatgccctgtggtcagaaacaagttcattaactttccctttgaagtgttttcgcccctgtttcctagcgttctgggaattttacacatccttcctataaaaccaagtatcaggtgagatccttaggatcaggaccatgaatcaagtggtgtgagggcaacacagcaaacttaccctttttaggccatttcctttttctgccctcaaactctgtgaactgaaccttgttaaagtcagtcaacaccagggtggatggtttgccgttgtcacctattttcaggacataacaccctgacttaggagccattccgatcatttctaattcaatagatgcacccagcattcagattgccttttctctcaaccaggatctttaaagtcgatgacaagagttccagtcctgaatcatggcaaagtgcagtagtgaactgcggggttaatgacaccatattctggaaggatctctctatggctgwtggtctcagttctggcatcagcctctgactgagaagcaggtctcacacaggaagagtcagatgaggagcaatcctctgcttccgatggagttagttgtgatgagttggtgaggtctg

SEQ ID NO: 711552 - DNA, 1201 bp, Homo sapiens
aagtgtttaatttccgtgagcttcagtcagtttctccatcaacaaggatgggtctaatgatacctgccttgcaaggttgctataaacgaagaaggtaagggtaaatactttgcagatgtctgtttgtatggggcagatacaactgaggcctgtctcctgcccccagacatgaggtagtccaggctacccacccagactgaaaggcaaatccaaaacaatagatggctctggaaacattgatcaaaacctggggcctgctatctcaaaggcaggaaaaaaaacaaaaacaaaaacaaaaaacctgggacatccaaaacagacctcaacacatgcttttcagaggaggggctgccaagattcaacctcctgaaaacctcccagaattttgccatccctatgaacattcagaaagacaatgctaaaattaaattctgaatctcagcccacccagctgtactcatagtgagtcccaaatgactacgtgtcatgcccacccaccaatcactctcttgctacttaccgacatcaccraatcctccagaaccaatgtccactggtctgggtgtttccggtctgagaacctctggtttgcgaatctctggtctgagcaccactggggtaaggttttctagggttggcttcgacaactttgctgcttgcctgttagttcgcagaaacgaagccagcatgtcctggcctgtgtcctctaagcaggagatgaacaaaggaagagcctgactccctcgagtctccagatctatgatcagctgcctggcctgatcccgccgagatccagagcctgcccgctgtttggaaagaaaggcaggatactaattatccacgtacttttatatggctctcaccttgtctccccatttcccagctactgtaagtctaaacaatcaggcacgtgggcagcaatggagctgcaggtgcactgtgtgccatttaccagcctttgctgatctgttcattattttgcagggcaaaagatgcccagcactatgctaagtgctgaaaatgctgccatggacagtctcagtccttaaggagcaaatttctaatggggaatgcaatcagacaaatcagcaatgacacaacaagagacaagtgcccagagggaagcacatggggctgaggatattcatgaagtgaatagcgaattcagagtcttatgaggtgggaggtagatagtggcaag

SEQ ID NO: 711553 - DNA, 1201 bp, Homo sapiens
aagtgtttaatttccgtgagcttcagtcagtttctccatcaacaaggatgggtctaatgatacctgccttgcaaggttgctataaacgaagaaggtaagggtaaatactttgcagatgtctgtttgtatggggcagatacaactgaggcctgtctcctgcccccagacatgaggtagtccaggctacccacccagactgaaaggcaaatccaaaacaatagatggctctggaaacattgatcaaaacctggggcctgctatctcaaaggcaggaaaaaaaacaaaaacaaaaacaaaaaacctgggacatccaaaacagacctcaacacatgcttttcagaggaggggctgccaagattcaacctcctgaaaacctcccagaattttgccatccctatgaacattcagaaagacaatgctaaaattaaattctgaatctcagcccacccagctgtactcatagtgagtcccaaatgactacgtgtcatgcccacccaccaatcactctcttgctacttaccgacatcaccaaatcctccagaaccaatgtccactggtctgggtgtttccggtctgagaacctctggtttgcgaatctctggtctgagcaccactggggtaaggttttctagggttggcttcgacaactttgctgcttgcctgttagttcgcagaaacgaagccagcatgtcctggcctgtgtcctctaagcaggagatgaacaaaggaagagcctgactccctcgagtctccagatctatgatcagctgcctggcctgatcccgccgagatccagagcctgcccgctgtttggaaagaaaggcaggatactaattatccaygtacttttatatggctctcaccttgtctccccatttcccagctactgtaagtctaaacaatcaggcacgtgggcagcaatggagctgcaggtgcactgtgtgccatttaccagcctttgctgatctgttcattattttgcagggcaaaagatgcccagcactatgctaagtgctgaaaatgctgccatggacagtctcagtccttaaggagcaaatttctaatggggaatgcaatcagacaaatcagcaatgacacaacaagagacaagtgcccagagggaagcacatggggctgaggatattcatgaagtgaatagcgaattcagagtcttatgaggtgggaggtagatagtggcaag

SEQ ID NO: 711554 - DNA, 635 bp, Homo sapiens
tccatgcaaggcattcctcctgaatgcatccatgaatttgtttacttttgcgtcaaacatatgagccattgtcatgctcagcctgtgccaccattgctctgtctgatgtatgtaatcatacaagacctgattttggttctaacacagtggtctttgactatcaacattgatgtttttagagatgggttcttctggttgatasagactatgcattgcgtttagcagatggggtaaaactggcctaaaacaagtctttgcagaatacatgccaatttccaaaaaaaaaaaaaaatttgttgctcaggtgttgcacaatttttatctaacactgaggctatcagctccaactaaacaacatttcagtgggtgaggctgccctaacttccattaggggccatggtctcactgccatcacttattagccatgagaatttggttgtagttttcaggtaggttggtttcttcctcatttgcagcttgttgatacttgttcctttttatttattaacatcccaatcaatttgcagctgccatcattacataaatatttttctgttataaaaagaagtgtgatctgtttttttagtgatttcctttgtttgggaatagagattggaagcacatactcagacctg

SEQ ID NO: 711555 - DNA, 1544 bp, Homo sapiens
caatatttacatctctttccttcagtctatcagggtgctctgaatttgaagtaggcactttgggaccctgatgtgttgggacagctgaatgcatgactatggatgtaggtccaccccccagcccatttgaaccactcctgagaccacggaaaacccagtagtctgttgtgtcatggtttccctaagaaatgggaatctgcaggtgtgttctcaagctagaagaaatgtaaagataaacaggaccttaaaataaattgttatgggatatcttcaaggttgtacactccaaaaatacgtagtaatactaattcacttgtttggccctcacttggggctaatggggagatcttatatttgttctgtctctttgatagaaaaattactctcctgacacttgataaacaaaccttgcatcatcctctattgaaaattaagttaaaataacatttttttttttttgagatggagtttcactcttgttgcccaggctggagcacagtagtgtagtctcggatcactgcaacctccgcctcccaggttcaagcgattctcctgcctcagccttctgagtagctgggattacaggtgtgcaccaccacatctggctaatttttgtatttttagtagagatggggtttcaccacattggccaggctggttttgagctcctgacctgaagtaatccactcgcctcggcctcccaaagtactgggattacaggcgtgagccaccgcgcccagcctaaaataatatttattgcatgctttgtatccatacttccaactatgaattcagacatttattgaatgtcaaacacctgctgacacgtatccataaattgttccttttaactcttccaaaacaccctctgagatattattaagattggcattgttgttgttattattagtgcccctattaaaaatattttgaaataattatagattcacaggaagttactaaaatagtatgtagatttcagaatatgcttcacccaactttctctatggcggatgtgttcctttaatttttstgtttgtttgcttgtttattaatacacaaggtactgaaactctgaatagctacatagtttgccaacttccagctagagaggggtagagactggggtcaaactggatccatctgactccaaagtataatctccctcccctggtttttggcgcatgggaaggtgtaactgatgagtgagagaccagctggagtttggaaactcttctgggaccatgagttccagtgtgtaatttcccacatcccaatctgcttcaggaggccactgatgtagctagcaatcagtcctgcagtagttttatgttcaggtgggagaaaagcttgggttgacttacttagactacagataagaacaaaagtagaagctcctgacagctcgagctccttttgctggcaccaagctctgttcttacaaagaacagtgtggagctggaggagaccctataaatatgcaaatgtagggaaatcttgcaccgggtcatcaactgcctagatgggacgaaagggaaggcaca

SEQ ID NO: 711556 - DNA, 1544 bp, Homo sapiens
caatatttacatctctttccttcagtctatcagggtgctctgaatttgaagtaggcactttgggaccctgatgtgttgggacagctgaatgcatgactatggatgtaggtccaccccccagcccatttgaaccactcctgagaccacggaaaacccagtagtctgttgtgtcatggtttccctaagaaatgggaatctgcaggtgtgttctcaagctagaagaaatgtaaagataaacaggaccttaaaataaattgttatgggatatcttcaaggttgtacactccaaaaatacgtagtaatactaattcacttgtttggccctcacttggggctaatggggagatcttatatttgttctgtctctttgatagaaaaattactctcctgacacttgataaacaaaccttgcatcatcctctattgaaaattaagttaaaataacatttttttttttttgagatggagtttcactcttgttgcccaggctggagcacagtagtgtagtctcggatcactgcaacctccgcctcccaggttcaagcgattctcctgcctcagccttctgagtagctgggattacaggtgtgcaccaccacatctggctaatttttgtatttttagtagagatggggtttcaccacattggccaggctggttttgagctcctgacctgaagtaatccactcgcctcggcctcccaaagtactgggattacaggcgtgagccaccgcgcccagcctaaaataatatttattgcatgctttgtatccatacttccaactatgaattcagacatttattgaatgtcaaacacctgctgacacgtatccataaattgttccttttaactcttccaaaacaccctctgagatattattaagattggcattgttgttgttattattagtgcccctattaaaaatattttgaaataattatagattcacaggaagttactaaaatagtatgtagatttcagaatatgcttcacccaactttctctatggcggatgtgttcctttaatttttctgtttgtttgcttgtttattaatacacaaggtactgaaactctgaatagctacatagtttgccaacttccagctagagaggggtagagactggggtcaaactggatccatctgactccaaagtataatctccctcccctggtttttggcgcatgggaaggtgtaactgatgagtgagagaccagctggagtttggaaactcttctgggaccatgagttccagtgtgtaatttcccacatcccaatctgcttcaggaggccactgatgtagctagcaatcagtcctgcrgtagttttatgttcaggtgggagaaaagcttgggttgacttacttagactacagataagaacaaaagtagaagctcctgacagctcgagctccttttgctggcaccaagctctgttcttacaaagaacagtgtggagctggaggagaccctataaatatgcaaatgtagggaaatcttgcaccgggtcatcaactgcctagatgggacgaaagggaaggcaca

SEQ ID NO: 711557 - DNA, 1439 bp, Homo sapiens
  misc_feature 987, 988, 989, 990, 991, 992, 993, 994, 995, 996, 997, 998,999, 1000, 1001, 1002, 1003, 1004, 1005, 1006, 1007, 1008,1009, 1010, 1011, 1012, 1013, 1014, 1015, 1016, 1017, 1018,1019, 1020, 1021, 1022, 1023, 1024, 1025, 1026, 1027: n = A,T,C or G
  misc_feature 1028, 1029, 1030, 1031, 1032, 1033, 1034, 1035, 1036, 1037,1038, 1039, 1040, 1041, 1042, 1043, 1044, 1045, 1046, 1047,1048, 1049, 1050, 1051, 1052, 1053, 1054, 1055, 1056, 1057,1058, 1059, 1060, 1061, 1062, 1063, 1064, 1065, 1066: n = A,T,C or G
  misc_feature 1067, 1068, 1069, 1070, 1071, 1072, 1073, 1074, 1075, 1076,1077, 1078, 1079, 1080, 1081, 1082, 1083, 1084, 1085, 1086: n = A,T,C or G
gtcggccggtcccttaactctgtgcaagactcattgtcttccaggtggtccaacaatagaccccatcaagggatgctgtgccattcagttagagagagaatgggaggaagctctcaaaggaaatacctggcacctgctggttgctatcactagcctgatcccttgccctcactccatctaacacactttttccatccctaccaccactggtatttgtcaagttggccactctaccaggaggggtaacacattcctgccttgcctctcaggagccagccagagaaggggacagaaggcgaagatgaccatatcactctgcctgtcgaataagaccaccatcacattgcttatttgctcacaggatggagaccttattctttctcagggtctcaaagatctttctgcttatccagccccagaagcttgcctggcttcccctctctctctgtgcctgccatacagccctgtgagctacatgatttgagctacatgaacccttaacctccctcttctagcaggatctttgcatctgctgctacctctgctagaacagacagacatacttattctcattctcaattgtcacttcctcaaagaagcttcatgacctggtcaatcttgcccattctattctcttctaattccgtgcacctcttcctcttagcacttcacgttaatttaacattgcttcccctccgggcctgtccactccatgccagcatggacaatggctttgggtcttcccttcacttcccttcctatcttccttcctctgttttctttcctttcctttgctgtcctgttctattctgtcctgtcccttctctgccattgtatccctatttcctcacacagtgtttgttcacagaggtcttaatgcatagtttttgattaatggaaggaaggagatagggagggacgggggaggggagaggagagagggagggagggggaggggagggaggaagaggacaaagagggaggggnnnnnnnnnnnnnnnnnnnnnnnnnnnnnnnnnnnnnnnnnnnnnnnnnnnnnnnnnnnnnnnnnnnnnnnnnnnnnnnnnnnnnnnnnnnnnnnnnnnnggatggagagggggtatgatgwatgccctactgagtctggcatctgctgcaagaagctgccagattccccactccttgaacccctcattgggtgcatggttagaggcagccctgctcagcggggcactgggagactggtgattacctccagcagccaccaccccatcctggggcagggccacgctgtgagcatgctccgtgcttcactgctgcatggaaatgatcactgaaagtttgatgatgtgtgggaaggagcaggtggtgatgaagttggtgaactcctcattctgtaatggactggagacttcctcatcagattgtgctccttcttatcaagcaggaagctggcaggc

SEQ ID NO: 711558 - DNA, 1260 bp, Homo sapiens
ttaagtaactaacttgctctaaatcacagttattaagtggcagggcctgtattcaaatgcaggtgggctgacttcagattcaaattgtttgcttttgccagtggttctcaatcttgagcatgcaaacctggaggccttgttaaaattcagatagccccatcttcagggtctccaattcagtaggttggggccgccgagaatttgcctaaccagctccctggtgatgctgaggctgctggactgggaagactgggaaccaactgagaagacctttgtatttggctttctcacctccagataagggctttttaacttttattttgtgagacaaggtctcaatctctcactcacgctgaaatacagcttatgatcatggttcactgcaacctcaaactcttgggctcaagcaatcccctgcctcagcaatatgaataaacatattggaggccaggtgtgagactccacctcaaaaaaaaaaagtaaaggaatagggctgggcgcggtggctcacgcatataatcccagcactttgggaggccaaggcaggcagatcatctgaggacaggagttcgagaccaccctggccatcgtggtgaaaccccgtctctattaaaagtacaaaaaaaaaaaaagccggcatggtggtgggcacctgtagtcccagccactcgaaagctgaggcaggagaatcgcttgaacccaggagacggagattgcagtgagccgagatcacgccactgcactccagcctgagcaagagcaagactccctctcaaaaaaaaaaaaaaagtaaagaaataaaacaatggctactccatagagcagccccgagggctgctggttgctcatttttatggttatttattgattatatgctaaagaaggggtggattattcatgcctcccctttttagaccatatagggtaacattctggcgttgccayggcatttgtaagctgtcttggcgctggtgggagtgtagcagtgaggacgaccagaggtcattcgcatcaccatcttggttttggtgggttttggccgcggcttctttactgcttgtgccggcctctcatctcatcctgtgacttagaatgcctccaccacctgggaacacagcccagtaggtctcagcctcattttacccagcgcctactcaagatggagttgctctggttcaaaggcctctaacagaagctaaacacaggtgggggctttcaaagaagcagatccaatgcccactgcccttcctcactccccta

SEQ ID NO: 711559 - DNA, 1260 bp, Homo sapiens
ttaagtaactaacttgctctaaatcacagttattaagtggcagggcctgtattcaaatgcaggtgggctgacttcagattcaaattgtttgcttttgccagtggttctcaatcttgagcatgcaaacctggaggccttgttaaaattcagatagccccatcttcagggtctccaattcagtaggttggggccgccgagaatttgcctaaccagctccctggtgatgctgaggctgctggactgggaagactgggaaccaactgagaagacctttgtatttggctttctcacctccagataagggctttttaacttttattttgtgagacaaggtctcaatctctcactcacgctgaaatacagcttatgatcatggttcactgcaacctcaaactcttgggctcaagcaatcccctgcctcagcaatatgaataaacatattggaggccaggtgtgagactccacctcaaaaaaaaaaagtaaaggaatagggctgggcgcggtggctcacgcatataatcccagcactttgggaggccaaggcaggcagatcatctgaggacaggagttcgagaccaccctggccatcgtggtgaaaccccgtctctattaaaagtacaaaaaaaaaaaaagccggcatggtggtgggcacctgtagtcccagccactcgaaagctgaggcaggagaatcgcttgaacccaggagacggagattgcagtgagccgagatcacgccactgcactccagcctgagcaagagcaagactccctctcaaaaaaaaaaaaaaagtaaagaaataaaacaatggctactccatagagcagccccgagggctgctggttgctcatttttatggttatttattgattatatgctaaagaaggggtggattattcatgcctcccctttttagaccatatagggtaacattctggcgttgccatggcatttgtaagctgtcttggcgctggtgggagtgtagcagtgaggacgaccagaggtcattcgyatcaccatcttggttttggtgggttttggccgcggcttctttactgcttgtgccggcctctcatctcatcctgtgacttagaatgcctccaccacctgggaacacagcccagtaggtctcagcctcattttacccagcgcctactcaagatggagttgctctggttcaaaggcctctaacagaagctaaacacaggtgggggctttcaaagaagcagatccaatgcccactgcccttcctcactccccta

SEQ ID NO: 711560 - DNA, 1260 bp, Homo sapiens
ttaagtaactaacttgctctaaatcacagttattaagtggcagggcctgtattcaaatgcaggtgggctgacttcagattcaaattgtttgcttttgccagtggttctcaatcttgagcatgcaaacctggaggccttgttaaaattcagatagccccatcttcagggtctccaattcagtaggttggggccgccgagaatttgcctaaccagctccctggtgatgctgaggctgctggactgggaagactgggaaccaactgagaagacctttgtatttggctttctcacctccagataagggctttttaacttttattttgtgagacaaggtctcaatctctcactcacgctgaaatacagcttatgatcatggttcactgcaacctcaaactcttgggctcaagcaatcccctgcctcagcaatatgaataaacatattggaggccaggtgtgagactccacctcaaaaaaaaaaagtaaaggaatagggctgggcgcggtggctcacgcatataatcccagcactttgggaggccaaggcaggcagatcatctgaggacaggagttcgagaccaccctggccatcgtggtgaaaccccgtctctattaaaagtacaaaaaaaaaaaaagccggcatggtggtgggcacctgtagtcccagccactcgaaagctgaggcaggagaatcgcttgaacccaggagacggagattgcagtgagccgagatcacgccactgcactccagcctgagcaagagcaagactccctctcaaaaaaaaaaaaaaagtaaagaaataaaacaatggctactccatagagcagccccgagggctgctggttgctcatttttatggttatttattgattatatgctaaagaaggggtggattattcatgcctcccctttttagaccatatagggtaacattctggcgttgccatggcatttgtaagctgtcttggcgctggtgggagtgtagcagtgaggacgaccagaggtcattcgcatcaccatcttggttttggtgggttttggcckcggcttctttactgcttgtgccggcctctcatctcatcctgtgacttagaatgcctccaccacctgggaacacagcccagtaggtctcagcctcattttacccagcgcctactcaagatggagttgctctggttcaaaggcctctaacagaagctaaacacaggtgggggctttcaaagaagcagatccaatgcccactgcccttcctcactccccta

SEQ ID NO: 711561 - DNA, 1260 bp, Homo sapiens
ttaagtaactaacttgctctaaatcacagttattaagtggcagggcctgtattcaaatgcaggtgggctgacttcagattcaaattgtttgcttttgccagtggttctcaatcttgagcatgcaaacctggaggccttgttaaaattcagatagccccatcttcagggtctccaattcagtaggttggggccgccgagaatttgcctaaccagctccctggtgatgctgaggctgctggactgggaagactgggaaccaactgagaagacctttgtatttggctttctcacctccagataagggctttttaacttttattttgtgagacaaggtctcaatctctcactcacgctgaaatacagcttatgatcatggttcactgcaacctcaaactcttgggctcaagcaatcccctgcctcagcaatatgaataaacatattggaggccaggtgtgagactccacctcaaaaaaaaaaagtaaaggaatagggctgggcgcggtggctcacgcatataatcccagcactttgggaggccaaggcaggcagatcatctgaggacaggagttcgagaccaccctggccatcgtggtgaaaccccgtctctattaaaagtacaaaaaaaaaaaaagccggcatggtggtgggcacctgtagtcccagccactcgaaagctgaggcaggagaatcgcttgaacccaggagacggagattgcagtgagccgagatcacgccactgcactccagcctgagcaagagcaagactccctctcaaaaaaaaaaaaaaagtaaagaaataaaacaatggctactccatagagcagccccgagggctgctggttgctcatttttatggttatttattgattatatgctaaagaaggggtggattattcatgcctcccctttttagaccatatagggtaacattctggcgttgccatggcatttgtaagctgtcttggcgctggtgggagtgtagcagtgaggacgaccagaggtcattcgcatcaccatcttggttttggtgggttttggccgcggcttctttactgcttgtgccggcctctcatctcatcctgtgacttagaatgcctccaccacctgggaacacagcccagtaggtctcagcctcattttacccagcgcctactcaagatgragttgctctggttcaaaggcctctaacagaagctaaacacaggtgggggctttcaaagaagcagatccaatgcccactgcccttcctcactccccta

SEQ ID NO: 711562 - DNA, 631 bp, Homo sapiens
ttttaggtaagggataaagctgaggacactttcttattatagtgcctcaggcagactaaaatctgttgttttcggggaacactgatctgtttggggatctatcttttctttcaagtttcagttttattatgtggcatttagcatgagtgacttcggtttggtctggtctgttggggtcaaatgcaagacctcctttcaaaacaatggcctcctggccaggcayggtggctcacacctgtaatcccagagctctgggaggctgaggcgggaggatcatgtgaggccaggagttcaagaccagcctaggcaacatggtgaaaccctgttgttattaaaaatacaaaaattagccaggcatgctggcacatgcctgtagtcctagcttcttgggaagctgaggcacgagatttgcttgaacccaggaggcagaagttgcagtgagcagagatcacaccactgtactccaatctgagtgacagagtgagagactgtctcaaaaaaaaaaaaagtcctcccataatttttgtttaacagttattacttagtctcctttggtgttttttttccactaataattaattaagtttggcgagaaagcttttactgcgtcctataattttcgttataaagt

SEQ ID NO: 711563 - DNA, 1002 bp, Homo sapiens
tgtatgagtatggaagctctttacatgtctgggacccttaacatctcatctgtttaagaggaataattttaatacttaaagtatgtaagagccctagtacagaagccaattttagtagaattcttcaaattattgagtatttataatttaacatatttatattgtgtgtgtgtgtgtgtgtgtttaaatagtgcacccattctttacttatcttagaaatgacatcgtacgacttgggggaattgtcaaaggtcatgcaaccagtcaaaggcagaatgaaaacaaatacctcaagtttcttgatttgcaggcttgtactatttctaccccactactcttctccagcagatgttaagtgacagccaggcccataagaatttagatgctggctcttcatattttcttcactgaaagaattagcttcacagaaattgtccttgaagggtctaaagtggataaaagtaagcttcatccgaaatgaggagacatctaacaaattgtcaaactttctggaactgtatctcttatagcattattaagagaactgatatatttcatcatttgtaaagtgagtgacttcattgtcataaaggtagcacaaaccaccagagagcagatgtttgggtgaatatggatattttataayaggtggaatcatagtacagtatgaagagtcaaatcattgtgggtttgattctatactttggagcctaaatgaattgtatgaatttgccaaaattacttaactcacctgagtctcagtttcctagtcagcaaaatgggtatattatccctaatttaaaattaatgcaatatgaaataatgagcattatatatcagacaacaaataactagtacataaaaataaaaacattttattatccttctgcctttgaaagatgttgctttaacctctattgctgacaaccttttctgcaaaagaaactcagtggctgtgaagtcttcttaagcctatactaggaaatcaaatccagttgccga

SEQ ID NO: 711564 - DNA, 783 bp, Homo sapiens
caaggtacctaccaccagaagacactcaatggatgttgaggtcatttgctgattcattatttagctgatatttttgttctcctgtttttctttcatgtttttcattatgtaaccactagtcttaggttgaagacaattttttaagtcatttgagcatcagaaccaaccttcaggcagttgcttcacctgtaaatggaaaagctctgggtgtctttccacctttgaaacttgaagactctgattcattttttaaaattatttcttcttattattattttttgagacaaagttttgctcttgtcgcccaggctggagtgcaatggctcactgcaacctccgtctcctgggttcaagtgattctcctacctcagcctcccaagtagctgcgattacaggcacatgccaacacgcctggctactttttgtatttttagtagagacgggggtttcaccatgttggccagtctggtcttgaactcctgacctcaggtgatccacctgcctcggcctcccaaagtattgggattacaggcatgagccactgcacctggccaaagattctgattcaaaggcaattctagttagtgaaaccaccgactgsttcttccagcagaggcatgaatgtggtcagaggacaatagagatgcatccatcaaattattattaacttttcattggagttttctatgaaacatgagttatctccacttttgccctgtaccatttaaatttctattttcaaaagaaatggaaattttttaaattatctttctaattagacag

SEQ ID NO: 711565 - DNA, 606 bp, Homo sapiens
ggaaattgaaaatactcctgatggaagctacagagaggcaattcaattaatattttttcaagtgacaagagagggtgtaaaccactgccctgggaaatttaaagcctggaaaagttgacccacatgggaaggatggaggacctgggtttgttggctggaagagggaggatccagaactgaatgaatagctatgtttaggcctgtgaaaggtttggggaataacggatgctttctggatactacyttctttgaggacagaatagaaaataaacttaaaatgtagggttgattatattcagctgaaagaataactttctggtggttttagaatcggtttagaaagcagctaagggtgcttctgatctgaaggttttaaagacgaagccgacactcatctgtcagagccactgggatttggtccttttaagtggcaggaccttgctggaaaccagcagcatcctgagactccaaatagttcttctgtatgttggattgctaactggttagggcagacctgcttgtgcttgactgcccaacagcaatcaccagcccccctctgccttatgcactgtaaaggcccaaaggccagatttggactttctcagc

SEQ ID NO: 711566 - DNA, 2153 bp, Homo sapiens
  misc_feature 960, 961, 962, 963, 964, 965, 966, 967, 968, 969, 970, 971,972, 973, 974, 975, 976, 977, 978, 979, 980, 981, 982, 983,984, 985, 986, 987, 988, 989, 990, 991, 992, 993, 994, 995,996, 997, 998, 999, 1000, 1001, 1002, 1003, 1004, 1005: n = A,T,C or G
  misc_feature 1006, 1007, 1008, 1009, 1010, 1011, 1012, 1013, 1014, 1015,1016, 1017, 1018, 1019, 1020, 1021, 1022, 1023, 1024, 1025,1026, 1027, 1028, 1029, 1030, 1031, 1032, 1033, 1034, 1035,1036, 1037, 1038, 1039, 1040, 1041, 1042, 1043, 1044: n = A,T,C or G
  misc_feature 1045, 1046, 1047, 1048, 1049, 1050, 1051, 1052, 1053, 1054,1055, 1056, 1057, 1058, 1059: n = A,T,C or G
cacattgactgatatctcatgtgtccctaaaatgcataaaaccaggttataccctgagcacctcgggcacgtgtcatcaggacctcctgaggctgcgttatgggtatgtccttaaccttggcaaaataaacgttctaaattgactgagacctgtcccagatacttttaggttcatagcatcaaaatgttgcactttatttaacctttattacaaagcaggtccacttatctccatcatactgaaaaataacccagatctcagagaggttaaaaactatgcctgatctcacaccatcagaaaatggtggtgcagggatgtaaaggcaggtctgagatcaacacgtgggttttcaaagctaggctagatgtttgccaacccgagatgaatctgttaaatgcctgtctgccagcctgctgtcagatgacaggtcatgtgggaagtaagggtggtatcagggctctatgaaatacggcagctaaaatacatttctgttactgacgttgacttttaagtgtgatggttctagactgtcccatctacctgaatggattcaacgctgttgtaagctctcttcccctgcatctgccaaggtgtaagctcatgtgactgagcttgtcaatcttctacattgatgccaaggagttttccaattggatctgggtgttccactgccttgctctcattgaatagtcttgaagagatggatttaaattgtgtcgaggatattagtccaaagtgaatgaagtggagagtagacttctcgtttatgtccccagagtgataaatgagggagtgtaattttttttctaaggcaaagaaaatgggaaaccaacgtggatttcagacacatgagaaatagcttatgaatttagatatggctyggcagaaataaattgtacatctgttcattcattttaataaagtggagagatgcatgctgctgaagcccttggagaacnnnnnnnnnnnnnnnnnnnnnnnnnnnnnnnnnnnnnnnnnnnnnnnnnnnnnnnnnnnnnnnnnnnnnnnnnnnnnnnnnnnnnnnnnnnnnnnnnnnntgggttttaaattatgatcctataatagtagcattaaaatttgtaatgtagccagtgctttctgaattggagggaaaattcatttataaaataacagttcagactttggaatgtaaatgggaaaatgtaatttttcttggctagatatgaattagtcctgggaggatgctacaacctcttgaccataaaatatatttttaaaatcttatgagaaagttttcagaagccagcaaaacttctttgggcaatctctatttaggtaaattgtgcaggtatgaaacatatgcttaactggctttgttatttttgccttgaacttggtgtttctcgtataagaacaattacagattaatatttccatttgaaatgaatctagtctgttacaaatacaaaaatcatttttactcagtagcaggaacataaggaagagagcttttataggccagcaattaccagttaccatgaaaatttacgtattcaacaaagggcactgggttccttattacttatgctccttatgtttgatattggtgcaaatacaacaatcctgattgtaggtttcctgctgattctaaaagccagaagcattattaaaatttcttttaaaaaataggtaagtttaaaacccacagaaagcttttagacagattgagcaattttggttttatttcacaaatcaaccatcaaggtttcaggtgggaaaaaggtataaacaaaccaggagagctggctggccatgaataacacgggcccagctagaaaaaccccagattgcctcacagagatcttcgcctcctattgaaataccgactagatagagaggacacactccagcctgcaaatgtgcaaataaaaactacagactgggaagagcttgtggttagtcttagcatcaagggcaattgcctattgtctcaggtcagcttttgcccaaagatgtacgacacttcctcccaggtctgtaggaatcttgatatctcaagaaatcacatggataaaagggtctggaatgtgacttatcagtggagacagagaagagcgatgtgacaaacataaaaaataaactatccaggcagagccccggggctcacatc

SEQ ID NO: 711567 - DNA, 2153 bp, Homo sapiens
  misc_feature 960, 961, 962, 963, 964, 965, 966, 967, 968, 969, 970, 971,972, 973, 974, 975, 976, 977, 978, 979, 980, 981, 982, 983,984, 985, 986, 987, 988, 989, 990, 991, 992, 993, 994, 995,996, 997, 998, 999, 1000, 1001, 1002, 1003, 1004, 1005: n = A,T,C or G
  misc_feature 1006, 1007, 1008, 1009, 1010, 1011, 1012, 1013, 1014, 1015,1016, 1017, 1018, 1019, 1020, 1021, 1022, 1023, 1024, 1025,1026, 1027, 1028, 1029, 1030, 1031, 1032, 1033, 1034, 1035,1036, 1037, 1038, 1039, 1040, 1041, 1042, 1043, 1044: n = A,T,C or G
  misc_feature 1045, 1046, 1047, 1048, 1049, 1050, 1051, 1052, 1053, 1054,1055, 1056, 1057, 1058, 1059: n = A,T,C or G
cacattgactgatatctcatgtgtccctaaaatgcataaaaccaggttataccctgagcacctcgggcacgtgtcatcaggacctcctgaggctgcgttatgggtatgtccttaaccttggcaaaataaacgttctaaattgactgagacctgtcccagatacttttaggttcatagcatcaaaatgttgcactttatttaacctttattacaaagcaggtccacttatctccatcatactgaaaaataacccagatctcagagaggttaaaaactatgcctgatctcacaccatcagaaaatggtggtgcagggatgtaaaggcaggtctgagatcaacacgtgggttttcaaagctaggctagatgtttgccaacccgagatgaatctgttaaatgcctgtctgccagcctgctgtcagatgacaggtcatgtgggaagtaagggtggtatcagggctctatgaaatacggcagctaaaatacatttctgttactgacgttgacttttaagtgtgatggttctagactgtcccatctacctgaatggattcaacgctgttgtaagctctcttcccctgcatctgccaaggtgtaagctcatgtgactgagcttgtcaatcttctacattgatgccaaggagttttccaattggatctgggtgttccactgccttgctctcattgaatagtcttgaagagatggatttaaattgtgtcgaggatattagtccaaagtgaatgaagtggagagtagacttctcgtttatgtccccagagtgataaatgagggagtgtaattttttttctaaggcaaagaaaatgggaaaccaacgtggatttcagacacatgagaaatagcttatgaatttagatatggcttggcagaaataaattgtacatctgttcattcattttaataaagtggagagatgcatgctgctgaagcccttggagaacnnnnnnnnnnnnnnnnnnnnnnnnnnnnnnnnnnnnnnnnnnnnnnnnnnnnnnnnnnnnnnnnnnnnnnnnnnnnnnnnnnnnnnnnnnnnnnnnnnnntgggttttaaattatgatcctataatagtagcattaaaatttgtaatgtagccagtgctttctgaattggagggaaaattcatttataaaataacagttcagactttggaatgtaaatgggaaaatgtaatttttcttggctagatatgaattagtcctgggaggatgctacaacctcttgaccataaaatatatttttaaaatcttatgagaaagttttcagaagccagcaaaacttctttgggcaatctctatttaggtaaattgtgcaggtatgaaacatatgcttaactggctttgttatttttgccttgaacttggtgtttctcgtataagaacaattacagattaatatttccatttgaaatgaatctagtctgttacaaatacaaaaatcatttttactcagtagcaggaacataaggaagagagcttttataggccagcaattaccagttaccatgaaaatttacgtattcaacaaagggcactgggttccttattacttatgctccttatgtttgatattggtgcaaatacaacaatcctgattgtaggtttcctgctgattctaaaagccagaagcattattaaaatttcttttaaaaaataggtaagtttaaaacccacagaaagcttttagacagattgagcaattttggttttatttcacaaatcaaccatcaaggtttcaggtgggaaaaaggtataaacaaaccaggagagctggctggccatgaataacacgggcccagctagaaaaaccccagattgcctcacagagatcttcgcctcctattraaataccgactagatagagaggacacactccagcctgcaaatgtgcaaataaaaactacagactgggaagagcttgtggttagtcttagcatcaagggcaattgcctattgtctcaggtcagcttttgcccaaagatgtacgacacttcctcccaggtctgtaggaatcttgatatctcaagaaatcacatggataaaagggtctggaatgtgacttatcagtggagacagagaagagcgatgtgacaaacataaaaaataaactatccaggcagagccccggggctcacatc

SEQ ID NO: 711568 - DNA, 1812 bp, Homo sapiens
acacamagacatgcacacacacacacacacacacacacacacgcagcttgaaataaacacatattccagctcttgtttttagttacctctttgtttctatcaacttgggggctctcttttttctcataagcttagctatttattataaatgcttttcaaatagtttatccagtattttaacatacttacagtgatagtgttaaatatttcttagtctgccatcttgctacagtgagaaattctgtctttactccctaattaaagaaaaaagaaagaaaaaagaagaaaagaaatatcctgaatcatatacatttttatattacagcagaatgcaaaaaaatgtgaagatctgtgaacacagaaataactaagttatggattggtatgggcaacttaaaagaaaatccctatttaaaatacaactattgtgaagaagtttatctaattaaataacgatcagtatgaagcaagttcttcctaagagctacttcacttgataatgtatgaatgactatttttatagaaaaatgttgtgccaagttagttgctctctgcgttaatattacagtcagaataatagagaacaataaaattagttcccactgcctaagttttatactttaatatgacaaagtaatgttttttatttatcttttttcccccatgcatagtcttctgttgacaaccccaatgtttcttgtgtacatctgcaaccaaataaataacgagctaacaatttggcacaatatacaccattttatggataatcatgctcatttacaaaggtaagcatgtttcttcatccaatagttttctcaaagttcctccaaaataaaaattatgttaacacagagtagcttaactgccctagaaatgttgacattgtactgatgctatctgaaggactcggtatgtttctggctttaagaaaactgctggtaggaatattatgacaatagatatgctaatattctttgctttataaattataagtacccttaaaggacagtgccaatactagttcatttttgggcgtgaaagaaaaacaaacaaacaaataaaatttttctagtccagcctcaggcgttttagaagaaggtgttgtgcccatggtcatcagcaccagaaattagcaaatgatcttgctgaaagttttgcaatcctagctctgaaattcaccaaaaacatttgcttttgtttgttttgcttaatttttgccttcttagctggttacaggaatttcttgtctttgtttcaacatttcggtccctgcatgtcctccttgtcttttcctagaggaggcatagtttaaaaagcaaggttaaatgagatctttcctttatattttttatcattctcttcctctatacaacatatcatttgtgtaaggcacccacccagtcccttccataggaatgactaatatcctttttccatggctctgtttactgtttcctgccagttactcaagttcttagcaatatgccacttcttcaaagaacctttccctgaaacgggaggtcacaaccaaatgctctttccacctgttctcttggtacctgttcttcatcccataatgacgtgcatagttcattattcttcattaagcagtaaagaaggttatttatttaaagtaggatattctgtgctaccaaagactgtatagaatgtacaattcaatcacattcctagaatgtagaagacaatcagaagttacttttaaatgagtgaatgtgttaatgaaggaatccatcaataaattgaccaaagtttgagtcacactcaatggacaattaggaagaataaaattct

SEQ ID NO: 711569 - DNA, 1812 bp, Homo sapiens
acacacasacatgcacacacacacacacacacacacacacacgcagcttgaaataaacacatattccagctcttgtttttagttacctctttgtttctatcaacttgggggctctcttttttctcataagcttagctatttattataaatgcttttcaaatagtttatccagtattttaacatacttacagtgatagtgttaaatatttcttagtctgccatcttgctacagtgagaaattctgtctttactccctaattaaagaaaaaagaaagaaaaaagaagaaaagaaatatcctgaatcatatacatttttatattacagcagaatgcaaaaaaatgtgaagatctgtgaacacagaaataactaagttatggattggtatgggcaacttaaaagaaaatccctatttaaaatacaactattgtgaagaagtttatctaattaaataacgatcagtatgaagcaagttcttcctaagagctacttcacttgataatgtatgaatgactatttttatagaaaaatgttgtgccaagttagttgctctctgcgttaatattacagtcagaataatagagaacaataaaattagttcccactgcctaagttttatactttaatatgacaaagtaatgttttttatttatcttttttcccccatgcatagtcttctgttgacaaccccaatgtttcttgtgtacatctgcaaccaaataaataacgagctaacaatttggcacaatatacaccattttatggataatcatgctcatttacaaaggtaagcatgtttcttcatccaatagttttctcaaagttcctccaaaataaaaattatgttaacacagagtagcttaactgccctagaaatgttgacattgtactgatgctatctgaaggactcggtatgtttctggctttaagaaaactgctggtaggaatattatgacaatagatatgctaatattctttgctttataaattataagtacccttaaaggacagtgccaatactagttcatttttgggcgtgaaagaaaaacaaacaaacaaataaaatttttctagtccagcctcaggcgttttagaagaaggtgttgtgcccatggtcatcagcaccagaaattagcaaatgatcttgctgaaagttttgcaatcctagctctgaaattcaccaaaaacatttgcttttgtttgttttgcttaatttttgccttcttagctggttacaggaatttcttgtctttgtttcaacatttcggtccctgcatgtcctccttgtcttttcctagaggaggcatagtttaaaaagcaaggttaaatgagatctttcctttatattttttatcattctcttcctctatacaacatatcatttgtgtaaggcacccacccagtcccttccataggaatgactaatatcctttttccatggctctgtttactgtttcctgccagttactcaagttcttagcaatatgccacttcttcaaagaacctttccctgaaacgggaggtcacaaccaaatgctctttccacctgttctcttggtacctgttcttcatcccataatgacgtgcatagttcattattcttcattaagcagtaaagaaggttatttatttaaagtaggatattctgtgctaccaaagactgtatagaatgtacaattcaatcacattcctagaatgtagaagacaatcagaagttacttttaaatgagtgaatgtgttaatgaaggaatccatcaataaattgaccaaagtttgagtcacactcaatggacaattaggaagaataaaattct

SEQ ID NO: 711570 - DNA, 1812 bp, Homo sapiens
acacacagacaygcacacacacacacacacacacacacacacgcagcttgaaataaacacatattccagctcttgtttttagttacctctttgtttctatcaacttgggggctctcttttttctcataagcttagctatttattataaatgcttttcaaatagtttatccagtattttaacatacttacagtgatagtgttaaatatttcttagtctgccatcttgctacagtgagaaattctgtctttactccctaattaaagaaaaaagaaagaaaaaagaagaaaagaaatatcctgaatcatatacatttttatattacagcagaatgcaaaaaaatgtgaagatctgtgaacacagaaataactaagttatggattggtatgggcaacttaaaagaaaatccctatttaaaatacaactattgtgaagaagtttatctaattaaataacgatcagtatgaagcaagttcttcctaagagctacttcacttgataatgtatgaatgactatttttatagaaaaatgttgtgccaagttagttgctctctgcgttaatattacagtcagaataatagagaacaataaaattagttcccactgcctaagttttatactttaatatgacaaagtaatgttttttatttatcttttttcccccatgcatagtcttctgttgacaaccccaatgtttcttgtgtacatctgcaaccaaataaataacgagctaacaatttggcacaatatacaccattttatggataatcatgctcatttacaaaggtaagcatgtttcttcatccaatagttttctcaaagttcctccaaaataaaaattatgttaacacagagtagcttaactgccctagaaatgttgacattgtactgatgctatctgaaggactcggtatgtttctggctttaagaaaactgctggtaggaatattatgacaatagatatgctaatattctttgctttataaattataagtacccttaaaggacagtgccaatactagttcatttttgggcgtgaaagaaaaacaaacaaacaaataaaatttttctagtccagcctcaggcgttttagaagaaggtgttgtgcccatggtcatcagcaccagaaattagcaaatgatcttgctgaaagttttgcaatcctagctctgaaattcaccaaaaacatttgcttttgtttgttttgcttaatttttgccttcttagctggttacaggaatttcttgtctttgtttcaacatttcggtccctgcatgtcctccttgtcttttcctagaggaggcatagtttaaaaagcaaggttaaatgagatctttcctttatattttttatcattctcttcctctatacaacatatcatttgtgtaaggcacccacccagtcccttccataggaatgactaatatcctttttccatggctctgtttactgtttcctgccagttactcaagttcttagcaatatgccacttcttcaaagaacctttccctgaaacgggaggtcacaaccaaatgctctttccacctgttctcttggtacctgttcttcatcccataatgacgtgcatagttcattattcttcattaagcagtaaagaaggttatttatttaaagtaggatattctgtgctaccaaagactgtatagaatgtacaattcaatcacattcctagaatgtagaagacaatcagaagttacttttaaatgagtgaatgtgttaatgaaggaatccatcaataaattgaccaaagtttgagtcacactcaatggacaattaggaagaataaaattct

SEQ ID NO: 711571 - DNA, 1812 bp, Homo sapiens
acacacagacatrcacacacacacacacacacacacacacacgcagcttgaaataaacacatattccagctcttgtttttagttacctctttgtttctatcaacttgggggctctcttttttctcataagcttagctatttattataaatgcttttcaaatagtttatccagtattttaacatacttacagtgatagtgttaaatatttcttagtctgccatcttgctacagtgagaaattctgtctttactccctaattaaagaaaaaagaaagaaaaaagaagaaaagaaatatcctgaatcatatacatttttatattacagcagaatgcaaaaaaatgtgaagatctgtgaacacagaaataactaagttatggattggtatgggcaacttaaaagaaaatccctatttaaaatacaactattgtgaagaagtttatctaattaaataacgatcagtatgaagcaagttcttcctaagagctacttcacttgataatgtatgaatgactatttttatagaaaaatgttgtgccaagttagttgctctctgcgttaatattacagtcagaataatagagaacaataaaattagttcccactgcctaagttttatactttaatatgacaaagtaatgttttttatttatcttttttcccccatgcatagtcttctgttgacaaccccaatgtttcttgtgtacatctgcaaccaaataaataacgagctaacaatttggcacaatatacaccattttatggataatcatgctcatttacaaaggtaagcatgtttcttcatccaatagttttctcaaagttcctccaaaataaaaattatgttaacacagagtagcttaactgccctagaaatgttgacattgtactgatgctatctgaaggactcggtatgtttctggctttaagaaaactgctggtaggaatattatgacaatagatatgctaatattctttgctttataaattataagtacccttaaaggacagtgccaatactagttcatttttgggcgtgaaagaaaaacaaacaaacaaataaaatttttctagtccagcctcaggcgttttagaagaaggtgttgtgcccatggtcatcagcaccagaaattagcaaatgatcttgctgaaagttttgcaatcctagctctgaaattcaccaaaaacatttgcttttgtttgttttgcttaatttttgccttcttagctggttacaggaatttcttgtctttgtttcaacatttcggtccctgcatgtcctccttgtcttttcctagaggaggcatagtttaaaaagcaaggttaaatgagatctttcctttatattttttatcattctcttcctctatacaacatatcatttgtgtaaggcacccacccagtcccttccataggaatgactaatatcctttttccatggctctgtttactgtttcctgccagttactcaagttcttagcaatatgccacttcttcaaagaacctttccctgaaacgggaggtcacaaccaaatgctctttccacctgttctcttggtacctgttcttcatcccataatgacgtgcatagttcattattcttcattaagcagtaaagaaggttatttatttaaagtaggatattctgtgctaccaaagactgtatagaatgtacaattcaatcacattcctagaatgtagaagacaatcagaagttacttttaaatgagtgaatgtgttaatgaaggaatccatcaataaattgaccaaagtttgagtcacactcaatggacaattaggaagaataaaattct

SEQ ID NO: 711572 - DNA, 1812 bp, Homo sapiens
acacacagacatgcacacacacacacacacacacacacacacgcagcttgaaataaacacatattccagctcttgtttttagttacctctttgtttctatcaacttgggggctctcttttttctcataagcttagctatttattataaatgcttttcaaatagtttatccagtattttaacatacttacagtgatagtgttaaatatttcttagtctgccatcttgctacagtgagaaattctgtctttactccctaattaaagaaaaaagaaagaaaaaagaagaaaagaaatatcctgaatcatatacatttttatattacagcagaatgcaaaaaaatgtgaagatctgtgaacacagaaataactaagttatggattggtatgggcaacttaaaagaaaatccctatttaaaatacaactattgtgaagaagtttatctaattaaataacgatcagtatgaagcaagttcttcctaagagctacttcacttgataatgtatgaatgactatttttatagaaaaatgttgtgccaagttagttgctctctgcgttaatattacagtcagaataatagagaacaataaaattagttcccactgcctaagttttatactttaatatgacaaagtaatgttttttatttatcttttttcccccatgcatagtcttctgttgacaaccccaatgtttcttgtgtacatctgcaaccaaataaataacgagctaacaatttggcacaatatacaccattttatggataatcatgctcatttacaaaggtaagcatgtttcttcatccaatagttttctcaaagttcctccaaaataaaaattatgttaacacagagtagcttaactgccctagaaatgttgacattgtactgatgctatctgaaggactcggtatgtttctggctttaagaaaactgctggtaggaatattatgacaatagatatgctaatattctttgctttataaattataagtacccttaaaggacagtgccaatactagttcatttttgggcgtgaaagaaaaacaaacaaacaaataaaatttttctagtccagcctcaggcgttttagaagaaggtgttgtgcccatggtcatcagcaccagaaattagcaaatgatcttgctgaaagttttgcaatcctagctctgaaattcaccaaaaacatttgcttttgtttgttttgcttaatttttgccttcttagctggttacaggaatttcttgtctttgtttcaacatttcggtccctgcatgtcctccttgtcttttcctagaggaggcatagtttaaaaagcaaggttaaatgagatctttcctttatattttttatcattctcttcctctatacaacatatcatttgtgtaaggcacccacccagtcccttccataggaatgactaatatcctttttccatggctctgtttactgtttcctgccagttactcaagttcttagcaatatgccacttcttcaaagaacctttccctgaaacgggaggtcacaaccaaatgctctttccacctgttctcttggtacctgttcttcatcccataatgacgtgcatagttcattattcttcattaagcagtaaagaaggttatttatttaaagtagsatattctgtgctaccaaagactgtatagaatgtacaattcaatcacattcctagaatgtagaagacaatcagaagttacttttaaatgagtgaatgtgttaatgaaggaatccatcaataaattgaccaaagtttgagtcacactcaatggacaattaggaagaataaaattct

SEQ ID NO: 711573 - DNA, 957 bp, Homo sapiens
gtctatgcactcaaatcattgaaggccaatgtgaaaaaacaaacaaacaacaaaaaaaaaacctctgagcactcttaatttttatttttgtcttatttgttcaaatgccaartataggcatcttacaatgataccatgtgtgtccccagaaaacttcacattttggaaaaattgcacactaaaaataatagggtctttgggaaaaatgcattaataataagatatttaaatccaatacaggtttgaaatcaagactctaacacaaacagttagaatcctaataagaaattatgctattatggttcaatttccatgggcatttgccataaaatttcagtcattccaacccttgtggccttttaccatggagtcatgctttatttttcttttaaaatgaatgtccttgaaacagtcacttctatagaaagaagtttaaccaaaacttaaaatactatccaagggtagcctttttaatcattaattttctttttaacatgagagaaatatcttcaggcttcatcttttcttgaaactccccaaagagcttaacatatagaaaatctagcagtttttcaaaccactaaataagtcacattttacacaaatgaaaggcatttctgcagattatataggttttatcttaaagtcttaatatattatgaagttttttctctattagtaagaaagcttgactataatgggtttaaaacattagcatgttgggggaaattgcataaacccacataacttccactgacctcagcctcctctttaccagtcatggtagagataattaacattaaagaaacacattatgggagaacagactatgattgcatcattattataatgacaacaaatgtaacccttatttcctattaaaaaacactttcgattaatgataaggaatgttctaaaagactagattgttgcagagttgaataaatatccatgaaa

SEQ ID NO: 711574 - DNA, 1244 bp, Homo sapiens
gcaaaaaatccatctattgtcacaacaatgcttgtcttttcatggtgcataggaaggaaacaagtgtcctttgagaatctgtgactatgctttacaaggtaaggggatttatagttactatctaccaaattgagaaacctctaagctgaaaaattaaaatcaaacttagtctcaggccaggaatatccctgtggcatttggcaggagcaaacccaaaatgctctggagagccacattttcacagagggcacctagaattcctgtaaataaagccctgttgaggatgtacccacacattacaaactaaagaccaagagtgaatgtagataaagcaaatagcagatttatacctttgagaacttcaggtgacagaacaatctggtagaaactgcaaataagtatgcttaaaatgattaaagacataaagaaaagtgtcatgcaaaaatagcaaagcgttktggaaaaaaaaaagagaataaactagaggaggataaaaaccatgcattcagatcaagaatgcaactttaggctgggcatggtggctcatacctgtaactccagcactttgggaggccaaggtgggaggatcacttgaggctaggaatttgagaccagcctaggcaacatagtgagactctacctctaaaaaaaataaaaaaataaaaaataaaaaaattacctgggtttgggggtgcacctctgtagtcccatctactcaggaagctgagaggggaggagtgcttgagcctaggatgttgagattgctgtgagctatgatcatgccactgtactccagcctgggcaacagagcgagacccccatctcaaaaagaatacaacttcttcccaaatgtgtaggactcctggtatgatatcaggatttaggaagcaatcatacttttttcttttctctctttctgttaaatatgttatttatatgggacaaatctctcacttgctctgtcagtgacatcaaatatataagggcataatgacggctccaaagcaagaaacattttccatatttaaaactgatgatcagctcataagacattctctctgttatgattgttccaatgtctcataaaggaaaatatcatctcagtgtgatttctttgcttctttgcactgttcagctcaatgttctctttccagctgggcacaaattgaggacactggccttttcaatggtgggcaaaaagccataatgggagggaggtggcaagcatcaaaggaaagctcaaa

SEQ ID NO: 711575 - DNA, 1278 bp, Homo sapiens
gtaggggccccgccagcgtggattgcatgcttggcctggtcctggtgctcaagaaggctcttccttttgtcatgggacccatactctaagcatcctcaattacatacaggatcagagagggcaagtcatttgcccacggctccacagctgcctgaccccacaacccgtgctgtaaacacacatgctgcaggcatcagtgtggtggaattgaaaacagccacgaggcaccttttcctgtgcattttggggaacttgccctccatctggcagcctcaatccaaaatttctccctcccccgtttcccagttgctgagaaagggctccaccacccatgctgccacccgcacgaggaaccaggtgtccccgcccatgctctgccctgaggctcagcctccatcagttctcatcagggcgatgccaggcccccaggccgggccctaggcccagtcttgccctctgatgccacctgctcagctccagggcccaggtgtgctggcgcctgtgtgcaggggtggcccagtgtgaggacagcaggtagctacccctcccctgtacacagcccaagtgaccaacacagatgtcgactgggccttcactgagccttcttagccatcccctgggacccggcgagcacccgcaccccagcctctggctacaccatggggcacaggcctgctcccccagcctctcctctacttggtcacattgcccattgggtttttttctttttttttgttttttttccttttttgagacagtctcactgtcacaaggctggagtgtagtggcgcaatctcgtctcactgcaacctccgcctcccgggttcacaccattctcctgcctcagcctcccaagtagctgggaatacaggtgtgcgccaccacgcctggctaattttttgtatttttagtagagacggagtttcaccatgttggccaggatggtcttgatctcttgacctcgtgatccatccgcctcagcctcccaaagtgctgggattacaggcgtgagccaccrtgcccggcctgcccaggggttttcaaaccatgaaaagatcaagtgaattctttgcagagcacaagagactcagctggggctcaaacccggggatgctggactcagcccctggaggcccctgcccaagcctgggcctggaggagaaaggcaatggtcgaaggccacctgggttagcccggctcagctaaggccacagctgctgccatcccaggcttcctggccagccctgcaccgacacatcttgcccactcccagggaag

SEQ ID NO: 711576 - DNA, 534 bp, Homo sapiens
tccgtggccaacggatgcaggcccaataagcatgcgcccaactggccatccgcacccgggacccacctggaggggtcctgatcaccccacttggtcctggcctcaggctctgaggggcacctcctcttccctcccccatgtccccatcctgggtggaactccaggacctgccagccttagtggcaacttcccctaatactcccacracaacagggtggccagggtctgggctcaagtcctgggtgcccgggtggcaggcagcaagggtgtgagcagactacatagcctgtgcacggggcccacgttccagagccaccccaggggagcatggctcctatcctgccagccttaggagggcgtgaatcgtcggagaggatgaggccgggaaggcgtgcaggccctcagccccacgcgtgacactcagcagcaggagggaataaaaagccacctgtggggtggccactgccaagggctccccgacacaagcacagagcacagcctggccttggctgcagcaccacagcagatgccttt

SEQ ID NO: 711577 - DNA, 653 bp, Homo sapiens
tgtctaggctttgtgaatatagatttttcttccctactccttatttttatttctgttataaatttcctattgttcctattggttttaaacttcaggcctgtgactttatgagtgtctagtgtttccatgaatgagcttcactgtccctagagacttcttgaaaatgaagttgtatagaaagacttatycaacatataccttctcctaacacagcagcacaatttctactagaataggaaaataaaaaagtttattttccagtcatcttcttcttcctctgtccatttaaatgagctttacctttgagtatgattttgagtcatgtttataatgtggaatttaccatgtagacaggagaaaggaagaggcaagaatagagaagcaggaagaaatgcaaagagacagtaaaagataagttctgtgtaggctggcaattcaaggaaagagacagtgaatgcccgcctaagcaagtgactggcttgggcaatgctgagctgagagattatttaaatgtaaattaaagagtatataatggaggccgggcacggtggctcgcgcctgtaatcccagcactttgagaggccgaggtgggcggatcatctgaggtcgggagttcggcccagcctgaccaacgtggagaaacccaatctcta

SEQ ID NO: 711578 - DNA, 653 bp, Homo sapiens
tgtctaggctttgtgaatatagatttttcttccctactccttatttttatttctgttataaatttcctattgttcctattggttttaaacttcaggcctgtgactttatgagtgtctagtgtttccatgaatgagcttcactgtccctagagacttcttgaaaatgaagttgtatagaaagacttattcaacatataccttctcctaacacagcagcacaatttctactagaataggaaaataaaaaagtttattttccagtcatcttcttcttcctctgtccatttaaatgagctttacctttgagtatgattttgagtcatgtttataatgtggaatttaccatgtagacaggagaaaggaagaggcaagaatagagaagcaggaagaaatgcaaagagacagtaaaagataagttctgtgtaggctggcaatwcaaggaaagagacagtgaatgcccgcctaagcaagtgactggcttgggcaatgctgagctgagagattatttaaatgtaaattaaagagtatataatggaggccgggcacggtggctcgcgcctgtaatcccagcactttgagaggccgaggtgggcggatcatctgaggtcgggagttcggcccagcctgaccaacgtggagaaacccaatctcta

SEQ ID NO: 711579 - DNA, 613 bp, Homo sapiens
tggtggtacgtgcctatagtcctagctacttaggaaactgaggtggggggattgtttgggcccaggtgtttgattccagtttggatagcatagtggtaccctgtctccaccaaaaacaacaacaacaaaaaacaagtaatacaagtgctgttagtttgaaagtgatgatctcatgtacctccattgcatttatgatcagagggaaacactactatgtagaataaatttccagaggcattttcttagtgttgatcaccccatctatctttttgcttttagaattttattaggacggtaatgcagtcttagagttttatcttcaactgcatctaatgccttctatattaattgaatcagggtcccagaacaaaaaaaggtaatacatttaaaagggaaaattaaagatagtttaacaaaacaactacttaggaaactgtcattcagggtaaggaaatgaacaaagtatggagagtcaamcttggtttagaaataacaagaagttattgccattcctaggtcttaggtgtaagcagatgacattattgaaatcttgagagagttttaattatgggagatagactttaaagaaggaatgtggccttgaataatcaca

SEQ ID NO: 711580 - DNA, 622 bp, Homo sapiens
gtattttaataatagaagagggactaatgtttcaagcacacatctcctgcccaccatggccttcccacacgamatatttttcatgagttggggcctattcctatgttatcacttggttttggtggataattctgaaacttacaataattttatttttctgtattgttttcctgattgaaatcagttgagatacttataaaggaaatttctagggatgctaaaacaacataccataccccaatattagtatcttccagcaacaaagggttatttcttttcattccgcagtccattgcggttggtttgcactcagcttcacagcttctccatcaggaaatcaggctgactaagcagccccgcttcaaacattacagttgccttactggggattagtatactaacaattaaaacctccagcccagcagtgagtaatgatgtttcttccacaatgtattgcacaaaaccattcacatggttcccatcacttctaaggggaatgggaagtgacatcctgctacatgtcccaaggcagagctggacatatttggtgaacatcactaataccccaaatagcattagctacatattattatgataatgcagtaatcactgtatagctgta

SEQ ID NO: 711581 - DNA, 1513 bp, Homo sapiens
tcctgaagcccacatcctcttgggatataaaaaattactagcactgtctctagagttagactttttgagtttgaatactagctcttacctgttaactgtgtgctggaatttttctaacatcttcaaatctcagttttctcatgcataagtaaaataatagttaattcttaagattgttttgagtttggaatgatttttttagagcattattctcaacgtcaaacacaaagtcagcactcaataaatggtgtcagtgacgatggtggtgatgattaggtgatgatgattctgctagtttattcttacataaacgttacttttgtgaaaagaataatttaaaattcttttaacaaacaattccatttcttaatagggaggaacaatgtagtataactttttttactgtattgttaatgttctggactacctgtaattgttatagatgatttttttccaatctaattatatacccctaaaaggaaaagagaaattaaatcagcatcaatacatgatttaaacaataaaacatccagaaagttatttcagaatacattgagtttcaataattaataactcattgatagaaatagtgcttaatatattacaattgagtcctagctcatatttcagacacacaactaatatttaaatataatatgttatactcttgacatttgtgcagacaactcatgaactagagcccatgatttattcacatctgttataacacattctgataatttatttggaagaaagcaatctgcattaatcatttattaattattaataaaatataagtgctgcattaaagaactgctgttcaaaaataaccttttcttgaagccaaggacttatttattttcaccctgcaatttgtaaagattaatcaccttttaaggcattgtcctccagtttgaccctgtgaacctttgagggaatacctctcacattcagataggattgcatctgttagagattgaattgtttctcctaaaagagatacgttgaagtcaaaattcctgctagctcagaatgtgatcttatttgtaaataaagtgaggcagatgtatttagttgaggtcatgctgcagtagcgtactcccctattccaatatgtctggtgcccttaaaagaatttgtgaagaygcagagacatggggcgaataccatgtgaagatagaggcagagattagagtgtattagagtgatgcatttataatccaagaaatgccaaggattgctggccatcaccagaagttaggagagagcaacagaacagagtcctgatgccaggcgcggtggctcatgcctgtaatcccagcactttgggaggccaaggcaggtggatcacctgaaatcaggagtttgaggccagcctggccaagatgatgaaaccatatctctaccacaaaatacaaaaattagtctgtgtggtggcgtgagcctgtaatcccagttacttgggaggctgaggcatgggaatctcttgaacccgggaggcagaggttgcagt

SEQ ID NO: 711582 - DNA, 610 bp, Homo sapiens
aaaaaaagaaaaaaaagtttgtttatgtgaacataggaaaacaaacacaagccaatttaaatggtacctaagagcctaaaagtgtctgcctgtcagcagttcatctgagacaagcagtgttacygatttcttgtttccttctgaagatattctaagcctattccctatcccatttagctgtgtgctctttaaagacagattcttcccatattattacatatacacttacttgattcttttttaaacagctccctcattctttttattttatttattttttttgagatagagtctcgctctgtcacccaggctggagtgtagtggcatgatctggactcactgcaaccctcacctcccgggttcaagcaattctcaagcctcagcctcccttgtagctgggactacaggcacctaccaccacgcctggctaatttttgtatttttagtagagatggagtttcaccatgttggccaggctggtcctgaactcctgacctcaagcaatctacccacctcggcctcccaaagtgctgggatttaggcatgagccaccgtgcccagcccttcatgatttttaatttttgcatcattttccattgagtggatgccc

SEQ ID NO: 711583 - DNA, 973 bp, Homo sapiens
gtgtcctggtctgatttgccctgtcccaacgttggcccagccctgctctggcacttcctgtcatgccctgtccctggtctgagcattggccctggccctgtcctgcttctggccctgccccagagttgaccaggcactgccatggcccagtcctgcattgccctgcccttttctgccctggtgctgccatggccctgcttgggccctagctctgcctcgactctggacctgccctgactctgctcagccctggatctaccctgactctgccttggtgttgccctcccatctctatggcctggctctggccctgccttgcacaggccatgctctgccctgcatgtcccagcctgggcccagcccttgccctaccatatttctgaccccacccgtacccttgttctggccttgaccctgccgtggcattctcctggcccttccttggtcctgccctgcccttccatgccctggcctttccctcaccctgcactggtcctgccctgccctggcagtgccttggccctggccctgccttctcctggccttgcyctttcctgccctggcctgaccccaggcctaccgagtccatgaaatgaccctggacctgccttgccatcatctgtcctggccctgtattgtccccaccatgctctggtccagcgcttacctggccctgttgctagtcctgccactgctatggccctgccctgtttttggccatgacctgtgctaccctagccctgccccgccttggccttggccctaccgtggccttttcctaccctggcctggccgtacactggccatttctaccctggccttgcccttccctggtcttgccctgccctggccttgccctgccctggccttggctttgccttatcctggtcctggttctgccctggccctgccctttctctggatcctctctggttctgccttctccctggccctgcccttgctctggccctgt

SEQ ID NO: 711584 - DNA, 1334 bp, Homo sapiens
ttggccccaggactgccccaggggtgggaaatattgagcaggacccaaggggccctctagctcagcattggaaaaaaatcactctgcacctgaagaggccacagtcccatattacagcccaactctcatgaaactcacttttgcataactaagtatctgagctggtgtcagggcccccaaaagcagtcatggtcgctggctcagagacctgttccagggaggtggtcccccagtagactgcccaggaaggacctgaagaactgagggccctagagtcctgaggaccctcctgggtggaaggatactgatctaggcctattccccactggaaggagctatggggcagcacccaggactagaggacaacgtccatgtacctacccattactgctggggcctggcctttccagctggccctgcttgtggctcaggatccctgatgttaggaggtggtacaatctttagggtgtgagcccctccagagtctggggtgtgctatgcatttatccatccattcattcatcaacatttatcaatgtctcctaggagccagagatgactcaggcaagttggatccagttgtgaagcctcccgttcccttccaagggatctagacagtatttaacaggaggggcacttgttaaatgctgtccaggggtttttcttttttctttttctttctttttttttttttaaagagacagggtcttatgttgcccaggctggtctggaactcctggcctcaagcaatccccctgccttgcactcccaaagggctgggattataggtgtgagccaccatctatgccagccaaggtttgtgttttagaaagatccctggcaggcaatatggagagtgatttagagcccagggagcttattaggaggaggtgagggagggtctacctgggcagtgtgtcaggaagacagggaaggacagatgtggggtgagggcagaggacagtcagcacatcggtgcygccaaccctttcctctcatggcttcagcaatgctgctctcaccggttcccaccacacactgtgtgcgtaaatagatggaggggtggtgggagggatgggggatgggtgtttgggctcaggggcgaatcttggaccgagcactgtgaggtgacggtggggccaaggcttgcatctccccacccacctgtccactgccattgtggagcagccagtgtggaacagccaggtgcgggtggggactgcaggtgtcctccccagtccagcaggaaaccactgactcatgtctgacagctctcagcctggatgggctcccggaggctgttagtcacctgtgaaacaagggcacgtgatccc

SEQ ID NO: 711585 - DNA, 575 bp, Homo sapiens
ctgactgacttactactctgactactcaagtttgttctctaaacatgactctaacaaatgcccaacaggctctccttgaatagagttgcaggaggttacagaaataatgaaaggacatgaatcttcttcccctgtgcaaacacgggaacatggctcccctgggtacaaggaagccggtgctcactaggatctgacatatggaacaccacatttaaaaataacaagactgaagatgctgtattgcttttacttaccccatccatccacctcctcacatcctaaatccccttatcatttaataaagacagccacctgtttggctcaagaacttaagccagcctggctgaagtggaagggagttggagggggagtgtagacagggaactactctgtgtgtggtctctcccactggactttccgattatggtgaagtatagaggcaacttgcttcttctccatccctatcctcagctctcagtttgaagaaaaccttcacgttgttgctgctaaccgctaatagcatgattccatatctccagcttctaatggastttagaaaagccttatgttctctg

SEQ ID NO: 711586 - DNA, 609 bp, Homo sapiens
aagaaaacttatacctggtttatagatggagagcctaagagtgaatgacttatcctgctccaggcatcacagcagttaaaaagtaactctgagatttgaaaccagaaactcagacattatcaatgatctaagtgccaaggagcctattttgtgttccaaaatgtcacaggacatttcacatttagttctaagggtgctagattgactcagaggggaaatacagtctattttggcaccacgttgaaattagcctgagtccggtgagagtatgcatcataaaatgatgcccacaggttaagggcagtccatgtttacaccagacatgggatacattttataaatgattattgattgaatagaatgaatcaaattaagaaaagtaaagacattagagagaggataagacctattgttcaactgccaaatcagaaaaagagaaagttatgataacatatggtacctagtgcagagtgaatgatgaggatagattacgagattaagttaagccaagtccaaggtgttcttagatggattcatttaggagtgaaatgtggctgcaacttggatcactcctcccacttactatcagacgtttamtgcaggtgccag

SEQ ID NO: 711587 - DNA, 593 bp, Homo sapiens
tgtggaggttagaggctagggagccagccattacagaccgcttgtgtttatgttctctatatctgttctctttcactgcaatatctctctgaaaatacatccttaaagaaataagctctttgagagcaggcatcttagacttttttcaccaatgttgccagcatatagaacgaactctgtaaatattcacagatggactgggcacagtggctcacgcctgtaatgccagcactttgggagggttaggtgggcagatcacctgaggtcaggagttcgagaccagcctggccaacatggcaaaaccccatygctactaaaaatgcaaaaaaaattagcttggcgtagtggcttgtgcctgtaatcccagctactcaggaggctgagacacgagaatctcttgcacccaggaggcggaggttgcagtgagctgagatcgtgccactgcactccagcctgggtgacagagtgagactcataaataaataaataaatattcatggatgaatgaataaattcttaatgtttgtataagtttgctattgttactgtaatcaattccccaaattgagctacttaaaactatattgatttta

SEQ ID NO: 711588 - DNA, 1093 bp, Homo sapiens
tctcctattctgctacggcatgagctgaaagcgtgkcctcaggaaaacaagcaaaagagcctgtcttgaccaataattcccatacctacaggaagtcatttgtacaaaatgaaggaactcagaaaaacccaagaattcaatgaagttattcattcggagatgcttttgccgcaatcgaatgcttgctagttcctagactgcatgatctacacaaattgggtaataagtcagacgggacagtcctgggtcagtactgtcatttccttttccatgtctgccctacaggcttcaaggccaggcaaaaaatatccttcatactaaaaatcaagtctccatacagatcagtggtcttgcctatggcctatggtgtagcatcctactttgggtagaaaggcggggcccagctgcacctctaggagggctgatatcaacactgtgctgaaaggcaaggggggtcaagtttaaagttcagcatacttctcctttgaggagtcaacctcccgtcttccaggcaaggcatccctatgttctgggttttcctggacagtctcaacttttaattttacttctaaatgtgtaattacatttgacttaaaaaatactgtccgaatagctatgctgatttttggtttggaaaatatgctcaccatggctcaagaaaccatgtaacataataatgcagccaatctcgacctacaacacaagctgtaagttaaggtaccctcgagaacactactctttcctcttccattccttcaggtgttataaaagcaagcctaagttaaagttctatttcctaagagggaaaagaattgcttttcaatgcaactgtagttcacggtggcccctcttactaatgactgcaaagcttctgccccacagtgttgttttatacagaacagacactaattctttttataaacaatgatattacatggaaccagaagcgagagcaggaggcctatgtacagacctcaatggctgcagcagaagttccagctgaggttttgttattatggcagtggcagatcttatggcaatggagggtcttgcagcttaaataaaagcaaactgttggctctgaaatccagat

SEQ ID NO: 711589 - DNA, 1093 bp, Homo sapiens
tctcctattctgctacggcatgagctgaaagcgtggcctcaggaaaacaagcaaaagagcctgtcttgaccaataattcccatacctacaggaagtcatttgtacaaaatgaaggaactcagaaaaacccaagaattcaatgaagttattcattcggagatgcttttgccgcaatcgaatgcttgctagttcctagactgcatgatctacacaaattgggtaataagtcagacgggacagtcctgggtcagtactgtcatttccttttccatgtctgccctacaggcttcaaggccaggcaaaaaatatccttcatactaaaaatcaagtctccatacagatcagtggtcttgcctatggcctatggtgtagcatcctactttgggtagaaaggcggggcccagctgcacctctaggagggctgatatcaacactgtgctgaaaggcaaggggggtcaagtttaaagttcagcatacttctcctttgaggagtcaacctcccgtcttccaggcaaggcatccctatgttctgggttttcctggacagtctcaacttttaattttacttctaaatgtrtaattacatttgacttaaaaaatactgtccgaatagctatgctgatttttggtttggaaaatatgctcaccatggctcaagaaaccatgtaacataataatgcagccaatctcgacctacaacacaagctgtaagttaaggtaccctcgagaacactactctttcctcttccattccttcaggtgttataaaagcaagcctaagttaaagttctatttcctaagagggaaaagaattgcttttcaatgcaactgtagttcacggtggcccctcttactaatgactgcaaagcttctgccccacagtgttgttttatacagaacagacactaattctttttataaacaatgatattacatggaaccagaagcgagagcaggaggcctatgtacagacctcaatggctgcagcagaagttccagctgaggttttgttattatggcagtggcagatcttatggcaatggagggtcttgcagcttaaataaaagcaaactgttggctctgaaatccagat

SEQ ID NO: 711590 - DNA, 2312 bp, Homo sapiens
tttttactttattgtatgtatttttagaaaccatatcaaattctatttttggaataagcagggtgctaataagtaaacaatraaacgttccagttttatacattaggcttaagtggcaaatcccataaaaaagcgtatcttcaattgtcttattttttcttctcagtagattaaaaattaaatgacttggagtttaccttaagattcttaaaaaagtcaccaaattcgacttaactgtaaaatacatgaccaattttattataatgcaccctaaagtcatatttgtacacttggttttactaaattgtgaggcattcaagaaaatcttaaatatgtaattatcagcaattactcacttagaactggtgaggcaatttccaatggagcatgttttggaaattctatcctgtctccccagtcgctctggtggcacctgatgaacaggccgggaataagaaaaagctccacaatactgaacatcgcaggttaacaccgggcagtgccagagaaccagatcacccgtcttcccttttcttacaataaggaatttataatttgccaatttcgtgcaaaatagaaactgagttacagaaatagaatctgtttactcagttttcccacgtggctccattaaggacagaattcttgaatactttaatatctctgttcttttggctctgttaaaaatgaattccaactgtgtgctgctatcttatgctaagtcgtcagaagccttcacagggtacagttctttcctaggtggggacattgcttctggtacttacctgagaggtggcacattttctcaagatgtctttagttgccccagggggtggtgtgatcttattaaacaatcccgttctcagtcgtggtgttggaaccaacaatgtttttttgctcttttaaagaaaagacaatcaataaattacaaaatcaaattattccataggactttcttatatgtatttttaccatttcaggagaagaggcaaattactattatccgcatggttttttttggtgtgtgccaaggaaattacttatttgaaaacctaattaaataatgtgtggggtcgatttttcttagaatcaccactcggcacctccttaccctgaagagccagagggtttactaaacttgctaatttgatttcacttgccattcaaaattgttacaggtaaaaactgacaacagaaatccaaactaaggtcagttctgacaaaatcccaacctcaactttcctgtgccccctctgctctcagcaccaagtgcgacacagttacaataatgctgtcattagaaactggcatggcatagctaccttagttactcaaacatttctatctagtttgactgttcagcaaatcacagtcaaagagatcagtaatcatgataatcaatacactgatacgtgccaatagcccttgacttctacttagttctcaaatgcctattgtgagaacctctagaacagggcttctcaaagtgagggccctgggccagcgcatcagcgctcctggcacctgttagaaatgaatcagcccctctgggggtggggagcttcgatgagccttccagtgactctgatgcacacgaaagtttgaaaaccactggctgagatgtctctgtagattatgcaagggtaagccacaaggcaatcataagatctgtgaaatctttcatgtaaataatagtatattttagtttttgagcaggagatgacaacccaagaccaataaaagacccatgacatctgtttggcctatttcaacaaaggcttgtcaaccacaagagtgaagtacttcaacacaggcagctgtgactgcggcctgctgcttttctgggagtggtggagtgtggctccctcatgggcagtgttggagtcctgtgccccacatatggggatcactctctcttttctagaagctgctcatcctctggctcagtggatctcagcctttagtgtgcattagaatcaccagcaagctttaagaattaccgaggtctagacctcactccagagactggaacctggcatggccaacagtcttcaaacctccttgagtgataccaccatgtggccagagctggcaagtggcacctaagccagtggggcttaagcctgtgtacttggagcaccctcggagtactgattgaacagaatctgatgccactttagagactcacaggtctggggttgggcctgggaagctgtgcatgcccccggcactgcggactgtccggtcagacactggccactgtgcctgtagctgtggcttgaggttgtgcatgcccccagcactgcggactg

SEQ ID NO: 711591 - DNA, 621 bp, Homo sapiens
aacatctaatactttgaamgagccccatagttccaggatttctccttttgactttgtaaaagcctttcttctatcccaattggataaagtaattggattaggctaatacactctacactgtaagcttgaatcatacaaaacatgaaaatagcggggggcggtggctccaagcctgtaaacccagctctcagggaggcagaggctgggaggatcgcttgagcccaggagtttgagacctgactgggcaacatagcaagaccccgtcctccacaaaaaagaagaaaaaaagtatgaaaatatatttctcgcgccaggtgcggcgactcatgcctgtaattccagcactttgggaggtcaaggcaggaggatcacgaggtcaagagttcgagaccagcctggtcaacatggcgaaacccccatctctactaaaaatacaaaaattagccgggtgtggtggcaggcgcctgtaatcccagctactcgggaggctgaggcaggagaatcgcttgaaaccggaaggcagaggttgcagcgagccaagatcctgccactgcactccagcctgggggaaagagcgaaactccatctcaaaaaaaaaaagaaagaaaatatatttctcaa

SEQ ID NO: 711592 - DNA, 1487 bp, Homo sapiens
tcttctttgtgccttttcaaggataataccagaaatttggaggagaggataggaaatataaatgcaaccaaaaagaaagatatcatcaaagaggtctgaatctctctttggattttaaagaattaaagaaagaaagggggactcaaaacaaaaacaaacctctacccatctcccacagtggagtggagccaacttgaaagcagtgaatgtatctatctggtggttggtgtcttctgtacttggcgttttgcctgggatggtagtgtttgctgaacaaacaaaggaatcttttttttttttttcctcacctcttttaactttggccaagtctgtctggcccaccagagcagctgtgatgacagttgtttggtgaatttccaaacactgtactatttaagtatggcacacagtcttagggggccaggcaagcaattggaaagctgaacctggctggccagacctgtgttaccaaaactcatatgtttcatttggatctttaagcagaaaaactttccaaacccttgctccaatatgtaattctccgtggctgatttctagcgaggaaccaaatttaaggtggatagaagaagcatattcattgaaggattggtctgtgttccaaggattgtatgatctaataggggtcatatacacgtcagtaattttcaggattctacctgactttttatcctggacaccaggtacagctgccagcatctcttcacagagcccctgtttactgtgacttttcaaagggcagggatagtttcctagtggccttggaatgccttctttcacagcaccaaccccataccttattcacaatgggggtgcacagccactctataagagagaagatcaaccttagaacgtttattaatatctttataatttcttatagttggggggaagcaaaggcgaaagaacatattcttgagtaatttattctgttccctggcattgatgaaagggataaaattaaatcagtgtttctactcaagttgtttgaaggacaagccaaaatcacaccattaaaagttaacatctaaaacagattgtacattactagggatgagttcagacccaaagtagaagaattggccaaatgaatctatagaatgttggttgtgaggaatttactaccctcatttccagtggttaaaaaataaaagacagattatcttcatttcaggccaggaaggtttgcagaaagagccaaggatatcttatccaagtttaacagggaatgaggtaaatggctaaggaaggtcagagctgcgaggtttttctggagcaccaaattcatcacaagtcatagacctgtgaaattcatgtcaaaattaccagattgtttcccttcttgaagstacttaaactctagcggaaaataggaacatctgtttaatttctgatggcctaaacaacttactcagtacctattgtgtacatctattgatggtatctttgagtgtgagatccatttatct

SEQ ID NO: 711593 - DNA, 668 bp, Homo sapiens
cataaaagaatagggacatattgactggacaatgatgtgtgattctgatttttgaaagtggacaatgtgtttccatcagtgcattaggctgtctgggaagaacaattctttaaaaagctctcaataaatgacataaataaaccagtgagcagccaggggccaaattatgtgtccctgtgacttactgttgtttgaggacagtgataaacatttcagaccatctatggaaaccactgggggaacttttgtttctctctaatagcctctgaagcctttatggctaatagtgtgtataatgagttcagttgcaagcctctgagcagagaagttgggctgttttcatgtggggaggggaaccctctgaaggtttgcccagcartgacagaatccggtcctctgtaagggaggcaccaaccccacatttggggaagctgggaagaaagagtgagaagatgaagatcctaagccaagatgccaagaagaatgtgaaaactggagcccaagtcagagtcagatgtgagatttaatcagagcatcacagccagagaacggagggtaaagtcagagccaggatactaacctagctcacagcgggaacgtgttgcagcctggaggatgctcactggaggacgctgaaaccacactcttgccagtggaagaactcctgt

SEQ ID NO: 711594 - DNA, 1430 bp, Homo sapiens
ggtcactttgaacttgcgcatagcagtgctgaatctgcaactgccccagtgtgtcccgcatgcatacacacggtgctcctatggaccttactcagcagtggctcttgatcagcacattatggatccatgccccacacaccatgaacacaccccacagtgccatgtttcccatccggttgggcctgaggagggctgcagcccctgttgtagtttggagaggatcttccttcttgatggcccgctagtcggtgttgaagtcctccaagctgcagctcctaagggacaacagtgtagatgagccatgtagacacctctgaatgttgaaacttggtgtattagtcagggttcttcagagagactgaaccagtagggtggatggatggatggattgattgaggagagagaggatatttgttagggcaattgggtaatatgattatggaggctgagaaatcccatgacaggtcgtctgtaagctggggaccctggaatactccaggaagctcagtccaagcccaaaggcctcagaaccagagaagctaatggtgtagctctcagtccaaagccaaagacctgagaacccatggcgtcactggcataagtcctggagttcaaaggctggggagcctggagttcagatatctgaggcaggaaaggaaataaaataagtggagagagagatcaactcttcttttctctgtttttggtctactggggtccccatcctattggatggtgcctgcctacactgagggcaagtcttcccccacttaattcactcagacacatatgctaatctcttctggaaacaccctcactttaggtattccttcatccagtcaagttgacacctaaaattaaccatcacacactagggatggaggacatggctttgcggcctcacaaccttttttctaaggaggcctggtcccttatattgggaaatgaactttagaaaccaacaagcgagtaccagctgtgctcattactactgaggtgtcattgtttccagaactttttaatagacaaagctattaaataaacacacacacacacayacacacacatatacacacattatgaattcgtactaataaccctaattccagtcaataccctgggactggtgctctcttccctctttcatatctgtatcttctttttccaataaaggggccctatttcccaacaactggaatatatttaatcatgcactaatttatataatacatataaaagacatttcagtggctcacatctgtaataccagcactttgggaggccaaggtgggcagatcacaacgtcaggagtttgagaccagcctggccaacattgtgaaaccccgtctctactaaaaatacaaaaattagccaggcatggtggcgggcacctgtaatcccacctatttgggaggctgatgcaggagaat

SEQ ID NO: 711595 - DNA, 595 bp, Homo sapiens
ctctgcctcccaggttcaagtgattctcctgcctcagcctcccaagtagctgggattacaggcacccrccactacactaggctaattttttgtgtttttagtagagacagggtttcaccatgttggccaggctggtctcgaactcctgacgtcaggtgatccacccgcctcagcctcccaaagtgctgggattacaggcgtgagccaccatgcctggcctaaaaaatttttatgatagacagaaaaataaattcttggtaagtcagtgaagtttgtaaatggggactttgacttttgacaaatttattttgaacaaatagatttaagacaatatattgattcagcaattatgatagaagtggttttctagtgcagatgactaggctgatacaatacacttctctgtaagattcagttattttatttattttttattttttatttttattttttgagatgaagtcttgctcttgtactccaggctggagttcaatggcgtgatctcggctcactgcaacctccggctcccgggttcaagcgattctcctgcctcagcctcctgagtagcagggattattacaggtgcctgccacca

SEQ ID NO: 711596 - DNA, 661 bp, Homo sapiens
tggaatatataaagaactcctaaaaatcactaagaaaaccacagacagcccaagagaaaaatgggcaaatggctcaagtaggtatctggtgaaagaggatatgcagatggccaatgaatctgcacaaagtgctccacatcattaatcattagggaagtgcaaattaaatccacaggagacacctgggcacaccctccagaaagcacacaatgacctgctggcaaggacaggaacgaccactttggaaaactctttggcagcacagccaaactgagcctttccactygaaaatgccctttgctcagaacccagcagcagctccaaagtctccacccagcctatggggccccagtacccacccttgcctcccatgcctctctcctcacccctgcacttggctgccctcaccctcgggctgcaccttgaacaccagaagggtgctcctgcctccagcctctgcctggaattctctgccctcgggtagccatgtggttcactcctcctttggtctctgcccaaatggcccctgtagaagagacctccccacccagccatgtcctctccctgtgacttaccaccccagactttctgtgttgatgcatcatggtctacctccttccatcagaacgtgagctccgaggcaaaggctcttcagacctga

SEQ ID NO: 711597 - DNA, 1485 bp, Homo sapiens
tcccccactgtattacatcatgagccttttaaaaatggtgctacaaaatcttcataatgatctctattaatagctacatagtatcccatccagtatccttctcagaattttcctaagttctcccctattgctggacactgaggctgttccactcttttgctattttaaataacatttcagcaaatgatttgccaacatcattcccattccctactcaagctgccaaaccttttccattcttttaaagtatcctagtgatcatcacttgcctttatttaatttaaatgttcttgcatctaaccttcctgcctgtgcagaaaacatctttatcacttcagctggatgtttggtttgatcccatcttgccaccatcaattattcctttttgttttctcttgtacctttgatctttccctttcctggactcttcccttttcaccaagcagacccaggtccrctcttgtagatacatctctgttgtttctgtgaatttgtatgtgctggttccgttgcctggaacattcctcttgcctgcacctgggaatctctatcaagcctgagcctaagaaagacattttttaagaaggtggctccaggatcaggaggggaagaatgtgactttctacaggctgtgtttattttggtgagctgggggccagagggctgatacagatctgtgcccacgtttaaggatctcagcttctgtagaggtggagatcttgggcatctttgtaagttcctgaagcagaactagaaagatcacagtgtttagaattgggctgacatcaagccaagtctcagctgcaccatttactaactctgtgctcctctatatgtcactgaacagcagtttcttcatctgtaaagggattaatgagatattatttggcttggtgctgagccccatcgctagcaagtcataaacaatttctctcctccattataagctttcaagccccagcaatgtctagactcatgtaagggctcatagtagacactcaataaatatttgttgaatgaataaacatggaccgatagctcagaggtgtgggcaccagctctcgtctgcatcccctcctgttgcctgctgcagccccaggcaatctgtatgtgaagcagaaaagtctgtgattgcaagtgcacgggcagccaggcagcagctgtctccagataagggggtggcaccttgccaagtaccggaggtctctccacagaggctcagtaatcatcacaatccctcatggaattcctctggagaatgcctctcttctcgaaacatgtggcacttcacaaacatcgtctcagtgatcttcgccacatgcctgggtggggggagaggcgccacagggcaccccagatgccccaagggcacatggcaaaggagggccgataatgaaaaaggagggggtggggtggaggcgacgtgtgtcctcattctacaggtggaccatggcagagagaggtttcagtggctcacccgtggga

SEQ ID NO: 711598 - DNA, 1485 bp, Homo sapiens
tcccccactgtattacatcatgagccttttaaaaatggtgctacaaaatcttcataatgatctctattaatagctacatagtatcccatccagtatccttctcagaattttcctaagttctcccctattgctggacactgaggctgttccactcttttgctattttaaataacatttcagcaaatgatttgccaacatcattcccattccctactcaagctgccaaaccttttccattcttttaaagtatcctagtgatcatcacttgcctttatttaatttaaatgttcttgcatctaaccttcctgcctgtgcagaaaacatctttatcacttcagctggatgtttggtttgatcccatcttgccaccatcaattattcctttttgttttctcttgtacctttgatctttccctttcctggactcttcccttttcaccaagcagacccaggtccactcttgtagatacatctctgttgtttctgtgaayttgtatgtgctggttccgttgcctggaacattcctcttgcctgcacctgggaatctctatcaagcctgagcctaagaaagacattttttaagaaggtggctccaggatcaggaggggaagaatgtgactttctacaggctgtgtttattttggtgagctgggggccagagggctgatacagatctgtgcccacgtttaaggatctcagcttctgtagaggtggagatcttgggcatctttgtaagttcctgaagcagaactagaaagatcacagtgtttagaattgggctgacatcaagccaagtctcagctgcaccatttactaactctgtgctcctctatatgtcactgaacagcagtttcttcatctgtaaagggattaatgagatattatttggcttggtgctgagccccatcgctagcaagtcataaacaatttctctcctccattataagctttcaagccccagcaatgtctagactcatgtaagggctcatagtagacactcaataaatatttgttgaatgaataaacatggaccgatagctcagaggtgtgggcaccagctctcgtctgcatcccctcctgttgcctgctgcagccccaggcaatctgtatgtgaagcagaaaagtctgtgattgcaagtgcacgggcagccaggcagcagctgtctccagataagggggtggcaccttgccaagtaccggaggtctctccacagaggctcagtaatcatcacaatccctcatggaattcctctggagaatgcctctcttctcgaaacatgtggcacttcacaaacatcgtctcagtgatcttcgccacatgcctgggtggggggagaggcgccacagggcaccccagatgccccaagggcacatggcaaaggagggccgataatgaaaaaggagggggtggggtggaggcgacgtgtgtcctcattctacaggtggaccatggcagagagaggtttcagtggctcacccgtggga

SEQ ID NO: 711599 - DNA, 615 bp, Homo sapiens
acaaggaaatatgtaactgcttcttcccttccttttaaattttaacagaagtggtaacacatattacagccactgttatttttcacttaatttactttggagattgttccctgtccttaaagagcatgcttattttttcatgayggcaatctagtttgttgtatggatgtatgataacatttaaacgactctcccattgatgggcatttgcgttgtttccagtcttacgctgttaaaaataatgctgcaataaaacaatcttgtgcagacatcatttcactggtaaacattttttaaatgggggaactctgcgagtttaggcagttatttttccttcgtctccatttactgtttgtatatttgtaccacatagtctaagatcaaagcatggagaatgcttccaccattagcaagtatttcagatatgctaataaacacattgcttttccgtaaatggcaaaatgcttcaacagcaccttatctgtgagatcctattttataaggaatcttttttatacgaatgtacttattcttttagatatcagttcttgaatgtatactccttatgatatacagcaagagattcttgaggttcccaagaattgtcctggaaag

SEQ ID NO: 711600 - DNA, 615 bp, Homo sapiens
acaaggaaatatgtaactgcttcttcccttccttttaaattttaacagaagtggtaacacatattacagccactgttatttttcacttaatttactttggagattgttccctgtccttaaagagcatgcttattttttcatgatggcaatctagtttgttgtatggatgtatgataacatttaaacgactctcccattgatgggcatttgcgttgtttccagtcttacgctgttaaaaataatgctgcaataaaacaatcttgtgcagacatcatttcactggtaaacattttttaaatgggggaactctgcgagtttaggcagttatttttccttcgtctccatttactgtttgtmtatttgtaccacatagtctaagatcaaagcatggagaatgcttccaccattagcaagtatttcagatatgctaataaacacattgcttttccgtaaatggcaaaatgcttcaacagcaccttatctgtgagatcctattttataaggaatcttttttatacgaatgtacttattcttttagatatcagttcttgaatgtatactccttatgatatacagcaagagattcttgaggttcccaagaattgtcctggaaag

SEQ ID NO: 711601 - DNA, 1263 bp, Homo sapiens
catctcttaaaaaaaaaaaaaaaaattccaaaaccacaaaacacaaacagaaatttagtagactggaatcatttccagaacaaaagcaacaaaagtgacatcatttgacatgtgaaactaggcagctgaggattagaaaatgctcctcaaggattatcgacctttgtaagggaggtaaagcagcccacgtaagatatcatggccatatcacgcttatgtaattccccccttggcccctacataaacgggatggatgtgaacaaacttcaaggagagagaaatttatgtcaaattcatcacaaaatgactgacttattcatttttatcttgttaacctattaagttgaaccacatgaatctttgtttaggtcaaaaatggtcaaatatcagcaatttcgtatgatttaagccaataatccaaggtttctgaggttcctgaaatgttctatttcttgacctgtgtgattattaattcactgaactatacacractttgatttgtgaacttttgtgtatttggtatatatcaatataagagtttcatatgaaattataatcaaagcatcaccccagtttatttggtcactatttgaaataaaacataaaaggccacttactatgtctattacggggctcgaaccacccactttctgtgcagaacagaacactgggaaccaccccaaattgaaatttcacaactcttctccactcccctgcagatactatcagatattctctgatgagagaattatcccacgtgctcttggttcctctttataattacggtgtttgtagtaaaaaaggccataccatcaaaaacatggacacaggcttaaaagaggcctcatcttggaactggagttattttgattagagtgggctttacacacccccacaaagtgaaaattacgagtcaatctattctgcccaatctgaacccaagcatgggtggcacacgacacaaatcggagaggaattcagaactgcctcttggattgaaagacctccttgacctggccctgacactaaagaaaaccccacatgtacccaaccatgagcctggctttcatctcaacaaaatgtcttagttccaacctgtttatcaaatcatctctccagttacctgcaaacatgtgggaaaaaagaaccaacaattttgaatggaaaggacttggaaatgatatagattagtgggtgttccaaggaggtctgtactagccaagtgggcagaattccatcagagatgtgaggaaggggactata

SEQ ID NO: 711602 - DNA, 1263 bp, Homo sapiens
catctcttaaaaaaaaaaaaaaaaattccaaaaccacaaaacacaaacagaaatttagtagactggaatcatttccagaacaaaagcaacaaaagtgacatcatttgacatgtgaaactaggcagctgaggattagaaaatgctcctcaaggattatcgacctttgtaagggaggtaaagcagcccacgtaagatatcatggccatatcacgcttatgtaattccccccttggcccctacataaacgggatggatgtgaacaaacttcaaggagagagaaatttatgtcaaattcatcacaaaatgactgacttattcatttttatcttgttaacctattaagttgaaccacatgaatctttgtttaggtcaaaaatggtcaaatatcagcaatttcgtatgatttaagccaataatccaaggtttctgaggttcctgaaatgttctatttcttgacctgtgtgattattaattcactgaactatacacaactttgatttgtgaacttttgtgtatttggtatatatcaatataagagtttcatatgaaattataatcaaagcatcaccccagtttatttggtcactatttgaaataaaacataaaaggccacttactatgtctattacggggctcgaaccacccactttctgtgcagaacagaacactgggaaccaccccaaattgaaatttcacaactcttctccactcccctgcagatactatcagatattctctgatgagagaattatcccacgtgctcttggttcctctttataattacggtgtttgtagtaaaaaaggccataccatcaaaaacatggacacaggcttaaaagaggcctcatcttggaactggagttattttgattagagtgggctttacacacccccacaaagtgaaaattacgagtcaatctattctgcccaatctgaacccaagcatgggtggcacacgacacaaatcggagaggaattcagaactgcctcttggaytgaaagacctccttgacctggccctgacactaaagaaaaccccacatgtacccaaccatgagcctggctttcatctcaacaaaatgtcttagttccaacctgtttatcaaatcatctctccagttacctgcaaacatgtgggaaaaaagaaccaacaattttgaatggaaaggacttggaaatgatatagattagtgggtgttccaaggaggtctgtactagccaagtgggcagaattccatcagagatgtgaggaaggggactata

SEQ ID NO: 711603 - DNA, 562 bp, Homo sapiens
agattcaccaaaatactgttactttttgtgtttttcataaagctcatgaatcatatgcctaaatcccttgttttttaaaaatgctaccattcttaataatttttatcacttactgctgtatttaactttagtttcactatatatcaagactgcaatcatttcttatctttatttatttatttattgagatggagtttagctcttgtcgcccaggctggagtgcatgtggcatgatctcagctcactgcaacctccacctcccaggttcaagcgattctcctgcctcagccacccaactagctgggattacaggctgcaccaccacaccaagctaattttgtawttttagtagagatggagttacaccatgttagtggggctagtcacgaacttctgacctcaggcgatccacccgcctcggcctcccaaagtgttgggattacaggcgtgagccaccgcaccagccatttcttatctttagacccttatataacaactcttttttgccaaattcaggtcctatgttcaaaataataaaatggtcaagatgtcttttcagctt

SEQ ID NO: 711604 - DNA, 831 bp, Homo sapiens
gggcgcggtggctcatgcctgtaatcccmgcactttgggaggctgaggcggatggatcacctggggtcaggagttcaagactagcctggccaagatggtgaaaccccacctctactaaaaatacacaaattagccgggcgtggtggtgcacgcctgtaatcccagctacacgggaggctgaggcatgagaatcgcttgaacctgggaggcagaggttgcagtgagctgagatcgcgccactgcactccagcctgggcgacacagtgaaattcggtctcaaaaaaaaaaaaatgatgataaataaaaataatggggtggcaaaattcatgagggtggtgttgactgtgctcagaaatcaaaagcaatgtccagctgggcatggtggctcacacccgcaatcccagaactttcagaggctaatgtgggaggatcgcttgaggctgagtttgagaccaggctgggcaacttagtgggactccatctctgtataaaagaaaaaaagcaaggcctctatatatgacctgagtgaatggctcccaccacgcctcctcttctcaggggaagaggaaaatgctcttcccctgagatccacatgcctcctccaagtcttagtttgtgtcactttcttggggaggcttaccagtcccctcccaattgtcccccaggctgaaatggggaaatgggtatggagcgtggatctttagctctgacctgaatgagtaggagatgctaggtgccgactcctttctctgtctcagtgtctggaaactgaacaattgagcctggatgatatcttagccccctcccactccccacttaccctacgatcat

SEQ ID NO: 711605 - DNA, 831 bp, Homo sapiens
gggcgcggtggctcatgcctgtaatcccagcactttgggaggctgaggcggatggatcacctggggtcaggagttcaagactagcctggccaagatggtgaaaccccacctctactaaaaatacacaaattagccgggcgtggtggtgcacgcctgtaatcccagctacacgggaggctgaggcatgagaatcgcttgaacctgggaggcagaggttgcagtgagctgagrtcgcgccactgcactccagcctgggcgacacagtgaaattcggtctcaaaaaaaaaaaaatgatgataaataaaaataatggggtggcaaaattcatgagggtggtgttgactgtgctcagaaatcaaaagcaatgtccagctgggcatggtggctcacacccgcaatcccagaactttcagaggctaatgtgggaggatcgcttgaggctgagtttgagaccaggctgggcaacttagtgggactccatctctgtataaaagaaaaaaagcaaggcctctatatatgacctgagtgaatggctcccaccacgcctcctcttctcaggggaagaggaaaatgctcttcccctgagatccacatgcctcctccaagtcttagtttgtgtcactttcttggggaggcttaccagtcccctcccaattgtcccccaggctgaaatggggaaatgggtatggagcgtggatctttagctctgacctgaatgagtaggagatgctaggtgccgactcctttctctgtctcagtgtctggaaactgaacaattgagcctggatgatatcttagccccctcccactccccacttaccctacgatcat

SEQ ID NO: 711606 - DNA, 1328 bp, Homo sapiens
atcagaaacaggagatgacttaaaaactatctaagtgataggtatttgcatataggttcatcaagttactaaaccaaattaccaagttaccacacaattccatgggagtttttccacccctccccaaaaaagcaatggcaaaaaaaaaacacaaaacattatgctagaatggatggttctatgatgccacctaaaagcattttcaactctgaaacctgtgttgccttcccagagcagcctggcctccatgcctttatacatcagaagttacttctggaaatcttggatggttcagttccccatctctttaaagctccctcacatgccctgtgctgagaagtgacacagttccagtaacgtcctgcagcttctcaatgttctttgctgagggaattgtctcagttcccattgtacacaaagcgttttgtgtcaccctcaggtggctgcctccaccaggctttgaagggaggggactgatttttggtggtggaggggagagagatgttactacagaaaaacaataatacataggatgatagtatatgtaaagcacctcaggaaagaggagtattcttcaggcacccaattactgttacaaaataagatcgtaattccaaatgctttaagaatagacatttcttcccatctatcaagcacttttctcagagtaactgaaaaataagctaatacctcatgataagcttgcctctttggaaagcgtaatccttcttctcagccaaaaaggcaccatgtaacaggggtggcaaatacatttcatttcacatagtaattccaattggttgacagtctatgcctagagagatgcactgaggattctaagaaggtgacgctgatgaggggggaaaagaattgattatcaatgtctgccacgtgcagggagctgggagggctgatgcctcccgcttgccattttgatgtagagcattactgaacaccaaaggaaaatgcaggaatagaaaagctgtataatatataagctggactatagttgggaacataattttttataagtctactttaccaggcaatttttcaaggacgtttctaaactacattttaaaagacaaagtcttgttgggcagtgctactgtgatcgaatggaggatgaaatggtttgagtaayaccgtcttgtttcttcctagactggcatctgccacaaggggcagcccatctgctccatccttggggaagaactaaatgagtgtcccttggctgagacggctgaatggaagatgccctgacatcagccaccatgtgtgtcctcaaatacatgtctctggtgttatgctacagatgcccacggcat

SEQ ID NO: 711607 - DNA, 1095 bp, Homo sapiens
aacatttttttccttttttttttttccctacagtagggctcaaacaaatccttgtgtgtgcactcactggtccagatgggatcacatacccggggctgaaccatcactgtgacttggtggatgcagccctctgaccagccacatctgtggaaccasagtacagattcaaccccacctgaactatctggtctgagaagggaggagaggtgatttccccgtaggaaaccgggtgctattaccagcaaagttatacagatgctaaacagccaagtaattaggcaatacaacacaaatgttaacacaccacttatctaatgaataacctcattgcctctcaacctctgcaccacctataggatccagttctaacatctttgcttaccatacaagactctccatgaattggcccaagcctgccttcctagccttgtctgctatacagtctgatttcacccacaaagaatgacacattcgtctctaaatagtctcttctgtcatcccactgcacccatttgcctggcatgctaaacttctacttcatcacctattgagccatatacctgactcaagacccagctcaaatgccattagcctttttttaaaatccacccaactcctcctggctgaatcagctgctcttttcctaacaaattgtgtaaatatctctactgaacagactttctcaacaggggcaatgtttttcccccaggggcatttggcaatgtctagagacatttttggttgtcatgactggagaagggatgcttgtggtatccagtgggtagaggccagggaggctgtttaatatcctgcaacacagaggcagtgccccacaacaaagaatgacccagctcagaacgtcaacactgccaaagttgaaaacccttgtatcacctaacacttcatgccttgtattacaccaatcatttctgtatcttcccagctagaccatgagctccttgggggcagggacactgttgcatttctcaatgtgctcccagctctagcaggtgcctggcccatagcagatgctcaacaaacattggcagaatgactgcataagggaatgagtgtccagatgggcttatgaaacat

SEQ ID NO: 711608 - DNA, 609 bp, Homo sapiens
tgcagagctccacaagccacacaccattggtggtttctttactggcaataaagacacttgatcctagtgtctttatgccagtaactcttacataaatcctacaagtgaaaatctagagaaaatcacctcattggaaattatcagaattccaggaccaactcagccactggagagctccaggctaatatgtggcaaagcatgctgtgcaaagatgattctccagttggtcaaatattgttgcctctagctcacaacarcttaccagtaattctgaagaagtgggcagaggctaagatattttaattaattttaatttaaatatctacccatctgtccatcaacccacctacccatccatcgatccaccaatccactcacccactcatctactcatccgtcaatccacccagctatccatccacccatccactcatctacccactcattcatctacccatccaaccacccatccatctaaatacctacccgcccacccacccacctacctacctatccacccacccattcatccacccacctacctgtccacccacctacccacccatccatccacccaccaactcatccacccacctaaccatctaccta

SEQ ID NO: 711609 - DNA, 1753 bp, Homo sapiens
gatttttcttttgcccatcctagaatatattctctgtctacagtgctggatatatcaatgcagaattgtgtgcaagtgtgtgacttgctagcagtcagccacagtcccatgcactttgcatatggtatctcttttaattcttacgatcacctcattcataagaggtaggcaccattctcatcctcattttccagataaataatctgatgctcaaggagattgtataacttccttgaaattacacagttgcatagagtggagtggagatttaagtccaggcctcttctgccttcaaacattttagtaaaatcttctccttaatatatgtaggtatgcaggctgaataatttagatcaataccagtgcacagtatttacttttgacaggaggtcttagttttctgtccaaataacagtactcaccccagggcccagagctgctggtggattgtcagagtgcacaactgcacgtgatgctgagtatgggtgactggccaacactgatgactgagccttgctgatggccaaaaacacattcctctgaactccaagcacactgccatctggagaaatgcttcccttatgttttggaggatagctaaacacagcagaccctccatagcagcaaatgtaccttccacatgcctatatgttgatttagagcaaattcagccaactagaacacagccaattcaagaaagcaggaagagagcacgtgtgttcaaagagcacctatatttgcaatccccataaatacactctctagcttaaaccagagagtttaatatagctacttaaatggtcaatagtataccagtgcaagctttctcaaggtcagctgggcattgcaatattttacaatccagacaactgacacgaaccaaatggcccccttcttcttttataacaacgtgtttacttcttctcatcctccttctgacatttatggagtacctggtcagatgagcaaagaaaaataagacaaggctcatctgctattgaagctgatgcaatctcattccttccagaactgcttattatggatctttgtgtattgcctgaggctttacctttctctttctgttcttttcttctgtttctgcaaactcctccttgctctcctcagggataaacacaaattaatgggtgtactggaggccagcacatggttacatcagaattttaaggaagccagttttctctgtgtagaaatgagaggctcagctctccatgattccttgacttctaatcaaacatgctaattagaaccccataaacaagccaaggctcagaagagggtggtttcaaacagggtaagtgtggaaagctattctgaattccactaacactgtgggttaatacttattaccctttttttctcataaaaaaatactattctgctctttaaacctgcattctcttagctactatacaagataataatctatactttttttcctgagactattttaccatcatctttatcatggttggcaagtaacacataattttggtgtttgattaattgatacactgtaagagtaggtactgatatctcttttgatcaccctttgactttttacggtaggtgttgaatacatgtttgttgaattcattaatgaaaaaatgatgtgagtaagtacccaagtgatactcatagtgmaaatattttcaataaattccagattcatctagaaacttttcattgttcctgggtggtatttgatggaacattctcaagagaaatacttatg

SEQ ID NO: 711610 - DNA, 1362 bp, Homo sapiens
acaagtgacatcatttgaactgctggatcaagctgagcctgaagtacctttggacttctcagttgcacgagtcaatatataccctttagtgttcaagcccatttatggtaggttttctttcatttgcaacctaaaagacctgactgataatccatgaagaggacagttgtcctcatgggagctggaaacaggcaaccttttggaaccaaatttctctgtccctctttctcttagagcacagggccactccttcacagattgtctctgtgtgcactgtgcctctattttcttctctccctcccagcaggcatccttacaaccttgccctttacagtcaccagccacaacttgtccccaagactcctctaccttccatttcccctgacagccttgcctctgtttccatattccagactcccgagagaaaaatctggttggtctagcttatcttttcatgtgaagccattcagatcatcagctgctgtcctgccttgcaaggccgcctagggttggacacccatctcttagtccaatcagctgtggctggggacaagtctcaggagggcagtgggcagcacagagaggggcctatttcccttagggacatctatgggcatggtgaaagtaactgacacctctagtgttgggtgctcaacacagaaaattcaaacaagctgcggaacatgtttgctttaacattgggtgaaaaaaaaacattcggacaaacgaattcaaatataaaagggagagtctgggggaagggtgtcatctaaaacaggagttggcaaactttttttttgtaatgggctaaataggaattttttttgaggggggctgcttcgtgggccgtaggttctctgtctcaactactcaaccctggtattatagtgcaaaagcagctatagataatatgtaaacagagcaatatgactctgttccaataatacttcttttagtagtagtagtaataataataataagaagaagaagaagaagaagaacttggtggacctaatttggcctgtgggacatagtttactggccctcatctagtaaatgaattctaggttctctctaatcctaatgaaacctgtgtagaaggattgttgtaatgattccataaaataatctatgcaaattacctagcaccgtgattggcacagggtcgatggtgttggctgtttttgttctcttttttgtcgagtgggctctcggaataactgggttccagatccaccaatgtgcttggctaatctrgaagagtcccttcatcttctctgagctgagctggaagttgatcatatcactccatatagtgagatgggatttctaaggaaaggaggtggaggacgaagagaaagg

SEQ ID NO: 711611 - DNA, 2316 bp, Homo sapiens
cctagttctttgctttttccccctcggtggcttaagtctaaaagaggtgctaaaaagatggcagctccttctgaaccttgcttggaattggtggctcagtggccttgcctcagcttgggggcggtgtgtgtctacgcagagcagtcacacctacgtggacagtaacagggcgctcttggttagtaggtgcacatgtgggtcggggagcagagacaggaggctccgcaaagaaagcctcggagccagcccggctcagtgcccagccgcgaagccgtagcgccctctggtgtgccctgaacatattgcatggcgtcacaaggcggttgggaccgcttggagcatctctgagccgacgctgccatctcctggtgagagtcgctttcagcaaatctccagactattcagcgttctaggctaggagccacaaggactgggccactttcgcccgaattcccagggtccacttttggaaggcatgaaaacacacaggaaagactagttggctgccagcagagcccctgatgacttcaaaacatcctctgggcccgccttcccctacacaaatctttaccactgcacttttgtatgtttggcgagggggtggttgggtttttttgttgttgttttgcgattttgtttttttgagacagggtcttgctctgtcacgcaggcttgagtgcagtggcacaatcacagctcactgcagcctggacctccctggactcaagtgatcctgatgcctcaacctcttgaatagcgggaaccacaggtgcacccaccacgcccagctaattttaaaaatatattttgcagaggtggtgggggtgagggtctcactgtgtcgcccaggctggtctaaaactcctggcctcaaaggattctcctgcatcagcctccaaaactgctgggattacaggcatgagccacggtacccaccctgctgcactttacaaaccaccctgtgctgcttgttttctttctggtctttgaggcccctacatgattctgaagcaaattatgtgaagatgttgttgtcagtggtaggaattaagcaactttaccagaaagtaatttttccatgttatttatgcatggaaacaaatatgtattctaaagcaatatatactgttatatttactgtttaacctcatagaaaccttgcaaaatagaagccacttaaagcctcacacccaaacctctattggaaccttttcacttggctttgtgtgtacttatagaacaaattaaacacataaatactaaaaacaaaaagcagctcataatcctctccttttggctttaaaaaaattatttaaaggcttaacatgtattaatttaaaggaaatggcatgaaatgaagaaaatgtctcctcatcctgtcttcccaagggaaacctgtgtaaatcattcctcaaacatcctcctaggttaaaatgaagacacctgccatgtatatgtagacagtattaatctcagtccacacaggtgtgaaaaaagctgcactctttgtatagtccgttctcccattgttacaaggaactatctgagacggggtaacttatgaaaaaaagaggtttcactgactcacagttccgcaggcttaactggaagcatggctgagaggcttcagraaacttaaaatcatggcagaaggcgaaggggaagcaagcatcgtcttactggggcgtcttaccagggcagagcaggagagtgagtaagaagggggaggtgccacacacgtttaaaggattagatctcctgagaactcagtatcgtgagaacagcaagggggacgctgacgtgcaagatccaatcacctcccaccaggcccctcccccaattcgacattggagatttgggtgggaatacaaatccaaaccatatcagctttaatttttataactaacttattttcgggtggcccacattttgacaggtgggtggtaattatatgctccaactgttaccggagaggggtcctgatccagacccaagagagggttcttgagtctcccgcgggaaagaattagaggtgaatccataaagcgaaagcaagtttatcaggaaagtaaaggaataaagaacggctactccataggcagagcagcggcttgggccgctcagctgctcagacttagtgttacttcttgattacatgctaaacatggggtggattattcatgagttttttgggtaaggtgtaggcaattcccagaactgaggtttcctcccgtttttagtccatataaggtaactccctgacattgccatagcatttgtaaactgtgatggcattggtaggagtgtgttttagta

SEQ ID NO: 711612 - DNA, 2316 bp, Homo sapiens
cctagttctttgctttttccccctcggtggcttaagtctaaaagaggtgctaaaaagatggcagctccttctgaaccttgcttggaattggtggctcagtggccttgcctcagcttgggggcggtgtgtgtctacgcagagcagtcacacctacgtggacagtaacagggcgctcttggttagtaggtgcacatgtgggtcggggagcagagacaggaggctccgcaaagaaagcctcggagccagcccggctcagtgcccagccgcgaagccgtagcgccctctggtgtgccctgaacatattgcatggcgtcacaaggcggttgggaccgcttggagcatctctgagccgacgctgccatctcctggtgagagtcgctttcagcaaatctccagactattcagcgttctaggctaggagccacaaggactgggccactttcgcccgaattcccagggtccacttttggaaggcatgaaaacacacaggaaagactagttggctgccagcagagcccctgatgacttcaaaacatcctctgggcccgccttcccctacacaaatctttaccactgcacttttgtatgtttggcgagggggtggttgggtttttttgttgttgttttgcgattttgtttttttgagacagggtcttgctctgtcacgcaggcttgagtgcagtggcacaatcacagctcactgcagcctggacctccctggactcaagtgatcctgatgcctcaacctcttgaatagcgggaaccacaggtgcacccaccacgcccagctaattttaaaaatatattttgcagaggtggtgggggtgagggtctcactgtgtcgcccaggctggtctaaaactcctggcctcaaaggattctcctgcatcagcctccaaaactgctgggattacaggcatgagccacggtacccaccctgctgcactttacaaaccaccctgtgctgcttgttttctttctggtctttgaggcccctacatgattctgaagcaaattatgtgaagatgttgttgtcagtggtaggaattaagcaactttaccagaaagtaatttttccatgttatttatgcatggaaacaaatatgtattctaaagcaatatatactgttatatttactgtttaacctcatagaaaccttgcaaaatagaagccacttaaagcctcacacccaaacctctattggaaccttttcacttggctttgtgtgtacttatagaacaaattaaacacataaatactaaaaacaaaaagcagctcataatcctctccttttggctttaaaaaaattatttaaaggcttaacatgtattaatttaaaggaaatggcatgaaatgaagaaaatgtctcctcatcctgtcttcccaagggaaacctgtgtaaatcattcctcaaacatcctcctaggttaaaatgaagacacctgccatgtatatgtagacagtattaatctcagtccacacaggtgtgaaaaaagctgcactctttgtatagtccgttctcccattgttacaaggaactatctgagacggggtaacttatgaaaaaaagaggtttcactgactcacagttccgcaggcttaactggaagcatggctgagaggcttcaggaaacttaaaatcatggcagaaggcgaaggggaagcaagcatcgtcttactggggcgtcttaccagggcagagcaggagagtgagtaagaagggggaggtgccacacacgtttaaaggattagatctcctgagaactcagtatcstgagaacagcaagggggacgctgacgtgcaagatccaatcacctcccaccaggcccctcccccaattcgacattggagatttgggtgggaatacaaatccaaaccatatcagctttaatttttataactaacttattttcgggtggcccacattttgacaggtgggtggtaattatatgctccaactgttaccggagaggggtcctgatccagacccaagagagggttcttgagtctcccgcgggaaagaattagaggtgaatccataaagcgaaagcaagtttatcaggaaagtaaaggaataaagaacggctactccataggcagagcagcggcttgggccgctcagctgctcagacttagtgttacttcttgattacatgctaaacatggggtggattattcatgagttttttgggtaaggtgtaggcaattcccagaactgaggtttcctcccgtttttagtccatataaggtaactccctgacattgccatagcatttgtaaactgtgatggcattggtaggagtgtgttttagta

SEQ ID NO: 711613 - DNA, 554 bp, Homo sapiens
ttcatatctgaagaactgtcaaaaaaaataagaaaacattctctgttgttcctgatgagtgagactataggaaagaggtttgattaaaaatacaaagcttactaataattagatgccttccccggtataagtgagtttccaatctattaggggagatattcaagcagaggctgtgtcacaatctggsctggaaactctagtatctacccaaaggggtagaagattaggttgattttaggggtttgttttttcagttctatctcctacatgtggtgaccttagtttctgaaccccaaaccaagacctatgatcctataaaagactttttgtgttgcttccagatttgaaagacagtctagcaggtacaaccaccaaaatatcgtcgtttctaggagttatcagtgatgaaataatggggaaaatatatgaaattggaactttccaggaaagaggaagaagtgaaatcacactacagcaggcatttacttctctttgaatactcatgtttcaaccaagaaggcagaaactctgggtaaaatttccttttttttttt

SEQ ID NO: 711614 - DNA, 810 bp, Homo sapiens
aaaaaaaatcaggcttagttaaaggtttgttttctattccattgatactctatactacatatttgcaactgtttctgttttagtacacattgattaatagcattagtcctcaaatcccagcatgttcacacacacgcaaaaaagtatttccatctgtaatcttcattaaggcaagagaaatctatcaattttggcatgcttgctgcttctttcagctgcagtcttgagtccttgcaaatgtctgagactatgagcctcacagctgccattaaatgctaattgtagggcaggtgtgcwctctagaaatggaggccaaaaagaatggagcaaaagagccaaagagaaagagaagtcttgacacctgaaagatgcagctccctctgtgctttacaccttacttgactgggcaggaaaactggcatttgaactaacaatgaaaatatgctaaacaaccaaacaagaagcaggtatgatccacaagggatgtaaaaaaagaaagggtatactggacaattatgtgcttaatagattagatgacgacagcagctaaagcgcttaaattacatctattgttaccttctttaagaagtggaaatcataggaataatgctaccaagacaactgaaatattttcacatccttccctaaatgtattccttaagaaaaaagtttacgactgctcctgctgctacttgctgaagtttttcgtaacctttaaagaactgtctcatctacaagttaaaactggctagttatcaggatttactgaatccctgcagtttgcaatatgcgttctgtgcaagaatacaa

SEQ ID NO: 711615 - DNA, 459 bp, Homo sapiens
tgactataaaatgctaacaatagttgttctttccttattggacactcaagaggattaaatattattcatgtaaggctcttagtataacaccttgcacataggaagcatttaatacctaaaatcgagtactgttattgtttcaggattattattttttttaaatttattttatttttttgggacagggtcttgctctgttgcccgggctggagtgcagtggtgcgatctcagctcmctgcaacctgcttcctgggttcaggtgattgtcctgcctcagcctccctagtagctgggattacaggcgcacgccagcacgcctgactgatttctgtattttcagtagagatggggtttcatcatgttggccaggctgctctcaaactcctgacatcaagtgatttgcccgccccagcctcccaaagtgctgggattacaggtgtgagccaccgtgcccagctc

SEQ ID NO: 711616 - DNA, 804 bp, Homo sapiens
ttccttccttctttccatctttcttgttttcttkttttcttttttttttaagagggagtttcgctttttttgcccatgctggagtatagtggcacgatcttagttcactgcaagctctgacccgcctcctgggttcaagtgattctcatgcctcagcctcctgattagctgggattacaggtgcctgccaccacatccggctaatttttgtatttttagtataaatacggtttcaccatgtttgccaggctgctctcaaacgcctgacttcaggcgatccacctgcctcagcctcccaaagtgctgggattacaggcatgagctaccgcgcctggccaaagacctctctaccttaaacctctggaaaaaaacaaaaacaaaaataaacaaaaaataaagcaaaacaaacaacaaactagaacattttattttctacctgtctgaataagcagttttcttcaccactattccatacaaaaagtgaccaccatagtacaggccatcacactctccctgcacccctctagtagattcttcactagcccatacagtttcctcttgttcctctttagtacattctttctacatgtttcagaaggatcttcgaaaattcaaatctgagatagttatttcctcaccatcctcccttacctcttgaccccttagaggttttaaacagccttattaagatataattcacacaccacacaattcacccattgaaagtgtacaattcattggtttttagtatattcccagtcatgcaaccatcatcacaggtttatttcttcttcttcttttttt

SEQ ID NO: 711617 - DNA, 1027 bp, Homo sapiens
tttatagctctctctccccctaaattcacacatgcatctctggggctggagatcagctcaagagatggacaccccattgtttcctgaaacactctcctctctaaccatgaagtcttattcctggactagcctatgtatctgcctctcctctgcccatcacccatgctcatatcattcacattagacctttgtattctgggtgaactggggagatgtggcccttgggttcactttgattacttccttgtaaaaataaacgcttaatagccctgcccactaattttttggatatgatattttaggcccaagccgggagtcatccttccatcactctatatttggaagagggaaggatttgtggcatcaaatatttaaaaataaaagtaaaaatattaaaattaattgagtaacttaattaaaataatagtttaaagtggcagcagggcaaaggagcatttgtagcttcagaaatgtagtgatcattctacagtcttttgaaaagataaacctgacaggaatttctagcgaaaatgaaaattggtgacggttgagcagctgcaaagcaaaagtgaaaaagtccttgagttgtcctagcacagaacgtgctcaccagcgccgttggatcctatccctgataccaaaggatccactgtgaatagcccagcaatttttagcactgcagctgagtaaaacagagtggcagatccaaatgtcattaaacatttataatttcggggaaacccttatttcaaatcaattcttcataaccatttcctcagtaaattcattcaacaagtatttatcgggcagtttctatgagtcagataatattataggggctggggatatagcagtgaccaagaccatttagaactctattcttaagacattgccaccttcctgggaggagaaaggtgccaacagaaatggataagccagataatttaagtttyggataaaataaaacaaggtacattgttttattgacataaggtcaagaaaagtcctctctaaagaggtgatgttg

SEQ ID NO: 711618 - DNA, 894 bp, Homo sapiens
tcctgacctcaagggatctacccaccttggcctctcaaagtgctgggattacacgcgtgagccactactcccggcctttagaaacttttttttttttttttgagacagagtattgctctgtcacccaggctggagtgcagtggtatgatcttggctcactgcagcccctgcctcccgggttcaagtgattctcgtgcctcagcctcctaagtagctgggattacaggcatgtgccaccacgcctggctaatttttatatctttagtagtagccatgttggccaggctagtctcaaactcctgacctcaggagatccacccgcctcagcctcccaaaatgctgggattacaggcatgagccatcgcacccagcctctagaaactctttgaatcacatattagttatattgtgttatcttctggtttttcaattttattaaggtcaagtttgtgataaaggtaaaaatatatatacatatttataatttatattaaaagttaaaaagtttccagttttactaaagtgaagcttatattagaagtaaaaacagaagcattcactttacaagctcctggaacctgtaaagccctgaatcgagtcagtggtgtcctaatgcagaaggttaatgtttgcacacgtggcattctagttacrttttgaaatggcttcacggtccattagccactttgtggaggcatgaattttcccagagcaccattttagcgaaggggactgatggcccgagaaggaaaatgggaggctggagggcgcgatgccccataaaacccagatttcatgacactgaggagattaagctgctgtgtgccacactgttcatttcaagtggtcttgagggactccctttaatctccaggtgaaagctgacgattcgga

SEQ ID NO: 711619 - DNA, 894 bp, Homo sapiens
tcctgacctcaagggatctacccaccttggcctctcaaagtgctgggattacacgcgtgagccactactcccggcctttagaaacttttttttttttttttgagacagagtattgctctgtcacccaggctggagtgcagtggtatgatcttggctcactgcagcccctgcctcccgggttcaagtgattctcgtgcctcagcctcctaagtagctgggattacaggcatgtgccaccacgcctggctaatttttatatctttagtagtagccatgttggccaggctagtctcaaactcctgacctcaggagatccacccgcctcagcctcccaaaatgctgggattacaggcatgagccatcgcacccagcctctagaaactctttgaatcacatattagttatattgtgttatcttctggtttttcaattttattaaggtcaagtttgtgataaaggtaaaaatatatatacatatttataatttatattaaaagttaaaaagtttccagttttactaaagtgaagcttatattagaagtaaaaacagaagcattcactttacaagctcctggaacctgtaaagccctgaatcgagtcagtggtgtcctaatgcagaaggttaatgtttgcacacgtggcattctagttacgttttgaaatggcttcacggtccattagccactttgtggaggcatgaattttcccagagcaccattttagcgaaggggactgatggcccgagaaggaaaatgggaggctggagggcgcgatgycccataaaacccagatttcatgacactgaggagattaagctgctgtgtgccacactgttcatttcaagtggtcttgagggactccctttaatctccaggtgaaagctgacgattcgga

SEQ ID NO: 711620 - DNA, 1378 bp, Homo sapiens
gatgccttagagaccagaggtactgggattattagcctctgaagcgtccacagatccagattaaccccatgacaattcagaagaatcactgacagtccacaggggaggtatcgattggatgtttcctctccgacaagaacccttcagcagggccagcctcactggcatgaggccagtgcaattgcacagagatccccgtgcaggacaggtgttggccttgaggcttcatgctccacagctgccatcttggaatgcgtaatcattggatctgaatgtgtatgtggaaatttagccccatgggatgatgtgtgcccggggcttggcatctcccctcctccacccagcggccatgactgtcctccccgatgggggatacctggcagggtctacacaaggggtgtccaatcttttggcttcccctgggccacaytggaagaagaattgtcttgggccacacataaaatacactaataccaatgatagctgatgagctaaaaaaaaaaaaaaattgccaaaaaaaatctcataatgtgttaagaaagttgacaaatttgtgttgggctgcattcaaagctatcttgggctgcaggttgaacacacttggtctacactcacccagtagtaatcccttgtgtggtggagaccaataatctatatcaagtggaactcaccaggacactcgagggagagatcacagaagacagaagcaagtgtcttcctgctattggcagtctgccccacgaattctgtagccagtcctgccctcatggcaacctcatcgcctcacctgccttccttgaaccagagacctttcctccctgcccttggtcattccaaactcccctgtggaagtttcaaatgtgctgacccaaactacttatctctgtgttgggaagccgcaaggggtcgcaggagcccccaaatggtcacgtacagacccctgtcccatccacctctttctcccactggcgcccaaagctctgggctggcaccgctcatacaccgccacccctggggatctggattcttgcctaataatgctgtttacagtaccactcccacccagctacacccacccagctacccccaccgagcccagaaaggcaacacagacctaaaaacccacaatcctttctctccccttcttttgttcagacttcctctttatttttcacatctcctttttttctgtctacaaaattaaaccatatttgtggctggaaatttggaaaatgcacaagattacaaagaagaaaatttgtcatcccaagataaaaatactgctcaaaatgatctttctccagattgtattctctgcacattgtaaaagtatgtttttttccaaaagaaattacgaccacctgtttccactgaatga

SEQ ID NO: 711621 - DNA, 1378 bp, Homo sapiens
gatgccttagagaccagaggtactgggattattagcctctgaagcgtccacagatccagattaaccccatgacaattcagaagaatcactgacagtccacaggggaggtatcgattggatgtttcctctccgacaagaacccttcagcagggccagcctcactggcatgaggccagtgcaattgcacagagatccccgtgcaggacaggtgttggccttgaggcttcatgctccacagctgccatcttggaatgcgtaatcattggatctgaatgtgtatgtggaaatttagccccatgggatgatgtgtgcccggggcttggcatctcccctcctccacccagcggccatgactgtcctccccgatgggggatacctggcagggtctacacaaggggtgtccaatcttttggcttcccctgggccacattggaagaagaattgtcttgggccacacataaaatacactaataccaatgatagctgatgagctaaaaaaaaaaaaaaattgccaaaaaaaatctcataatgtgttaagaaagttgacaaatttgtgttgggctgcattcaaagctatcttgggctgcaggttgaacacacttggtctacactcacccagtagtaatcccttgtgtggtggagaccaataatctatatcaagtggaactcaccaggacactcgagggagagatcacagaagacagaagcaagtgtcttcctgctattggcagtctgccccacgaattctgtagccagtcctgccctcatggcaacctcatcgcctcacctgccttccttgaaccagagacctttcctccctgcccttggtcattccaaactcccctgtggaagtttcaaatgtgctgacccaaactacttatctctgtgttgggaagccgcaaggggtcgcaggagcccccaaatggtcacgtacagacccctgtcccatccacctctttctcccactggcgcccaaagctctgggctggcaccgctcatacaccgccacccctggggatctggattcttgcctaataatgctgtttacagtaccactcccacccagctacacccacccagctacscccaccgagcccagaaaggcaacacagacctaaaaacccacaatcctttctctccccttcttttgttcagacttcctctttatttttcacatctcctttttttctgtctacaaaattaaaccatatttgtggctggaaatttggaaaatgcacaagattacaaagaagaaaatttgtcatcccaagataaaaatactgctcaaaatgatctttctccagattgtattctctgcacattgtaaaagtatgtttttttccaaaagaaattacgaccacctgtttccactgaatga

SEQ ID NO: 711622 - DNA, 1378 bp, Homo sapiens
gatgccttagagaccagaggtactgggattattagcctctgaagcgtccacagatccagattaaccccatgacaattcagaagaatcactgacagtccacaggggaggtatcgattggatgtttcctctccgacaagaacccttcagcagggccagcctcactggcatgaggccagtgcaattgcacagagatccccgtgcaggacaggtgttggccttgaggcttcatgctccacagctgccatcttggaatgcgtaatcattggatctgaatgtgtatgtggaaatttagccccatgggatgatgtgtgcccggggcttggcatctcccctcctccacccagcggccatgactgtcctccccgatgggggatacctggcagggtctacacaaggggtgtccaatcttttggcttcccctgggccacattggaagaagaattgtcttgggccacacataaaatacactaataccaatgatagctgatgagctaaaaaaaaaaaaaaattgccaaaaaaaatctcataatgtgttaagaaagttgacaaatttgtgttgggctgcattcaaagctatcttgggctgcaggttgaacacacttggtctacactcacccagtagtaatcccttgtgtggtggagaccaataatctatatcaagtggaactcaccaggacactcgagggagagatcacagaagacagaagcaagtgtcttcctgctattggcagtctgccccacgaattctgtagccagtcctgccctcatggcaacctcatcgcctcacctgccttccttgaaccagagacctttcctccctgcccttggtcattccaaactcccctgtggaagtttcaaatgtgctgacccaaactacttatctctgtgttgggaagccgcaaggggtcgcaggagcccccaaatggtcacgtacagacccctgtcccatccacctctttctcccactggcgcccaaagctctgggctggcaccgctcatacaccgccacccctggggatctggattcttgcctaataatgctgtttacagtaccactcccacccagctacacccacccagctacccccaccgagcccagaaaggcaacacagacctaaaaacccacaatcctttctctccccttcttttgttcagacttcctctttatttttcacatctcctttttttctgkctacaaaattaaaccatatttgtggctggaaatttggaaaatgcacaagattacaaagaagaaaatttgtcatcccaagataaaaatactgctcaaaatgatctttctccagattgtattctctgcacattgtaaaagtatgtttttttccaaaagaaattacgaccacctgtttccactgaatga

SEQ ID NO: 711623 - DNA, 411 bp, Homo sapiens
gaattcatatccagaccttaggcaggaatctacgcctaatagctacacgctaattcccgattttttttttccataaaaaaggatatgaggccgggcacggtggctcacgcctgtaatcccagcactgtgagaggctgaggcaggcagatcacttgaggtcaggagttcgagaccagcctggccaacacggtgaaaccctgtctttactaaaaatacaaaagttagccaggcgtggtgttgcacacctaaaatcccagctactcgggaggctgaggcagaagaattgctttaacctgggagactgaggttgcagtgagccgagatcacaccgccgccctgggcgactcagtgagactctgtctcaaaaaataataataataattaaaaaacaasgcgttatgaaaacatttc

SEQ ID NO: 711624 - DNA, 454 bp, Homo sapiens
ggccccattccttcaccctctctccccctgcttccatggccacacccagataatccaggagactcttcccatatcaagatccttaccttgactacatctgcaaagtcccttttgccacataaagcaacattcacagattccagggattaggacctgggtatctttgggggccactacttcgatgaccacaagcacccagctcttaatgcactcaataaatatttgttgagtgcatgaatcaattttaactgtttagcatccttgttggcagcctcttggctcagtcctttcaggaatgtgtgttttctcttccatcaagtttgttcgaatctcctgttcagtaaggatttcctgaccctaatttaacatcacagcttgcccctccatcacacacactccccattgycttaccctacttaagtttacttcttccccatagctttttgtcacttaa

SEQ ID NO: 711625 - DNA, 657 bp, Homo sapiens
caaaacgctctctcatcagagctactctttctgaataaagaattcggtctcttcttctctcagctttcttggcatcagaaattgaattcgtgggagctgaccatgccatctaaaacagtccaaaagtaagactctaaactctgttgcaaaatggtttattctgtccctttgccctaccccacaaacgtattcagctacatagtaaaatgctatggcagaaagttcaaccttacttggatgtagtatattcagcatcctgaactctgaccttttactttttcggcaggacagtcatgtagcaggtaacratgtttcagtccgtgatggacagtatatacaacagtggtcccgtaagattatcatgccatatttttgctgtggcttttctatgtttagatacacatatacttgccgctgtgttgtaactgcctacagtgttcagtacagtcacatgctgtataggtctgtggcctagaagcaacagactacatcagatagtctaggtgggtagtaggttatgccctctaggtttgtacactctgtgatattcgaacaatgacaaaatgcccaatgatgtatttctcagaacgtattggtgtcattaagcaatgctgactgtacatacatatcacagacaactcaattatcctttttttt

SEQ ID NO: 711626 - DNA, 1262 bp, Homo sapiens
gggtttattaacagtacaggctctgacgcaagcaaacacactcagtgattaatgctaatggtaatggtggtgcagtgatgaccgtcccttttcaacactgccacctccccctgcacatacatcgtrgggacaccagtggctccagccgttcaagtctgggtctttgcctgtggtgcccccagggcatggtagtgaaaggccgggctccggaagccacctttatctgaagcgtggaaatgtggttccaggctgcctgtcccaacagcagacccatccacctggccggtggggattgatctgatgggcacgagggcccaggagcatgttcccggcctctctggatcatggactgctcttgagcaccgaacttgaccagccttatcaaatctgactgtatttccctttctgtaattcaccagagagccttgtaaatcagcagccactagcaattcctgctttgtggtggctgtaagactcagagcaacttgtttttccagacctctcgtctaatcttttctgtgtgtgtgtgtgtgtgtgtgttttaaatgttatcttgaacaagaaacagctaaaattttatttttttttttgcattgcgacagggtttttgcccagggtctgttggatgggccggttaacaatataggcactaaagccaggtccctcttggctgggggattttgggtgagttattagctaatcttagctttgaattttccatctataaaacaagacccagaatagtatgtacttcatagagatgttgcgaggattaattaatgcttataatgcttctaaatgggcttaaagcactacctagtccataataagtgcctaagaaatgttattataggatttgaagttgcacggactggaacttgaatcttggtctctgccccttacctgctgtgtgacattaacaagtgtctccacctctctgagcctgtgtctgccttatattaatagctgtggttgttgcaggttgagccaccagtgtgtcctagttggtctgggatatgcctgatttttagtgctgaacgtcccatatcctcagtcccaggcaagctgggatgcttggtcacactggttatggggttgaaataaaccatagcacctagcacattgtaggtgtgagtaaatggaaacatgccagaagtagtctgtcccattaggttatgtgtgggaggtggtggggggatgttatagctgctcatttgtttcagactacaaatactcatgccatttatctcagacatagaact

SEQ ID NO: 711627 - DNA, 1262 bp, Homo sapiens
gggtttattaacagtacaggctctgacgcaagcaaacacactcagtgattaatgctaatggtaatggtggtgcagtgatgaccgtcccttttcaacactgccacctccccctgcacatacatcgtggggacaccagtggctccagccgttcaagtctgggtctttgcctgtggtgcccccagggcatggtagtgaaaggccgggctccggaagccacctttatctgaagcgtggaaatgtggttccaggctgcctgtcccaacagcagacccatccacctggccggtggggattgatctgatgggcacgagggcccaggagcatgttcccggcctctctggatcatggactgctcttgagcaccgaacttgaccagccttatcamatctgactgtatttccctttctgtaattcaccagagagccttgtaaatcagcagccactagcaattcctgctttgtggtggctgtaagactcagagcaacttgtttttccagacctctcgtctaatcttttctgtgtgtgtgtgtgtgtgtgtgttttaaatgttatcttgaacaagaaacagctaaaattttatttttttttttgcattgcgacagggtttttgcccagggtctgttggatgggccggttaacaatataggcactaaagccaggtccctcttggctgggggattttgggtgagttattagctaatcttagctttgaattttccatctataaaacaagacccagaatagtatgtacttcatagagatgttgcgaggattaattaatgcttataatgcttctaaatgggcttaaagcactacctagtccataataagtgcctaagaaatgttattataggatttgaagttgcacggactggaacttgaatcttggtctctgccccttacctgctgtgtgacattaacaagtgtctccacctctctgagcctgtgtctgccttatattaatagctgtggttgttgcaggttgagccaccagtgtgtcctagttggtctgggatatgcctgatttttagtgctgaacgtcccatatcctcagtcccaggcaagctgggatgcttggtcacactggttatggggttgaaataaaccatagcacctagcacattgtaggtgtgagtaaatggaaacatgccagaagtagtctgtcccattaggttatgtgtgggaggtggtggggggatgttatagctgctcatttgtttcagactacaaatactcatgccatttatctcagacatagaact

SEQ ID NO: 711628 - DNA, 1262 bp, Homo sapiens
gggtttattaacagtacaggctctgacgcaagcaaacacactcagtgattaatgctaatggtaatggtggtgcagtgatgaccgtcccttttcaacactgccacctccccctgcacatacatcgtggggacaccagtggctccagccgttcaagtctgggtctttgcctgtggtgcccccagggcatggtagtgaaaggccgggctccggaagccacctttatctgaagcgtggaaatgtggttccaggctgcctgtcccaacagcagacccatccacctggccggtggggattgatctgatgggcacgagggcccaggagcatgttcccggcctctctggatcatggactgctcttgagcaccgaacttgaccagccttatcaaatctgactgtatttccctttctgtaattcaccagagagccttgtaaatcagcagccactagcaattcctgctttgtggtggctgtaagactcagagcaacttgtttttccagacctctcgtctaatcttttctgtgtgtgtgtgtgtgtgtgtgttttaaatgttatcttgaacaagaaacagctaaaattttatttttttttttgcattgcgacagggtttttgcccagggtctgttggatgggccggttaacaatataggcactaaagccaggtccctcttggctgggggattttgggtgagttattagctaatcttagctttgaattttccatctataaaacaagacccagaatagtatgtacttcatagagatgttgcgaggattaattaatgcttataatgcttctaaatgggcttaaagcactacctagtccataataagtgcctaagaaatgttattataggatttgaagttgcacggactggaacttgaatcttggtctctgccccttacctgctgtgtgacattaacaagtgtctccacctctctgagcctgtgtctgccttatattaatarctgtggttgttgcaggttgagccaccagtgtgtcctagttggtctgggatatgcctgatttttagtgctgaacgtcccatatcctcagtcccaggcaagctgggatgcttggtcacactggttatggggttgaaataaaccatagcacctagcacattgtaggtgtgagtaaatggaaacatgccagaagtagtctgtcccattaggttatgtgtgggaggtggtggggggatgttatagctgctcatttgtttcagactacaaatactcatgccatttatctcagacatagaact

SEQ ID NO: 711629 - DNA, 582 bp, Homo sapiens
tgaagttgtgtctattttccactcacacgcttcccaggaagagtcctggacagcgtatcaggatctctcattttcttgcttgaactcactgcaggctcatcttgtggcraggctcaccacccaccatgccaggtcttgtcagtgccctggggcagcgtggatgggctgcccatgctttcagctaacagacagcagcaaaggccatcgcctccttctgacggaatcagaaggtggaaccaggccagtgtagggtgggaccagaactgatgtctggacacacgacccgtagactgtccctgccattggagagctggggaccgcgccacaggaggctgcgtggttatcgcctgtgagccacgaagaccttcatttcctcatctgtgtttactttgtgtctcctctgaatgtgatcctatgttctgggtggtggttgtttcccgaaatggctgcatttcaaatatgctgttcttttcccatcaatagtttcttgccagctgggtgcagtggctcacgcctgtaatcccagcactttgggaggccgaggcaggtggatcatgaggtcaagagctcgagaccagcctg

SEQ ID NO: 711630 - DNA, 582 bp, Homo sapiens
tgaagttgtgtctattttccactcacacgcttcccaggaagagtcctggacagcgtatcaggatctctcattttcttgcttgaactcactgcaggctcatcttgtggcgaggctcaccacccaccatgccaggtcttgtcagtgccctggggcagcgtggatgggctgcccatgctttcagctaacagacagcagcaaaggccatcgcctccttctgacggaatcagaaggtggaaccaggccagtgtagggtgggaccagaactgatgtctggacacacgacccgtagactgtccctgccattggagagctggggaccrcgccacaggaggctgcgtggttatcgcctgtgagccacgaagaccttcatttcctcatctgtgtttactttgtgtctcctctgaatgtgatcctatgttctgggtggtggttgtttcccgaaatggctgcatttcaaatatgctgttcttttcccatcaatagtttcttgccagctgggtgcagtggctcacgcctgtaatcccagcactttgggaggccgaggcaggtggatcatgaggtcaagagctcgagaccagcctg

SEQ ID NO: 711631 - DNA, 582 bp, Homo sapiens
tgaagttgtgtctattttccactcacacgcttcccaggaagagtcctggacagcgtatcaggatctctcattttcttgcttgaactcactgcaggctcatcttgtggcgaggctcaccacccaccatgccaggtcttgtcagtgccctggggcagcgtggatgggctgcccatgctttcagctaacagacagcagcaaaggccatcgcctccttctgacggaatcagaaggtggaaccaggccagtgtagggtgggaccagaactgatgtctggacacacgacccgtagactgtccctgccattggagagctggggaccgcgccacaggaggctgcgtggttatygcctgtgagccacgaagaccttcatttcctcatctgtgtttactttgtgtctcctctgaatgtgatcctatgttctgggtggtggttgtttcccgaaatggctgcatttcaaatatgctgttcttttcccatcaatagtttcttgccagctgggtgcagtggctcacgcctgtaatcccagcactttgggaggccgaggcaggtggatcatgaggtcaagagctcgagaccagcctg

SEQ ID NO: 711632 - DNA, 586 bp, Homo sapiens
actcctaggagctccatgctgacaggtgcacatggggaaagccagtcttcgaccccagaccatggcctgtcccccttcttgtctcatcctggtccctttctgcagggcgaggggtctcagactcatgggtgcagatgccgtagccatgcatcaagctctgctcatatcccttgcaaacagccatccctcgaccacctcttcaggctcatctgtaaaagaagtgctgtgaacaagactagcacaggccttgggagtgagyttggggccgtttgggccaggagctctggcctgggtacccagagcatgacctagaggtgaaggtgcaggtccagatgggcggtctcctcgtatttggctcctggcttccccgtgacctgtagcaccatgacatggtgaacggcttccatgttgtctgcatggcacacccttcatgctctcgtcatgggtggaatcccgatctgtctctcatcgctgaccacaagggcatagcagtcttttcggtctgggctgccttttcattcttgactatttcagtcctagcacactgactttccctgccccccacctaagcctttaagcctgagtc

SEQ ID NO: 711633 - DNA, 586 bp, Homo sapiens
actcctaggagctccatgctgacaggtgcacatggggaaagccagtcttcgaccccagaccatggcctgtcccccttcttgtctcatcctggtccctttctgcagggcgaggggtctcagactcatgggtgcagatgccgtagccatgcatcaagctctgctcatatcccttgcaaacagccatccctcgaccacctcttcaggctcatctgtaaaagaagtgctgtgaacaagactagcacaggccttgggagtgagcttggggccgtttgggccaggagctctggcctgggtacccagagcatgacctagaggtgaaggtgcaggtccagatgggcggtctcctcgtatttggctcctggcttccccgtgacctgtagcaccatgacatggtgaacggcttccatgttgtctgcmtggcacacccttcatgctctcgtcatgggtggaatcccgatctgtctctcatcgctgaccacaagggcatagcagtcttttcggtctgggctgccttttcattcttgactatttcagtcctagcacactgactttccctgccccccacctaagcctttaagcctgagtc

SEQ ID NO: 711634 - DNA, 659 bp, Homo sapiens
acacaaaaccataattatagaataagataatgtaaaaaatatttacaattataaaatatttcgtaattgtctaaaaatacagaaaatacctaagcataaacttaaaattggtaacatccagtatctacaagagtaaaccatgaaagcactccagaaagacacaaaacatggcttragcaaatataaagacatagcatgttcttagctagcaagaccaaacatcactgcagcagcatcagttctccctaagttaatgcatttaacatcatctcaattaaaatacctatttttgttacggagctacaaaaattgctgatgaaattcattggaaagaacaaacaagcacaagtagctaggaaaaaccatgaaaaagaaaagcaacaggggttggggacggggcactacccacaccagatattgaaacatacaaaacatccatacatgaaagaatggcaccatcactggtagttgccagagctaaagggaagggagaatgggtagttactgtttaacgggtacagagtttcaggtttaagagataaagaattatagagatgctgctggtggtgatggttacacattatgaacgtatttaatgccactgaaccgtacactaaaagtagtatacagtagttaagatggtaaatttcacattgtgt

SEQ ID NO: 711635 - DNA, 615 bp, Homo sapiens
tgttttgacgggcatatctcctctgtgccktgaaacaggaggttttcatgaccagccagtctatcaactggatgatgatgatgattattattattatttgagacagagtttcgctcttgttgcccaggctggagtgcagtggtgcaatcttggctcattgcaacctcccctcccggcttcaagccattctcctgcctcagcctcccaagtagctgggattacagctgtgcaccaccatgcctggctaattttgtgtgtgtgtgtgttttttttttttttttttttgttgttgttgtttttttaagtagagacggggtttcaccctgttggtcaggctggtcttgaactcctgacctcaagtgatccacccacctcggcctcccaaagtgctgggattacaagcgtgggccaccgcacccggccgtcagctggattatttttaatagctctgacggaagttcagagtcggaatagtactgattaaaaaagcttgcattggtttcaccacctttctgttcttggttccatttctaggcttttccaagaatttgatttatgttggcagtaacagttcttttagggcacagctccattaatattttcaaactgcctatt

SEQ ID NO: 711636 - DNA, 615 bp, Homo sapiens
tgttttgacgggcatatctcctctgtgccttgaaacaggaggttttcatgaccagccagtctatcaactggatgatgatgatkattattattattatttgagacagagtttcgctcttgttgcccaggctggagtgcagtggtgcaatcttggctcattgcaacctcccctcccggcttcaagccattctcctgcctcagcctcccaagtagctgggattacagctgtgcaccaccatgcctggctaattttgtgtgtgtgtgtgttttttttttttttttttttgttgttgttgtttttttaagtagagacggggtttcaccctgttggtcaggctggtcttgaactcctgacctcaagtgatccacccacctcggcctcccaaagtgctgggattacaagcgtgggccaccgcacccggccgtcagctggattatttttaatagctctgacggaagttcagagtcggaatagtactgattaaaaaagcttgcattggtttcaccacctttctgttcttggttccatttctaggcttttccaagaatttgatttatgttggcagtaacagttcttttagggcacagctccattaatattttcaaactgcctatt

SEQ ID NO: 711637 - DNA, 615 bp, Homo sapiens
tgttttgacgggcatatctcctctgtgccttgaaacaggaggttttcatgaccagccagtctatcaactggatgatgatgatgattattattattatttgagacagagtttcgctcttgttgcccaggctggagtgcagtggtgcaatcttggctcattgcaacctcccctcccggcttcaagccattctcctgcctcagcctcccaagtagctgggattacagctgtgcaccaccatgcctggctaattttgtgtgtgtgtgtgtkttttttttttttttttttgttgttgttgtttttttaagtagagacggggtttcaccctgttggtcaggctggtcttgaactcctgacctcaagtgatccacccacctcggcctcccaaagtgctgggattacaagcgtgggccaccgcacccggccgtcagctggattatttttaatagctctgacggaagttcagagtcggaatagtactgattaaaaaagcttgcattggtttcaccacctttctgttcttggttccatttctaggcttttccaagaatttgatttatgttggcagtaacagttcttttagggcacagctccattaatattttcaaactgcctatt

SEQ ID NO: 711638 - DNA, 601 bp, Homo sapiens
tgagaattcactctatatattggttaagtggagactatgcctttcactattttctcaggaggactatttatatttatgacacattctgwtaaaaaaatatatatatataattatactttaagttttgggatacatgtgcagaacgtgcaggtttgttacataggtatacatgtaccatggtggtttgttgcacccatcaatccgtcatctacattaggtattcctcctgctatccctccccttgccccccaccctctgacaggccccagggtgtgatgttcccctccctgtgcccatgtgttctcattgttcaactcccactatgagtgagaacatgcagtgtttggttttctgttcctgtgtagtttgctgagaatggtggtttccagcttcatccatgtccctgcaaatgacatgaactcatcctttcttatggctgcatagtattccatggtgtatatgggccacattttctttatccagtgtaatattgatggacatttgggttgtttccaagtctttgctattgtgaatagtgctgcaataaacatacgtgtgcatgtgtctttatagtagagtgatttataatcctttgggaata

SEQ ID NO: 711639 - DNA, 1168 bp, Homo sapiens
tttgctctaaaccaaacctcaacctctgcatgatattctagcatctgccctcaaaagtagtgcaaaactgaaaaagtattcccaaatagctgagacagtgagtcctttagagttatgcactgtgcctcattcatactttttttttttttttttttttttttttttttgagacagagtcttgctctgtcgtcaggctggagtgcagtggcgcgatctcggctcactgcaacctctgactccctggttcaagtgattctcctgcctcagcctcctgagtaactgggattacaggcacgtaatcccaccacgcccagctaattttgtatttttagtagagatggggcttcaccatgttggccaggatggtctctatctcctgacctcgtgatccgccygcctcaccctcccaaagtgctggattacaggtgtaagccatggcactcggccccattcattcttataaactatagagatacttttagtagtgatgatacattaccatatatatgtacacacatgcacacacacaatctcatatttttagaaaagttactgctatattatgtttgatattggctgattccgattctattaatgtgacagcatcaaaacattaacatggagttttctgaagatgaaatacacataaatttatctaaatttagatgtagtctaaatttcaattattcgtaacctgatgcaaattcaaatatttgataacatctgttttattttattttataaagcttcctctattttgcatgaagctaagaactagttttaagaacaagttattttaaagctttttattttaccatttgaaagtaatgttttattttccttttatttgggagaaaaatgtacatcttcatgatgagtaaaatgtgtctgacacttctcaaataatttactcatggttaagaataagcaggagtgattagagcttcaaatcagaaaacttcagagagccagaagctatcaaaatgtgcagcttttatgagcgatttctcactcattgctgtatagcagtcaccactgatacagtctagttttttccaaagcatgtataattgggcaaatcatctaaacccccacaagcaggcaattattcaactgcactgacgcagaatcactgggtccagtacttcattagaatataccataatcc

SEQ ID NO: 711640 - DNA, 1168 bp, Homo sapiens
tttgctctaaaccaaacctcaacctctgcatgatattctagcatctgccctcaaaagtagtgcaaaactgaaaaagtattcccaaatagctgagacagtgagtcctttagagttatgcactgtgcctcattcatactttttttttttttttttttttttttttttttgagacagagtcttgctctgtcgtcaggctggagtgcagtggcgcgatctcggctcactgcaacctctgactccctggttcaagtgattctcctgcctcagcctcctgagtaactgggattacaggcacgtaatcccaccacgcccagctaattttgtatttttagtagagatggggcttcaccatgttggccaggatggtctctatctcctgacctcgtgatccgcctgcctcaccctcccaaagtgctggattacaggtgtaagccatggcactcggccccattcattcttataaactatagagatacttttagtagtgatgatacattaccatatatatgtacacacatgcacacacacaatctcatatttttagaaaagttactsctatattatgtttgatattggctgattccgattctattaatgtgacagcatcaaaacattaacatggagttttctgaagatgaaatacacataaatttatctaaatttagatgtagtctaaatttcaattattcgtaacctgatgcaaattcaaatatttgataacatctgttttattttattttataaagcttcctctattttgcatgaagctaagaactagttttaagaacaagttattttaaagctttttattttaccatttgaaagtaatgttttattttccttttatttgggagaaaaatgtacatcttcatgatgagtaaaatgtgtctgacacttctcaaataatttactcatggttaagaataagcaggagtgattagagcttcaaatcagaaaacttcagagagccagaagctatcaaaatgtgcagcttttatgagcgatttctcactcattgctgtatagcagtcaccactgatacagtctagttttttccaaagcatgtataattgggcaaatcatctaaacccccacaagcaggcaattattcaactgcactgacgcagaatcactgggtccagtacttcattagaatataccataatcc

SEQ ID NO: 711641 - DNA, 1168 bp, Homo sapiens
tttgctctaaaccaaacctcaacctctgcatgatattctagcatctgccctcaaaagtagtgcaaaactgaaaaagtattcccaaatagctgagacagtgagtcctttagagttatgcactgtgcctcattcatactttttttttttttttttttttttttttttttgagacagagtcttgctctgtcgtcaggctggagtgcagtggcgcgatctcggctcactgcaacctctgactccctggttcaagtgattctcctgcctcagcctcctgagtaactgggattacaggcacgtaatcccaccacgcccagctaattttgtatttttagtagagatggggcttcaccatgttggccaggatggtctctatctcctgacctcgtgatccgcctgcctcaccctcccaaagtgctggattacaggtgtaagccatggcactcggccccattcattcttataaactatagagatacttttagtagtgatgatacattaccatatatatgtacacacatgcacacacacaatctcatatttttagaaaagttactgctatattwtgtttgatattggctgattccgattctattaatgtgacagcatcaaaacattaacatggagttttctgaagatgaaatacacataaatttatctaaatttagatgtagtctaaatttcaattattcgtaacctgatgcaaattcaaatatttgataacatctgttttattttattttataaagcttcctctattttgcatgaagctaagaactagttttaagaacaagttattttaaagctttttattttaccatttgaaagtaatgttttattttccttttatttgggagaaaaatgtacatcttcatgatgagtaaaatgtgtctgacacttctcaaataatttactcatggttaagaataagcaggagtgattagagcttcaaatcagaaaacttcagagagccagaagctatcaaaatgtgcagcttttatgagcgatttctcactcattgctgtatagcagtcaccactgatacagtctagttttttccaaagcatgtataattgggcaaatcatctaaacccccacaagcaggcaattattcaactgcactgacgcagaatcactgggtccagtacttcattagaatataccataatcc

SEQ ID NO: 711642 - DNA, 1168 bp, Homo sapiens
tttgctctaaaccaaacctcaacctctgcatgatattctagcatctgccctcaaaagtagtgcaaaactgaaaaagtattcccaaatagctgagacagtgagtcctttagagttatgcactgtgcctcattcatactttttttttttttttttttttttttttttttgagacagagtcttgctctgtcgtcaggctggagtgcagtggcgcgatctcggctcactgcaacctctgactccctggttcaagtgattctcctgcctcagcctcctgagtaactgggattacaggcacgtaatcccaccacgcccagctaattttgtatttttagtagagatggggcttcaccatgttggccaggatggtctctatctcctgacctcgtgatccgcctgcctcaccctcccaaagtgctggattacaggtgtaagccatggcactcggccccattcattcttataaactatagagatacttttagtagtgatgatacattaccatatatatgtacacacatgcacacacacaatctcatatttttagaaaagttactgctatattatgtttgatattggctgattccgattctattamtgtgacagcatcaaaacattaacatggagttttctgaagatgaaatacacataaatttatctaaatttagatgtagtctaaatttcaattattcgtaacctgatgcaaattcaaatatttgataacatctgttttattttattttataaagcttcctctattttgcatgaagctaagaactagttttaagaacaagttattttaaagctttttattttaccatttgaaagtaatgttttattttccttttatttgggagaaaaatgtacatcttcatgatgagtaaaatgtgtctgacacttctcaaataatttactcatggttaagaataagcaggagtgattagagcttcaaatcagaaaacttcagagagccagaagctatcaaaatgtgcagcttttatgagcgatttctcactcattgctgtatagcagtcaccactgatacagtctagttttttccaaagcatgtataattgggcaaatcatctaaacccccacaagcaggcaattattcaactgcactgacgcagaatcactgggtccagtacttcattagaatataccataatcc

SEQ ID NO: 711643 - DNA, 978 bp, Homo sapiens
cgtacacacacatagaacaatgcagagtacttatacttgtttttgttagctgtttctgccctctccagaaaaatcctatctatatgaagaatctcatattataaaagatgcatccagtttgagatttgtttgtttgtttgtttgttttttaatttgagacagggtctcactctgttgcccagtctggagtgcagcggcatgatcttggctcactgcaaccttcacctttggggctcaagcgatcctcctgcttcagccttctgagtagctgrgactacaggggtgcatcaaaacaccaagataatatctgtattttaggtagatggggtttcaccatgttgcccaggctggtctcaaactcctggactcaagtgatctgctcgcctgggcctcccaaagtgttgggattacaggcgtgagccactgtgcctggctgatttttggatttcaatagtagaaattccactttaattctaaatgttttaattctaaaatttaatactgtagaattttattgattttttccttttttttccacactcttgttcccattctcttctcctacttctaagagataaataatgttcagctatcactttcaactcagtggatatacaaataaataacaaattaaagacctatataattgaccgtttggcagtttaaaattcaaggacattggttgggcatggtgacttatacctataatcccagaactttgggaggcaacgggggagaatcacttaaggccaggagtttgagaccagcctgggcaatgtagtgagaccctggctctacaataaatttaaaaattagctggatgaggaggtgtgcccctgtattcataactacttgggaggttgaggctggaggatcacttcagcccaagagaacaaggatgcagtgattgtgccactgtatcactccagcctgggtgacagagtgggaccctgtctgtagtaaaaataaataaataaa

SEQ ID NO: 711644 - DNA, 978 bp, Homo sapiens
cgtacacacacatagaacaatgcagagtacttatacttgtttttgttagctgtttctgccctctccagaaaaatcctatctatatgaagaatctcatattataaaagatgcatccagtttgagatttgtttgtttgtttgtttgttttttaatttgagacagggtctcactctgttgcccagtctggagtgcagcggcatgatcttggctcactgcaaccttcacctttggggctcaagcgatcctcctgcttcagccttctgagtagctgagactacaggggtgcatcaaaacaccaagataatatctgtattttaggtagatggggtttcaccatgttgcccaggctggtctcaaactcctggactcaagtgatctgctcgcctgggcctcccaaagtgttgggattacaggcgtgagccactgtgcctggctgatttttggatttcaatagtagaaattccactttaattctaaatgttttaattctaaaatttaatactgtagaattttattgattttttccttttttttccacactcttgttcccattctcttctcctacttctaagagataaataatgttcagctatcactttcaactcagtggatatacaaataaataacaaattaaagacctatataattgaccgtttggcagtttaaaattcaaggacattggttgggcatggtgacttatacctataatcccagaactttgggaggcaaygggggagaatcacttaaggccaggagtttgagaccagcctgggcaatgtagtgagaccctggctctacaataaatttaaaaattagctggatgaggaggtgtgcccctgtattcataactacttgggaggttgaggctggaggatcacttcagcccaagagaacaaggatgcagtgattgtgccactgtatcactccagcctgggtgacagagtgggaccctgtctgtagtaaaaataaataaataaa

SEQ ID NO: 711645 - DNA, 643 bp, Homo sapiens
ctccctttctgtgtgtctttctttctttctttctttctttctttctttctttctttctttctttctttctttctttccttctctcccttcccttccctttcttttttttttttttttgtcagagtctcactctgttgcccaggttggagttcagtggtgcaatcttggctcactgcaacctctgcctcccgggttcaagcgattctcctgcctcagcctcctgagtagctgggattacaggcgcccaccaccacgcccagctaatttttttgtattttagtggtgacagggtttcaccacgtggtccaggatggtctcaaactcctgacctcaggtgatccatctgcctcaacttcccagtttctaatgatttcctgcatattctttctttcttttttatatatttaggcattatgtttaaatattttaaaatgtactttgaatcccatccagcacyaaagccaatgcctaccacaaagtatttgacagcattagctggacagaatactaattacatctaataatctaatttacagatgtcagctcttcaaggttttatgctatacctatattgctgtaatttcaggatttgctgcctatatttagtctatgaccaaacatagaggttaagaacactggcctg

SEQ ID NO: 711646 - DNA, 643 bp, Homo sapiens
ctccctttctgtgtgtctttctttctttctttctttctttctttctttctttctttctttctttctttctttctttccttctctcccttcccttccctttcttttttttttttttttgtcagagtctcactctgttgcccaggttggagttcagtggtgcaatcttggctcactgcaacctctgcctcccgggttcaagcgattctcctgcctcagcctcctgagtagctgggattacaggcgcccaccaccacgcccagctaatttttttgtattttagtggtgacagggtttcaccacgtggtccaggatggtctcaaactcctgacctcaggtgatccatctgcctcaacttcccagtttctaatgatttcctgcatattctttctttcttttttatatatttaggcattatgtttaaatattttaaaatgtactttgaatcccatccagcaccaaagccaatgcctaccacaaagtatttgacagcattagctggacagaatactaattacatctaataatctaatttacagatgtsagctcttcaaggttttatgctatacctatattgctgtaatttcaggatttgctgcctatatttagtctatgaccaaacatagaggttaagaacactggcctg

SEQ ID NO: 711647 - DNA, 1481 bp, Homo sapiens
atatttaaaaattagctgtacatggtggcatgagcctgtagtcctagctgctcaggaggctgaggcaggaggattgcttgagcccagcagttcgaggctgtagtaagttatgattgtaccactgcactgtagccagtaagttatgattgtaccactgcactgtagcctggacggcagagcaagaccctgtctcagtcagtcaattaatcaatcattcagtatataggagtggaatggctgggtcatgtaatagatatgtttaatgttttgttgttgttgttctttaggccaatacagcagaatagaaatattgaactttttttttttttgagacggagtctcgccctgtcacccaggttgaagtgcaatggcgcgatctcggctcactgcaatctccgcctcccaggttcaagcgattctcctgcctcagcctcctgagtagctgagattgcacgcgtgtgccaccgcgtccgggaaaatatttaacttttaaagaaactgctgaagtaccttctaaagcagtcaatttgccattcccatcagcacgtatgaggcttccgcatagcctttcttggctggctacaaactactgcagaagcttcagaactgagtctcccattgggtttacctggctggtgactacaatcaaagccctgaggcctgcactccctgggccccagacaaagagggaggggtgtcctagaaatacttgctgaagacagtgtcaggaatctgcattctctaaggaagcttcttggccccaggactgccccaggggtgggaaatattgagcaggacccaaggggccctctagctcagcattggaaaaaaatcactctgcacctgaagaggccacagtcccatattacagcccaactctcatgaaactcacttttgcataactaagtatctgagctggtgtcagggcccccaaaagcagtcatggtcgctggctcagagacctgttccagggaggtggtcccccagtagactgcccaggaaggacctgaagaactgagggccctagagtcctgaggaccctcctgggtggaaggatactgatctaggcctattccccactggaaggagctatggggcagcacccaggactagaggacaacgtccatgtacctacccattactgctggggcctggcctttccagctggccctgcttgtggctcaggatccctgatgttaggaggtggtacaatctttagggtgtgagcccctccagagtctggggtgtgctatgcatttatccatccattcattcatcaacatttatcaatgtctcctaggagccagagatgactcaggcargttggatccagttgtgaagcctcccgttcccttccaagggatctagacagtatttaacaggaggggcacttgttaaatgctgtccagggtttttcttttttctttttctttctttttttttttttaaagagacagggtcttatgttgcccaggctggtc

SEQ ID NO: 711648 - DNA, 1263 bp, Homo sapiens
ttttttaaaacgcaagcagggatattttagggtaaactcagaagatggacctccttttaatcaacaataaaaataatccttccataggtgcaaagatgcataggagagtggatttcaaagtcttttgccaaaatgaaaacagtggttatctctggaaggtaagagtatgggtattttaattgttctggttcatacatttctaaccttccaaattttctgcaagatttagctttataataaaaatacataataaatctgcatgtgtgtgtgtgtgtgtgtgtgtgtgtgtgtgtgtgtgtgtacaaatatgaataatgggggatgaataaaaaggatttctgcacccactggggctgtcctgttgggtgggtgataggagatggccgattattttgggtccagyacttttggctcaggaaggcaccagatagaaggaacataagatgcccttcatgctgactgccaggttccgtaactgaggtccttgctgggtgaacagacgctggagtgccctaaagatatgctagaataatccctgagtgaggacacttgaaaacaagcactctttccctgacattcagagaaatctcagagaaatcttcagtgtcccctaaaatggtttgcagaaccttccatatgtgtgcagtattctcgagagagtatatccttagttttcgtcaaattcttaaagagggcatcagtgatcccctaaaaggtcctattctttaaaccagaaatatctattactataaaatttttttcaaaggggcaccccaaacatgggtgtgtgtttatttataaattaaaggcatatactataacataatatatatacaatataaatacatacaaaatattcatttttaaaaaaagatagaaaataagaagttctaatatttttgtctcatattccaaaggatcatatccaagtcccctggaaagcactggtctctttttggggaaagttgcctctagaatcaatgaggtagccgggagtggtggctcacacctgtaatcactttggaacactttggaacactgtggaaagccaaggtgggaggatcgcttgaggccgggagttcaagaccagcctggtcaacatagaacctgtcaccatttttgtaataaaaaaactaattagtcaattaattagtagtggaaccaataagcagcttcttatcaccccactccccagctaaagtaatcctttctgtaagttgccaagttccatgagcaagacataaaaacatatgggccaaactc

SEQ ID NO: 711649 - DNA, 1263 bp, Homo sapiens
ttttttaaaacgcaagcagggatattttagggtaaactcagaagatggacctccttttaatcaacaataaaaataatccttccataggtgcaaagatgcataggagagtggatttcaaagtcttttgccaaaatgaaaacagtggttatctctggaaggtaagagtatgggtattttaattgttctggttcatacatttctaaccttccaaattttctgcaagatttagctttataataaaaatacataataaatctgcatgtgtgtgtgtgtgtgtgtgtgtgtgtgtgtgtgtgtgtgtacaaatatgaataatgggggatgaataaaaaggatttctgcacccactggggctgtcctgttgggtgggtgataggagatggccgattattttgggtccagtacttttggctcaggaaggcaccagatagaaggaacataagatgcccttcatgctgactgccaggttccgtaactgaggtccttgctgggtgaacagacgctggagtgccctaaagatatgctagaataatccctgagtgaggacacttgaaaacaagcactctttccctgacattcagagaaatctcagagaaatcttcagtgtcccctaaaatggtttgcagaaccttccatatgtgtgcagtattctcgagagagtatatccttagttttcgtcaaattcttaaagagggcatcagtgatcccctaaaaggtcctattctttaaaccagaaatatctattactataaaatttttttcaaaggggcaccccaaacatgggtgtgtgtttatttataaattaaaggcatatactataacataatatatatacaatataaatacatacaaaatattcatttttaaaaaaagatagaaaataagaagttctaatatttttgtctcatattccaaaggatcatatccaagtcccctggaaagcactggtctctttttggggaaagttgcctctagaatcaatgaggtagccgggagtggtggctcacacctgtaatcactttggaacactttggaacwctgtggaaagccaaggtgggaggatcgcttgaggccgggagttcaagaccagcctggtcaacatagaacctgtcaccatttttgtaataaaaaaactaattagtcaattaattagtagtggaaccaataagcagcttcttatcaccccactccccagctaaagtaatcctttctgtaagttgccaagttccatgagcaagacataaaaacatatgggccaaactc

SEQ ID NO: 711650 - DNA, 423 bp, Homo sapiens
  misc_feature 15, 16, 17, 18, 19, 20, 21, 22, 23, 24, 25, 26, 27, 28, 29,30, 31, 32, 33, 34, 35, 36, 37, 38, 39, 40, 41, 42, 43,44, 45, 46, 47, 48, 49, 50, 51, 52, 53, 54, 55, 56, 57,58, 59, 60, 61, 62, 63, 64, 65, 66, 67, 68, 69, 70, 71,72: n = A,T,C or G
  misc_feature 73, 74, 75, 76, 77, 78, 79, 80, 81, 82, 83, 84, 85, 86, 87,88, 89, 90, 91, 92, 93, 94, 95, 96, 97, 98, 99, 100, 101,102, 103, 104, 105, 106, 107, 108, 109, 110, 111, 112, 113,114: n = A,T,C or G
ctgagagcctggacnnnnnnnnnnnnnnnnnnnnnnnnnnnnnnnnnnnnnnnnnnnnnnnnnnnnnnnnnnnnnnnnnnnnnnnnnnnnnnnnnnnnnnnnnnnnnnnnnnnntgggaggcttcgtggaggaggctctgtgagcaaggtccaagccttggggttccaggtgggcacagaggaggaagggccatccaagtagacggcctggtgtgggcgaagccagtgcagccccatgctgtgctsatgccatctccctcgctgtgatttttagtttataaagccgtttcatgtgtgctgtttcattttatctttgaaacccaaggattgcagcagggcttgtctcctcttaatcaatgagccacctaactggagctcaggctagcagcgatttgctcctggcccacggctagagggtggcgg

SEQ ID NO: 711651 - DNA, 565 bp, Homo sapiens
gccacactttcatggctaagtaaataatttaaattgaacaaaggcaaatgttgagtgataaagttaaaagaaagactctacttttgttgaaacatagaaaacaatcacggataatacaatgtatgtgaacacacacacaggaagcacatttgtattttccagaaagtccaactgacasttctatggactggagaacatgttaagaacaatcataacatattctgtatggacagaaacatattctgtatggacagaaatttatcttactctcatgtttgaaagggtatggcccatatgggggctacaaacaactttgctgagtgaatgaatcactgaattctatttttcctctaagaggaaagaagaacctataaattaaaagatattttaggccgggtgtggtggctcatgcctgtaatcccagcactttgggaggccgaggcaggtggatcattaggtcaggatatcgagaccatcctggctaacactgtgaaaccccgtctctactaaaaataaaaaattagccgggcgtggtggtgggcaccggtagtcccagctacttggg

SEQ ID NO: 711652 - DNA, 1143 bp, Homo sapiens
attttttttcctttgcttgttctgttttctgcctgtgtaatggtctacaaaacatcaaatgctttctcactcggatcttcctgaaattattcttgcttttcaagaatccaagaatattcctcttaatgaaacctgtttggatcaacgttgttaaaaaaaactctatctcttgaatcaaacactctagtgctttgtttatatttatcaaatgaaggttatctcatattgatgtttattaatgtttaattcttttctgtgttactggaagctggttgatgacacaggctctttttaaggcactttattcagaaacaacactttgttcatccagaaacaactaaaaacagctaccattgcaaccaaaccctattacctgcaagatactttacacayggtagatgtaagaaaatattctaaaagaaaaattctaaaagtaagacactttttagagaattagtgttgatcaacataatatttgaaatattgtggacaaactagagtagatttagaaaacaggggcacagtttaattcaatttagttcattgagaaataataaacagccttaatttgtttagatttaatgaggtgtgatttgaggtgtgactgtatcactgagaaaaataaatagaaaaaaattgtcaaattttaagtacttctgtttattttatataggtaatgcttgatttattttttccccaacaaaaatgagaaaaaatttgctgttctattataaattgttttttattctaggacaatttctttttggttttatttgaagaagagaaaatactatatttataaataaaatatgtacattattataatagatataccatacctttggggttttcaatgcttttctataaaatgtttatttgaatactatcaactttaaaaaaataaaaacatcttggccaacatggtgaaaccccaactctattaaaaatacaaaaattagctgggcgtggtggcaggcgcctgtaatcccagctactcgggaggcaaaggcaggataattgcttgaacccaggaggcagaggttgcagtgagccaagactgtgccactgcattcctgccagggcaatagagtgagactccatctcaaaaataacaattattattattattatactatttattga

SEQ ID NO: 711653 - DNA, 984 bp, Homo sapiens
tgaaagtaacatgggtctatgaaaaaatattacaaataatctggaagtaattaaagaagtattaccctgaggaagcttcacctagctgaaagctaaaggattagaaagagttaactcaatcaagtagaaggtggctgtgttgggaacagatcatttcagatgaaaggaacaacctgtgcaaaggccttatggtgggcgtgaatgtggtataactgtgaagaactaagggagctgagtgtctgggctgcaaaggtttaaatgcaatttatgggagatgaagcttgccaggaaggcaggatttagacccagaattttataagattttggttcagattctaagcagcaaatcttgctgaagaattttaagggagacatttcacttttgacagttttaaaataaatgttctacaatttgtgcaggtctgagttgataaatggggatcagttaataagcaatcctggtaagagatgaaagtcgctctagattattggcagtggagatggacagaagtggagaaatataagatatatttagaaaataaaaccaacaaatattgctgacaaattgtaagagagatgaagatgtcaaaaatgcctcttctatttctggcttatgtaactttactgttgttggtactatggactgatagcacacaatagaaaaggacatgcctggatttattgaatcatccaagtaaaggtatctaataagtgtataattaaaattttctatgaaaagtacatttaaaaacaagccaaactgaacatataaatacaatttcatttaaaatgatagaaatgtctgttcatggcagtcaggttttaaaatgtgctctttgtcattaatctgtcactattgtcatttcccaagttcttttcactsttaacacttccttttaaaatttttattctaatccaatattcttatgcattattttactcttttttaaagtgattaaatcaaaacaaagaagaaattgagag

SEQ ID NO: 711654 - DNA, 636 bp, Homo sapiens
ttttaaatgttgtcactaagctttcttaatgatctgattttctcaaaacagttattacagtgttttattttgaaaagttgctcaaatatacatgttaagtcttctacagtaatatatttaatttttctgatattttcttgttttcaataatatatcttacctgttagcctgtttttttctaatataaatattaaaatttaactcataggtacctgagaagcaaatttagtttacacttactatagaaataagaaaactgaggtcaaaatgttagatgccttctctaagatcacataagttgcttacttacataattagcaccaaaactggtatctacttatactcaaatgtgcttcctaccacactatgctgcttttgatgaaacttattgatatatctaataaatatttttaattatttttgaattaatttaaaaattaactggcatcaaaatggttatctttagcaaaattcaatggaagaaatatataatttagccactttgagggacttttacattgatagtcattgaaaactggtcagttttcattgtttttcataagaatactmtattctcataagaatactataaggcattatttaacagttccaccactgaactggccgggaccatcg

SEQ ID NO: 711655 - DNA, 566 bp, Homo sapiens
attattctcagacaagttacttttattaactaaaattatggttattctgaataatagatcaattaaacacaaatgaattatctcaaatccaacagtaaggtagaaaatagtaaactgtaattatgtattcaaatgttagattttgaaaaatgcctttcccatctcatttatcaacattgtaggggaaaaatatcataatggcatttacaatgtaagtatcattctaataaatatatagtaaactatatgatcaaattctaaagctgatgtgattttagagcaactactttaagtcatctaaatgtaagaacctctatttcatttttccaaatcatattttcaaaatatccactatatttgacttcacgttcccaacatttatggcttacctgagaggtctatgttaagaagtgggtgagatttattgacccaaatgagcatgaatagaatttcttaattaggaaatttatgttaattaggaaaaatgttaaatttccctctactcttactcttcttcttttcttttttcttttyttctttttttttttttttttgagatggagtct

SEQ ID NO: 711656 - DNA, 590 bp, Homo sapiens
gagatggtatgtacagctactactgtcctttttttctacaaatggccataaagttgtagttgatatttataactcattccataggtcattccattttcccttaagtcaacattttctattgttgtgattctttacctgatgattaactagaaaaaaaaatcacctttcccccacagtggttttccattaacttttatcttyggatatgggagtaataatcatctgatagaattcccagtgtttcagacaaagtcatcatatagcaaaaatctattttattgttaataatcaggagccattatttctattatcttcttctttatgtattggctaattgacatagagcccaaaatggtcaagtgatgatcttaactttgagatcaatggagccgttgttatgtgttctgataaaagctttcctcccctaataattaagacctcaaagctgtagtccccaaattcctgcgtcaggaataaaaattctctgaatgaattattaggtgtaatagcaagaagagtcatttttacttcttccggaaaaaagagcactatgtattgattgccgattaaatatacaatctataatatat

SEQ ID NO: 711657 - DNA, 916 bp, Homo sapiens
ccaaaaacaaatatgagatttgaacactctagtgaacatcatgctttgctcaagaggagatcagtgcagcccttctggaggacgatcctgaagtacttcatcaaattaagtacacactggcccaataaaccagcaacacaaccacaagccatattataacgcacatgtataaatcaggatggataaagcccattggcctatacagccaatgtatatgtatatgtataaatgggctctattcatcctgatttatacatatacattataatatggcttgtggttgtggagagccacggggaatctacatakctccccctgggggatgaagcagttagagacacaatatagggtactctaccacggttagatataaaaatgtacacaggtttacagacagacctttaaacattgtattgagtagagatctatagcataacactatttttagtaaataaaattacatgtccacaaactgtaatttttaagaacacctataataaaaagatcgtgtaaaacacatcgggttggttgcctcattaggatatggtcagggaaaataagatggggactggagatagataaagataatgaaaacattaaacaatactggggctttgctcagatcaatgatctaacatggcataaatgtgaaagacaattaacaacagccctctgtacctgaagttcattggaaacccaaggagtatcacttagaatcaccaaaacatacgatttacaagtgtttgacttcttttctacagttcttcaaagtcgatggaaaaataccaatttttggccaacatttgtattacatatgaaagaagtaataagctgaatgtcataattacaaaccaaaaaaacaaacaaaaaactcttttaaatccataaacacagaagaaaagtttctgctggctca

SEQ ID NO: 711658 - DNA, 916 bp, Homo sapiens
ccaaaaacaaatatgagatttgaacactctagtgaacatcatgctttgctcaagaggagatcagtgcagcccttctggaggacgatcctgaagtacttcatcaaattaagtacacactggcccaataaaccagcaacacaaccacaagccatattataacgcacatgtataaatcaggatggataaagcccattggcctatacagccaatgtatatgtatatgtataaatgggctctattcatcctgatttatacatatacattataatatggcttgtggttgtggagagccacggggaatctacatagctccccctgggggatgaagcagttagagacacaatatagggtactctaccacggttagatataaaaatgtacacaggtttacagacagacctttaaacattgtattgagtagagatctatagcataacactatttttaktaaataaaattacatgtccacaaactgtaatttttaagaacacctataataaaaagatcgtgtaaaacacatcgggttggttgcctcattaggatatggtcagggaaaataagatggggactggagatagataaagataatgaaaacattaaacaatactggggctttgctcagatcaatgatctaacatggcataaatgtgaaagacaattaacaacagccctctgtacctgaagttcattggaaacccaaggagtatcacttagaatcaccaaaacatacgatttacaagtgtttgacttcttttctacagttcttcaaagtcgatggaaaaataccaatttttggccaacatttgtattacatatgaaagaagtaataagctgaatgtcataattacaaaccaaaaaaacaaacaaaaaactcttttaaatccataaacacagaagaaaagtttctgctggctca

SEQ ID NO: 711659 - DNA, 638 bp, Homo sapiens
atttctcagatcatctgatacaatgtaagacaatctgcttgtgatccataggccactcgttcttcctccaaaatggccttgtacatgttactatattttatttgaatgtaaacacaattaccaagcagtaaataatgattttccttacccattgattagtgcatgttgatactgaagatgcattgatttgtacaagcctagcttgaaatggagcagatgggtatgtaaaggtttactcaaaatcaatgtgaattagattgctgctcctcagtaaaatgaattataagttagaatggctattttctttaacttaatgtaatagaatgctgtctaaggcaatctgttaaggtagacttactgaaaatgtagcctttgatctcaaaaataagcattcccaaaacaacatgatttaatgagcaaagacaatattatgtctaagaaaatgtagttaaggcattgtagcaaatgtcctggaaaaatgtttgacaataaacttgttttcttttaaaaaataataatcatgttctttcgagttatacagtattacactgactgctttttttccttgattgtttgtraatattcacatatacatatgttacagtggtttaatcactgtactgctcacagtgcagcag

SEQ ID NO: 711660 - DNA, 604 bp, Homo sapiens
tattcatttgtaaactataccttaataaaaataaaacaaaaatgaatacatgtatatgtatctaggcatacattgttttattactctttgctttattgtgcttcacggatattgcactttttaacaaattgaatgtttgtgacaaccctacatggagcatgtctattggcttcatttttccaacagcaygtgcccactttatgtctttgtgtcaaactttggtaattctcccaatatgttaaactttttcatcattattttatctgttgtgatgatctatgatcagtgattttttttttttttttttatttgagatggagtctcgctctgtcgcccaggctggagtgcagtggcgcgatctctgctcactgcaagctccgcctcccgggttcatgccattctcctgcctcagcctcccacgggcgcctgccaccactaactattgttaattgttttgtggtgctgcaaactgtacctatataacaacagtgaacttaactgatgaatgttgtgtgtattctgactgctccacagactggccattccctatctctcgctccacagactggccattccctatctctcgctccacagggcttcctgt

SEQ ID NO: 711661 - DNA, 623 bp, Homo sapiens
attccactattgggtatctacccaaagaaacaaaaattattttgtgaaaaagacacatgcacatgcatgtttatagraacacaatttgcacttgcaaagaaatggagccaacctaagtgtccattaaccaatgagtggataaagaaaatatggtatatattcaccatggaatgctactcagccatgaaaatgaatgaaataatgtcttttgcagcaacttggatggagctggaggccattattctaagtgaagtaactcatacatggaaaatcaaaaatcatatgttctcacttataagtgggagttaagctatgaggacacaaaggcataagaatgatacactggactttgggggcttgacggggaaggttgggagttaagggataaaagactacatattggatacagtgtatactgactcagtgataggtgcactgaaatctcagaaatcaccactaaataacttttccatgtaaccatgaaacacctgtttccccaaaaatgattgaaataaaaaagctaaaaataagtcttgctgagattttgatagaaattgcaataaacctgaatatctaactgggggggaaaacaaaaagaaattaaacattctagtgtttctgga

SEQ ID NO: 711662 - DNA, 623 bp, Homo sapiens
attccactattgggtatctacccaaagaaacaaaaattattttgtgaaaaagacacatgcacatgcatgtttataggaacacaatttgcacttgcaaagaaatggagccaacctaagtgtccattaaccaatgagtggataaagaaaatatggtatatattcaccatggaatgctactcagccatgaaaatgaatgaaataatgtcttttgcagcaacttggatggagctggaggccattattctaagtgaagtaactcatacatggaaaatcaaaaatcatatgttctcacttataagtgggagttaagctatgaggacacaaaggcataagaatgatacactggactttgggggcttgacggggaaggttgggagttaagggataaaagactacatattggatacagtgtatactgactcagtgataggtgcactgaaatctcagaaatcaccactaaataacttttccatgtaaccatgaaacacctgtttccccaaaaatgattgaaataaaaaagctaaaaataagtcttgctgagattttgatagaaattgcaataaacctgaatatctaactggggggraaaacaaaaagaaattaaacattctagtgtttctgga

SEQ ID NO: 711663 - DNA, 1160 bp, Homo sapiens
ttgcatttctactatgtgctaaaacaacgaaaatgaaaaagaaattagacccaaagccacgtaaatgtcaataaatacttatatctaggatacaaagagacctcttacaaatcaataacaacaacaacaaaaaacaaaaacgcaacacaagccaatgggaaaaaaatgataaagtagttgaacagacattaaagtataaaaggctatcttcaaagaaatgcaaagtaaaccataatgaaataacagcacactccacagaatgaataaaatgaaaaatacaaaaaaatccagtgtcagtgaggatgtggggcaactagaactctcatacattattggtaggaactattttgtgaaattgtttggcattctcttttaaagctgaacttgggcctaccctatgatccaccaattccactcataagcatatatccaacaaaaaatacacatatcatcagaatagcatactagaatgtttacagtgttaccctgcataaattatctaaaacttaacactactgaaataacaaccaataatagaatggataaatttcagtatagtcacacaatagaatattaaataacaatgtgaatctatgagctgcaactgcaacagaaatacagataaatctcacaataataatgtttagctaaaaaaaatgcctgacacaaaagagaacatagttctgattccatttatataaaaaatttaaaaacatgcataactagcctctgttgttgtaaatcaagacagtggctatgcttggtagagatggagaggggatagtagtgaggagaactcttggggtacaattaatgttgttcttgatttaagggttgcctatgggtgtgctaagcgtgtgaaaaattaatttacctggacatttatgctacatttatcagcataaatactatatttcaataaaatgtttgaataatctggatgattaagcataaaatgaatttgtctgatgaagtattttcttcctgattaataagatgatatgagaagacactattcctattaatgctactrttaatagtaaaagctaaaataaagccaatagtaataatttcaattgtcactttttaaaacttttcaatgaatattaatatcctttaattaccatttgctcttaagagtaatctctcaagatttaaaa

SEQ ID NO: 711664 - DNA, 1084 bp, Homo sapiens
agctttttaccaaatgttttattgcccagaatatcacgatgcccaacaccctcattctaggagcacttggttaattaaggctcattacataagaacgagattgaagtattgtaaatagaaaaaaaatacatgtttctattgatggtttattcttttaaacaagtttgtgcctgagtaacttacaaaataattttataaaatatttgctatttatttatttttttatttgctcagggaaacgcatcaggctaagaattacgagagtgaaacactggtttcttcttggacacttttcagctctgccctttaccacccwacttagcctcactgggcctcattttccctcctggcaaagtgacacagtcagactaagtgatctccaatgtttctttccattctaaaactctatggttctataacattctcgatttattgagccactgtttcactgattcattcaataaacatttattgaagcccaattctgtgccaaactcaattgctctcctgctgtcaaaatcaggcaacatgctagagttaaaatgtctttaaagatttctgatggctgctgcttttaaaaggaacttcccatagcaacccctacctctttgtgcttctagagctagctctcctattattctgtgaggacttacaaattcagaaagacaaaggaatatggaaaggcctggtattcacaacctactagatgtaaatttcctattcctaatcacctttcttccacaacccagaaaacaataccttcaatggatttgctagtgttacagattgtgtttgattatttgtccccaaatttaaagtacttcttcatataattgcaaatatacgcatagaaaataaaatattttaaaagaaagctaatattatatactataagtcttaatttgagattatacatatttatccaataaaagtatagaaggatcaatcaatactgactagtgtttccctatgggctccatggatagagcccataatttgaaattaggagccctaggttcaattcctcactttatggttggtgctatatgtccaagagcagtaaatgtagctgagtctgacttta

SEQ ID NO: 711665 - DNA, 644 bp, Homo sapiens
ggagctgaccaagataggcctggccattgccttttatgatatcaaaacataatataaagctatgagaaataaaacactgtgctattggtgtaaggtttaaaaaatagctcaatagaacagaaaagggaatctagaagtagagtcatggatatatggtgaatatattatatgacaaatgtggcacttcaaataaatggggaaaagataaactgtccagtcgggaaaaattaatttacatcactacttttaactatkgaaaaatataagtttcagaaggtttaaagacctaaacaaagtgcaacactataaaatattaaagaaaatattagagatgccacatagggtaagcctatgcaaaaactatagaagaaaaaggggttaaatttcactttgtcaataaaattctatcaatgaaagtgaccataaatatactacaagaaaagtaacaaattaggaaaagatatttgctcatatacaacaaagggttgatattcaaaacatataaggaactcattcaagaaaaagacaaatagctcaatagaaaaatgggtgaaagatatgaattggtaattcatataagacaaagtacatatccagaatctacaaggaacttaaaaaaatttactagaaaaaaaatccccatc

SEQ ID NO: 711666 - DNA, 2181 bp, Homo sapiens
cttcagcctaattaaataatggaaccacactgatccttccctccaaggtctgggggcactgtttcctctccactccagttctgcttgggaatgttgactttggaaaacggcactaaaaaaactccggctgcaatttccaaatcagaaacagcctctaaatccttattcagcaaagggtcagagacattggcagggctgagcccatttaggccataggagcctagaacctcttctccctacaaagcctccagagacaaaagagttatcaaaagtcagctcaaatctggaaataggaatccactgggtgtcccaggatttggaaatgaatcaaataaaagtctcacctcctagtcattcctggtccaatagaggagatttccacaagcagctgatgggaacatgaaacagaaggacataggtatcacactacgggggcccagaataaggagcctcaaatccagatgggcttcctggagaagtggggtctgtccaaggtcttacaggataggaagaacatcgtaggcagagaaaggagggttagaccctccaggcagagagaacagagatccaaggaaacctcagtctttgtggacatgtgacactggcttagctgctcctttctggtgcaaggtcttgccccagacctttcaaggtcttgctgggccaagtttttcagcagcaacattaattactattactttttttttttttttttgagacagagtctcactccatcacccagactggagtgcagtggctcactgcaacctctgcctcccgggttcaagcaattctcctctctcagccccccgagtagctgggactacaagagcctgccaccacgcccagctaatttttgtatttttagtagagacagggttttaccttgttggtcaggctggtctcaaatgcctgacctcaggtgatccacycatctcagcctcccaaagtgctgggattacaggcgtgggccaccacgcccagcctactgttactattaattactccttacctctcggtgagacttcattcccatgcccaatctcactggatcctcacaggcaccctgggagaaaggctgggcaaatgtcattctctggatcaggaaaaagaaactgaggcaagctagtgccgtgactggcatcacacagccatattaagaagcagagcccaggcatcaccaagggttttctggcccttccacctctgccctttcctttccatacagttcagcagctgggaattccaaggctccacggctttccctctcctctcttgtcttgatggaaactcagtcactgccaagtactgcctatggggcatttgcacatggggcttttccctatggctgttttctcaaagtctctatcttatctcttaaggtgcttcttttatctctcacaacacctaaaacagtgctgggcacacagtaggtatcagtgggcttgtgggctcattgatgggtagaccagtgcagaagcagtgtcactagggaaaggataggctagaaaaggattttgggtatgatcatcactacctcaattcatagacacttgctttggaagtctttaagaaacaggactagctcctgtcatctcctcacttatgtccttaccctgcctacagacatcttcctactgtctatccatgtcttttattccactcaacccacttacctcccagatatttttctttttctttcttttttctttgagatggagtcttactctgttgcccaggctggagtgcagtggcatgatcttggctcactgcaacctccacctcttaggttcaagctattctcctgcctcagcctcctgagtagctggggatacaactgccggccaccacactggctatcttttgtattttaagtagagacagggtttcaccatgttggccaggctggtctcaaactcctgacctcaagtgatctgcccgcctcggcctcccaaactgctgggattacaggcgtgagccaccatgctggccccagatattttgacttttgggctggtgcaaaaacaccagtccacttgggcactggggcacaggagatgtgtgtgtatggaagctgtgagtgtgttgtgacagggacatgcactgtccactaaggcacaggtggctagtgaacacttggaccatagtagtctgaattgagatgtgaggtaagggtaaaat

SEQ ID NO: 711667 - DNA, 1283 bp, Homo sapiens
taggaaatccaggtccccggagtgccatgtgtagctacgggcagagatgactagagctgagtagaggaagctgcattcagttccccatgagaagtaaaacaacatttagagaaacttacagatgatgacagaaagattttacagcaacttaagaaaagcaaaaagacaaaatggttcagaaaaaaaaaataatctaagaagaatctataaggagctgataaaaatgtgccataaactagatgtggagctgctccaggaaagaaccaataacatgcctaaaaaatttttgtagtatttgaagttcataccttagaacaagcttgcccaacccacggtccgtgggccacatacggccaaggacggctttgaatgtggcccaacacaaattcctaacctttcttgaaacatgatgagatttttgtttgtcattttatcaaagctcatcagctatagttaatcttagtgtatttcatgtgtggcccaagacaacgctttttctaatgaggcccagggaagccaaaagattgcacaccactggcttaggtgatattatttattcaacaccatagatatgtgtgtgtgtgggggtatatatatatgcatatgtgtgtatacatatatatgtaccacatatatatatataatatatatatcatatatgtgtctcctccttctaagagggaggaacttttccaaatagtaataacataggtgaaatgtaattcttatcctaaccatgatcaagcaagcttttttggaatctttgagtggatgtaattttatattcccctttatcaaacactgaccacagggaatattcccctctaataagcttcttttgtagcttttttctgaaaaactggacaaatgtaatgtgggagtcagacagcatgtgtcactaagctgagagcagtgacatatgcaggtgacattygcatgtcctggcagcattgtccagcaaagtcttcctttctttggggatggaccctccctcctcacctggagcagctccacgtcaggcatgtggcacgtctcccacagctctctgtacatgtctttcatcctttctaaatgttgggtcattctcacttgactgtcttgtagttgttggaaaagcccttttgcttctctgtccagtgcctgcagatgaagttgcttctcctcatcgagaaatagacgcatcttttgatattgaatattgattatcaccttacttaatgacacatagttctgcggagacatttggttaaaaggattacatactctcactctcaacagaaaac

SEQ ID NO: 711668 - DNA, 1283 bp, Homo sapiens
taggaaatccaggtccccggagtgccatgtgtagctacgggcagagatgactagagctgagtagaggaagctgcattcagttccccatgagaagtaaaacaacatttagagaaacttacagatgatgacagaaagattttacagcaacttaagaaaagcaaaaagacaaaatggttcagaaaaaaaaaataatctaagaagaatctataaggagctgataaaaatgtgccataaactagatgtggagctgctccaggaaagaaccaataacatgcctaaaaaatttttgtagtatttgaagttcataccttagaacaagcttgcccaacccacggtccgtgggccacatacggccaaggacggctttgaatgtggcccaacacaaattcctaacctttcttgaaacatgatgagatttttgtttgtcattttatcaaagctcatcagctatagttaatcttagtgtatttcatgtgtggcccaagacaacgctttttctaatgaggcccagggaagccaaaagattgcacaccactggcttaggtgatattatttattcaacaccatagatatgtgtgtgtgtgggggtatatatatatgcatatgtgtgtatacatatatatgtaccacatatatatatataatatatatatcatatatgtgtctcctccttctaagagggaggaacttttccaaatagtaataacataggtgaaatgtaattcttatcctaaccatgatcaagcaagcttttttggaatctttgagtggatgtaattttatattcccctttatcaaacactgaccacagggaatattcccctctaataagcttcttttgtagcttttttctgaaaaactggacaaatgtaatgtgggagtcagacagcatgtgtcactaagctgagagcagtgacatatgcaggtgacatttgcatgtcctggcagcattgtccagcaaagkcttcctttctttggggatggaccctccctcctcacctggagcagctccacgtcaggcatgtggcacgtctcccacagctctctgtacatgtctttcatcctttctaaatgttgggtcattctcacttgactgtcttgtagttgttggaaaagcccttttgcttctctgtccagtgcctgcagatgaagttgcttctcctcatcgagaaatagacgcatcttttgatattgaatattgattatcaccttacttaatgacacatagttctgcggagacatttggttaaaaggattacatactctcactctcaacagaaaac

SEQ ID NO: 711669 - DNA, 1283 bp, Homo sapiens
taggaaatccaggtccccggagtgccatgtgtagctacgggcagagatgactagagctgagtagaggaagctgcattcagttccccatgagaagtaaaacaacatttagagaaacttacagatgatgacagaaagattttacagcaacttaagaaaagcaaaaagacaaaatggttcagaaaaaaaaaataatctaagaagaatctataaggagctgataaaaatgtgccataaactagatgtggagctgctccaggaaagaaccaataacatgcctaaaaaatttttgtagtatttgaagttcataccttagaacaagcttgcccaacccacggtccgtgggccacatacggccaaggacggctttgaatgtggcccaacacaaattcctaacctttcttgaaacatgatgagatttttgtttgtcattttatcaaagctcatcagctatagttaatcttagtgtatttcatgtgtggcccaagacaacgctttttctaatgaggcccagggaagccaaaagattgcacaccactggcttaggtgatattatttattcaacaccatagatatgtgtgtgtgtgggggtatatatatatgcatatgtgtgtatacatatatatgtaccacatatatatatataatatatatatcatatatgtgtctcctccttctaagagggaggaacttttccaaatagtaataacataggtgaaatgtaattcttatcctaaccatgatcaagcaagcttttttggaatctttgagtggatgtaattttatattcccctttatcaaacactgaccacagggaatattcccctctaataagcttcttttgtagcttttttctgaaaaactggacaaatgtaatgtgggagtcagacagcatgtgtcactaagctgagagcagtgacatatgcaggtgacatttgcatgtcctggcagcattgtccagcaaagtcttcctttctttggggatggaccctccctcctcacctggagcagctccacgtcaggcatgtggcacgtctcccacagctctctgtacatgtctttcatcctttctaaatgttgggtcattctcacttgactgtcttgtagttgttggaaaagcccttttgcttctctgtccagtgcctgcagatgmagttgcttctcctcatcgagaaatagacgcatcttttgatattgaatattgattatcaccttacttaatgacacatagttctgcggagacatttggttaaaaggattacatactctcactctcaacagaaaac

SEQ ID NO: 711670 - DNA, 1653 bp, Homo sapiens
tgatattgttggtaatattccaggagttagagcatgaaattacctccaatatcacggggtgtgtaaacaccccgtgatattgttcctaatggcctgtgaaagagaaaatattgctcccattatcacaggaagtgttcacccctgacaatattgttttctaatatccagggaaggagagtatgatattactcccaaggttgaagggggtgtacacattttttgtgatattgtgtctaatatccaacaacttttccctaaagaattctaatttctcttatttacatgtgtctataaatttttatttattttttgtagttgatttttcccttcagcctgaaagagccaaagtcatatcttcctgtatggagatttgagaagcctgaatgttggatgtgaccctcaagatgatccccgtatcactgcaaaatcggaatgttttctcgtatggggcgctcagactttcacatctggcaaatactattgggaggttcatgtgggggactcttggaattgggcttttggtgtctgtaacaattattggaaagagaagagacagaatgacaagatagatggagaggagggactctttcttcttggatgtgttaaggaggacgttcactgcaggctctttaccacaccccacatgtggtgctatatgttccaagacctagcagccgagtaggattattcctggattgtgaaggtagaaccatgagcattgttgatgttgatcaaagttcccttatatacaccatccataattgtgccttctcacctcttctcaggcctatcttttgctgtagtcacttctgaccagagacaaatcagaaatgtgtccacatgctgtgggaacccctttatcccaggaagccctcttttttgtgccttgtcaaagaggacaaacaagttacatttaacttctttagttgccttctaatgtcatcacaactcattaatagggtttctattaaatatggtgaaaacactataaccatgtgtattggttctttgtttaatcatttttggaaaatcattacccatgatgcatggcagagaatatattctctggtttttcattatttctgaatgtcacaaagtgaaatcagagatgacagaggtgtctaaatgaagttaaaatcaatggaagaaaatagggatcttgtgcttcatgaaaaaacttggagtaaaaagactcagtggtaacttggaaatattctctttctcttcatctaacaatattatacttatccatgtgttttatttatgaatctatactttgaggtaatcttatttgacctcctatgctgtgcttatctttgtaaatctcatcttayatacaaatgctcatgccttattagagtgctgttctacagtgaaatttacaaggtgatcaggacaatgctggatcaattaaatattcaaatggacataaatgctcacccctacctcaaaccatacacagttcatttccacatggattcatggtctgaaggtgatgagaacacaataaaatattctcaaagagaaagatttcctaaccaggacaaaaaagtaacaattaagaaggaaaatttagttagtttatatcaaaaatgattctgtgtttcaaaatataccatccaagaattaaaatgcaaaccgagtggagaaaaa

SEQ ID NO: 711671 - DNA, 630 bp, Homo sapiens
caccaagggagcccagctatcttgaccttagagtattgaccaagccctctgtattagtccattctcacattgctataaagaaatccctgagactgggtaatttataaagaaaagaggtatattcatctcatggttccacaggctgaccaggcagcgtggtgctggtatcctcaatcatggtggaaggtgaagggggagcaggcacatctcacgtggcaggagcaggagcaagaaagagagtgagkggggaggtgccacacacttttaacacccaggtctcacaagatctcactctgtatcgtgagaacagctccaagtggatgctgctaaatcatcaatgagaaacaacgccatgatccagtcacctctcacgggaccccacctccaacattagggattacagttcgacttgagatttgggtggagacacagacccaaaccataccaccgttgaatcagacccccaggggccgcacagaacccttccacacagcctctgctctggcccaacttcacatgaaatctgggaggcttatggctacaggtaacagaaaaccccattccttggcttaaatcataaggaaatgtactatgtcacacatggaaagtccagccagagggtggcttcca

SEQ ID NO: 711672 - DNA, 1311 bp, Homo sapiens
gagacccgggagctatggccaagggagacaaagggcacattggagtcccggctcctctgtccgtgaggtccctgggctccctcgtccctcagctcccaccaaagacgctcgtcagggtgggcaccgtggagctctgggcccgagcctcccccaccccaacccccgcttcttgtgccatctgctgagtcacgtgacctctctgagctgccatggacgctctggtaaatcagggtgatgagctccacactgccttccttgcacaatcaaataggctcttggatgtgtcgttcacatctgctcccagtgccggcacaaggtccggtaaacacatccatgcaggggaacaaacccatcgctggtgccctggcccagccctggccctgtctcctgtgcgcctttgacaagttgttcagcaaacgtgtcctgacagctgggtgtggaaaggccctgccctctaggaagcttccgtgaggtgggatggggcatgcaggggtgggccgtgcaggggtggtcccccccgccctgacttgaacacgccatgccggcccctctgtcacctttctccccgtccaccccactcagcatagctgctgctgtcacgggtgtgcagaaagcttcggcaaaggatgcacaccagccccacccgtcctgagccacctctgcctgccagagagagacgggaggatgaggctgagcatctgcaggacctgagggatggagggagggtaccactgcagcaccccttaaatacttgttgccaccaagaaaaccctggaagactgaagtggaggaaatctgagtctcgagcgacctgaagctgtgcccgtcagagtggacctgagccgccagcrcatgcgatggccaccgtgctctcgcccccaccctaagggagagcaggcgcattttcattctgatgcagaatgaacagtgccctgaaggcggtccttcccggtcgagctatgtgcatgtgcttttagtgacctcatcatgtttctgctacctgcaaaacctgccacccccatccccgagaagttgggggtgcatgtggaactcactcatgcattcacaggtgctagcgcttccatgggaaggggttggggacaagtctcagccaaggtgacagcatcacagatgggtaggggctctgtggggaagcagaggtggtggtggcaaaagggagggggctggaatcgtgctgggagcaccctggagtggcatttgtgggtaaaggacggggatctggtgcgtagcagccagtccctttgtgcacaggcatggacctctggctgtggctgtcagccactgtgcctg

SEQ ID NO: 711673 - DNA, 1311 bp, Homo sapiens
gagacccgggagctatggccaagggagacaaagggcacattggagtcccggctcctctgtccgtgaggtccctgggctccctcgtccctcagctcccaccaaagacgctcgtcagggtgggcaccgtggagctctgggcccgagcctcccccaccccaacccccgcttcttgtgccatctgctgagtcacgtgacctctctgagctgccatggacgctctggtaaatcagggtgatgagctccacactgccttccttgcacaatcaaataggctcttggatgtgtcgttcacatctgctcccagtgccggcacaaggtccggtaaacacatccatgcaggggaacaaacccatcgctggtgccctggcccagccctggccctgtctcctgtgcgcctttgacaagttgttcagcaaacgtgtcctgacagctgggtgtggaaaggccctgccctctaggaagcttccgtgaggtgggatggggcatgcaggggtgggccgtgcaggggtggtcccccccgccctgacttgaacacgccatgccggcccctctgtcacctttctccccgtccaccccactcagcatagctgctgctgtcacgggtgtgcagaaagcttcggcaaaggatgcacaccagccccacccgtcctgagccacctctgcctgccagagagagacgggaggatgaggctgagcatctgcaggacctgagggatggagggagggtaccactgcagcaccccttaaatacttgttgccaccaagaaaaccctggaagactgaagtggaggaaatctgagtctcgagcgacctgaagctgtgcccgtcagagtggacctgagccgccagcacatgcgatggccaccgtgctctcgcccccaccctaagggagagcaggcgcattttcattctgatgcagaatgaacagtgccctgaaggcggtccttcccggtcgagctatgtgcatgtgcttttagtgacctcatcatgtttctgctacctgcaaaacctgccacccccatccccgagaagttgggggtgcatgtggamctcactcatgcattcacaggtgctagcgcttccatgggaaggggttggggacaagtctcagccaaggtgacagcatcacagatgggtaggggctctgtggggaagcagaggtggtggtggcaaaagggagggggctggaatcgtgctgggagcaccctggagtggcatttgtgggtaaaggacggggatctggtgcgtagcagccagtccctttgtgcacaggcatggacctctggctgtggctgtcagccactgtgcctg

SEQ ID NO: 711674 - DNA, 816 bp, Homo sapiens
tttttttttaattagggttttgctctgttgcccaggctagagtgcaatggcatgatcatagttcactgtaaccctgaactcctggactcaagtgatcttcctggctcagccttgagtagcttggactataggcatgcactaccatataaggctaatgaaaacaatttctttgtagtgatagggtcttgccatggtgcctgggctggtcttgaacttctggtctcaagtgatcctcctcagcctcccaaagtgctgggattacaggcatgagtcagtgtgccaagccagttcactgtttttttgttgttgttgtttgtttrtttgtttttaatagaaacatacagccatgtacattgcactgatacttgtttttgttcaggcaatatatcagaaatatttcttccagttaatgcatataaataaatgcaccataatataggcactcagctgttaaaagatagttgtttctaatttttcgtgttcacagaatgttcagtgacaatattttatttgcatctttgttactgggttgagtaatattaaggaacagattatcacatgtagaaacaaagggtcaaggatatgaacattttaagttgtggtaggtaatgccatattattctgagaagaaattaccaatttgcatgcctactgatagtaaatgagattttattagtcactttaatttttgttgatctgataggacagaagtgatgtattattgttgacttaatttgcctttccatgattaccaatgagtttgagaatctttctctttttttatttctttggtatattatcctttcataaacttta

SEQ ID NO: 711675 - DNA, 816 bp, Homo sapiens
tttttttttaattagggttttgctctgttgcccaggctagagtgcaatggcatgatcatagttcactgtaaccctgaactcctggactcaagtgatcttcctggctcagccttgagtagcttggactataggcatgcactaccatataaggctaatgaaaacaatttctttgtagtgatagggtcttgccatggtgcctgggctggtcttgaacttctggtctcaagtgatcctcctcagcctcccaaagtgctgggattacaggcatgagtcagtgtgccaagccagttcactgtttttttgttgttgttgtttgtttatttgtttttaatagaaacatacagccatgtacattgcactgatacttgtttttgttcaggcaatatatcagaaatatttcttccagttaatgcatataaataaatgcaccataatataggcactcagctgttaaaagatagttgtttctaatttttcgtgttcacagaatgttcagtgacaatattttatttgcatctttgttactgggttgagtaatattaaggaacagattatcacatgtagaaacaaagggtcaaggatatgaacattttaagttgtggtaggtaatgccatattattctgagaagaaattaccaatttgcatgcctactgatagtaaatgagattttattagtcactttaatttttgttgatctgataggacagaagtgatgtattattgttgacttaatttgcctttccrtgattaccaatgagtttgagaatctttctctttttttatttctttggtatattatcctttcataaacttta

SEQ ID NO: 711676 - DNA, 1080 bp, Homo sapiens
actttttaagatggatgcttagttcattgacttttatcctttttttaaacaaatatatgtatttaagacattttctctctgattactgctttagaaatatccaaaaattctattaggcagcttcttgttgtattcctttctgaatattttctattttctgttatttcttctttaacctattttttaagtttcaaaayacaggaatgtctaattatcttcttgttattgtattttcaaattagtgcactgtggtttaaaatgttattgtagattttaatcctttaacatttttgagactcctttattggtccttgtgtagtcaatttccaaacacattccaggtgtgcacaaaaagcatgcatgtttgaaatatttggagtggattgttcatttgttcattagctcaattttaataatattgctcaagtaaactgtatttttactgatactttgtcagcctgttctattctcaaattaatgtgttataatcttctatcacgatttgcctatttattgtttcagttctgtattctcttttggagagtgttgttttctttaaactttttatttgcactaagttcaaagaggtaggttgtcatttttaaaggaattatccatttcatttaggttttcaaattaatttgatttagagttgttcaaagtagattttgtgattaaaagaaattctttatgtttaaaggtaattttcccttttgccatcatttaaacatttcctccatctatgctttactttttaaattaagttttctggtcacttattttatttaattttttaaaatagtttttttaacctcattagtatctaattttttttactttgttgtttgactagctgttttgacttggtaatttaatttgtacatttttatttttccatttttattgttataagtatctaaggctatgaattttcatctgatcactgcttttgttttccatagattatagaaattctacaattgcgatttgaattttcctgctgacctaagcattgtttaataaaaaggttctgaatttccagatgaaaagactgctttaaaaacaatttttattattaat

SEQ ID NO: 711677 - DNA, 1080 bp, Homo sapiens
actttttaagatggatgcttagttcattgacttttatcctttttttaaacaaatatatgtatttaagacattttctctctgattactgctttagaaatatccaaaaattctattaggcagcttcttgttgtattcctttctgaatattttctattttctgttatttcttctttaacctattttttaagtttcaaaacacaggaatgtctaattatcttcttgttattgtattttcaaattagtgcactgtggtttaaaatgttattgtagattttaatcctttaacatttttgagactcctttattggtccttgtgtagtcaatttccaaacacattccaggtgtgcacaaaaagcatgcatgtttgaaatatttggagtggattgttcatttgttcattagctcaattttaataatattgctcaagtaaactgtatttttactgatactttgtcagcctgttctattctcaaattaatgtgttataatcttctatcacgatttgcctatttattgtttcagttctgtattctcttttggagagtgttgttttctttaaactttttatttgcactaagttcaaagaggtaggttgtcatttttaaaggaattatccatttcatttaggttttcaaattaatttgatttagagttgttcaaagtagattttgtgattaaaagaaattctttatgtttaaaggtaattttcccttttgccatcatttaaacatttcctccatctatgctttactttttaaattaagttttctggtcacttattttatttaattttttaaaatagtttttttaacctcattagtatctaattttttttactttgttgtttgactagctgttttgasttggtaatttaatttgtacatttttatttttccatttttattgttataagtatctaaggctatgaattttcatctgatcactgcttttgttttccatagattatagaaattctacaattgcgatttgaattttcctgctgacctaagcattgtttaataaaaaggttctgaatttccagatgaaaagactgctttaaaaacaatttttattattaat

SEQ ID NO: 711678 - DNA, 1953 bp, Homo sapiens
ctgtgggaaattcaatagatcaaaacctggtttcttcaacaaattaatggcaaagaaaaaggagagactgagggggaatttgtagattaagagatttaaatgacaaaggagaaaaaaaactgaaatgtggtgtttagaaatgcacacaggtgataaaactatacgaaaagcaaaaaagtcattaccataaatgttaggatggtggttacatttagaggaaaaaagatttcaattggagtagagcacaggcagcacttttggattgtctaacaatgttattttctgtacctgagtagtggttacatcttataaattcatgattaacctatacatttgtttcaagcagttttccatgtatgcgttatattttataataaaaaggtgttaattcataaataaatatttgatggaaaaaattgatgttattagatattaatttcctaaacttcacaacagcccactgtacccccaaacttaccatctctatctatacccccagtttctgatctgctggaataaaatactcttattcaagaccaacactccttctagtctcttttggaatcttgacccattaatatcactcctctttcccatcttcaatctccatctttctatcaaggcaatataggacagtggtaaataactaggctcttttgtcagaatcccagggttcaaatcctggttatgctatttaactagctgtctcatcttcagcaagtaaaaatctctctgtgactagctctcctcattagcagaagggtgataatagtatctaattcatagggccgatatcaaaattaaaggagttaacagatgcaaagccctttaaagaaggcctggacattttcactaagtgttagtcgctatcattattctcaccacccctaccatctccattctctcaatgtatgaacatgctcagttttttcacttttatcaaaatcctttcctaaaccctgtgtccctgtctagttatgttctctctccttccctttttcctcaaagcaacaaagatcacccaattgccacatctcctagcagcattttagtacctatcttactgacctgcactggagcatttgatactgttgtccattttgaacataaaatcgtctcctcaagttccgtgaccccactgttttggctgtcccacttttgagaaggtatgattagtctcaattgctagacaccctctacctgctgcttaaactttgctgtttctctatttgccattttcatttcacttcaaaagctgcctaagtgatctgattcgtgctcatggtttgaacaatcatttataggtagctaaccttaaaagcctccagttctgaaccctcttcaagctttasatatatttatctaaatgtgtgctgcacctggatgccaaaatgtccaatactgtgttcactacagattgggtcctccctctcaaattcattctcagttaacatccaatcacccaggcagaaacctaagagcaattccaggccccttctttaccctcatccccaacatccaatcactgaatcctactgattctacctctaaatttcctagaaatgatctctttctcaccatccctactataccttccccagtcccggcctatagcatctctcacctggaatataggaacaatatctaaagtctttactgacctctaatgctactttcttccttactttgctttattctaaagtacacagaaacacccatagttgcctaaacttgtttgcctgtttctatgcctttctactgtttcccctgcctggggtgttcttccctgatttttattgcattctttcattttttgagatgccgttaagataacttatcctcaggggggaaaaaagccttccatgcattactaggttgggtcaagttcctgtattagtctgttttcacattgctataagagaattacccgatactgggtaacttatttattta

SEQ ID NO: 711679 - DNA, 1580 bp, Homo sapiens
cgcaggtctggtttcatcctaactgttcatgcccataaccataaaaaagaagacacagattcatccctcatccctcaggtctcgttgatttgtgccaaatgagggcaattactagacatatggacacctcctctacctaatgaaaagctgactccctcattcagtcatgttttttatccaaatatgttttaagtgaaccagcaaaaccatgcagagccacttcacagagtatgcagtttgtggactgaaaatagagggatcaggagctgaaatccagcccatgctcagcactctgagccacgtgtctcagcatggatctacatccacctgaaagaagggcatctcttcctttgcaccaagtaacctcagcttgccaagtcaagtgcctaaagggctgttttctcctacggcacatttttcaacattcacatcaggtatcctattgtctacccagtgtcataggactatttgacctgtgaaatcacatctccctgggtctcattttcctcatctctaaaatgaaaagacgggcaaaataaattctaaacctccttccatgttaaaaactctaaagaacaaacaacctaggcttccctggctctttcagagttacggtgtaatctgccaaagaggaaaaataacgactagacctcgagatcctagcggcttcctatgggacctcatgcagggcctctctgggaactccagccctggcttacttgctaatttcccatgggtcttccttagatagcctttctccaatgggaagaacaaaactcatttgccctgcacacaacatagtcagaatggccaatgacagagtaactataaaagggtttagcgaatgtaaaaagtgctacacgcatgtgtacactagatcctcccagcagcttttattccccagactgcccagagaaagttgtttttggtccctgtttttcttatttgtcaatagagcatatgagagtgatcatccactttccagtttatttttgccacttgcagaatcgaaatggcagtcaagaaaaggttgaacctgaggtctgtctctgctaagtgagaactactgttggttgaactattcccactggtgttgcccagtgattccgctccaccatgtctttgaaggttggtaggggaaaaggtgaagcatctcatggcaacaaagactatcaayctcactctgttggaataaagctagtcaacctaccactgtatttcacaacaattcaaatccaggtatctctcctacttaaatccttacatcaggatttggaaattcaggattctgacaaattgaagcacaaattccatttatgcaaccttgaagagatacatacatgcagaaatccacattcttgggaataagtttaaagtatcttggtttatcaattctggaggaaagaccagcttcctctgtctgtcaattttgattttattcccatcattctgggcaaaaagtgaggttaaaacagtactgcctgacatgagttcagatgtttggtgtgaggaatctctacagggaggacccctgaggtcagattcataagctccctggggcctacagcctgactgctttg

SEQ ID NO: 711680 - DNA, 1281 bp, Homo sapiens
tttttttttttttttttttgagacagagtctcgctctgttgcccaaactggactgcagtggtgtgatctcggctcactgcaacctccgcctcctgggctcaagcgattctcctgcctcagcctctcgagtagctgggattacaggtgcccgccaccaggcccggctaatttttgtatttttagtagaggttttgccatgttggccaggctggtcttgaactcctgacctcaggtgatctgcctgccttggcctcccaaagtgctgggattacaggggtgagcaaccgcgcctggcctctaacagatttttaaactcattttcttgtttttttcttccttaggtagaagattatgaaatgtgcaaaaattgatcatctggtttcttttcctaatatttatatttcttatttatatttcttatttcattctcttgcttagtgactttgaaagcacttccagaagagaatacaaaagcagtgctaatgccaggcgcctttgtcttttctctgatgccaggagaatgctcatgagtgtcttcccttgagcgtgatgccggcagtcatttgatgtgcacgtggaagtttttggttatattatgcaactacccttccattctctttttggtgctctggttgcatggaaaagttatctggtggtgatttctgagactttggtgcccccatcacccaaggtatccttctattcttatataaaacattgctattaggagtaaatgttacttttaaaaattgtttttatgcatttattgagacttttttctttttgtgttcacagcctgtcaaattttgaataatctcacaattttttgcagctatcccgcaaccgcaaaggaggaggaatcggcctccctcagctcaggctgaagtctttctctttttaaaaatcaggattgatgtctttgcagccattttatgaatagacttgggggtttgggttggcatttttgctgccagcwggagggtccagcaaacagactcctctgttggctctcgacttgtcatctcctgtctgcagtgccagccatcacatgtcaagccccttcaagcagtgattcatggggctcccaacagccttgaccacactcatcttccagtgtttctgaggtcagaggtgctagccctacccatgaagctcagttccccatggttaagcctcatttgtccatgaggacttgggatggcctagaaaacagctccaggaggtgttcagacttgcttgggcctcctgtgtcttgtgtttatagcaacagagcccaagctg

SEQ ID NO: 711681 - DNA, 2132 bp, Homo sapiens
aaacatcatcatcttttttgtcctttatatttttatgtagaagaatccggtaaagtgagattaagcctgttcttgccttggtcaggaaaatgattgataggatataattttccctttcttctgtttgttccattgagtccaaactacatactttcaaatcatacagtggaaggataacagaagtgaatgaggcataattaactaaggataagggaaataataaagagaagagagtcaggggtcagggagaaagaagctggctgtacagcttttgtttccccggtatattttaacattcttttccttttctattacataagctctaatttgctgttatgtaagtgggagtaataaataacctttggactaaatggaatgggggaaatatttctagccatcatcaatccagtgaactgtagaacagttcttaattgtgcagcctaatcttcaaggaatgtttatgcttcgtaagctttgctgtctgctgttttgaattgtgatagagcttgtgtaacagagaatgttggtaattatagggtactatagaagcctgtgtacttttttaattaggtgttttgggggaatttgcctaaacatcaatgatgtttagttttatttaggatatatatttttcccattggagaagactttcttttcttggagccttatctggaggatggtgactttatgaaactctgttttggggagtgctatttttatggttgtttttttagcatggttcattgtaaagtttatttagatttctaggtttgaagtgggtgaggtatataagatatctattatattaaggtaattgatccatcttataaacatttcaaagcaagttaagattcagctggtaatattgctcaatataaattcttggaagtgaaaaaaaatagtatgtcaggatgagttatttttgtagacttgattccaaagtgaccaaaagaacttcatgaaactacagttgccttaatccttcaagaagtcccttttgaaaaatgtttacgataaaactgaggaatcccatattatagatctggtggtgtctgccttcttatctcatcctgggattgtcttactcattatgcatcagctacattggccttctttcagacatccaagctcctttcactagttgttcccactgtctgggatgtaaattccttgtcactcggctatcaccgtcaagatcacattcttacaacagcctttttcagttacccaacctaacagtcaactctcagcattttcatcacatctccttccctattctttctcgctctgtcgcccaggctggagtgcagtggcgcgatctcggctcactgcaggctctgcctcctgggttcgcgccattctgcctcagcctcccgagtagctgggactacaggcgccggccaccgcgcgcggctaattttttgtatttttagtagagactactaaaaatacatcactgtgttagccaggatggtctcaatctcctgacctcatgatccgcccgcctcggcctcccaaagtgctgggattacaggcgtgagccactgcgcccggctctccttccctattcttacgtgatagtttgttttccttggttgcttacttatctttcttcattagaacatcaagttccatgggaagagagacttgggctgtcttccatgcctgacagtagtagatgcttcataaaagtttgcatatgcaaatatggaagttttcatcctttttgctataaaggatatctaagtttattatgtggaaattttaaaaagatacttttacattgaagatttttttccagatgattagagaaatggaaatagcttaactagtacaaagagcactggacaagaagtcaaaacaacaggattctttaatcattctgcaactaattacakttgccttatagcagaccaaatcccctaatctcctagtgactccatttctgcatgtataaaatgagaaacagggttaactttccgtatgatataaggaggcaagtgagggcagcactgtgcagggagttttggactccattaaagagctttgtatttatcctacaagcaatagaaagctactgaaaggattttaactgaggtgggacaggatatagggaagtggtggtggtggta

SEQ ID NO: 711682 - DNA, 623 bp, Homo sapiens
gtattttgtggtgagtgtgagagttgggaaaagtttggtttttcctatctcacagagtgcttatatgcaattataaataaaaagagggtccattgcttttctcagatttattttttatttatttttattcattttttggagacagggtcttgctgtaacagacaggctggaatatagtggcacgaacttggctcastgcagccccgacttcccaggactaggtgattctcccacctcagcctcccaaatagttgggactagaggtgtgtgccaccatacctaatttttttgtattttttgtagagagagggtttcgtcatgttgcccaggctggtctcaactcctgggctcaagtgatcccaaagtgctggggttataggcgagagccaccacaccctgcctcattagatttttaaagggatccatgacaccaaaattattaagatcagtgaattagatacttttgttcgggatgactcctcttggctttaagcagttttttatcaaagttttgctatcatcctatataaattacctttaggctaaaactagttacctaatcattttagctatgatttgttgactagccattaaacagtataaggtatttcatatggatttgc

SEQ ID NO: 711683 - DNA, 652 bp, Homo sapiens
tttcttaatctgtaaaaggtgaatatttactaatagctgctgtctatgggggctgtcagaagtaaatgagcacttacggagcttatcatagtggttggcacatagtaagcagtcaatacattttagctactggtattattattgtcagtattattttttggtcacgttctctatccttcaaataataaaagttcaaaaataataaaactctctcaartaataaaaattccaattgattaaggtaaaatttaggctgggcacagtggctcatgcctgtaatcccagcactttgggaggctgaggcaggtggatctcctgagatcaggagttcgagaccagcttggccaacatgacaaaaccccgtctttactaaaaatacaaaaattagccgggcatggtggtgggtacctgtagtctcagcttctcgagaggctgaggcacaagaatcacttgaatctgggatgtggaggttgcagtgagccgacattgtgccactgcactccagcctgggcgacagagtgagagactctgtctcaaaaaataaagaaagaaagaaagaaagaaaataaaataaatttatgaaagttctcagactgccattaaatcaaacagaatatcacaactataattacaaaacaaggagaaagtaaaa

SEQ ID NO: 711684 - DNA, 652 bp, Homo sapiens
tttcttaatctgtaaaaggtgaatatttactaatagctgctgtctatgggggctgtcagaagtaaatgagcacttacggagcttatcatagtggttggcacatagtaagcagtcaatacattttagctactggtattattattgtcagtattattttttggtcacgttctctatccttcaaataataaaagttcaaaaataataaaactctctcaagtaataaaaattccaattgattaaggtaaaatttaggctgggcacagtggctcatgcctgtaatcccagcactttgggaggctgaggcaggtggatctcctgagatcaggagttcgagaccagcttggccaacatgacaaaaccccgtctttactaaaaatacaaaaattagccgggcatggtggtgggtacctgtagtctcagcttctcgagaggctgaggcacaagaatcacttgaatctgggatgtggaggttgcagtgagccgacattgtgccactgcactccagcctgggcgacagagtgagagactctgtctcaaaaaataaagaaagaaagaaagaaakaaaataaaataaatttatgaaagttctcagactgccattaaatcaaacagaatatcacaactataattacaaaacaaggagaaagtaaaa

SEQ ID NO: 711685 - DNA, 652 bp, Homo sapiens
ttcccagaaatttcatgaaagttttgcacccttaaaatcttatagtgttgccttccagcacttttgttggttgaaaaatatcaacccccagataagtaagggagagttggtggagaccacgrggaccttgaacgttactaaaaaaattacacaagagaggtgcttgtgccccagggcttttgcccttgctattctcattgcctgggatcttctgccctctgatattagaataattctctgacttgtatttttaatttctttgctgatttatcatcttctcagggaggcctttcttcatcaccctatttaaaattaacccatctcctctgatacttcctcttgcccttctgtgttttcttcttctccttagcatttatcaatatgttatgtattttaaatatttactgtttgcttgcttaccctgtttctacccactggaatgtaagctctatgggagaagggattctcaataatatctgttgaataaatggacagatggaatggatggaacaatggatggatgaatggatggatggagggagggtggcatagatggatggatggaaacatgaaggacggatggaaggatggatgaaaggaaggatggatggaaggatgaatggaaggaaggatgggtagaaggatagaggga

SEQ ID NO: 711686 - DNA, 652 bp, Homo sapiens
ttcccagaaatttcatgaaagttttgcacccttaaaatcttatagtgttgccttccagcacttttgttggttgaaaaatatcaacccccagataagtaagggagagttggtggagaccacgagkaccttgaacgttactaaaaaaattacacaagagaggtgcttgtgccccagggcttttgcccttgctattctcattgcctgggatcttctgccctctgatattagaataattctctgacttgtatttttaatttctttgctgatttatcatcttctcagggaggcctttcttcatcaccctatttaaaattaacccatctcctctgatacttcctcttgcccttctgtgttttcttcttctccttagcatttatcaatatgttatgtattttaaatatttactgtttgcttgcttaccctgtttctacccactggaatgtaagctctatgggagaagggattctcaataatatctgttgaataaatggacagatggaatggatggaacaatggatggatgaatggatggatggagggagggtggcatagatggatggatggaaacatgaaggacggatggaaggatggatgaaaggaaggatggatggaaggatgaatggaaggaaggatgggtagaaggatagaggga

SEQ ID NO: 711687 - DNA, 652 bp, Homo sapiens
ttcccagaaatttcatgaaagttttgcacccttaaaatcttatagtgttgccttccagcacttttgttggttgaaaaatatcaacccccagataagtaagggagagttggtggagaccacgaggaccttgaackttactaaaaaaattacacaagagaggtgcttgtgccccagggcttttgcccttgctattctcattgcctgggatcttctgccctctgatattagaataattctctgacttgtatttttaatttctttgctgatttatcatcttctcagggaggcctttcttcatcaccctatttaaaattaacccatctcctctgatacttcctcttgcccttctgtgttttcttcttctccttagcatttatcaatatgttatgtattttaaatatttactgtttgcttgcttaccctgtttctacccactggaatgtaagctctatgggagaagggattctcaataatatctgttgaataaatggacagatggaatggatggaacaatggatggatgaatggatggatggagggagggtggcatagatggatggatggaaacatgaaggacggatggaaggatggatgaaaggaaggatggatggaaggatgaatggaaggaaggatgggtagaaggatagaggga

SEQ ID NO: 711688 - DNA, 652 bp, Homo sapiens
ttcccagaaatttcatgaaagttttgcacccttaaaatcttatagtgttgccttccagcacttttgttggttgaaaaatatcaacccccagataagtaagggagagttggtggagaccacgaggaccttgaacgttactaaaaaaattacacaagagaggtgcttgtgccccagggcttttgcccttgctattctcattgcctgggatcttctgccctctgatattagaataattctctgacttgtatttttaatttctttgctgatttatcatcttctcagggaggcctttcttcatcaccctatttaaaattaacccatctcctctgatacttcctcttgcccttctgtgttttcttcttctcyttagcatttatcaatatgttatgtattttaaatatttactgtttgcttgcttaccctgtttctacccactggaatgtaagctctatgggagaagggattctcaataatatctgttgaataaatggacagatggaatggatggaacaatggatggatgaatggatggatggagggagggtggcatagatggatggatggaaacatgaaggacggatggaaggatggatgaaaggaaggatggatggaaggatgaatggaaggaaggatgggtagaaggatagaggga

SEQ ID NO: 711689 - DNA, 652 bp, Homo sapiens
ttcccagaaatttcatgaaagttttgcacccttaaaatcttatagtgttgccttccagcacttttgttggttgaaaaatatcaacccccagataagtaagggagagttggtggagaccacgaggaccttgaacgttactaaaaaaattacacaagagaggtgcttgtgccccagggcttttgcccttgctattctcattgcctgggatcttctgccctctgatattagaataattctctgacttgtatttttaatttctttgctgatttatcatcttctcagggaggcctttcttcatcaccctatttaaaattaacccatctcctctgatacttcctcttgcccttctgtgttttcttcttctccttagcatttatcaatatgttatgtattttaaatatttactgtttgcttgcttaccctgtttctacccactggaatgtaagctctatgggagaagggattctcaataatatctgttgaataaatggacagatgsaatggatggaacaatggatggatgaatggatggatggagggagggtggcatagatggatggatggaaacatgaaggacggatggaaggatggatgaaaggaaggatggatggaaggatgaatggaaggaaggatgggtagaaggatagaggga

SEQ ID NO: 711690 - DNA, 612 bp, Homo sapiens
tcagctcactgcaacctctgtctcctgggttcaagcgattctcctgcctcagccgcctgagtagctgggactacaggcatgcaccaacacgcctggctaatttctgtatttttagtagagatgaggtttcaccatgttggcctggctggtcttgaactcctgacctcgggggatctgcctgcctcggcctcccaaagtgctaggattacaatggtgagccactgctcccagccaaatttttacattctttttaagtcccttaaagaaaatgtggagtatttcagaaacaacattttatttatttgaacgtaattgtttaagaatttgtgataattcagacgaagactaggctgacccttatatgatcatttaaacaagaatttaataatctgggaaactttgaaactaccaaaaagtttaattgtaaatttcttgaacatattgcacacactaggtgctyattaagtaattttgtattaataaaaatcaaattagaatatttaatatatgaaaatttttacatgctatgtagtcaaaagtatgtatgtgctaagaacaaatggttattatttattacatttacatcaaggtaagttctcaaatttcacctga

SEQ ID NO: 711691 - DNA, 899 bp, Homo sapiens
gcctttcaccatattcttgctggttaccattctcagagatgaaacatcttcctgtttctattatatctaagcaggctttgcacccacccaagctcccttatatccctgggctcaggtataaatttgccacttatttaaaaagggaatttctccacattctttcttccactacagatttgaacctccattcccaaatgcttccctggcttcaggccttttgtctcatgcacggatttgttccctagcaagtctcttctaaatactgttttggtgggtagacttttagattctcatctttactttctgcctaggttactatcacacatgtagttaccttctttgtctcactgaactttatagacaagccttgccctmctccatacaaattcctgagagagtgcaacccagcctggagccggagcttcagcctctcatttgcttgaagagcagcttgatcccctgtatttcctcgaaatagcctttttgttacatgatcctaacaccatgagtataagaaacatgccatctgaagtgcctgattcttgcctgttatgaactaaatgtttatgtcctcccaaaattcacatgctgaagcccaatcaaggtggggtctttgaaaggtaattagagttagtataggtcctgaggatagagttcttaggatgaaattagtgatcttataagaaaagaaagaaagatctcactctgcctgtctcgctctcgctctctccatgtacacctcagggaaaagccataataggacacagtgagaaggtagccatctgcatgccaggaagaaagccctcatcaggaaaagaataagcaagcatcttggtcatggagtttccaacccctcgaactatggaaaaaattattttctctctaagctatccagtctg

SEQ ID NO: 711692 - DNA, 577 bp, Homo sapiens
aggtgatttaacagtatagagttgagacagttccacccaattacagactagatgatctaggtttggactaatctctctcacagggtgaaataactgcttcacatattgctccaaatcttttctggaatcaacatttaaatctcaagtaaaatgaatttgacatttctgctctaagtttctactgtgatgaactcgccctaaggcaatggatatctacatatctggcagggagaagaagttcaacaataagaaaagagaagagtacagytttcaaaacttatcctgtcacatggtatatggtctagggctacttggaggaatgtgggctcaagaagaattcagagaaatcctagaccatcattgaaggtcaaaagaatcaggaaaagcttaaaggagaaggtgggacatcaactagtccatcataagctatttaaattaccaaaatagaattagcattaacagaactgtcatggtgacattagcagtatttggttggatgtggacaattattgagctcattctgaaacataaaccaggttatattaatttctaaataaagcaacagtaataatcctaa

SEQ ID NO: 711693 - DNA, 745 bp, Homo sapiens
tggataagtttttctttcctatcctgtaaagacagaaaaaaagtacattaaagacaatatattctgccagttggctatattagataaaaataaataaataaaaaaggtaagaaaaactgcattttggcacaacccaccgtacaactgacaaacagaatgaaacactccaaacctaattgcaatcccactgtctaaagcccagggagtgtgcgaagaaacagtaatccgaggaactaaagacacagtaagaaaatgctcctattcaaaaacatcttactcacattttagtcattagaaatatattatcccataaaaccatayattgaaagcaaaatgcaaacactttctgggaaaatgtggactacctttctgttaagtagatcattcaccagataatcaaaatacacgaactctaatgggaatgcagatgggccagttaaagacaaagctagacgagtgggctccagtggcaacacaagcctgggggctgcagctcagggtttagtaccagatgtggaatggtttggtgccaaagatcagcttgactttctctccaatcatatacccaggctgctgacggcagctattccccacacaggcagcttgtgcttctctgtccgtagagtattaataggttttaacattaatttgcaaaatgtgaccaacataaatagaattcacgcaaacaggaaacgtactaaatgatttatgtattctgctaatacttaacccaataaacatcatc

SEQ ID NO: 711694 - DNA, 767 bp, Homo sapiens
tgagcaatgacagtgtactgcagagaaaatttactcttgcctagaactggagggtttttatgggtctgtaattttcccacactcattgctgaaagcttaattaagtacttcaaaaacgtatctccattgttttaccttcttgaggggaacggtcttgttaaccagccctgagttgtctaccccaaacaatctctgtcattttcaaagatgcaaaatggtgttatttaattgtctccaccattgtcacacacaggaatgcctaataatagcaacccttgtctccctcttctctcctttgcaaatggstcagtgactggaagaggcggactaatagccagagttaaatataaatacaaattaataatacatagagaacagcaataccagaaaaaaagaattctggtaaaatgatgtgaaaaattgacagctccctcactcttaaggttgctgctatatacagtctaggttttctgtttggaaataggtagggtaaaatctaagacctgcacaagggcagtgagagacatttacagcctcctctctatttgtttttttaaggaaaagtcaactcctgaaatgtcccttagctataatcagaaaactaagaatattattctgtgtcaacaatgtatttatggagagaagtaaaaataagttccacagcaacacatttacatgaattatgaactaggattcttggatttcataatcactccaaagctttttggggatggtgtgtgtgtgtgtgtgtgtccgtaattgttcat

SEQ ID NO: 711695 - DNA, 643 bp, Homo sapiens
tccaagaattaatgcaacctctttttgagtgtatttaaattcagcctgaggacataaattcaattaattaatacctcacataagaagtatacctaattttatgtgtctgcctctaatttctgaagtctcagaatttaatgaactaatctacatccaatttaaccatgattttacagatttcagctagaattcctgaattagcacttctctttaagagtcctttaaaatttatttttcttattatttcattctaacctcttgattgttgaaaaatcagattcttgactcagttaagactcagctgagaaaattacctcttggttcttaaccagtataatttggatcaagtgagaaatacctcaaagctaattaaagaacatatcataaaatgccttctgtctctagtacatgcaaattataaaaaaaagtttcaaaacaatatacccttacagggtatttgctgtctaatttgtcaaactttccaggttttgccatcctgaaatccccttccctccacaaatgtcttggattttyctgcctctcttgcccaagtctgtcctagtcacagccagactccttgagaaataatctaaacccactttatcaccctcattcactctttaaccctatgcaattcagcctg

SEQ ID NO: 711696 - DNA, 694 bp, Homo sapiens
tgctccagtttaattaaatcctttgtatttttttccctaggtcactatattagcatcagaaataggttctctgtcttcagtgtgtccttgaatctgtaccaaaggaagcttcctaaggtgcactgtgatcagctgcccctttctgacactctttcagacatccatgatcccrgagcttctcagatccatcctgccacccatgagagacaccttttctttttactaatgcaagctcctcaaataccagtgactcttctgaggagcatgatttggagagataagggatatatttcattagaggagccttgtcctttgttcttggattatctctaacataggtgtaaaaaaactatctactgcaaaggtaagttaagataccttgattcatttaaattctcttcaaatccattcatttactcttgtgggatcttgaattctcttattctctctctctctctgtctcacacacacacagagagacacacacacacacagagctgtgacttgggatgatggaataacgtaaagaatacagatatcaatctggccacaagaattttcaggaattttgctgatctcatgactcccaccaaccgtcagagaacacacaatgcaattatctctagcccgggcatgtaagaattatgctttgatttactttccacaacccctccccatttagccccatcactgc

SEQ ID NO: 711697 - DNA, 1073 bp, Homo sapiens
ttaaactaattgaaaataattttgaggtggtcggtaccacccataattcgtttttaaagcataaccacttatttataccttttctattatttctaaaatcatcctaagagattactaacatgaaaattcacaattgaaatgattcaaaacaaagcaaccgagaggaaagatgaaaatgaagggcaagagaaataaagtaacaagaaaatgggataaactagtcacattgaataatcaataactttattcaaatattcctgacagctaaagtgaaaataaattagtaaataaaattgcactgaacctttttttttcttcagatgaaaggaactagattctgaaaggcattgcccagtagacacaaagcagttgatatgttagaccatgttttagcaaacatccactaatgcctttaaatggatagtgggtttcttgggtgcactaagagaaaattatcaattttattgctttccagtgatttgatctcataaaggaatatatcttgaagatagagtatcatttggggtttttctgtaaataaaacgtatctaaattcagtcaagcttaaatgttggtcaattcacatttgaattatgttagcattcttttctcttaataaaaatagaactcacatacacaagatgcagggatgtagatactaacattagtggctggtcatgaaaactatgatataaactttttctcctactcagacccatcacatttcttcacaggtttggttcacagggttgcttgtgaataatgttattagagaatggatttgcttggatacaacttggtaaagagattaaaatgtaataaagatacaaattgtctagatatttttggttatgctatttgttatctgtgcaacgcatagaataattggccattactggctrcaatgaaatatctatgctagcttgtaacagctgtcttggaactaaacaaactaaaaattttggagaagttaaatatgagctttgttaggcaatttcatgaggatttagaagatggtaaaacaaatcctagagttatgagaagataggtgaggtttgaactgagtgttaaag

SEQ ID NO: 711698 - DNA, 629 bp, Homo sapiens
atgttcctatgacttcttgagttatacatttttattaacaaatgataaaattatattcactaaatgaactcatttgtacctgttttaccagtttcagaatgttattttatatttcttaggtttttcttagacttgtagaaatcatgctgctttgttccctgcaggagttaaaataaaaatattagtaattatgcatatttaattttcagaatgccaactgattactcacagcasttataaaagggaaatgattttagatattcataaaacatttccttagtaaggggctttcaagtctgaagttgtgttattatggatatttctttttaaaataatcaggataaaaaatgcatttattaagatccctcttcttttctctttttcagatgtaagacaaaagtctaccctgatgaacttccaaacacaagtgtagtcattgtgtttcataatgaagcttggagcactctccttagaactgtttacagtgtgataaatcgttccccacactatctactctcagaggtcatcttggtagatgatgccagtgaaagaggtacaaactggttttttgtttttgtttttgtttttttgttttgttttgttttgtttttttgtattagaaagcttta

SEQ ID NO: 711699 - DNA, 934 bp, Homo sapiens
caaaggaaagatctctccaaagaattagataacatgcatagtataattcctgacccttaagatgtaacctctgaatatattatttcaaagttacacactgtaactgaaaaccctaagcacagctgattttacaaatgctttatgtaatctctaaggtcaaataatatcttaggtaaggttattaatttttgatcaagggtwtatttttctccaattgcagatttagaaaattagttactatttttgcatctcaattttcctcgactgaggtacttcagtcctacagtttctcccaaacacttccactttatctcatgtacttcattattttccccaatcaattctttttcctctgcagcttaagaaattagtcattttcttttatgtttgttcttctgtatatatgttcctatacataaggtgactatacagatgcagcatattcctatactgtgaataaaataaactgaactagatgtgtccttattttcataactagtgaaaggagagagatatggctataaacaaaagttattaaaatagatgcagaactttttatacacatacctgaactgtttggacttgtggagactgaataactgatggctgggccgcctgaatgactccatggacttgaactgtctgcccattgggcagctgtactagagttacggtgggagcagatgatgttgcatgagctgctggcatagatacctatggtgttgaacacagaaaagaattatcatcccagacactctttggcagtactcatgttcaatatgaaataactttttagaagcaaaaacgtgacctttttgctagatatgtatttcactgatatgaaagtaatgactaaatttaatattctttaagaaaaaacactataaaaaacaccaaaaactatacccctatccttttcagctcttcccaagtg

SEQ ID NO: 711700 - DNA, 591 bp, Homo sapiens
gctaacatagtgaaaacccgtctctactaaaagtataaaaaaatcagccgggcatggtggcacgtgcctgtattcccagctacctcaggaggctggaggtggaacctgggaggtggaggttgcagtgagccaagatcgcgcaactgcactccagcttgggcaacagagtgagactttgtctcaaaaaaaagagaaaaagctgaattttaatctgtttgacatgggttcatcttattttcatactggccatgtaaaccatgtgcttgttaatatatagtttgtgaaccatatgtatgaaagtcaataaatattattgctgttgttattgttattatcttagaagtggaagagattaatctagtcctcttatttcagtaacaagaagcaactgtgcttttttaattttcaattttgtagtaacgttcatttaataattcagtgtccacctgtgaaagccttgcctgaatatccatgtgatttcttgctcaggaacttgtcatattccctgtttgttgcagtcattttgacatttcrtattctgctttgtgtgtgatactttggtgaccttatttgtgaaatgggagaacttga

SEQ ID NO: 711701 - DNA, 1338 bp, Homo sapiens
gggatcccttaggctagatttcctcattaataaagactgcactgttgtcttaaaaatgaccattatcttttgatcgttcacagccccagaaagcactctataattcattttttctgagtggaaaatctcacaaggaagtttcattggctcttgaactaattatttaccagaaccttttgtaaaaatagtggtatttggggctgaaatatgtcaaaaatggtcttgattacaataagcacaaggaaaaagataagtattatgaagaggacatgaaatcttgaattccaaataatcaatttgatcattacacattgtatgcttgtatcaaaatagcacatgtacccaataaatatgtacaactattatgtatcaataattttaasagaccttgtaatttgcagaagaagttgagaagaattattaaatttcattctaatttttcacattcaattaaatgaagacaacatgaatttcatgcttacttcacagatttgcaaatgtactctgagtgtttaaactgctctgcaaatattgttaaaatattgacccaaataataagcaatgttattttaagagtgagaaacccatacagagctgtcttgacattcaaagatatagaccttgcttaacctctcttggttcctcaattatgtcattgcttctgctacaaatatagtgttcttaattacattaccaattaaggggaacaggatgctcagaaaaggcaagctgaataatgatttgggaataatgatattaataaaaattttttaattctgaattttgtttttgagttttctattttaaatgcagttgtattccttgtggctgtattagctcttttgttcacaacattctgcaaagctttataagaaaaggcatgtaaaactattgggaaattttttgaaaggaataaataaatacacattacctatagcatcagaaaatgtacaaatctaagtagaatgaatcttttactctctaagaaataaactaaataaactacgtttctgtagactttaattaaaaagttgtttgttagagaacaattctgtaatttcaaaattgcatttgaagactccaattcaagatgatctgaaagtaaaatcaatgctgtctacttttcagcatttgccgaagttctacattatttgggtgtctgtattgttactcagttctttattaatactgtgatgtaagtatgctttcctcatttaatcccattttggaactaaaatgtttttaatgtgggtagcttgggaaaattttatttgttaaaataaccaattctttgcacagagtgtgctatagtaaaacaattggctgcaatggtagtga

SEQ ID NO: 711702 - DNA, 1896 bp, Homo sapiens
caattggcaaaaatcaaatgccaaagaaataaatggtagtgtttgttatcaggctcaagtttaatatagatggtaatagttatactgtggcatttcgggatagactttttgtttctcctacacaaattactttgagtaaataatttagatacataaacctttttagtcactaagataccatttacaaagaagtgttgcaacatactactaacaacataatgggctgaaaggagaaatgggcctttaaatgtgtcttctggatcggtgtagttgattatataagactaatctactaacagttttctcacttttagccacaaagagagagcctcctataatcttccttgtttataacactttaatttttcaatctcttaggatcataaaggcattctagttccagtcaatctactgagtttggttaatatgcacataaatcatcagccatcagtaaggaaggtgactgctggtagagctaatccatcatcaggactatgagacagctgctccttttatagaggaaataaaagcaaatacagaaaaccttaagacttgaaggtttttgtattatcaagtccatgcacttttacctgtgtgatatttgcaacttttgttttctgattcttagaattatagtaatatatgtattaatcctgctgctttggcctttggattttggcatgatttcattcttcttgtagaaaaaaatataatcagtgtctctccacctagtttatttccttagagttttgctgtctaacatggtgtatacttttactgctcaccatgattgcaatcattatattagtattgaaaatacccaaagagttagtgacatacctttggatgagattaataaccatgtagggggaagaatggattgccaagccatatactgaagttcagagtctttactttttactgtttaatttggggagaactttcaaagagataaggtttaaaatctgcactggaattcaggaagtaacatgcgcctgtctctaggaaacagaaatgagactgatgatataatttagaagtacatgtgacataagtcacgtgcaaaacaaggtaggtgcttacttcaatcatgacctttgaaaatttctcagtgatagtgtgggaggcttttttaggaatggaattggaacaatatgtgcttcttcccacgagtaaactgtgaaatgagtgttttaaatgatttttaattacagtttctgagctcagtacttgaaggtgccagttgagatgaaaagcatgtagtttrtttatttcattgtcagggtgagagtatgatttataaaagagttcctaactcacattagaattcacttaaacattctgagaaaaaaaaactaaaaacaaaaaccgttgctaagtaggttttaggtaaaatatatttgagtaaaatttgagttcaagaaaaatgtagatcctctctaaggaatttctatcactaacagagctatttatatttaacatatttaatgacaagcaaggtaggaaagttgttttgcaggccacttttttatgaatcaaaaaagttattttttgcttaatgagtgtaaaaatactaaaacgtaataattccctcttacatatttttcttacttacgttttttgtatttatttaaaaattaggccagtgacaaaagaaaaacataactcaagttaaaaatgaaatatatgtggccgggtgcagtggctcacacctgtaatcccagcactttgggaggctgaggtgggtggatcacaaggtctagagatcgagaccatcctggctaacatggtgaaaccctgtctctactaaaaaaaaaaaaaaaaaaaaaaaaattagccaggcgtggtggccagcgcctgtagtcccagctactcgggaggctgaggcagaagaat

SEQ ID NO: 711703 - DNA, 583 bp, Homo sapiens
taaatttgggagtcaatatgggacagataaataatatttcttagatattttcatcagatatcacaatgtatatatactggtgttcctctaagatcgttatttttcttcttcttcttctttagtctccctctgtcacctaggctggagtgcagcggcgtgatctcagctcattgcaacctccgtctcccaagttcaagtgattctcctgcctcagcctcccaagtagctgggattacaggcatgtgccattatgcctggctaagtttgtatttttagtagagatggggtttcactgtgttgatcaggttggtctcaaactcctgacctcagttgatccgcccaccttgacctcccaaagtgctgggattacaggmgtgagccaccacagcaggccagagatccttttaaaggtgctaaataattatacttcttttatcttttgttggtttcctgcttatctcaaaatcatctcttttgctcagttaaaacactaagcacttagagtggcaaatttgtggaggtaagagagtaagttttttataacccgcatagtgtgaggcgtgctaagttttctttccctcca

SEQ ID NO: 711704 - DNA, 635 bp, Homo sapiens
tcactcagctcaaaagtgttctaatttatgttttctctcacctgccttggtttaatgttatcaatattttacttctttacatgttttatatatattatacaagatggttgttactgttattttaaaggattaatattcattttcttacatatttttattttttatttyttcacaattccattcttacatctgcagtcatttcttttagtgcatcttactttagtaatgatttgtctcagctttttcttgtctaaaccatgttgattttgtttttatatttgaaagacatttttattgagtataaattttagtttaacactcttttcctttttccttttttctttctattccttttagcagcacattaaatgtgtcattccattgtcttcagggtttcacaattttagttaaaatatcagaggttggttttatgatttttttcctttgaatgtaaagtctcttctttgcagggctgcttttaaaattttctatttagcttgggcttatggaattgttactattccaaacattgtatgtatgagagtgtgtgagtgtgttgttttgtttgtttttctacttagggtgtgcagagcacagtaaattaatgtgtttacatctgtcttcatttttggaaa

SEQ ID NO: 711705 - DNA, 635 bp, Homo sapiens
tcactcagctcaaaagtgttctaatttatgttttctctcacctgccttggtttaatgttatcaatattttacttctttacatgttttatatatattatacaagatggttgttactgttattttaaaggattaatattcattttcttacatatttttattttttatttcttcacaattccattcttacatctgcagtcatttcttttagtgcatcttactttagtaatgatttgtctcagctttttcttgtctaaaccatgttgattttgtttttatatttgaaagacatttttattgagtataaattttagtttaacactcttttcctttttccttttttctttctattccttttagcagcacattaaatgtgtcattccattgtcttcagggtttcacaattttagttaaaatatcagaggttggttttatgatttttttcctttgaatgtaaagtctcttctttgcagggctgcttttaaaattttctatttagcttgggcttatggaattgttactattccaaacattgtatgtatgagagtgtgtgwgtgtgttgttttgtttgtttttctacttagggtgtgcagagcacagtaaattaatgtgtttacatctgtcttcatttttggaaa

SEQ ID NO: 711706 - DNA, 643 bp, Homo sapiens
ttgtgatccttactggacagaaaaaggtatttaggagttacagcagaggtgggactggagcttagttcttctgcatcccagtgtgcagaagggcaagactgcagatcccaggtttgggggcaagactagacaatttcaaagagccctttgtgctctctaaaatttggagactcagattctgaattagcaaattagtctgtaggccagcactgtccagcaaagctgtctgtgaagacggaaacgttgcatgcctgcacagtccaatacagtagccactagccgcatatggctaacaagcacttggaccatggctagtgtgaccaaggagttgcatttccaccatattggacagcacagctctggtgttttcccttccccaaggctcagcactgcaacctctgccacgcactgatgcmctgaagtttgcactcagcaatggcacctggggacactttcctatatcccttggtaaaacacaccaggttccctcaaatacaccacttattcttcagtgaaattctacagaagtgggaggaaaacaaaattgaaagagctgaagcagaaacactattgatttttaatccttttttatcatccaagaatttcaaggtatatttctcatgtcattccattcctctcctgg

SEQ ID NO: 711707 - DNA, 1131 bp, Homo sapiens
aagaacattgtgcttcatacaggttcagtggacagccttgattcccacagctgctgcttcccgggcccattctctgctcatgtgtaagtcatgaagtgtctctgaaatacttagccaacagcattaacctagcagctgaatcccttttttttttctttcagatcaaaacagcaggttttataagttgaaagcacagagggagagcacgagtctcagaagtctctgggcccaaaaggcaggagcttcacagcatttggctctgcagactccctcctgtgcatgctcaccctgggacacctccctcctggcctggttccactctgctttgaagagataggtgatccaggccattgtcagagatggggttctcttgctgtctctctggctgattccacgcacaggcgttcttcaaatgctgctaggtaggaaaaccatggggaagttatgatggaatgatcaaaaataaattttctgttcttgcaacaactcaccttaaaaatccacttaccttttaatttcccttactgaagcccagactcacataagatcctttacaatctgggttgacctacatttatttcagtgtyaccactgccgtctgcccctgcaacgttctctgtttcaaaatcagaaacgtttatctcttcctggagcattttgaatttttgttcatactcatactccttattctgtttagcgttctcttctcttccttttcctcacctggtggacccctattctttcctgtatgattacactcgcttctctaaaatgctttaaagaggcacttgctttgtgtgtctgttcacgtgtttgttctgtcagtctgagtcgggaaagcgtcgtgcggctggcctggctgccaagacctggggcagcctagttcacagagcccccttggaaatctgtggggaaagttgagacttctttctactgttggtttgtgcccaagttaaatgtgaaacatgatgggtcccaaagtagtgtgctttagaagttcagagggaggccaggtgcggtggctcatgcctgtaatcccagcactttgggaggccgagaggggcggatcacgaggtcaggagatggagaccatcctggctaacacggtgaaaccccgtctctactaaaaat

SEQ ID NO: 711708 - DNA, 1939 bp, Homo sapiens
ccatagtacacttgttgttagatcatagccctgttsattgttttcaagtttttgttatttatttaggattggatcttaaattcctctagtttacttcaatatcttgctacaactctccaaacaagaacaaaaactgctaagctggacaatttgacataagtttcagggataaagtctcatgcctgatgtgtagatcacatggagagctcaccagaatgcccaatgccacaacccaaggagggaatcatgggaaccctggtttatagtcagtgggccagaagctgaggtcaaaatctgagtttgtaattggcatgtgaaatggggtcaggctcctgggactgagccctcacctatcctgagctctcaacccaactttacctggctgtctccaagtaagtaggatcagaataacaggacacctagctggtgtttgctgcagagttgcttggttggcatgtggagaaaaccccccacacatctggtgtcagaagtactctgtgattgtgagtagagagtagggaaacatgcttaggtttttcccatatatatatccacacaaatatatgtgtgaatcttagtataattcttttcatcttatttgatttcaggataatgaaagttgtattcttattgctatttattaacaggaagtctctgattaatccagaaaacagtattttttggtctctcttctaaagtaattttcattttctctcatttagttttcacatgaaagcttgatagaactataattccaaggatactgttatgtaaatgcaggctatttagaagtgaaattcctgagtcaattgtttcctttcatttctagacagtgtaaggatagtacttgagttggtgctattaaccccctccccaaaatgtgaatggtagtagggattctttgtgggcagtcctgccactggagacatttgaaactcaaattccatttctatagatcaaaggctaaatcacaccagtggtaaaactaatatgtttacaaaacaaattttgatttaaacaaaccaacaaaattccctttgatggctctcattgcacttaggtaaaatccaatcccctcctggtggtccccaaggtcctgatggggccagaccatccagttggcacctagttagtgctcctgctccaacccctcaggtgcaagctcctccctattcatggccccctctctgttggaaacctttatcccgctccaggtctaaccctctttcatctcaagtcttacatgttgtatccctggagaaactttcattaacttcccactcaaaactgttactcctgttcctctttttcatcccacttttcaactcattattaaaggcacttatttcaacatgcgtcatgtcatctgtgctgtgatgattggttgactgtgcatgctcatcccagagctctgttctctttcttttctgtatccagcatttttcagacagagggttgggcatgcttatggcatctgggggaacaattctttgtacagtttataaggttatgcatgataatgatgcttaacaaataacccccaaacctcattggtcacaaccaacactgatatctcactcgtgggcttggtactcggctgggcttggggctcaggtctgctctggtctctcactggtgtttcttgcttgagggcccaggtggagggaggtatggttgcctgagtatgcggtctcctggtgaatggcttgagcttaggagagtgagggaacacagaatggttcttgacacctcacccagaactggcacaatctcctatctgcttacatttctctggtcaaagaaatttttatgacctaaaatcaatgcaggaagtttgatgtctttaacaactgggtgctaaatgttggtaatgcctctgctgtggtgggaatgtttgggttaccccaaaatctatatgttgaaatcctgactcccacaa

SEQ ID NO: 711709 - DNA, 1939 bp, Homo sapiens
ccatagtacacttgttgttagatcatagccctgttgattgttttcaagtttttgttatttatttaggattggatcttaaattcctctagtttacttcaatatcttgctacaactctccaaacaagaacaaaaactgctaagctggacaatttgacataagtttcagggataaagtctcatgcctgatgtgtagatcacatggagagctcaccagaatgcccaatgccacaacccaaggagggaatcatgggaaccctggtttatagtcagtgggccagaagctgaggtcaaaatctgagtttgtaattggcatgtgaaatggggtcaggstcctgggactgagccctcacctatcctgagctctcaacccaactttacctggctgtctccaagtaagtaggatcagaataacaggacacctagctggtgtttgctgcagagttgcttggttggcatgtggagaaaaccccccacacatctggtgtcagaagtactctgtgattgtgagtagagagtagggaaacatgcttaggtttttcccatatatatatccacacaaatatatgtgtgaatcttagtataattcttttcatcttatttgatttcaggataatgaaagttgtattcttattgctatttattaacaggaagtctctgattaatccagaaaacagtattttttggtctctcttctaaagtaattttcattttctctcatttagttttcacatgaaagcttgatagaactataattccaaggatactgttatgtaaatgcaggctatttagaagtgaaattcctgagtcaattgtttcctttcatttctagacagtgtaaggatagtacttgagttggtgctattaaccccctccccaaaatgtgaatggtagtagggattctttgtgggcagtcctgccactggagacatttgaaactcaaattccatttctatagatcaaaggctaaatcacaccagtggtaaaactaatatgtttacaaaacaaattttgatttaaacaaaccaacaaaattccctttgatggctctcattgcacttaggtaaaatccaatcccctcctggtggtccccaaggtcctgatggggccagaccatccagttggcacctagttagtgctcctgctccaacccctcaggtgcaagctcctccctattcatggccccctctctgttggaaacctttatcccgctccaggtctaaccctctttcatctcaagtcttacatgttgtatccctggagaaactttcattaacttcccactcaaaactgttactcctgttcctctttttcatcccacttttcaactcattattaaaggcacttatttcaacatgcgtcatgtcatctgtgctgtgatgattggttgactgtgcatgctcatcccagagctctgttctctttcttttctgtatccagcatttttcagacagagggttgggcatgcttatggcatctgggggaacaattctttgtacagtttataaggttatgcatgataatgatgcttaacaaataacccccaaacctcattggtcacaaccaacactgatatctcactcgtgggcttggtactcggctgggcttggggctcaggtctgctctggtctctcactggtgtttcttgcttgagggcccaggtggagggaggtatggttgcctgagtatgcggtctcctggtgaatggcttgagcttaggagagtgagggaacacagaatggttcttgacacctcacccagaactggcacaatctcctatctgcttacatttctctggtcaaagaaatttttatgacctaaaatcaatgcaggaagtttgatgtctttaacaactgggtgctaaatgttggtaatgcctctgctgtggtgggaatgtttgggttaccccaaaatctatatgttgaaatcctgactcccacaa

SEQ ID NO: 711710 - DNA, 1939 bp, Homo sapiens
ccatagtacacttgttgttagatcatagccctgttgattgttttcaagtttttgttatttatttaggattggatcttaaattcctctagtttacttcaatatcttgctacaactctccaaacaagaacaaaaactgctaagctggacaatttgacataagtttcagggataaagtctcatgcctgatgtgtagatcacatggagagctcaccagaatgcccaatgccacaacccaaggagggaatcatgggaaccctggtttatagtcagtgggccagaagctgaggtcaaaatctgagtttgtaattggcatgtgaaatggggtcaggctcctgggactgagccctcacctatcctgagctctcaacccaactttacctggctgtctccaagtaagtaggatcagaataacaggacacctagctggtgtttgctgcagagttgcttggttggcatgtggagaaaaccccccacacatctggtgtcagaagtactctgtgattgtgagtagagagtagggaaacatgcttaggtttttcccatatatatatccacacaaatatatgtgtgaatcttagtataattcttttcatcttatttgatttcaggataatgaaagttgtattcttattgctatttattaacaggaagtctctgattaatccagaaaacagtattttttggtctctcttctaaagtaattttcattttctctcatttagttttcacatgaaagcttgatagaactataattccaaggatactgttatgtaaatgcaggctatttagaagtgaaattcctgagtcaattgtttcctttcatttctagacagtgtaaggatagtacttgagttggtgctattaaccccctccccaaaatgtgaatggtagtagggattctttgtgggcagtcctgccactggagacatttgaaactcaaattccatttctatagatcaaaggctaaatcacaccagtggtaaaactaatatgtttacaaaacaaattttgatttaaacaaaccaacaaaattccctttgatggctctcattgcacttaggtaaaatccaatcccctcctggtggtccccaaggtcctgatggggccagaccatccagttggcacctagttagtgctcctgctccaacccctcaggtgcaagctcctccctattcatggccccctctctgttggaaacctttatcccgctccaggtctaaccctctttcatctcaagtcttacatgttgtatccctggagaaactttcattaacttcccactcaaaactgttactcctgttcctctttttcatcccacttttcaactcattattaaaggcacttatttcaacatgcrtcatgtcatctgtgctgtgatgattggttgactgtgcatgctcatcccagagctctgttctctttcttttctgtatccagcatttttcagacagagggttgggcatgcttatggcatctgggggaacaattctttgtacagtttataaggttatgcatgataatgatgcttaacaaataacccccaaacctcattggtcacaaccaacactgatatctcactcgtgggcttggtactcggctgggcttggggctcaggtctgctctggtctctcactggtgtttcttgcttgagggcccaggtggagggaggtatggttgcctgagtatgcggtctcctggtgaatggcttgagcttaggagagtgagggaacacagaatggttcttgacacctcacccagaactggcacaatctcctatctgcttacatttctctggtcaaagaaatttttatgacctaaaatcaatgcaggaagtttgatgtctttaacaactgggtgctaaatgttggtaatgcctctgctgtggtgggaatgtttgggttaccccaaaatctatatgttgaaatcctgactcccacaa

SEQ ID NO: 711711 - DNA, 2528 bp, Homo sapiens
gttatcctaaaagtacaaatgaagatgtaattatggaaacagtattaactcactgtctgagaagaaagtgtcttcgtttcctgtcagcacacacatctgaatggcaagagtgtgagtttatacccgcccttatgttgccacatagcattgctgaacccagtttttcagaaaaaaaaaaaaatgacaactggatagagcacccactgctgtttctacagggagcacgtaggagctctgatgattgtaagaggaaaaagcaggcaggcagagccccctgtggttggcagtgcatctctctttccacacttttccctgcctaggactcctraagctcacctgacttccccagttattctgcattttacacgtctccttctggatctctctgtgtctttatctcctaataagctttttcttcctcactcttgaccagtgatctctatccaactctgatggatacattctggtttatctgtcttggaccattctctacctccattccattcttctagaaaagagtgaaattaggagtaatttggacaggaagccgtgccaagattttttctaaggacatatatgctgttgattcttgatcaacacaggtttggactgtgtgggtccacttacatgtggattttttcccaaccagatgtgtatggaaactacagtattcatgggatgcaaaaccagtgtatatggagggccaacttttcatatatgtgggttccgtacagccgactgcagagtatgcacagattttggcataagcaggtggtttttgaaccaatcccccacatatactaagagatgactgtagttaaacttccaatggagaagcggaggtgtcaaacattcattacttaattgtgttgttttcattgggtaggtagtatagcattaaagctgatggtttttcaaaattaaattgcctttaatcctattcccatattgcagttatttcacatttgcatattattttgcagtgcttgttcccagatcttcatagttgtgtatagttgtaatcatcatatatgtctaaaagaggtaggacagtgagtgagtgcagtgattaaaaacacaccatttgaagccatatcttggttcatttctgccttttccatttcccagctgtgtgacctcggccatatatttaatctctctttgccctagtatctgctttataaaatgagaataatattacttttctgacaggtgttgggaagattaaatgaaatgtgaccaaaatgcctcaaacggtgcctggcactcttcagctgttgatagctttattttcattactgtagtcttcattctttttggttttgtcagatcacatcctaaatattttctagccttcccgtttgtttatttatttttatttttctaagtgtgtgtttgtgtgtatgggtggctgtgtgtgtttcctgagataggatctcactctgttgcccaggcaaagagtgcagtagtacaatctcagctcactttagccttggtctcccaggctcaggtgatcctgccatctcagcctcccaagtagctgggactgcaggcgcataccaccatgcctggctaagttttgtattttttgtagagatggggttttgtcatgttgcctaggctggtgttgaactcctgggctcaagccatcctcccacctcagcctcccaaagtgctgggattgcaggtctcagccactgtggctggccgttcccatttattttaataactacataatttatgtgttaatacagcgcagttcattaaacttttttttgttagacacaattttaagttgtttctgtttgccattgtggataatattgtgaaatgtgatcagatagtttctgctgagaggttttctaggtgttggatgattggttatcactccctctgtgtgttacaactacgtaaaatactaacagttgtgaagggacttcccagcatatgcccccaatatttccagctttgatttttttgtttgtctaatttgttactgtagcaactataaaatggcagctctgtagaccactgagaggatcgaagatggttctgtgtaagtacaggttacagagaactcatccagtaccatgtaactaataagttccaggtttgaatacaggactgtttactgtgttttcttctctgaattgtctgttatagactatactcgagtaacgttttccttgtgaatttgaataaagtctatacttcagatttaaatatattgtcactgtgatgcaagtatttctcaggcactttattttacttttgtattgtttttcattatatacaaggaatttgtacccaagttggtcagtcttttttttttattcttgtttccaaatgagaggttcattgtttttccatggatctggtaaaatagttaatgcatgtcagctggtcttttattaattatgtttaattctttaacctatgtagaatttattcttctttagcctaaagtggggacctgtcctagttttcctattcatatccacttatcctactactgtttgtcagataat

SEQ ID NO: 711712 - DNA, 2528 bp, Homo sapiens
gttatcctaaaagtacaaatgaagatgtaattatggaaacagtattaactcactgtctgagaagaaagtgtcttcgtttcctgtcagcacacacatctgaatggcaagagtgtgagtttatacccgcccttatgttgccacatagcattgctgaacccagtttttcagaaaaaaaaaaaaatgacaactggatagagcacccactgctgtttctacagggagcacgtaggagctctgatgattgtaagaggaaaaagcaggcaggcagagccccctgtggttggcagtgcatctctctttccacacttttccctgcctaggactcctaaagctcacctgacttccccagttattctgcattttrcacgtctccttctggatctctctgtgtctttatctcctaataagctttttcttcctcactcttgaccagtgatctctatccaactctgatggatacattctggtttatctgtcttggaccattctctacctccattccattcttctagaaaagagtgaaattaggagtaatttggacaggaagccgtgccaagattttttctaaggacatatatgctgttgattcttgatcaacacaggtttggactgtgtgggtccacttacatgtggattttttcccaaccagatgtgtatggaaactacagtattcatgggatgcaaaaccagtgtatatggagggccaacttttcatatatgtgggttccgtacagccgactgcagagtatgcacagattttggcataagcaggtggtttttgaaccaatcccccacatatactaagagatgactgtagttaaacttccaatggagaagcggaggtgtcaaacattcattacttaattgtgttgttttcattgggtaggtagtatagcattaaagctgatggtttttcaaaattaaattgcctttaatcctattcccatattgcagttatttcacatttgcatattattttgcagtgcttgttcccagatcttcatagttgtgtatagttgtaatcatcatatatgtctaaaagaggtaggacagtgagtgagtgcagtgattaaaaacacaccatttgaagccatatcttggttcatttctgccttttccatttcccagctgtgtgacctcggccatatatttaatctctctttgccctagtatctgctttataaaatgagaataatattacttttctgacaggtgttgggaagattaaatgaaatgtgaccaaaatgcctcaaacggtgcctggcactcttcagctgttgatagctttattttcattactgtagtcttcattctttttggttttgtcagatcacatcctaaatattttctagccttcccgtttgtttatttatttttatttttctaagtgtgtgtttgtgtgtatgggtggctgtgtgtgtttcctgagataggatctcactctgttgcccaggcaaagagtgcagtagtacaatctcagctcactttagccttggtctcccaggctcaggtgatcctgccatctcagcctcccaagtagctgggactgcaggcgcataccaccatgcctggctaagttttgtattttttgtagagatggggttttgtcatgttgcctaggctggtgttgaactcctgggctcaagccatcctcccacctcagcctcccaaagtgctgggattgcaggtctcagccactgtggctggccgttcccatttattttaataactacataatttatgtgttaatacagcgcagttcattaaacttttttttgttagacacaattttaagttgtttctgtttgccattgtggataatattgtgaaatgtgatcagatagtttctgctgagaggttttctaggtgttggatgattggttatcactccctctgtgtgttacaactacgtaaaatactaacagttgtgaagggacttcccagcatatgcccccaatatttccagctttgatttttttgtttgtctaatttgttactgtagcaactataaaatggcagctctgtagaccactgagaggatcgaagatggttctgtgtaagtacaggttacagagaactcatccagtaccatgtaactaataagttccaggtttgaatacaggactgtttactgtgttttcttctctgaattgtctgttatagactatactcgagtaacgttttccttgtgaatttgaataaagtctatacttcagatttaaatatattgtcactgtgatgcaagtatttctcaggcactttattttacttttgtattgtttttcattatatacaaggaatttgtacccaagttggtcagtcttttttttttattcttgtttccaaatgagaggttcattgtttttccatggatctggtaaaatagttaatgcatgtcagctggtcttttattaattatgtttaattctttaacctatgtagaatttattcttctttagcctaaagtggggacctgtcctagttttcctattcatatccacttatcctactactgtttgtcagataat

SEQ ID NO: 711713 - DNA, 2528 bp, Homo sapiens
gttatcctaaaagtacaaatgaagatgtaattatggaaacagtattaactcactgtctgagaagaaagtgtcttcgtttcctgtcagcacacacatctgaatggcaagagtgtgagtttatacccgcccttatgttgccacatagcattgctgaacccagtttttcagaaaaaaaaaaaaatgacaactggatagagcacccactgctgtttctacagggagcacgtaggagctctgatgattgtaagaggaaaaagcaggcaggcagagccccctgtggttggcagtgcatctctctttccacacttttccctgcctaggactcctaaagctcacctgacttccccagttattctgcattttacacgtctccttctggatctctctgtgtctttatctcctaataagctttttcttcctcactcttgaccagtgatctctatccaactctgatggatacattctggtttatctgtcttggaccattctctacctccattccattcttctagaaaagagtgaaattaggagtaatttggacaggaagccgtgccaagattttttctaaggacatatatgctgttgattcttgatcaacacaggtttggactgtgtgggtccacttacatgtggattttttcccaaccagatgtgtatggaaactacagtattcatgggatgcaaaaccagtgtatatggagggccaacttttcatatatgtgggttccgtacagccgactgcagagtatgcacagattttggcataagcaggtggtttttgaaccaatcccccacatatactaagagatgactgtagttaaacttccaatggagaagcggaggtgtcaaacattcattacttaattgtgttgttttcattgggtaggtagtatagcattaaagctgatggtttttcaaaattaaattgcctttaatcctattcccatattgcagttatttcacatttgcatattattttgcagtgcttgttcccagatcttcatagttgtgtatagttgtaatcatcatatatgtctaaaagaggtaggacagtgagtgagtgcagtgattaaaaacacaccatttgaagccatatcttggttcatttctgccttttccatttcccagctgtgtgacctcggccatatatttaatctctctttgccctagtatctgctttataaaatgagaataatattacttttctgacaggtgttgggaagattaaatgaaatgtgaccaaaatgcctcaaacggtgcctggcactcttcagctgttgatagctttattttcattactgtagtcttcattctttttggttttgtcagatcacatcctaaatattttctagccttcccgtttgtttatttatttttatttttctaagtgtgtgtttgtgtgtatgggtggctgtgtgtgtttcctgagataggatctcactctgttgcccagkcaaagagtgcagtagtacaatctcagctcactttagccttggtctcccaggctcaggtgatcctgccatctcagcctcccaagtagctgggactgcaggcgcataccaccatgcctggctaagttttgtattttttgtagagatggggttttgtcatgttgcctaggctggtgttgaactcctgggctcaagccatcctcccacctcagcctcccaaagtgctgggattgcaggtctcagccactgtggctggccgttcccatttattttaataactacataatttatgtgttaatacagcgcagttcattaaacttttttttgttagacacaattttaagttgtttctgtttgccattgtggataatattgtgaaatgtgatcagatagtttctgctgagaggttttctaggtgttggatgattggttatcactccctctgtgtgttacaactacgtaaaatactaacagttgtgaagggacttcccagcatatgcccccaatatttccagctttgatttttttgtttgtctaatttgttactgtagcaactataaaatggcagctctgtagaccactgagaggatcgaagatggttctgtgtaagtacaggttacagagaactcatccagtaccatgtaactaataagttccaggtttgaatacaggactgtttactgtgttttcttctctgaattgtctgttatagactatactcgagtaacgttttccttgtgaatttgaataaagtctatacttcagatttaaatatattgtcactgtgatgcaagtatttctcaggcactttattttacttttgtattgtttttcattatatacaaggaatttgtacccaagttggtcagtcttttttttttattcttgtttccaaatgagaggttcattgtttttccatggatctggtaaaatagttaatgcatgtcagctggtcttttattaattatgtttaattctttaacctatgtagaatttattcttctttagcctaaagtggggacctgtcctagttttcctattcatatccacttatcctactactgtttgtcagataat

SEQ ID NO: 711714 - DNA, 597 bp, Homo sapiens
tagcgacactcccctcaccaagtttattcctgggtcttgggcgccccctccaatcactggtgctatacctgtgtctccttacccctgaaggaagccctgacagcctgtgccactccttcccgtagaggctgcctgagctgaaggtgaggttgccaggtgccccacagcttcccagggacccgcgtgtcctcattgcttggcagagtcagagtgggttgtagtgtayctctgcaggtggtttgttgatgcaatgggtcaagggtgagggatccttggacagggtggtgttgttgtgggtgttgtgtagtgcctgttgcccagggctttttgcttagcagatggctgtgggaacttcccagctcacactcctctgactgggtctccttctggggtctgttccagtagctttcccgaccagctagttttgtttcaagttcacagcactcatcactggcctgttagtttttccaggctgtggggcttactcagcagaggatgtaatcggtacataggctacacccttttcaaaccagtcttgccaagtgaggcacacccacatcctgcgttggtccaagaactcacaccgtactttctcag

SEQ ID NO: 711715 - DNA, 597 bp, Homo sapiens
tagcgacactcccctcaccaagtttattcctgggtcttgggcgccccctccaatcactggtgctatacctgtgtctccttacccctgaaggaagccctgacagcctgtgccactccttcccgtagaggctgcctgagctgaaggtgaggttgccaggtgccccacagcttcccagggacccgcgtgtcctcattgcttggcagagtcagagtgggttgtagtgtatctctgcaggtggtttgttgatgcaatgggtcaagggtgagggatccttggacagggtggtgttgttgtgggtgytgtgtagtgcctgttgcccagggctttttgcttagcagatggctgtgggaacttcccagctcacactcctctgactgggtctccttctggggtctgttccagtagctttcccgaccagctagttttgtttcaagttcacagcactcatcactggcctgttagtttttccaggctgtggggcttactcagcagaggatgtaatcggtacataggctacacccttttcaaaccagtcttgccaagtgaggcacacccacatcctgcgttggtccaagaactcacaccgtactttctcag

SEQ ID NO: 711716 - DNA, 574 bp, Homo sapiens
ggccaggagagctccagaagagccagggagtttgggacatatgtagtagatagtcttaacaataatgaaggcacagattcccctacccaagttccaggcatggagctttatgtacattctcatgtatgctggcagtaaccctatgatgtgagcgctattgttatgtccattttatatttgagggaacagaggactaaaatcacacttttcctggttggcagagttggagtttggatgcagggcttgcttgcagaaaagcttatgctcttgatccaaactccgtgcaagacccgcccgctcccccctgcccccacgccgtctgtcctccatgggcaccttcagcctgtctaagagagggctgtgtaggaggcttagagaggcccccacaggggtgtctggggcccagcagagtgccagttgagaatgtggtgcatgttggaaatgccatgcaacttagtaaacagtgcttctgtcttgttaagtgacctgtgcaaagaccatgtatgcacgyattgctaaagctgtggaatggtggaggcaaggtcgggaggttgagactggctaaaatgtggat

SEQ ID NO: 711717 - DNA, 1319 bp, Homo sapiens
caaaaagggtcattatttaagttaagaaggttgcgcccaattttctctggggcggtgtgaccggcagcccgtaccaagtcccccgactcggactcacgcgggcctgtgtgtcacgcatttgccgcttccttaccagctttttttccctagaaaagaagccagagaaactggaacggagggggcgagggaaaccaaaaagtctcacctaactttctgatttagaggctacgacctgccattcacgacctttaaccttgagaattaatgtctcctaacttaagattctacacctctaaaatgggggtcataaccacctacctggggattaaatgagataatgcacgtaaagcgttttgggcagtgcctgacacatggtaagcttgaaggctaatttaatttttaactacagcccccggcacaagggctggtatgaggacttcttgactgagagatagcagaagtaaaggcgactaaattaagttgccgtgacgttaagtactttttgcaaaaagttaaaaatcatccaaataccataggatgctcagtaagttactttcacacaaaatatattgttaggataacattttgtgggagaatatacgagatcagtcaagaaaatgcagcgatgtaaattttaccgttagagaaaagctttttttatgtggagtattttttgtgttcgcgaaatataatacatatgaagaaaattttatatagtatgcatgaatgatttaacagttctaaagcaaacacctgtttaacactcaggtcaaaacagtgcactaccagaagcctcctctcccctatgtatcaaaattctctacttcccccccagatataaacactgttctcatttttatagttactattaggttgcctatttttcctatagtagttttagcatccatatgtgcatctcaagaacatagttttgcctggttttgaacttcacatgaattggttcatacagtatatacgctttagtatcttcttttacattgtgagattcattcattcattttgcgtagctgtaatgctttctcattgctatataattctttttttttttttgaracggagtttctctcttgttgcccaggctggagtgcaatggcacgatctgggctcactgcaacctcctcctcccaggtttaagtgattcccttggagtagctgggattacaggcatgcgccaccacgcccagctaattttgtatttttagtagagttggggtttctccatgttggtcaggctagtctggaactcctgacctcaggtgatccgcccgcctcgacctcccaaagtgctgggattacgg

SEQ ID NO: 711718 - DNA, 1559 bp, Homo sapiens
tgtcttcacagggaattgaactaaacctttcatctctaatgctgtgtatcatctaaacatttaatactacccaaggtatgctgattttacctcattcactaacttattcaaatactttctgaatgcctactattttaccccagacattaagcttggcactggggatacagagacgaaaggcattctctaccttcagggtgctcacaatctaatggagaaagacactgtcttagtttaggattttaatattttgacttacacaatcacactggcttcctcatctatgtgcaagttctactatgaaaacaagaagtgtgtgtttccctgtgagctttgggaagcagagagatgtagggatatgggagcagtttagatatgatgagtctgagattagtacttccaccaacaaactcaggagggcagaggcgcatctgttttgctcaccactgtatggacaagcactaagcacaatacccaccacactgcataaatcctcactccaaaactacagaacaaagagggagctggaaatacaatgtggagttcaaagtaaagggatctaggctagatatacaaaagagtaccaaatggattataagcgtcactgaaacagaagagtatacacaataaaaagagaaaatgagcataaaaatctaagaaagatacccatgcttaagaagtggatcaaggccggacacggtggctcacacctgtaatcccaggactttgggaggccaagtcgggtggatcacgaggtcaggagttcaagaccagcctggccaagatggtaaaaccccgtctctactaaaactataaaaattagccaggtgcggtggcaggcacctgtaatcccagctgctcaggaggctgaggcaggagaattgcttgaacccgggcggcagaggctgcagtgagccaagatcgtgccactgcactccagcctgggcaacagagtgagactccatctcaaacaaaaacaaacaaaaaaagaagcggatcaagagcaagcagcagtggcttacacctgcaatcccagagattgcagaggctgagaagggtgtttgcttgagcccagaaatttgagaccagcctgggcagtgcagtgagacaagaccctgttctctacaaaaactaaaaattaaaaaaaatcagccaggcatggtggcacacccctgtagtccaagctacttgtgaggctgaggcaagaggatcacttgagcccaggggttccaggctgcaatgagctatgattgtaccattgcactccagcctgggtgacagcatgatgccgtttcaaaaaaaaaaaaaaggaagagaaagatgtgtatagagaggtagtgaaggaaacttcagtcatagaattaaagacctaagagcatggtgtcacaaaaatcaaatggggaaaatattaagatgaagagcaaataaatacagaaagaattttaaagttagtcttgtgatcaaagctaactccacactttaaaaggcttatcatccaaatattgagggtattcaaatrgctactgaaatattagccatgaaagcctggtttaatttac

SEQ ID NO: 711719 - DNA, 1003 bp, Homo sapiens
tccctctctctagatactatctcccacccctccagccacatcaaaagtctcactataggagtattgggactatggctgaaattttactgtcaagcgaacttttactgcttttccaaagttctatccaaataccatctcctttgtgaagtgttctttgcttctcttgagcaattaatcacttgaatcatttccttctctgtgttcccatagcacaaaggacatatctctactatgcgtagtgtatctttttgcatatccgtctccccaacattggctgtgaggtgaataaatgttttaagcacttttatttttatttttgtagacatggagctttgctatgttacccaagctgatctcagactcctggtcttaagcgatcctcccatgttggcctcccaaagtgttgggattacaggcatgagtcaccacaccaagccacaccagttttaagcacttttaatacataaggacaacttgccctctagttgagtaccttttctcctccactccaacaaacattggatagcataattctaaaactctttgctaacaacttacatctctttgattacttttgtgatgaaacattaaacaatatgatttgtatagtaatgactgtttgtgttttaaactgaccatgttttgagttcagttcaattctattattatgatgtggctgacctccccccaacctattactccttcctatttgtcactctggggattatatggtagtgtacttatcttgcaaaatattgcactgtggtaatatgattaarttatttcatcagaatatagtattaaagctataatatgttcctggaaaattgtagtgctgagccatttcttaatagttatttctgcccagtcacactacttctgaattacacatcactactagtaagtccaataaaaatttattccaaatgacgtgtttgctaataaatctggagaaaatttgaaaattccctgggagtcagcagaaaatagttttttttttttt

SEQ ID NO: 711720 - DNA, 641 bp, Homo sapiens
ttgttaaattcagatgcttgtttgacattcaagtaggcacttagatatataaaatctggagataaaatataaattggggaattacatacagatgtacctcattctgtttttttttttttttcttgagacagagtcttgctctggagttctacttgttaaatttcagatgcttgtttgacattcaagtgggcacttagatatataaatctggagataaaatataaattggggaattacatacagatctacctcatgctgttttttttttttttccttcttgagatagagtcttgttctctcgcccaggctggagtgcagtggtgtgatcttggctcactctgcctcccgggttcaagcgattctctagcctcagcctcccgagtagctgarattacaggtgtgtgccaccacgcccggctaatttttgtatttttagtacagacgggtttcaccatgttgctcaagctggtcttgaattcctgagctcaaaatgatccgcccaccttggcctcccaaagttctgggaatacaggcgggagccacttccccctacctcattctgttttaaaatcttcatagccttgtgccttactgatatatcatcagccgtataacaaatagctccatccaatgataaacta

SEQ ID NO: 711721 - DNA, 1921 bp, Homo sapiens
gaaggctgacctctatggactgcctcaattgggctcccctggattccttcctggtggtcagtgggctagctgtggcagcatccagtcattgaaggccagaagtcctgtgggaagcctttccctgctgctaagccaggcccacaactctctaattgcctcatcagttttaggagtggtaagggctccccactattgctagcctttggatgcttcaccatttcttcttggtttctattgactctgttctcaccctgaaaatagttctcaatcacccctttgaatatattgtctgtttcttctaggatcttgactgacacattcactggggcttgcattggtgctctccagtgcatgtgtgccactaagaagtgaattgccttggtttgagagttgcaaattattactatttctactactacttctgcttctattactactactacttctttctcttctaccttccttttctctctctctctctttccttttcttctttctctctctctctttctttctttctctttctcttttctttcttctttctttttgcactagaaacctttctgagtgaaaatttaygctgaactccaagatataaaacatataaaattataaaaagaaacctgctctggttgaagtgggtgaggaggtcgggagtctcgtctgtatgatcttctctccttcttctctaaggggatcccttgaggcacttctgagcaatcatagggttatatggaacccagtttgaaaactaacactttagcatgttttaaatgctggggtggaaaagtttgcaatttccagacatggttctgactgtatgacttctttgtcctctgtcctctactctcccctgctgttcaccacctcaagtctcaaactctgaactcctcctccctaaacatagcctctttactttatagcaacagctgttatttattcaagctattattattttccaggcatgaagctaaggtcaagggctaatcctacaatatagatattctcattcatattttacacatgatgaaatagagactcagaaaagctaaatgactttcctaaggtaacacaactagtaaatggaaaatctggtgttccaatttgtgtctgtctgatcatgaaagctcacgaccttaacaagcacccactagtaccctcatcttcctctttcttctgaatctgattttaccttcattaggactctgaaccttagtttttctctattctctttaattctatcttggtttggattttttttttttaatccagaaacccttagctgtgtatgtcatgcctttgccagtatccaaagttttcttattctcctaactctttgaatttcacctgcgttgacaatccccaaccgcacacaatgccccaatgtctgcattctatttccaatacttatttccagtgtctatttttaagtatgctgttgtggtgaattaagatgagaccgtctgagtgtagtaagtatccacgccctcctttctcaactgggtcctcacttctgcaggaaactcctttgaattttattccatctgtcaattctctgttatgtcgccttcatactcactatgccgtaattaagccctcatctcatctgttcttcatcattttatcgcagcttataattttatctttagctttactttaggtctttcaaggtgagctctcttaaataattaattcttttatcattacagttgtttgaaaacttgctccaaatagtggtcgttcaaacagggtaaagtctgttttctttctcttatgtatagttaggaagagggaagttcagggttctatgttggctcaaggatcctcagaaatccagataccttccagctcaatgctctcctgtaccttgggtgttgtctttatcctaaggattcacagtggctgcttgagagcccattat

SEQ ID NO: 711722 - DNA, 1921 bp, Homo sapiens
gaaggctgacctctatggactgcctcaattgggctcccctggattccttcctggtggtcagtgggctagctgtggcagcatccagtcattgaaggccagaagtcctgtgggaagcctttccctgctgctaagccaggcccacaactctctaattgcctcatcagttttaggagtggtaagggctccccactattgctagcctttggatgcttcaccatttcttcttggtttctattgactctgttctcaccctgaaaatagttctcaatcacccctttgaatatattgtctgtttcttctaggatcttgactgacacattcactggggcttgcattggtgctctccagtgcatgtgtgccactaagaagtgaattgccttggtttgagagttgcaaattattactatttctactactacttctgcttctattactactactacttctttctcttctaccttccttttctctctctctctctttccttttcttctttctctctctctctttctttctttctctttctcttttctttcttctttctttttgcactagaaacctttctgagtgaaaatttatgctgaactccaagatataaaacatataaaattataaaaagaaacctgctctggttgaagtgggtgaggaggtcrggagtctcgtctgtatgatcttctctccttcttctctaaggggatcccttgaggcacttctgagcaatcatagggttatatggaacccagtttgaaaactaacactttagcatgttttaaatgctggggtggaaaagtttgcaatttccagacatggttctgactgtatgacttctttgtcctctgtcctctactctcccctgctgttcaccacctcaagtctcaaactctgaactcctcctccctaaacatagcctctttactttatagcaacagctgttatttattcaagctattattattttccaggcatgaagctaaggtcaagggctaatcctacaatatagatattctcattcatattttacacatgatgaaatagagactcagaaaagctaaatgactttcctaaggtaacacaactagtaaatggaaaatctggtgttccaatttgtgtctgtctgatcatgaaagctcacgaccttaacaagcacccactagtaccctcatcttcctctttcttctgaatctgattttaccttcattaggactctgaaccttagtttttctctattctctttaattctatcttggtttggattttttttttttaatccagaaacccttagctgtgtatgtcatgcctttgccagtatccaaagttttcttattctcctaactctttgaatttcacctgcgttgacaatccccaaccgcacacaatgccccaatgtctgcattctatttccaatacttatttccagtgtctatttttaagtatgctgttgtggtgaattaagatgagaccgtctgagtgtagtaagtatccacgccctcctttctcaactgggtcctcacttctgcaggaaactcctttgaattttattccatctgtcaattctctgttatgtcgccttcatactcactatgccgtaattaagccctcatctcatctgttcttcatcattttatcgcagcttataattttatctttagctttactttaggtctttcaaggtgagctctcttaaataattaattcttttatcattacagttgtttgaaaacttgctccaaatagtggtcgttcaaacagggtaaagtctgttttctttctcttatgtatagttaggaagagggaagttcagggttctatgttggctcaaggatcctcagaaatccagataccttccagctcaatgctctcctgtaccttgggtgttgtctttatcctaaggattcacagtggctgcttgagagcccattat

SEQ ID NO: 711723 - DNA, 596 bp, Homo sapiens
acatttcccctgcatctaccatttatcacatttgatttctttgaagctggagttattccacagaggtttatttattatgcttattgttacgttttgagtttgctttaattaagaaactgtggcagtgtataatctttttagacactttattaatgttgttatttaaaagtctataattgattaggaatacattactagtttcaagaaatggtacactgattccattccattttgtctgggctattcagatttaggagattacctgtaatcttttattagagaggacaatttggaggtaaatttccatttcaagattaaatgttaactggggccatgatccgtgtctgggtcttaattaatccgtgtgactgagtcacaacacagagaggccaatgccattggaaggagaatttttattacttacattttccgagaaaaaggggcaccctatgccatgcaagtccacatgtggaagcaccaggcttggtcaggastaaggcagaagcatggtttctatggaaaaccatgaaaccatcatggattccatgggaaaggcaaggcaggaagggggaacagtttaggattggctagtttga

SEQ ID NO: 711724 - DNA, 647 bp, Homo sapiens
tcaccattaagaaaacttcacagactcttgcagttgagaagtgactcccatgtttttctacttgaagtaacattagcactactgatttttcaaggctagcaagtagggtcaactgaataatgagcagattaatcaagacttcagatgctgcctctagctcataacttatagactgacaggttcataatctttaaaatcataattttccctagggtagaggacttttctatgataagctgttctgtttttttttttaatatgaaggttctcaaaaaaaggattacaatctcttttccatcaacaatgtgcacctcaattatttatacctattcagctaccaaaaagaaatgttttaaggaatcatgrtaagggattctctccctttctctctctcaaatacacacagaactatggactaaacctgcagacctagctcacccttttcagtacctaaagtaacttatggccaagaagtcacctagaaatatgtagtttgccattaagtcattatggctctgggtttaaaatttctagtccacagtctgctcctaaacaaaagtctgagaaaatacatccatcatcgctcaagttctgtacagtatgtgcagtcttgagaatttggatttttgtgactagaacaatatatt

SEQ ID NO: 711725 - DNA, 2289 bp, Homo sapiens
gggaccattggtaaaataaatggcaaaattatttctaccccagcacaagcagctagttctctgaacagtttactggtctcaatgcaaataaatgtaaaatggggtgctgtagttccatctgtagatgtaattattttgtaagtatcctatttgtttttaatatgagacaataaatagtgtgattatgtcaagtaatctttttcagcaatgtcaattcatcatgctagcaaattctaaaaataaaattttaattatgtaatatttaatatcactgatgtcaaatgggaacatctgtaacctcatatcagagactctttataataaataaatagttcctagaaatcaataagaaaaatcaacaactcagtattgcaaagaatgttattagatgattcacacattttttaaaaaatggttttaaacacaggaaagatggttgacttcacccaaaattagagctatgaaaactaaactgacatcaaaatattatatttacctttcagcctggcaaaatttaaaactttgttcacaccctcttggcaaagttatgaagaaacaggcactcataacatttctrctctaagtataaattgacacacttcctagaaagtacaatttaacaaattaaccacatcacaaatacatatactaccaatgcagagcatttccaagataaattatttggagaaaaaaataaaggtatggaaccatatgcataatatggtactttttagttacagcggagagaggataacatttttttttttttttgacagagtctcattctgtcgcccaggctggagtgcagttgtgcaatctcggctcactgcaacatccacctcctaggttcaagcgattcttgtgcctcagcctccctaaaagctaggattatacgcacgcaccaccacactcagctaattttcgtattttttagtagagacggggtttcaccaagttggccaggctgctctcgaactcctgacctcaggtgatctgcctgcctcggcctcccaaagtgctgggattacaggcatgagccaccaaacccagcctaatatatctattactatctattatctaatagtaatatacctattatctaaaaataacataatatgctttataaacataaagaaactttagaaaaatgcccatgaaagtaataacattggtccatggaaatagactaggcagattgtggaaagaaaacatattactgcattcttatgtggggctggagaaggggggaaatacatggaaatagcacatatacattaaatgtaatagaatcatttatgtcagtaggttaaaaaaaaatccctcttctatcttcaacagatttaatgattgtgtgttgatgcgtaggaaaagtgtaagtaaaactgtttaagggcttccttaacattattccttcatgatgaaatcttgtctggccccaaacaagctaagggtgtcccttctcagctcactagcagtaacagaattcaagacctagtggagtacctgaccccaagataagagctctgcttggtgcccaacttttcttcaagacctcaggccacttttagctcaacagcagatgtccgacagccagcaaatgagccagtgttgcttgtttccatgtgaaataaatttaactaatacttaataatttaaaagacaagcagttctcagtccttctgagcccttttctttctgctactgtcaatattcacgcattaattcataactctgagcacctactatacattgcttgctgctctagaagcaccaggtggaccgctcaagagtgcccccaaaacaccgcagcttaaatgacatattccagggtcaagacttagcggtgggactatttcactccttgttgttgacctccaggaagttgaaatttagtgattcacagcttaagggggagagcataaataagcccacgcacaaacccagaaagaaatcgagttaaaggagaggacaagattgttgagcttggcaaagtgataagtggtgcatgagccttttgcccctaaaaacagtggatttatttttaagtacacacatgcatatacatcactgactagacgtgtgactggggcagtcatttcactctccaacattccacatctgttccctaaaaagtgaaagagcttgagttagatcaatgcttcccaacctttttccgtgatcacacccctacagagcctttttagactcttttcccatgtcaccctccatcataaaatatcaatgccacagttaaactgtacaactgaatatgcactgtatgtatgtctg

SEQ ID NO: 711726 - DNA, 2194 bp, Homo sapiens
ggagcctcagaagtgcaatgtaaaacattcctctcagagctatatcacctgagtagtaagagggttggggtattttttaatcatcttctgtcactcattgattgtagactaatcactatgagtgctaattacagtgcttcaaacttggtttagtgggacaacgtgagacctgaaagaatgagaaagtcctccacaaaggaatgcaggtgatgggaattggatgtcagcacagtgtttatggaagtgctaagagaaaaacatatgagtaattgcccaaccttttcactcatttgtattttattatctcaaaattactttaaacttaaaaatattgcaagaataatataaatagtcatataccctttcttcagattsacatattaaccaataaaataaagagactaaactgtaccaaattacaagaaattaaaggtatcatagattatatagcagagtctagatgatttttactatgtattactcatagaattggtttagaaaaacaattatgacatgataattatattttctgaattagaacacataaacattcatacatgagaataatgcaaataaaatatttcatcaccatctctattgtatttcattctctgaatcttatccggctttatgtcctaaggttgaactggttagagaactagggagaaaatgactttaataagagatccattttataaggctgccaaagttacagcccattcatatgctatccaattatagttatcagctattaaatcttactgccaatcagagaatgtttaacacttcaagaagtaatgaacatttaattcatgctaaagggaaaaatgtgaaattttggatgataataaaggttcccagttaaagttatataaaggagccagaacaaaatgaaacacaacaaaaacaaccttggtagcagggaaagctgggtttctatataacatacctggttaaagatgatacatgaaatgcatttatatataaaataaacagaattgcattagataaatatctacttagcagaattcaagctaaggccctcacaaacctgccacatgtttacaaaatacaaaaagaaaggatagcgcaaagtggtgactacactcaacaataatttatagtatattttaaagtaactgaaagagtataattggaatgtttgtaacacaaagaaatgataaatgcttgaggtgatggatacccccatttactctgatgtgattatcacacattgtacttcatgtatctcataaatatatacacctgctatgtacccataaaaattaaaaattaaaaaattataaaaaataaaaaagaaagaaggaagaaaagaaagaaataaaggaaggaaagatgaaggaaggaaggaaggaaggaagggaactgtatctatagaaatatatcctcagtaagcctggcatggtggctcacacctgtaatcccagaactttgggaggttgaggctggatcatcacctgaggtcgcgagtatgagaccagccggaccaacatggagaaaccctgtctctaccaaaaatacaaaattagctgggcatggtagtgggcacctgtaatcccagctacttgggaggctgaggcaggagaattgtttaaacctgggaggtggaggttgcagtgagctgagatcgtgccattacactacaacctaggcaacaaaagcaaagctccatttcaaatatatatatatatatgtatacacacacacagacacatatacacatatatacatatatataaacacacatattttatatatatattatatatattatatatattatatatatatatatattatatatataatatatatataatatatatatatctcctcaggcaagaataaatgaatattgaattcagaagtgaaataaacttttatttaaatcaaacattctgttctactcttggaaattttagacaagaaaattgttttcagaaccataaaatttagcagatttccaaaatagaaaagaatgaatgaatgaactgagaacaaatcaaaacaaacaaataggtctttgaaaaaattgtgtcacacaatgaaagagaagagtattaagcaaagtatcacatgggttttgcttaggagtgaggcaaaattagtcctaaactaaatgctgctgtgcttcagccaaacaaagtttagaggcaagaactgatagaataaa

SEQ ID NO: 711727 - DNA, 1322 bp, Homo sapiens
tctggtttgaatttacaaatttgaagttataattcactgacatatatttaaatttgaatctttttttattaattatacatgattcatgtggtcccttttaagctgataattcttcccttcgggtatatatatgtatattttttcattagttctttttcttctctatgtgctgtattatttcttttaaaagtaacatatggtcacctgaataatttatctaaatattttatcttttctttagtaaagtgtttgcatttttgttccagattctggtaagatttttcagcttgatcttccagttccccagttcaatatttggtgaagtgcattatgtgtgtctcacatattttattgtgttactgtattcacaatcttgttaatttttaggaattatttagccatcttcaactttcctttcacagtagaattctagtaatattttatttatgcaatttttttcttttttttgagactgagttttgctctattgcccaggctggagtgcagtgatgcaatctcgctcactgtaacctccacctcctgggttcaagtgatactactgactcagcctcctgagtagctgagattacaggtgcttgccaccacgcctggctaacttttgtatttttagtagaggcagagtttcatcatgtttgccagactggtctcgaacycctgacctcaagtgatttgcctgcctctgcctcccaaagtgctgggattacaggcatgagccactgcacccagccttatttattcaatatctccttgaataactctgagatttggctccccacattaactcattcattgaaataatatgtttgcataatatggtttctctttcaggatccatattctacttattctactattatttattttctatatagatttataaattatcatgtaaattgaaaacacctagaagcttgtttgtattttcttacttactttgtataataattgctcagctcactttataagattctcttgcatacatgtatcgacacgctatactcacatgcagatagatgatagatatgtatatacttttttctgaaacatttgccccattactttgaaataattcagtgtgtatgtgtaaaaacaaagacattcttctataatcacagtaatttcagacaaatgaaactttaacaaaatagcacaaatatttctgtatacctttctttcaaattctcaaatgttaacattttaccacacttgctttagagcttctttcttttttgcgtaagacttttgcatgcaggctgcagattggatgtcagtttatctctaaatacacactctgacatgtg

SEQ ID NO: 711728 - DNA, 1322 bp, Homo sapiens
tctggtttgaatttacaaatttgaagttataattcactgacatatatttaaatttgaatctttttttattaattatacatgattcatgtggtcccttttaagctgataattcttcccttcgggtatatatatgtatattttttcattagttctttttcttctctatgtgctgtattatttcttttaaaagtaacatatggtcacctgaataatttatctaaatattttatcttttctttagtaaagtgtttgcatttttgttccagattctggtaagatttttcagcttgatcttccagttccccagttcaatatttggtgaagtgcattatgtgtgtctcacatattttattgtgttactgtattcacaatcttgttaatttttaggaattatttagccatcttcaactttcctttcacagtagaattctagtaatattttatttatgcaatttttttcttttttttgagactgagttttgctctattgcccaggctggagtgcagtgatgcaatctcgctcactgtaacctccacctcctgggttcaagtgatactactgactcagcctcctgagtagctgagattacaggtgcttgccaccacgcctggctaacttttgtatttttagtagaggcagagtttcatcatgtttgccagactggtctcgaactcctgacctcaagtgatttgcctgcctctgcctcccaaagtgctgggattacaggcatgagccactgcacccagccttatttattcaatatctccttgaataactctgagatttggctccccacattaactcattcattgaaataatatgtttgcataatatggtttctctttcaggatccatattctacttattctactattatttattttctatatagatttataaattatcatgtaaattgaaaacacctagaagcttgtttgtattttcttacttactttgtataataattgctcagctcactttataagattctcttgcatacatgtatygacacgctatactcacatgcagatagatgatagatatgtatatacttttttctgaaacatttgccccattactttgaaataattcagtgtgtatgtgtaaaaacaaagacattcttctataatcacagtaatttcagacaaatgaaactttaacaaaatagcacaaatatttctgtatacctttctttcaaattctcaaatgttaacattttaccacacttgctttagagcttctttcttttttgcgtaagacttttgcatgcaggctgcagattggatgtcagtttatctctaaatacacactctgacatgtg

SEQ ID NO: 711729 - DNA, 624 bp, Homo sapiens
caggcaacagaacttggtcccagctctcagaaagagaccagtttgccttccgtatttgttctcactgggttcttggcctattccatgctatcccccaacatttagggcagatctttaacgcatagtccactcatattcacacactaatctcctctggaaacatcctcagagacacacccaaaataatgctttaccaagtttctaggtatttcttaatccagtcacattgacacctaatattaagtccacaaatctacctcttgtcaactttgtagccatacacatctstttaagccatacttcatttccaaatgaagacattaagaaggtagtaaatccacctaacatgatgcaactatcctgtgtataactgacagtgcactaatgtcttccccagaatttggccttcaggatttcagcattcaggattgtaatctttcagaactgtgatttaggattttagacattatggattttagattttagagattttagactttagggatattgaccttttcggatttccatattcgagattatggcatttgggattatgatctaaatattctactcaaaaaaagctaatcattcatacccaaataaaatatcaccccctttaaattt

SEQ ID NO: 711730 - DNA, 624 bp, Homo sapiens
caggcaacagaacttggtcccagctctcagaaagagaccagtttgccttccgtatttgttctcactgggttcttggcctattccatgctatcccccaacatttagggcagatctttaacgcatagtccactcatattcacacactaatctcctctggaaacatcctcagagacacacccaaaataatgctttaccaagtttctaggtatttcttaatccagtcacattgacacctaatattaagtccacaaatctacctcttgtcaactttgtagccatacacatctgtttaagccatacttcatttccaaatgaagacattaagaaggtagtaaatccacctaacatgatgcaactatcctgtgtataactgacagtgcactaatgtcttccccagaatttggccttcaggatttcagcattcaggattgtaatctttcagaactgtgatttaggattttagacattatggattttagattttagagattttagactttagggatattgaccttttyggatttccatattcgagattatggcatttgggattatgatctaaatattctactcaaaaaaagctaatcattcatacccaaataaaatatcaccccctttaaattt

SEQ ID NO: 711731 - DNA, 624 bp, Homo sapiens
caggcaacagaacttggtcccagctctcagaaagagaccagtttgccttccgtatttgttctcactgggttcttggcctattccatgctatcccccaacatttagggcagatctttaacgcatagtccactcatattcacacactaatctcctctggaaacatcctcagagacacacccaaaataatgctttaccaagtttctaggtatttcttaatccagtcacattgacacctaatattaagtccacaaatctacctcttgtcaactttgtagccatacacatctgtttaagccatacttcatttccaaatgaagacattaagaaggtagtaaatccacctaacatgatgcaactatcctgtgtataactgacagtgcactaatgtcttccccagaatttggccttcaggatttcagcattcaggattgtaatctttcagaactgtgatttaggattttagacattatggattttagattttagagattttagactttagggatattgaccttttcggatttccatattcgagattatggcatttgggattatgatctaaatattctactcaaaaaaagctaatcattcatacccaaatamaatatcaccccctttaaattt

SEQ ID NO: 711732 - DNA, 1039 bp, Homo sapiens
taaaagaaaatttaaataaccatattttcaatatttcttatatcttctgatccctgtctgaatattttacttatacttttaatgctctataatagtcaccacaataaattcaccaaatatatatatatatatatttaaattcacatagtttacttcacattttctgctaagccattcattttgtttggttttgttttattttagatgaaatatttttagtttaattgctcctgtgcattggtagggaatacataattttcatacacaaccaatatagagtaaatgamcacattaatcagaaaacagtattcaaatctatttggatataaaccaatgtgataaaaaatatagattttctaaaactcattcccattctcatttccattctaattttttaacacaaaagtgaatgaaataatctatataatatcagaattgatggcaaatatcagctcaaatttaattataaaatattgttaataaattggtgcataagttcaattttagtcttcaaataaaaattccaggttttgaaggttattctggagaaggagtttggcacattggtaggataatattattacaacagtctttgcaaacagccagtaccctctagtgtacattattaataaaacactcaacaaaaatgaacaatattgcctttctccttaacgattaccatttatctacactgtgtgtttgttttagtattttcaaacatgtaatcaagcaacgattacctagtgaaatgatgaaacacactgattataaatacttcttaaccatggtgcaatccataggagtccattccttggtacagagctgtaattcttattcatgttcatgtcagttgcaaatttatattgatggaagaattaggcctcaaagtagttcttattctaaaactctgtcactgattattgatttaactgacatttaaaccatcatagcatgtcacaaacatacacaaatccttacatattcttgtcaaagtcaatgaaaaattaagtacagaaagcaatttaaaaaatatgaagta

SEQ ID NO: 711733 - DNA, 1894 bp, Homo sapiens
tggaaaatatgttatttattttaacattcaataagtttatcaatgttttaaataataaataaatattttaaaaatatctctgttttattttctaatatgctaaatattggtggctggaactacataaaagctctttgagggtacttaatacattttaagagtatagagaaatcctgagacaaaatgtttggaaacagctagtttagctgatcatagtgagggaagggctattttacttatgctaaactgtacataagtaaaaaccaacatttgtgacatttaatcccgagaaaaatgtaatttattttgttgtttattgatcaaaatatgctttatatatttcaaccaaggaacttttccagggatcccacattttatcagagttctttgattgaaagcaaaataagccaactaaggaaactgtattagttttctattgttttataacaaatgacccaaactttagtggcttaaaacaacatgtaattatgatctcacagtttccatgcttccgtgagttgtagaagtcatggaagcttgcttcttcaaagccagtaaaataatctctttcttcagaaagcctgtcacttattttgaaggggtcacctgattaggtcaggccagccaaagacaatctcccctttaaattacttaaaggcagttaaggascttaattgcatctgtgaaatctcttcacttttgacataataagtaacactcatggaagtatggtccatcagctttgctgtattgttgttagaagcaagttataggacctgcctgttcacaaggagaggggattacacacggagtgagtcactagggttcatcttagaattctaccttccttagcaaactaaacaaatagggaatttactggaagtaaaggggatagccacacaatcaatggaatggctagagaactggcatgagaaagggcaggaaaccctttccatttcctaagagctatcaaagtcctgtttttttgtatctagaaaagtattaattgactagattatctggccaatgtgccacagctaaatgaatcaactgtgtgtgtgtgtgtgtgtgtgtgtgtgtgtataaaactttgtgtccttttactcaaagttaaaaattttatcccttggctaagagggcagagcatcttgagtaacagctcccaaaagactacccacgtgggaagagatgatgtgaggtgatgaccagtagaggaaaatgctggaaagccacaaaacaaatgtcccccaaagtcatcataaccaaagattttatattttttcaaagtgcaaaggcagagaaatattatccttcaacaatgtaataataatttaaaatctggcaaatcctttatatatatgaactcaggttttgaaaattcttctaagtagatgattaatatatatcctctggctttattaatgacagaaatcttattgttgtattttatttattgttgctacacaagaaggacagatagctttccatgttttaaaacagaaagatgatttaggtattctttgcccctatattagtccttttcagagaaccactatccagtcatctggctcttactttccacattacttttatcctatgtttgagatggtatctgctgccccaattttctagccttcacatcttccatcgttccaagagcttccaaaatctctttctctatcaaaaagacaaatgtttatattctcctgactccagctgtcgacagcgtggctcataagattcacttaccactgtttatacaaaatagtataatttcagatattttaatgacaggttggagtcaaccttccctttagtaagcaaaaacataactcatgccagattccaagcattctggaagtcagagcttacacctgcatttccagggattcct

SEQ ID NO: 711734 - DNA, 2574 bp, Homo sapiens
attacagacatgcactaccacatccagctagtttttgtatttttagtagagacggggtttcaccatgttgaccaggctggtctcgaacttctgacctcaagtgatccacccacctcagcctcccaaagtgctgggattacaggcataagccacgcacccggcctcattgtgtatttaaaagctagtattgaaagtgccactctgaatgtgtactaaagaaagattaagctatgcacatgctacacatataatgtatgtgtgtgtacaaatataatgtgtggatgcttttgtatgtatgtacacatatgccaaaatgtgtatgtatacatgtctccacttcatctttttttttcttcttctaatattgctgtggctttctattttgtatctgatggaaatctggaaagactttctcaagaaagtgaaagaggaatttctgtaaatttagattgatcttctttatttatttagattgatctagttattctgtacatcatggtttctgttttagtgtgtatatactactcagtatttttcccttctctgcaggaaaaaaaatgagtttgttctccctctccttcctcttatctctccagctaattctcttatttctttttttattctctcacactgaggtgttttttgcagactttatcacaacctgacaatgttctcaatgtttcctttgatgctgagttctttttaaaagacgtatgaaatgtaaaatctcccttcctttcccagatcaatatttgaaataaaaagcagggcaaacaccttcaaaacgaaaagtctcctgtttcctgttgcctattccagcagcaggacttgggttgcttgccgtttttcctgcttttcatttccgaggaggcaggagcacctcagatgctccagggaattgttgattccagagagaattgctgatgggtgtagcaccccctgggtgcgtgcatcgaagctgtgaacaaatcccccctttcctcactagagtctctacagagaaatcacctcagcccatgtattctgtgacagctgaggatggcaaatgtgggagcaatgtgggcttctcctggtgctaagtctgaacacagagcataggccttgcctcaaatgtttgcaaacatccgtgttaatgctcagcacgccactttacaccgaaggagtcacaccagtgtgacacacgacttcaagacttctgaggagctagaaaggaagtttatgtatttgaggcctttcccttggcttcactccatttagaactgggtgactcaaaatgacaaataaggtgtagtaatgaagacaaaaagcttctttaaaaaaattattgttaatccacttctctttttgacctctgaacagcattatactagggagtttacccagtcctctcagtgaataagcttgtgctgaaatcctgtgttctcaagctggcatgttatgttgaaatgctttcaagttacataaacgcccacacttactaagtgcaattccctaattgagtcactgggaagcagcagaagtgagcagcactgtggtcctgtgacacagtgacagtacagagaactgtttccccaggagcaactcaagtctcaccacctgctgggctcccaactgttcatatattcaacctatggtaaagaaatacagaagtaggattgccattatcatcctcagtatcgccttaaactcttaccagtgtatctgaattgcatttgtctgcaaaaccagcaggcctgcaggccgatattagagtcactttctttcaaggaaagaggaaagtactcaaaatgacagagtaggtatggcagaggacagtaaaggaaaaacctctcttttcttttctacatttggatactagttaataggataactttggaatgagggagatcaggttccaactcttgctctgcttcttgtgtggcccatttaaaagctaatctttataaatccccttatctgtaaaaatgggtataatagttatgtggaactaaatgaaaatctaccaaatgagaaaaagaaaggctagttgttccaagcttgctacagcaagggagtcagccaccatcacttaacattttagcagagactcaaaggcacgcaggagagtgggaaagcattatagtggaaaacrggaaggcttcagctctgccctgattggaggctgttgcatggggaagctataagcaggccagctagaggtggggcaccctgcgtgattggttaggggatgtatttttgattttctgtggttggtgttaacttggaagtggggccaaaattagggaagctgtcagtaattaagtcttgtcagtttggggccagttgttacagaaatgatcatttatcttcctggattgtcactggagatagcaatctggtttcctgcaagtctgacttatagcaggctggcttcctggattgtttattacagataaggggttggtttcctgggcaagttgctaccggttgtaggtcaaagttctattttattattttcatttttatttctcatttgtaaattcagtttcaatgaagcattcatcagagagcagtcatgtagcaggtgctcagtaa

SEQ ID NO: 711735 - DNA, 711 bp, Homo sapiens
acatagaagagcctttattataatggtgttataaagatagcatctgttaagttgctttatataaagtttcagatggaaaattcatcagtgaacttatatagtaaaaaaaaaatcattaaaaatttgggtggatctacttaggtttaagtataactgcatttgtgctcctgttttatagttgggtttaaaaatacttgtgatttttattataagcttcctcatatatcttttcaagtaggtttatgtaaataagtaagtaartaaataaataaataaaggttcacttggacccaagttagtgcacgaaatgaagaaataaatccacttacgaatggtgaactgactgaagccctcctaagatgttagttcaggcaaaagatccaaatttcagagcatcacaagagacagcagattccactgaaactattaccttactgctcctatatatgaggtgaagttttgtgtgagaaggatcaaagagattgtgatcatctctaagcagtgcaaaaatctagtgatgagcaggaggagaaaatctaaatagttctggtagagatatagggattagtaagtgaggaggttatatgctggaggttacatttagcctataaaaacaccataatccaggtttattctaccaattactgtgtggccttgagatctacattttagcatttactaaatgatagggaagagcagttgagctcttaa

SEQ ID NO: 711736 - DNA, 621 bp, Homo sapiens
tcggcctcccaaagtgctgggattacagggatgagccacctcgcctggtctgcattaaggacttttaaacagccttgctgtaaatcagaattgggtcctttagctgggagcattgttatcgggtttagaggtgtagtagtttgcagggtaacatttgggtgggtcatctaagaggatggcctagtatttgcccatttgccctgcagtgagccataatctcccttytgttttagtaaagtcagtacctggtggggcacaaacactgtaactgactgtcccagggaaaatttttctacctcttgcaaaactatacaggtagctaccactgcctgaaggcaggttggccatgccttggttgtctgattcaattgcctagagaaacaggctatggattgcagtgtgcctcctgcatttgaattaacacacccaaattgactctttgttttttatggatataaagtttgaatggcttctggggacctggtatccccagtgctggggttgttattaatttatccttaaaggggctctgagtctagtccctttaaggctttctaaagtggtttggccatcagcccaaaattggaatccagatcctacagaaacgggtcatttccagga

SEQ ID NO: 711737 - DNA, 621 bp, Homo sapiens
tcggcctcccaaagtgctgggattacagggatgagccacctcgcctggtctgcattaaggacttttaaacagccttgctgtaaatcagaattgggtcctttagctgggagcattgttatcgggtttagaggtgtagtagtttgcagggtaacatttgggtgggtcatctaagaggatggcctagtatttgcccatttgccctgcagtgagccataatctcccttctgttttagtaaagtcagtacctggtggggcacaaacactgtaactgactgtcccagggaaaatttttctacctcttrcaaaactatacaggtagctaccactgcctgaaggcaggttggccatgccttggttgtctgattcaattgcctagagaaacaggctatggattgcagtgtgcctcctgcatttgaattaacacacccaaattgactctttgttttttatggatataaagtttgaatggcttctggggacctggtatccccagtgctggggttgttattaatttatccttaaaggggctctgagtctagtccctttaaggctttctaaagtggtttggccatcagcccaaaattggaatccagatcctacagaaacgggtcatttccagga

SEQ ID NO: 711738 - DNA, 1757 bp, Homo sapiens
catttgtacttaaatttttatttttggtttgttcagtgaattattaaagattgatatatctgaaacctatcatgggaaaaacagttgccagaggtttgacagaaatgcagcttcctttttttttgatctaattgaaaactgtttttgtgtttaaaattagtagttatttccttaattaggtgaaacctttttagcagcatttggtttactaagtttagaaatatttttgacataaatattcttgggggaaattttgattcgtgggcagttacagtaaattcattcagatctttttttttattattattggaaccatatgccttctttctacaaagtgatttaccttgtcctaaaacgtgactttgttttgtccaattccttcattttaggaatagcaaagctgtgttccagaaagcttaaataatttgttaaaggtcacatattcaattagtagtggaattagggtaagaacttagatctcaaattcaacaatggaaatgtttttgcactacaacgatgccctccttcataaatgaagatcactggcatgtgctttaacttggctttcttcccgtggcaattgtttttgctctcacacacttggaagtccctttttatcaacagtatcaactcatgagacaaattggcccagctcaggggtatatggcctattgttacaaaatagaataaagtgtatcgacttgatagaaatcagtctgtttcttagtccttattaatatcattttcttgctaagaactctagtctaaaatttgctttacagagcctcattgctatgttcttggggtttataagaatctttgccaatttactgaaaaactacaaaatcacctgttatatggattgacagactctttttctgctttgtcagttatccttccacatgtaattttgcagatttgttttaaaaaaawattctgccaagttgtttttattccatgatgttaaaaattatttggaaaacataagtcagtaagcattgttgtttcaagatatacctcaaaaaatatttgaaactgtttaggattggatttttttttcatgtttttgttaatttaaactttacttttgagagggcatttttctttaaattttctttgtttctatatgaactgttttaacagtgacttgattgaattttgagtcatgtgtgaaacaagtcacttgtagtcaaataattttcagttataatcaggagaaccgatctcattcatctataattctctgacctagaagtagtcatctcattttcagtcaattggatcattgtactgttaacattttactatttttcaattacttcaaaggtaaacttgaattttcagatgctgtatgttaatttactagttaatatttatagctttcatttttttctagtacataatttatgctttcaaaacatggatttgtaatttttctcttttaaaaatcagttttcacttctgtaaatcaaggtttaattttttcacaaaatactattaatatttaccatttactaggagtatctataagggtccaatgggcttggaaaaagaatggctttcccggtctttttttttttttttttttttggtagtatgtttataatctaaatctattgtatttgttcttatctctgaaacaatattactcaggatatatttagaatataactactttccaagtacttgataagtttatattttaaaattcatgtcttgtttcacacctggattccaaacattaagcatgtatttta

SEQ ID NO: 711739 - DNA, 1382 bp, Homo sapiens
tttctcttctgaagcacattgccagttttataatgaagaaggacttaattatttttctttttctattgcttatgtttattcttcataaaatgacttttcttccatttgtgggctgagaaataagctcctatattggactttgcagacttggcttttttatagcgtaaatcagctcagctggctaaatgcctcactaagtgaaacttcataatgtagctggaactaaattgtgctctggagcattgagtctttaaactggattattgatttacaaacccataatggtgaagaggctatagagagacaagaacctccctctcctgatccttgagcaagtttttcctcacttcaggggctctgagctcacgagcaaaatcctaaccaagtttatcttgctaggacaacccattttaaatgctcaataaagaaagaataattcttctcccgcttaaccactaaagaacaacatatgtttctaacgtagctttttatttttttttatctttcatttttttgttggtaaatctcccagacaacagcagttctgtagagagtttaaatatgaaggaatggcaggacgggctaagggcacttctacccaacattaacatcaactttggtggactgcccaattcttcttccccctccaacgccaaccacagtgcaccaacgtccaacactgccaccaccgacagcctgagttgggacagccctggcagctggacagacccagccatcatcacaggtaactttctcactcccttcagctacactgactgccaacagtttggtttttagcacagattaaataaaaaccgagatctcttcaacataagctgcttttcacaaagccgcaagtgtggagtggcttgtttcgttctcaggggtcatgcaagtctcatttaacctgtcggcctagttgtgtattaataagaaggcatttggtgcctaggttgcttcttctggtttaagtaggtgttaacatctggcaacatgtgtattttgtaggcctcaaagtacaaaaggatctgacttactcttcttataaggaacatactccactttttgttataaagctctctattataaggctgtcttgttacgcatccctgtcagaggaggaaaagcacaattgggaaatgccatcaggcagttctggggaatggtgttttgcagctctgcctctgtgacagtgggggactaagtctagttcaagaggaggcatgggtttgtgtgccaataagttctttgttgttgggggaggattggtttaaaaggtcttatttggaaggagtttaaaattgtaatctcttctgtstttccttttggttttgctttctaaatttgtttgacgaccttattctttccacacaaactcacca

SEQ ID NO: 711740 - DNA, 610 bp, Homo sapiens
ggttctgagacgggcgctggcctgacccaggccaatcagaatcattcagtggacttccgggcctctcaatttcctctgggctgttgaggtggtttgatgtaagattgagctatgcccctgttgggactcagaaaacaatacctcaaaataaaggcttcagcagcagcctccgaagcaagagtttttctctgaccatctcgtgctgccttgtctgttagtttcattgtttctcaaggacagtcatagaaactagaatccctcttccccagggcgggtcatagaaaccagaactcctttgccccaaagccaggcacaaaacctaaaagtattactctaactttcccctgcttttctgtgcaaaactggccataaagaaattatctsatctaccttgtttgagtgtaggtcataagaccccattccagagaggttcctgccccacatccagaaggagggaatgtgtgctcagagaggccaggaggaatctagacaggcaggccttgtgggtttcctggctctgtctattcacattgaatctaccctttctgtccaatcatatttccacacatctgtccatactttgttgaacctaagcataaaaatggaccat

SEQ ID NO: 711741 - DNA, 959 bp, Homo sapiens
tgggctagggccaccagcagccatgaagttaatagcatgcagctcttcttagatcattaattttttttttttttccagatgggrtctcactgtgtcacccaggctagagtgcagcagcatgatcatagctcaccataatctccagtgcctgggctctagtgatcctcctgcctctgccacagagccgctgggactacaggcatgaaccactctgcctggctaatgtttagtttagttttttttttttgttttttttttgtagttttgggagtcttgctatgtcgcccaggctagtcttgaacttctggcctcaagtgattctcttaccttggcctcccaaagcactgggattacaggtgtgagccaccatgcctgaccaatttaactgatttaatacattttctattaaaagaaaatagacacatcctggagtagaatataaatacaagactcaaaacactctttgcatggagaatttcgccgtcctttttcaccatgtgtgctctgacgcagggttttccaggtgctggagaggagccctgtggcctaggagctggaaacagtggctccagcctgcctcagtgactatgtaaggtctcaggaagccatgtaaattctctcatttttcactcctcatccaaaaaatgaatttgtttgtcttcaaaattttctctgagttcgcaccagttctaacatcccatcttaccaggtgttagtgaattccttgttagcgagtgttaaagaggggactgaatgaattaatttattagttatagggtttaactagtttagttctaggtccaattctgtgattctgctctgagctttccccatgtataatgcaataatttatgattaggacagatattttccaaaagtatagtatgtctaaatttttatattaattatatatgaattatttaattatatataaattttatgttaataattgaattata

SEQ ID NO: 711742 - DNA, 959 bp, Homo sapiens
tgggctagggccaccagcagccatgaagttaatagcatgcagctcttcttagatcattaattttttttttttttccagatgggatctcactgtgtcacccaggctagagtgcagcagcatgatcatagctcaccataatctccagtgcctgggctctagtgatcctcctgcctctgccacagagccgctgggactacaggcatgaaccactctgcctggctaatgtttagtttagttttttttttttgttttttttttgtagttttgggagtcttgctatgtcgcccaggctagtcttgaacttctggcctcaagtgattctctyaccttggcctcccaaagcactgggattacaggtgtgagccaccatgcctgaccaatttaactgatttaatacattttctattaaaagaaaatagacacatcctggagtagaatataaatacaagactcaaaacactctttgcatggagaatttcgccgtcctttttcaccatgtgtgctctgacgcagggttttccaggtgctggagaggagccctgtggcctaggagctggaaacagtggctccagcctgcctcagtgactatgtaaggtctcaggaagccatgtaaattctctcatttttcactcctcatccaaaaaatgaatttgtttgtcttcaaaattttctctgagttcgcaccagttctaacatcccatcttaccaggtgttagtgaattccttgttagcgagtgttaaagaggggactgaatgaattaatttattagttatagggtttaactagtttagttctaggtccaattctgtgattctgctctgagctttccccatgtataatgcaataatttatgattaggacagatattttccaaaagtatagtatgtctaaatttttatattaattatatatgaattatttaattatatataaattttatgttaataattgaattata

SEQ ID NO: 711743 - DNA, 959 bp, Homo sapiens
tgggctagggccaccagcagccatgaagttaatagcatgcagctcttcttagatcattaattttttttttttttccagatgggatctcactgtgtcacccaggctagagtgcagcagcatgatcatagctcaccataatctccagtgcctgggctctagtgatcctcctgcctctgccacagagccgctgggactacaggcatgaaccactctgcctggctaatgtttagtttagttttttttttttgttttttttttgtagttttgggagtcttgctatgtcgcccaggctagtcttgaacttctggcctcaagtgattctcttaccttggcctcccaaagcactgggattacaggtgtgagccaccatgcctgaccaatttaactgatttaatacattttctattaaaagaaaatagacacatcctggagtagaatataaatacaagactcaaaacactctttgcatggagaatttcgccgtcctttttcaccatgtgtgctctgacgcagggttttccargtgctggagaggagccctgtggcctaggagctggaaacagtggctccagcctgcctcagtgactatgtaaggtctcaggaagccatgtaaattctctcatttttcactcctcatccaaaaaatgaatttgtttgtcttcaaaattttctctgagttcgcaccagttctaacatcccatcttaccaggtgttagtgaattccttgttagcgagtgttaaagaggggactgaatgaattaatttattagttatagggtttaactagtttagttctaggtccaattctgtgattctgctctgagctttccccatgtataatgcaataatttatgattaggacagatattttccaaaagtatagtatgtctaaatttttatattaattatatatgaattatttaattatatataaattttatgttaataattgaattata

SEQ ID NO: 711744 - DNA, 959 bp, Homo sapiens
tgggctagggccaccagcagccatgaagttaatagcatgcagctcttcttagatcattaattttttttttttttccagatgggatctcactgtgtcacccaggctagagtgcagcagcatgatcatagctcaccataatctccagtgcctgggctctagtgatcctcctgcctctgccacagagccgctgggactacaggcatgaaccactctgcctggctaatgtttagtttagttttttttttttgttttttttttgtagttttgggagtcttgctatgtcgcccaggctagtcttgaacttctggcctcaagtgattctcttaccttggcctcccaaagcactgggattacaggtgtgagccaccatgcctgaccaatttaactgatttaatacattttctattaaaagaaaatagacacatcctggagtagaatataaatacaagactcaaaacactctttgcatggagaatttcgccgtcctttttcaccatgtgtgctctgacgcagggttttccaggtgctggagaggagccctgtggcctaggagctggaaacagtggctccagcctgcctcagtgactatgtaaggtctcaggaagccatktaaattctctcatttttcactcctcatccaaaaaatgaatttgtttgtcttcaaaattttctctgagttcgcaccagttctaacatcccatcttaccaggtgttagtgaattccttgttagcgagtgttaaagaggggactgaatgaattaatttattagttatagggtttaactagtttagttctaggtccaattctgtgattctgctctgagctttccccatgtataatgcaataatttatgattaggacagatattttccaaaagtatagtatgtctaaatttttatattaattatatatgaattatttaattatatataaattttatgttaataattgaattata

SEQ ID NO: 711745 - DNA, 959 bp, Homo sapiens
tgggctagggccaccagcagccatgaagttaatagcatgcagctcttcttagatcattaattttttttttttttccagatgggatctcactgtgtcacccaggctagagtgcagcagcatgatcatagctcaccataatctccagtgcctgggctctagtgatcctcctgcctctgccacagagccgctgggactacaggcatgaaccactctgcctggctaatgtttagtttagttttttttttttgttttttttttgtagttttgggagtcttgctatgtcgcccaggctagtcttgaacttctggcctcaagtgattctcttaccttggcctcccaaagcactgggattacaggtgtgagccaccatgcctgaccaatttaactgatttaatacattttctattaaaagaaaatagacacatcctggagtagaatataaatacaagactcaaaacactctttgcatggagaatttcgccgtcctttttcaccatgtgtgctctgacgcagggttttccaggtgctggagaggagccctgtggcctaggagctggaaacagtggctccagcctgcctcagtgactatgtaaggtctcaggaagccatgtaaattctctcatttttcactcctcatccaaaaaatgaatttgtttgtcttcaaaattttctctgagttcgcaccagttctaacatcccatcttaccaggtgttagtgaattccttgttagcgagtgttaaagaggggactgaatgaattaatttattagttatagggtttaactagtttagttctaggtccaattctgtgattctgctctgagctttccccatgtataatgcaataatttatgattaggacagatattttccaaaagtatagtatgtctaaatttttayattaattatatatgaattatttaattatatataaattttatgttaataattgaattata

SEQ ID NO: 711746 - DNA, 685 bp, Homo sapiens
gaaagctaccatttgatagtctactaaaaatgccagaatttagctgtattaggtttattcttaattcattgccattatggaatgttcctatagcacaagtgacaggagaaatccatgtataaatgtctgtgctacatgctataagcacagtgattcccacctccaccctccatcttctcaaagcaatcatgtgaagtatcaccagctatgagagacagaatatgctggaggctaaatttctttatctttaaaatgtttccaaaaatggccagaggagttgatttgcttttgtttccatgagtattttcgctattacctttagagatcactaactcagagcagttcatatgactttctgctgycatcatcctgacccctgcctaaacttttcttactgtggaaaatattaacaattgaccttattcagacatttggcaggctgtggtcattattaattccttcttgcttttctacatattttaattgccctcgggatctggtattctgaagaatgctactattggccagcttgataagtttgggaaatactctcctcttcatagctctgagttagttagccttataggactagtaatgagagttgaatgaaagaactagaaattactagatctttcttataagggaaagctcttcttagctaacattttaaaataattttgcattt

SEQ ID NO: 711747 - DNA, 956 bp, Homo sapiens
ctgacatacttagatgatgagatcttgttattccataagcggtaggataccagatgtggtaaacaaataacctctagcagcctgaatggaaggatgtggtaggytggattattgttcagcaaatattcattccctaacctaccccactcccaatagccccccacccaacctatgagagcagtctgtttcgtcatccaattgctattggacttggtcgtgtgacttgatataaccaatggaatgttagcaaatatgccactagcaaaggcttgaaatatgcttgtgcagttggacttggtctttgcacttctattgtttgccgtgagaagaacatgcttctagtagctgctaattcaagaaggatgaaaagcactggctctggacctgatctgcagcttggtaccaagcccagtgtagtccagcctacagccaagtcccagataatgagcatatatgtgagcaaggaagatatacttgttgtatgctgctgaattttgaggtggtttgttactcagtattgtggcggtagctgacaaatacagaaggatactcatttcttttaaagaccttctttaggcactgttttggaagctgcagctttccatgtagcatcaagaactttattgttcaatggcacctattttaatgccagttttgtctctggttactggcaaaactgttcaggattgaaagctcactttaaagaaatgcttacaattcagatgggaagaagagtgctggttgaccctggctatctccacaaacctgtctgtacttggaagttgtttctaggaaaatataatggccagtggctcctttttttgttgttggatcagctagttgtatgtccttagtggtacaaagggcagtgaatacacaaagatagtatctttaattatggaaggagcctattaaaattccattttatcttaagaaataaacatgtaaaggaatct

SEQ ID NO: 711748 - DNA, 956 bp, Homo sapiens
ctgacatacttagatgatgagatcttgttattccataagcggtaggataccagatgtggtaaacaaataacctctagcagcctgaatggaaggatgtggtaggttggattattgttcagcaaatattcattccctaacctaccccactcccaatagccccccacccaacctatgagagcagtctgtttcgtcatccaattgctattggacttggtcgtgtgacttgatataaccaatggaatgttagcaaatatgccactagcaaaggcttgaaatatgcttgtgcagttggacttggtctttgcacttctattgtttgccgtgagaagaacatgcttctagtagctgctaattcaagaaggatgaaaagcactggctctggacctgatctgcagcttggtaccaagcccagtgtagtccagcctacagccaagtcccagataatgagcatatatgtgagcaaggaagatatacttgttgtatgctgctgaattttgaggtggtttgttactcagtattgtggcggtagctgacaaatacagaaggatactcatttcttttaaagaccttctttaggcactgttttggaagctgcagctttccatgtagcatcaagaactttattgttcaatggcacctattttaatgccagttttgtctctggttactggcaaaactgttcaggattgaaagctcrctttaaagaaatgcttacaattcagatgggaagaagagtgctggttgaccctggctatctccacaaacctgtctgtacttggaagttgtttctaggaaaatataatggccagtggctcctttttttgttgttggatcagctagttgtatgtccttagtggtacaaagggcagtgaatacacaaagatagtatctttaattatggaaggagcctattaaaattccattttatcttaagaaataaacatgtaaaggaatct

SEQ ID NO: 711749 - DNA, 956 bp, Homo sapiens
ctgacatacttagatgatgagatcttgttattccataagcggtaggataccagatgtggtaaacaaataacctctagcagcctgaatggaaggatgtggtaggttggattattgttcagcaaatattcattccctaacctaccccactcccaatagccccccacccaacctatgagagcagtctgtttcgtcatccaattgctattggacttggtcgtgtgacttgatataaccaatggaatgttagcaaatatgccactagcaaaggcttgaaatatgcttgtgcagttggacttggtctttgcacttctattgtttgccgtgagaagaacatgcttctagtagctgctaattcaagaaggatgaaaagcactggctctggacctgatctgcagcttggtaccaagcccagtgtagtccagcctacagccaagtcccagataatgagcatatatgtgagcaaggaagatatacttgttgtatgctgctgaattttgaggtggtttgttactcagtattgtggcggtagctgacaaatacagaaggatactcatttcttttaaagaccttctttaggcactgttttggaagctgcagctttccatgtagcatcaagaactttattgttcaatggcacctattttaatgccagttttgtctctggttactggcaaaactgttcaggattgaaagctcactttaaagaaatgcttacaattcagatgggaagaagagtgctggttgaccctggctatctccacaaacctgtctgtacttggaagttgtttctaggaaaatataatggccagtggctcctttttttgttgttggatcagctagttgtatgtccttagtggtacaaagggcagtgaatacacaaagatagtatctttaattatggaaggagcctattaaaattccattttatcttaagaartaaacatgtaaaggaatct

SEQ ID NO: 711750 - DNA, 1861 bp, Homo sapiens
tgccgtgattgtgaggcctccccagccatatgaactgtgagtcaaataaatctctttcctttataaattacccagtcttgggtatatctttactagcagcatgagaatgaactaatacaaagccactccaagaggcctctgccagtatctttgggccattatccagtccctgggcctctgttccttctgtaaatgccaggagtttgactagattatttgagatccctcctagcttcttcaccctatggttcatggtggcagtccctagcgcttcttgaaagtgataatgggactctttggacatctttcagtatttccaaaaatgaaacagaaatttttatgggagacaggtttgcccgggcacactaaaaaaaaaaaaaaaaaatgatgtttcaatttatggcctagaattaggtcaacccagtaggatagcaatgacagtttactgatcagaagctctgattggcagctaaattttgattaacataagatggaataataatcattgtttaatcaatgtatcttgattgaaaaaaatgtcttgtgagatcacttagaagttaaaagcattggaatccttcacgtatgttgcaagaggaagcttaatttatttttgtgaagttagagtacatttcctcacccatacccacagacacctacaagagaacttggaaaataaggagctggcgtctgcctctactcagccaccwgaataaaaagcccacatgtaaccagtcatggtgtcaacacccgaagttgttgtaaaagcccatatgcatttagccatggtgttagcactcagagtaagaaggtgagcttcagcagtaggcctttgtaaggagaaggctacatttcatctcagaaaagctaccaccaatgcgcttaccctctctaaagaaactcagaagaacttgaagcctaataaatatgtgccactttttctcactgtctggacattaaccatcaaaacacctttaaaatgacagggagccgtaatatattattttgtcttaaagaaagaatgaatttaggactagtcatattcttcctgtagctagtgttgtgtccatggatccatcacctctgcctctgagcttcagtttcctcctctgaagactgagaagctgaatatgaggctaagattctttctagctcaaattttctgtgttccaaaaacatgatgcattacttgagctcttcctatgtgcctggcactattctaggtgattataaatgtacagtatgtcctttaatctccaacaacaatgcatccttttcatccctgttttatgaaaaaggaaacagatccacaaagaggccaagctagggaggaaccgagtcagatgtctgtatcctgaaagtaactctgagcctgatccgctcaggcactggaagcttccctacatcccctttctccaatttcttcaacacaacctgagcagacgcttgcatgtgcagttcttttcatctttcccctgacatcaccccaatcacctaagttacttgtctctgaattgccttcaatttgtcttcatctttctagaacagaagagatgatggcaatgcaccttgcaggtgcagtttccttggggacccctgaacaaggaggtaaacttcatctgttgaagtctcctatagaagagtagagagtctgtctggatggtgctgcctaagaggcaagaaaccacaggacccaaaaatagccatggagcaccacttgggataagtgcccaataaatgaaggggtagggaaatagagcccagggaaaaaggttaaagaaattggaatttgctcacataaacatagtaaaactgatcaatattgggagacacttctccatgggactcagctttttgcatg

SEQ ID NO: 711751 - DNA, 626 bp, Homo sapiens
tctcagcagtagcatctattctgctctcttttgccagaattctctcccatgagctagctcagctgcagttagaaccgccctgccaggctctcaagcccagcagaggacttagcctgaggtctggctatggggcgggagggataagtgggggaaggagtgaggggaaaggagcggcatmcctgtgctacccacccacaaatccccagcaaggcacgggccaggagctccaccagggagtggaggggcagggggccttttctgaatctgggagagcacttcctattcgaagtttacaggaaatgtattcatcttaatctatcctttacagccattccactgggacttttttttttttaagagaagcttttctctttttccccagaggcaggtaggaaagcagcggggtggaagaaggcagttaggggcatgaggaacagcctgggatggcaggaagccacagctgggtgaaaattcgggtgctgggtggcaggcaacaagccagtcagctagcttagatgctctgcctgttctgtctccatgtctctgtcctgttccgtctctttggctttctcaggccaccaaaatgtgcaaggagaagggaaagggatgcagaggggccaggcgtg

SEQ ID NO: 711752 - DNA, 1856 bp, Homo sapiens
caatggcaaccccttcccctggctgctgttttactcaccatttracaaaaaattaggtggtgcctttggaggaagagaagggagatttaggcggaaggatttttttttaaaaatttatttttgagacagagtctcgttctgtcacccaggctggagtgcagtggcaccatctcagctcactgcaacctttgcttcctgggttcaagtgatcctctcaccttagcatcccaagtaactggaactataggtgcatgccaccactccggactaatttttgtagttttagtagagacagggttttgccatgttgtacaggctgatctcaaacccctagcctcaagtgatccgcccacctcagcctcccaaagtgctgggattacaggcatgagccaccacacccagctgaggttgaagggattcttacaaagacatgtgaagagaataaattgaaaataaatatgattacattaaaactaagctcagtactttaagatgtcatgttctctgacttgataactgaagaatttgtgtgagtcatgagaagaaggtaatttgttgtactttatattttcagctatccttgagaatggtttctgcttcttacattctcaatgatagacaagtctgacacatggagtttactttaaacggttaggcaatcccatgggttgtggcccatagggtgataacaatagaatttccttttgtctgaccttaaaaaaggatatcagataaatactgcttccttggtgcagttaattttaggccaaaatacaattattggtcagatgcacaaattatctctttatttcttaaggattagaaaaaattttgaggaatcctactttcttcctaaagcagatctgaaatagaaataattttatacaagctaatttttccagggtttttgtttgtttcttcttaaaaaactattttaccagaaaatatgaatacgttctgaaactttaccataaaaaattctcatttcttcccttcttttccttttcttttctcttttcttttctttctttctttctttctttctttctttctttctttctttctttctttctctctctctttctttctttccttctttctctttctttctttctttctttctttctttctttctttctttctttctttctttctttctttcttttccttctttcttttttctacctcttcttattttctctcattcaagcattaatgacctatcaattctacagatagttaattcacacttacaatgtgcctgtcatatttattttaaatattgaaactcactagaaccaaagtccaaatatggatgctctgtcgtggtgagtccacttgttacaaggaccctggaaaatgaaatcaacttggatagaaaccaacatagacccaattttatatcattaaaccatcttctattctaaagaacaactgtatgtgtattacatataggcttctaatagaatttctgatggacatatcagcaaatttaattcggtattttaaaaaatacatcctaaacaaaaacagatttttctcaggagtgtgagaatgatacagcatcagataataaatttaatataaataatgatattaaagataaaggaacagaagcaaaatcatttcaaaaatgtagaaacatttaatatagtcagcatatttattaaaagtaatctgaacaagcttagattggagtaggacatttttacctcaaaaacaagaagctaccaagaaactacagcaaacatatatttacattagtaacaaagcaagaatgaatactatcattgtttctattgattattgaagtgaaaaaactagccaatggagtaagacaaaacaaaaaacaaaaa

SEQ ID NO: 711753 - DNA, 1010 bp, Homo sapiens
attctttcctcactaggaaaaatccaacttttacatttggtttacttgttgattccatcctagtaagtcttttataggtgctagtttaaacttctttcttggtagaagatatattataggcatgacaaactaataaagcccaattctactttttggggggcaaatgttccatctaagttaacacaaaaagaagaaatttaaaatatcgatataagcaactgcttactaaatagagtgctttatccttgtcttggcatcacttacagttattttaagcaatggcctattttctgtgtttaaatatttctaattagccagaaatttgtcatgatatttagatcattaaaagcctaattgaaacatcctttctctccaaagcctggagttttctgttcctgtttttttggtttgtttgtttttttaagcagctttattgagatacaattttcataccactacatttacccatcataaacctacagtttaaggatgataattaaacttataaagttgtccaaatatcaccacaatcacattttagaacatttccatcatccccaagatttcttttctggtcatttgtagctaatccctgctcctacccatcgtcctaggtaactattggtgtgctttgttccaataaatatgccttttttggacattttatgtacatggaattagacaaattgttatatagtcattgtatcttgcttcttcaaaaaattttaatggcatttctatggaaatattttctctttccttttgcattggttttcagaaggaaataaggtggaaacccagcatgaaggtggaaagcctcgtatccgaagctacatctagcatcttstagcttcagagacttatttggagaacagggaactgaggcagttatttaatcaggatatcagaatttgcttttgctgttctatccacactttctcatgaagtcaatcccatatattccacatgatcagccacggaaagtcatcataagacaactcccaggatta

SEQ ID NO: 711754 - DNA, 550 bp, Homo sapiens
cttgccctcatagaactattattctggcttatcagattcatattttacccagcattccctatcctctatcccttgtactatttaggatttatctgtttatccagggtctcttggttcttagttgttattttaaaatatctttagagaaagagatttgtagtagcttctccatatctgtgagcttttagcgttcatgttttcagaagtttattttttgagtttttgttgataaaaagaaatctttttttcctaaagaatggagttcttgacaatgtagacggtataatgtagacaatataaactcttgtttatataatgaacagtggttcgtgaacgtaaacactgggctttaacttattagggtgttgaattaacttccactcatttaattaggatgatctcaaacattarattgtctccaatcacattaagtttttaagagacacgtcattggagagagagtttgtgtgtttatgagataatgatgtcggtgttaagctatgcccatgtttgtccatatagttatcaaatttgaccaagtttaaaaaaa

SEQ ID NO: 711755 - DNA, 659 bp, Homo sapiens
gtttaactactcactatattaatactactatgtttttactatgttttactattttatttttgtatgttttgtttaactactaactaaagttgtagttatgttattaataactactattaattagtattagttaaacaatactaattaatattattatgttctggccctccagtgcttaattgagtgtgggcaataggaaatttttttggaaggaaagggacaccataaacagactggcctttagaaaaataactatgtgaaatgagtcggyggaagcagagagaagaaactggtggtctctttgaaggttactgcagtgaagtggataaaatggataggtatgagtagaaagggtgcaagaacaaacattactgcctgtgtatggggagcgaggcaggggtcaaagaggaatcctaaggtttgagtctgagtagctaggaagaccattgggtttttaaccagggaatgtaaccaggaaggcaaaggaggagctgttaaaggggtagaggaatgttacattttggacagggtatggatttggatgtcgatggggcatccaggtagtgtgttttgcaggtggcagttgtaagagcaggtttgagttctggccagagatgtagattctggaagctgcagtatggagatgggtgtgattacta

SEQ ID NO: 711756 - DNA, 659 bp, Homo sapiens
gtttaactactcactatattaatactactatgtttttactatgttttactattttatttttgtatgttttgtttaactactaactaaagttgtagttatgttattaataactactattaattagtattagttaaacaatactaattaatattattatgttctggccctccagtgcttaattgagtgtgggcaataggaaatttttttggaaggaaagggacaccataaacagactggcctttagaaaaataactatgtgaaatgagtcggtggaagcagagagaagaaactggtggtctctttgaaggttactgcagtgaagtggataaaatggataggtatgagtagaaagrgtgcaagaacaaacattactgcctgtgtatggggagcgaggcaggggtcaaagaggaatcctaaggtttgagtctgagtagctaggaagaccattgggtttttaaccagggaatgtaaccaggaaggcaaaggaggagctgttaaaggggtagaggaatgttacattttggacagggtatggatttggatgtcgatggggcatccaggtagtgtgttttgcaggtggcagttgtaagagcaggtttgagttctggccagagatgtagattctggaagctgcagtatggagatgggtgtgattacta

SEQ ID NO: 711757 - DNA, 1077 bp, Homo sapiens
catgttgagtttccatgttgaatgtctcccatatgcctggctttgtggaattttaagacatatggagtatttccatcctcactcagtatttcacctttcactgcaacaagttactgcactgcactactgagacatgcacatcatccattattgctggaaatcggcataaaaagttagctcatgtgtggatcacctgaggtcaggattttgaaaccagcctggccaacatggtgaaaccccgtctctactgaaaatacaaaaagtagctgggcatggtggtgggtgcctgtaatcccagctactcaggggactgagtcaggagaatcacttgaacctgggaggcagaggttgcagtgagccgagaccgcgccattgcactccagcctgggtgacaagagtaaaactctgtctcaaaaaagaaagaaagaaagagagagagggaggggaaagaagttagctcaggagagaagaaatattctgaaatcagcaatataagtagttattttaacaacagaggttcaatcccaraaagagataattatcttaaacctgacaactgaggcatgcaggaaagccctctggttattcttttcaccacacctgaaagacatgtggttgtatcccagactgtttatttttcctccatgtatactttatcttggagcaagcatctgcccttatagtgtaaactattactagcattcttatagctgtcctcttcacttctttcctgatcatgagtcctttagctacagaatattcatatttgtttgtgctttgtttttatttattttggtactttttacattttattttgcttaaatgcagcaaaataatacaaaacaaaaattcaagccatgcatttaaaaatatttctcctactaagcctaaatcattattattcaggtttgactctctccatttatgttgattcaatttattacttgagaccctattattaccaggccatgtgccaagggaaggaaacacaaagaacaatttcagggaactcataatctagtgaaaaagaaaaatatgtaaataaatgattataatgtaaaaaatatataatgatca

SEQ ID NO: 711758 - DNA, 1077 bp, Homo sapiens
catgttgagtttccatgttgaatgtctcccatatgcctggctttgtggaattttaagacatatggagtatttccatcctcactcagtatttcacctttcactgcaacaagttactgcactgcactactgagacatgcacatcatccattattgctggaaatcggcataaaaagttagctcatgtgtggatcacctgaggtcaggattttgaaaccagcctggccaacatggtgaaaccccgtctctactgaaaatacaaaaagtagctgggcatggtggtgggtgcctgtaatcccagctactcaggggactgagtcaggagaatcacttgaacctgggaggcagaggttgcagtgagccgagaccgcgccattgcactccagcctgggtgacaagagtaaaactctgtctcaaaaaagaaagaaagaaagagagagagggaggggaaagaagttagctcaggagagaagaaatattctgaaatcagcaatataagtagttattttaacaacagaggttcaatcccaaaaasagataattatcttaaacctgacaactgaggcatgcaggaaagccctctggttattcttttcaccacacctgaaagacatgtggttgtatcccagactgtttatttttcctccatgtatactttatcttggagcaagcatctgcccttatagtgtaaactattactagcattcttatagctgtcctcttcacttctttcctgatcatgagtcctttagctacagaatattcatatttgtttgtgctttgtttttatttattttggtactttttacattttattttgcttaaatgcagcaaaataatacaaaacaaaaattcaagccatgcatttaaaaatatttctcctactaagcctaaatcattattattcaggtttgactctctccatttatgttgattcaatttattacttgagaccctattattaccaggccatgtgccaagggaaggaaacacaaagaacaatttcagggaactcataatctagtgaaaaagaaaaatatgtaaataaatgattataatgtaaaaaatatataatgatca

SEQ ID NO: 711759 - DNA, 1077 bp, Homo sapiens
catgttgagtttccatgttgaatgtctcccatatgcctggctttgtggaattttaagacatatggagtatttccatcctcactcagtatttcacctttcactgcaacaagttactgcactgcactactgagacatgcacatcatccattattgctggaaatcggcataaaaagttagctcatgtgtggatcacctgaggtcaggattttgaaaccagcctggccaacatggtgaaaccccgtctctactgaaaatacaaaaagtagctgggcatggtggtgggtgcctgtaatcccagctactcaggggactgagtcaggagaatcacttgaacctgggaggcagaggttgcagtgagccgagaccgcgccattgcactccagcctgggtgacaagagtaaaactctgtctcaaaaaagaaagaaagaaagagagagagggaggggaaagaagttagctcaggagagaagaaatattctgaaatcagcaatataagtagttattttaacaacagaggttcaatcccaaaaagagataattatcttaaacctgacaactgaggcatgcaggaaagccctctggttattcttttcaccacacctgaaagacatgtggttgtatcccagactgtttatttttcctccatgtatactttatcttggagcaagcatctgcccttatagtgtaaactattactagcattcttatagctgtcctcttcacttctttcctgatcatgagtcctttagctacagaatattcatatttgtttgtgctttgtttttatttattttggtactttttacattttattttgcttaaatgcagcaaaataatacaaaacaaaaattcaagccatgcatttaaaaatatttctcctactaagcctaaatcattattattcaggtttgactctctccatttatgttgattcaatttattacttgagaccctattattaccaggccatgtgccaagggaaggaaacacaaagaacaatttcagggaactcataatctagtgaaaaagamaaatatgtaaataaatgattataatgtaaaaaatatataatgatca

SEQ ID NO: 711760 - DNA, 667 bp, Homo sapiens
cttgagactggataatttataatgaggtttaattgactcacagttcagcatggctggggaggcctcaggaagctttacaatcatgctggaaggcaaagggaagaaaggcaacttcttcactaggtggcaggaaggagacctgctgagcaaaaggggaaaagccccttttaaaaccatcagatctcatgagaactcactcactatcacaagaacagcattggggtaactgcccccatgattctcttacctcacaccaggtccctcccacgacatgtggggattatgagaactacaatccaaggtgagattaggatggagacacagccaaatcatatcaattgaggagatttagtgaaccacatgtaatgtcaacctgtggactgcatcattctagaagtctccacaatagacaccacaatttccaacataagatttatcagtaataaaggtaatattttgggttcttatttgctttgtcttgttttatttttattcatttattcattcattcatttttaatttctcaactggcagagaaattgagcagtaaggtggtgggttatttacttggtccttcttgaacaccattaataaacarcttacaaacataattccttctctttcacaccataactatttgactctatacaagctacttaaattttaa

SEQ ID NO: 711761 - DNA, 594 bp, Homo sapiens
gtgctgggattacaggcataagacacagcacccagccaggtcaccattttttatagtagctctcttttgttttaatgtattaattaggactgtccaggaactgaagttaaaaacrtctagaactagaaggcacttccagaaggcacccaggcaatgataatacttgttaacattctttaactgccttgcaataaaagtttacgtaaccatcatttgaaaactgaaatctacaaaacctttccctattttaagatatgctacaaatattatagagtatcagggaagaataaagaaaatattgttatctaaaaactaaaataaattacaaggaaaaacaaacaataaaattagttttccaacttcaaaataccacaaacatccaagctaaatgaggaagttcgaacccatcgcaaagaagctaaaaaccttgaaaaaagattagacgaatggctaactagaataaccagtgtagagaagtccttaaatgacctgatggagctgaaaaccatggcacgagaactacgtgatgactgcacaagcttcagtagccgattcgatcaactggaagaaagggtatcagtgactggagatcaa

SEQ ID NO: 711762 - DNA, 897 bp, Homo sapiens
tgtgtgtgtatacaaatatgtatatatgtggtttgtgcaagcttttttcttcttttatttaatatcatgtgagcattttctgagataaataagaaatctaggcaaattttgtgtttttaaaaataatcactttgcatagctgtgccaatatttatttaactaatttatattatttagcaatagctttctattcttcaggttttccttactataaatcaagcaacactaaatgtctataaatttttgtgtacaagagttactcttttatctctcctatgacaattccgattattacaaatttgaatttatgaaaagcaattcaatatattttatttatagatacagtggtttcattttaaaatataagtgggtccaataaaatgttaatgaataacaaaaatcagagcctaaataaaattcaatttattaaaataggtttttaaatttttgatgagtgttgaattaatcatgagtttttcatccaggtcttttattttgagaaaattacaaaattttataaacckgatctctcgtcttcaattatttgttccccattaaaaaaaattactgtgccctggaaactataaaatttttaaggcaaacttttttttcaaaacttttgagttaattctgccctattaaaaatttttataacttgtaattggattcactagtttttattaccatctataatacttaaacagtttataaccagatttaatgatgttaatctgctttccaggataatctgtaatgcctctgcttgcttgttatctaatatttattacatatatacataaatgtatatatatctaatatttattagatatacacataaaaatgtatatgtgtgtatatatatgtgtgtgtatatatttgtgtaaatatatatacgta

SEQ ID NO: 711763 - DNA, 897 bp, Homo sapiens
tgtgtgtgtatacaaatatgtatatatgtggtttgtgcaagcttttttcttcttttatttaatatcatgtgagcattttctgagataaataagaaatctaggcaaattttgtgtttttaaaaataatcactttgcatagctgtgccaatatttatttaactaatttatattatttagcaatagctttctattcttcaggttttccttactataaatcaagcaacactaaatgtctataaatttttgtgtacaagagttactcttttatctctcctatgacaattccgattattacaaatttgaatttatgaaaagcaattcaatatattttatttatagatacagtggtttcattttaaaatataagtgggtccaataaaatgttaatgaataacaaaaatcagagcctaaataaaattcaatttattaaaataggtttttaaatttttgatgagtgttgaattaatcatgagtttttcatccaggtcttttattttgagaaaattacaaaattttataaaccggatctctcgtcttcaattatttgttccccattaaaaaaaattactgtgccctggaaactataaaatttttaaggcaaacttttttttcaaaacttttgagttaattctgccctattaaaaatttttataacttgtaattggattcactagtttttattaccatctataatacttaaacagtttataaccagatttaatgatgttaatctgctttccaggataatctgtaatgcctctgcttgcttgttatctaatatttattacatatatacataaatgtatatatatctaatatttattagatatacacataaaaatgtatatgtgtgtatatatatgtgtgtgtatatatttgtgtaaatatatataygta

SEQ ID NO: 711764 - DNA, 1058 bp, Homo sapiens
gaatagccacttcaggaaatgtgctttaattccagactcaaaccagggccctcacaactgagcaagtcagaayaaaatttctttctttgcttactcctccccaagtagctctttgctctttaaaatttgcttcttttagatttatctgtagtccaagtatgaccccacagaccaataattccattctgaatccactaatctttatctttgagactcttatatgtaattgctgtttgcagaataagccttctaggtgcctgttggatatctgaagagccaaattcctttggagtacatagtattttctagccttagttattctgcaaatgaataaactctatgttgtagactttaagtgtaaaaaacaggaagattgtagagagggagatttttgtttctgctattactgatgagataatagcaaagagagatgagaggcaagaatggccaacacattgatttcatcgtgttcagactaatgatctaaaagtaacctggaatttctgatgcttatttaaattttcccaatttttagactaccagtctcattaagacatcaaaataacatccatcagcatgtaactttttttttcttttcttttcttttttttcttttttttaagatagagtcttgctctgtcacccaggctggagtgcagtggcgtgatctcggctccctgcaagctccgccttccaggttcatgccattctcctgcctcagcctcccaagtggctgagactacaggtgcccgccaccacacccagctaattttttttttttttgtatttttagtagagacggggtttcatcatgttagccaggatggtctcgatctcctgacctcgtgatctacccacctcggcctcccgaagtgctgggattacaggcgtgagccaccgcacccagcccatcagcatgtatctttagcatgtatgtgccaaaagaagatctgtttaacttgtttcctgctgtatctctagtgctcaaaatataatgagctcaatatgtacttgttaaataaataaatgaacattattatagcagctgtactaatttg

SEQ ID NO: 711765 - DNA, 1058 bp, Homo sapiens
gaatagccacttcaggaaatgtgctttaattccagactcaaaccagggccctcacaactgagcaagtcagaataaaatttctttctttgcttactcctccccaagtagctctttgctcyttaaaatttgcttcttttagatttatctgtagtccaagtatgaccccacagaccaataattccattctgaatccactaatctttatctttgagactcttatatgtaattgctgtttgcagaataagccttctaggtgcctgttggatatctgaagagccaaattcctttggagtacatagtattttctagccttagttattctgcaaatgaataaactctatgttgtagactttaagtgtaaaaaacaggaagattgtagagagggagatttttgtttctgctattactgatgagataatagcaaagagagatgagaggcaagaatggccaacacattgatttcatcgtgttcagactaatgatctaaaagtaacctggaatttctgatgcttatttaaattttcccaatttttagactaccagtctcattaagacatcaaaataacatccatcagcatgtaactttttttttcttttcttttcttttttttcttttttttaagatagagtcttgctctgtcacccaggctggagtgcagtggcgtgatctcggctccctgcaagctccgccttccaggttcatgccattctcctgcctcagcctcccaagtggctgagactacaggtgcccgccaccacacccagctaattttttttttttttgtatttttagtagagacggggtttcatcatgttagccaggatggtctcgatctcctgacctcgtgatctacccacctcggcctcccgaagtgctgggattacaggcgtgagccaccgcacccagcccatcagcatgtatctttagcatgtatgtgccaaaagaagatctgtttaacttgtttcctgctgtatctctagtgctcaaaatataatgagctcaatatgtacttgttaaataaataaatgaacattattatagcagctgtactaatttg

SEQ ID NO: 711766 - DNA, 1058 bp, Homo sapiens
gaatagccacttcaggaaatgtgctttaattccagactcaaaccagggccctcacaactgagcaagtcagaataaaatttctttctttgcttactcctccccaagtagctctttgctctttaaaatttgcttcttttagatttatctgtagtccaagtatgaccccacagaccaataattccrttctgaatccactaatctttatctttgagactcttatatgtaattgctgtttgcagaataagccttctaggtgcctgttggatatctgaagagccaaattcctttggagtacatagtattttctagccttagttattctgcaaatgaataaactctatgttgtagactttaagtgtaaaaaacaggaagattgtagagagggagatttttgtttctgctattactgatgagataatagcaaagagagatgagaggcaagaatggccaacacattgatttcatcgtgttcagactaatgatctaaaagtaacctggaatttctgatgcttatttaaattttcccaatttttagactaccagtctcattaagacatcaaaataacatccatcagcatgtaactttttttttcttttcttttcttttttttcttttttttaagatagagtcttgctctgtcacccaggctggagtgcagtggcgtgatctcggctccctgcaagctccgccttccaggttcatgccattctcctgcctcagcctcccaagtggctgagactacaggtgcccgccaccacacccagctaattttttttttttttgtatttttagtagagacggggtttcatcatgttagccaggatggtctcgatctcctgacctcgtgatctacccacctcggcctcccgaagtgctgggattacaggcgtgagccaccgcacccagcccatcagcatgtatctttagcatgtatgtgccaaaagaagatctgtttaacttgtttcctgctgtatctctagtgctcaaaatataatgagctcaatatgtacttgttaaataaataaatgaacattattatagcagctgtactaatttg

SEQ ID NO: 711767 - DNA, 1058 bp, Homo sapiens
gaatagccacttcaggaaatgtgctttaattccagactcaaaccagggccctcacaactgagcaagtcagaataaaatttctttctttgcttactcctccccaagtagctctttgctctttaaaatttgcttcttttagatttatctgtagtccaagtatgaccccacagaccaataattccattctgaatccactaatctttatctttgagactcttatatgtaattgctgtttgcagaataagccttctaggtgcctgttggatatctgaagagccaaattcctttggagtacatagtattttctagccttagttattctgcaaatgaataaactctatgttgtagactttaagtgtaaaaaacaggaagattgtagagagggagatttttgtttctgctattactgatgagataatagcaaagagagatgagaggcaagaatggccaacacattgatttcatcgtgttcagactaatgatctaaaagtaacctggaatttctgatgcttatttaaattttcccaatttttagactaccagtctcattaagacatcaaaataacatccatcagcatgtawctttttttttcttttcttttcttttttttcttttttttaagatagagtcttgctctgtcacccaggctggagtgcagtggcgtgatctcggctccctgcaagctccgccttccaggttcatgccattctcctgcctcagcctcccaagtggctgagactacaggtgcccgccaccacacccagctaattttttttttttttgtatttttagtagagacggggtttcatcatgttagccaggatggtctcgatctcctgacctcgtgatctacccacctcggcctcccgaagtgctgggattacaggcgtgagccaccgcacccagcccatcagcatgtatctttagcatgtatgtgccaaaagaagatctgtttaacttgtttcctgctgtatctctagtgctcaaaatataatgagctcaatatgtacttgttaaataaataaatgaacattattatagcagctgtactaatttg

SEQ ID NO: 711768 - DNA, 1158 bp, Homo sapiens
aaaaaaaaaggacatctagtaagaaaatataaaaacacatgcaccttctaggtagatgatgtaaatatgtaaatacaagcacaactataaaaattttcctggggcaaatagaggaaacttaagacttgtagttaagctaactccactattcactacaggtatgagaaagatcagaccataaccaacatatcacattcagggaaaaatatataactcaatttgggccaatgaaacccaatagacattagctgaggactttagaagtgaaggttcatttcttttcctcaaaagctacctaaaaaaagattcattttcttgatgataatgcattggaaaaaagtgtaataatgataaaaacaaatgttcgccggaccattctctgtgtkcctggtgctatcatatgtgctgttgatgcaggaactcagtcttcacagtcaggttgtgtatgaagtgggtgctattattctgtacattttacacttggggaaacttagaattcgttaactatagtaagacctcacttcatgtcgttgataggctctcagaaactgcaactttaggtgaaatgaggtataatgcaaccaatgatttttctcatctatgtcataacaaaaagcatgaaaagaaacaatgttatttgaggatggggtgtacattgtttggttaaagtggcagtttccaagaacctatcagtgatgtgaaggaaggacttactatgatccaaaattgagtggcaaggaagtagagatgggatttgatcccttaagccttattaagccttattcctcctgtaaaggagtccgcatcctttacagttgtgctgtagtaattctcatcaagtactagtacaaccatatatatcacgtgatgtttctctacactggaaatcaaaaatattcaaatacagaatgctacattcctagacagaataactcaatattattagaatgccattttatattattatatgcttaatataatatggataagataatcaagagttttcctgcccacctccgcaaaaaagtagactatgaaactaactaatacacataatcttaaaaagaagaaatatggcctactggtgatttaaaactatcttaaaaccacaatcactgagcaatatgatatcagtgcaagcataaagatagatgagta

SEQ ID NO: 711769 - DNA, 1158 bp, Homo sapiens
aaaaaaaaaggacatctagtaagaaaatataaaaacacatgcaccttctaggtagatgatgtaaatatgtaaatacaagcacaactataaaaattttcctggggcaaatagaggaaacttaagacttgtagttaagctaactccactattcactacaggtatgagaaagatcagaccataaccaacatatcacattcagggaaaaatatataactcaatttgggccaatgaaacccaatagacattagctgaggactttagaagtgaaggttcatttcttttcctcaaaagctacctaaaaaaagattcattttcttgatgataatgcattggaaaaaagtgtaataatgataaaaacaaatgttcgccggaccattctctgtgtgcctggtgctatcatatgtgctgttgatgcaggaactcagtcttcacagtcaggttgtgtatgaagtgggtgctattattctgtacattttacacttggggaaacttagaattcgttaactatagtaagacctcacttcatgtcgttgataggctctcagaaactgcaactttaggtgaaatgaggtataatgcaaccaatgatttttctcatctatgycataacaaaaagcatgaaaagaaacaatgttatttgaggatggggtgtacattgtttggttaaagtggcagtttccaagaacctatcagtgatgtgaaggaaggacttactatgatccaaaattgagtggcaaggaagtagagatgggatttgatcccttaagccttattaagccttattcctcctgtaaaggagtccgcatcctttacagttgtgctgtagtaattctcatcaagtactagtacaaccatatatatcacgtgatgtttctctacactggaaatcaaaaatattcaaatacagaatgctacattcctagacagaataactcaatattattagaatgccattttatattattatatgcttaatataatatggataagataatcaagagttttcctgcccacctccgcaaaaaagtagactatgaaactaactaatacacataatcttaaaaagaagaaatatggcctactggtgatttaaaactatcttaaaaccacaatcactgagcaatatgatatcagtgcaagcataaagatagatgagta

SEQ ID NO: 711770 - DNA, 1158 bp, Homo sapiens
aaaaaaaaaggacatctagtaagaaaatataaaaacacatgcaccttctaggtagatgatgtaaatatgtaaatacaagcacaactataaaaattttcctggggcaaatagaggaaacttaagacttgtagttaagctaactccactattcactacaggtatgagaaagatcagaccataaccaacatatcacattcagggaaaaatatataactcaatttgggccaatgaaacccaatagacattagctgaggactttagaagtgaaggttcatttcttttcctcaaaagctacctaaaaaaagattcattttcttgatgataatgcattggaaaaaagtgtaataatgataaaaacaaatgttcgccggaccattctctgtgtgcctggtgctatcatatgtgctgttgatgcaggaactcagtcttcacagtcaggttgtgtatgaagtgggtgctattattctgtacattttacacttggggaaacttagaattcgttaactatagtaagacctcacttcatgtcgttgataggctctcagaaactgcaactttaggtgaaatgaggtataatgcaaccaatgatttttctcatctatgtcataacaaaaagcatgaaaagaaacaatgttatttgaggatggggtgtacattgtttggttaaagtggcagtttccaagaacctatcagtgatgtgaaggaaggacttactatgatccaaaattgagtggcaaggaagtagagatgggatttgatcccttaagccttattaagccttattcctcctgtaaaggagtccgcatcctttacagttgtgctgtagtaattctcatcaagtactagtacaaccatatatatcacgtgatgtttctctacactggaaatcaaaaatattcaaatacagaatgctacattcctagacagaataactcaatattattagaatgccattttatattattatatgcttaatataatatggataagataatcaagagttttcctgcccaccyccgcaaaaaagtagactatgaaactaactaatacacataatcttaaaaagaagaaatatggcctactggtgatttaaaactatcttaaaaccacaatcactgagcaatatgatatcagtgcaagcataaagatagatgagta

SEQ ID NO: 711771 - DNA, 1523 bp, Homo sapiens
cggcaaaaaagcattaatatccagggaaaaacattttatgtcaggccaagacaccagaatgagtgccagctgccagtcaaaagttggatgggatatactataagataaagtcagtttgaggaagggctggccagtgggcaattcattttatgagaaagaaaaatcttcctgagaagagaaatgaaagaggctcctaaaagaacactactagcaaccatgaacttggagcagctagaaaaggagactgagggccgggcgcaatgcctcatgcctgtaatcccagcactttgggaggccgtggcgggcagatcacaaggtcaggggatcgagaccatcctggctaacatggtaaaaccccatctccactaaaaatacaaaaaattagccaggcgtggtggcacacacctgtagtcccagctactcgggaggctaagacaggaaaatcgcttgaacctgggaggtggatgttgcagtgagccgagatcacaccactgcgctccagcctgggcgacagagcaagactccatcacaaaaaaaaaggaaaagaaaaaggaaaaggagactgagatgggttctaggttaagagagggagaagaagagaagtaaatgctaccattgcctttgggaagaggtccagacattgggatccagttatggtgcttgctcaaggtgtatgctttaggcaaagggtcattctagtggcagtgctggcctggtttgttataaggtggacagttgtgccaatgcagaagggtgctttaagcacatgttgactttaagccaccacaatttatattcaaaagacaatcgttgattttctggtgatatatctgctgggtgatggctcatgggtccttgctgtttttaaaggccacgtaattgtgatagatcgaattgaaactgtacaaaatttaaatttatctcttcttcattcatctatgttagacatacttaaatgggggcacctatgatttcaaacagagctcatcataattagrcacatttatattttgatcagtaggaggaagtaaatagaaaactaccagacataggaaacaactgagcagttcataataataaattactagaacatacacctttgtaaataatttctgtaacaaactacaaaactttcttagaaaatgtttcattcgtggtcacacccaattttaaaggtttttgtacctatcatattaggatacatttataattgtgaaacaagttgaggtcagaagtgactattttagagactaaaaatatggcttcttaatttaaagttgcaaagaaacctgtgaatagtagcatcagttctaaagtaaaacaagtcaatgaatcagaggatcaacgtgagaaagttgcccagcagttagagaaaaataatgacagaaaaacatgagatccgtgacgacaaatttaggacaaatgtataatggaaattccagaaaaagggaaaaagactgcaggaaaaaaaaaaaaagaaagaaataatgggcataacaatagaagaaaacacaactgtcaaa

SEQ ID NO: 711772 - DNA, 1523 bp, Homo sapiens
cggcaaaaaagcattaatatccagggaaaaacattttatgtcaggccaagacaccagaatgagtgccagctgccagtcaaaagttggatgggatatactataagataaagtcagtttgaggaagggctggccagtgggcaattcattttatgagaaagaaaaatcttcctgagaagagaaatgaaagaggctcctaaaagaacactactagcaaccatgaacttggagcagctagaaaaggagactgagggccgggcgcaatgcctcatgcctgtaatcccagcactttgggaggccgtggcgggcagatcacaaggtcaggggatcgagaccatcctggctaacatggtaaaaccccatctccactaaaaatacaaaaaattagccaggcgtggtggcacacacctgtagtcccagctactcgggaggctaagacaggaaaatcgcttgaacctgggaggtggatgttgcagtgagccgagatcacaccactgcgctccagcctgggcgacagagcaagactccatcacaaaaaaaaaggaaaagaaaaaggaaaaggagactgagatgggttctaggttaagagagggagaagaagagaagtaaatgctaccattgcctttgggaagaggtccagacattgggatccagttatggtgcttgctcaaggtgtatgctttaggcaaagggtcattctagtggcagtgctggcctggtttgttataaggtggacagttgtgccaatgcagaagggtgctttaagcacatgttgactttaagccaccacaatttatattcaaaagacaatcgttgattttctggtgatatatctgctgggtgatggctcatgggtccttgctgtttttaaaggccacgtaattgtgatagatcgaattgaaactgtacaaaatttaaatttatctcttcttcattcatctatgttagacatacttaaatgggggcacctatgatttcaaacagagctcatcataattagacacatttatattttgatcagtaggaggaagtaaatagaaaactaccagacataggaaacaactgagcagttcataataakaaattactagaacatacacctttgtaaataatttctgtaacaaactacaaaactttcttagaaaatgtttcattcgtggtcacacccaattttaaaggtttttgtacctatcatattaggatacatttataattgtgaaacaagttgaggtcagaagtgactattttagagactaaaaatatggcttcttaatttaaagttgcaaagaaacctgtgaatagtagcatcagttctaaagtaaaacaagtcaatgaatcagaggatcaacgtgagaaagttgcccagcagttagagaaaaataatgacagaaaaacatgagatccgtgacgacaaatttaggacaaatgtataatggaaattccagaaaaagggaaaaagactgcaggaaaaaaaaaaaaagaaagaaataatgggcataacaatagaagaaaacacaactgtcaaa

SEQ ID NO: 711773 - DNA, 3017 bp, Homo sapiens
agaatttacatcctatgatgtctatcagttggactttgtttggctctttagagccatccaatatgcctgtttcctcctctagcaagttactttcaaatattttaatacattttttgttaactcttagtattattattattgttaactctcagtattattcctccagttaaatgtccactcagttttcaattgtaccttatatgatacattggtagacccttaaatatttcagtccaacaccttaagacaggctgtcattaattttttccatcttagtgtccagaatgggatgtgttactctagtatatgagagggcttgccyaacaccttaatagatctgaaaattatagttgtgtgaattctatgagaagaggcggcgtctcacatcctattttaggtgaaatgacagggcatggtggagtaggttgtattgtcttttctgttctcttgaccacacagataaaacctataagtggcagcactatcctagtcaaaaacttagaaaatattctatgagtctataggttttctgttgaaaattgttctgcctttggtcccaattctattttttctcaatatctctgttcagaaagcattatgtcgtgataatatcatagaggtcttatggatgaatcactattgatagtattatctaatggatgcaatatctaatggatcaattccattgatgtgcagcatgatgtcaggatgtggggatgagtgggaatttctatggatgtctacactgtcacttgtcaaagaagcaaatttaatattgccttgagtttctcccttcatataagcaatattttgctataattactctaatttaatattacttcatcactcaaaacaagccaaaggtaaaacagaatacaaaatcaaaatataaactgtagagaaactctgagatgagacgtttgtcgggaaaagatgttggctagtgaattcatcagctctagttcagagtaagccaccctgaagaggatgccctggtaataatagtgatctccacactgctgacacaggttgtatgtttctgttttttcttttctacactgttaagttcaagggacaccctatctttgtcactgtttttgtttcttcttttctacactgttaagttcaagggacaccctctctttgtcactgtttttgttttttgtgttccttttatctgttagtcaacaaatatttgttgacctcttgaggagactcgaaggctgcagccttgttaatcatgatgaacaccaaggtagggccaggctcttgagctcctctcatctgccttctgcaagggctacatggtaacaccacatcagatggaaactaatttcttgggttttcctaggacttcagatatgctcaagcaagaaaccattactaatgggtcggtttagtatctgtcttggagtctggagcagatagtagctgtcaattgttttttgatcaccgcaaaggtacagacattggaatggaatctatgtgaatgtgttagttttggtccatactgaaagtttattgaatgatgtgaacaataattatgcatatcaatacaagtcaaatgagtgagttaaggagcgataaagatgaatcttcataaacaatgcatattgcaacaatgtgggtttgggatattgtagatatggttccatatagttttcactaggtttgcactgtgctacgctatgttactccacatcatttctccccatatcacagcatcccttgccaccgtactacacatctagtgacatgggtgggtgaaaagacaaaggatctctttgcatttgctgttcattttcttctaggatcagagtccaaatttaagtctttttgattattttccaggctaaaatatgcatttgacttttgcagcatttgatggtctcatgagagtcaagattttcatgaatctgttgaaaagtcagtggtcattccttaaacagggaggagagcctcttcagtgaacacaattgttcattatgtgtgacagtaatgcagggaccactattaccaggacatcctcatcagggaggcttccttcgaattagagcttatgaattcactagcgaatatcttttcccaacaaacgttgcatctcagaatttctccagcgtttacatcttgattttggattttctgttttacctttcacttgttttgggtgacgaagtaatattaaattagagtaattgttatccaaacaatgtgaggaaaaaaaaattattatctccaattggaaaattagataatggagttagatttctttgcctttttaaaaaattaacaattgctactcttgtaccattctgagggaaatcaacagcatttaatttcattgttttcggttttctttgcacttgttaaagaagagactagtgagattggaatcctgggcctccctcccgttggtcagcaagaaaaatggagggtgtgcttcaagttttcccaaacagaggagcttagggacctctccctgctcctcaagcaagccgtatgcacagttgtcatctgtgctacaatgcctggcaggcaacggggacacagcctttactaacaggcagttgaggaagactcagtgacaccgtcacagttgctggctccagtgccacacctgaaatgtgagcaccagaacaacacctggacgttgctatgaactgggacctgtgttgaggaactctcagagctagcctcagttctttggaaatgtgcttggtcaccttctctatagttttctcggcccattccagtgtgatgaaaatcttgagccacaacaagcagacattctcacgtgaattttaaaccctgtgcttcataccctgccctggctccccattccccgctccatgctccacccctcagaaacaacgtttttggggtggaactgtagccctttgttttcctttcgttaactttgctgaaattgtttaaaccacggtgacagtcttaggaggaaaatgactatccaatatagcttttgttttctaagctatagataattatagataatataa

SEQ ID NO: 711774 - DNA, 1725 bp, Homo sapiens
aagtttaattccctttgtcagctcttctctccacacaccagcctaagtaaaccctaatcagaagcaaaccaagatttctccacacactaaattatctgccttccatacccaggctgctaactgctattggaaataaaaagccacacaactgagatgaactctatcaatgtatgtgcaagtgggcaatcccaacagtctctagtgatctcgctcttcggttcttcacataaggcatttagaacgttctcaagtccattcaaaacgtgtcgatcactcgctgccatcccccaccttaacaaacaaatttgccttstatcttacaaataaaatataaatgaatactttttcatttcctgccctgaaactgtaaacttaactccaatatacctgccctttatgttccttctagtaaaatgaaagaaatgtctttcctcccatctaaggctaagctctccatctgtatattctggctcctgctgtctttcacttaattaggaacctcattcaatccatcagcccctctccttcttgtttttctcaacatctccctgtctactggagccttctcaattggcagacaggttttaggtcctcctttattaaaaccaaccaaaactctgaacagtgccatttcctttctctctctttcccttgaaagcccaacttcctggaagaacggtcaatatatgcttgtccccactttctcacaggcggctacaatataaaacctggctgaggtagcccagaaatcagagattccaggtgacccttcaattcggaaatgtgagtggagagcgacagtgaagcactgtttattcacagcagaagttccgtcaatggacaagcactaccaagaccatatctcagactctgggaagatgactggctggtaagatcttagagtgaggtcttggcctcttttgtgctaatcctcatcatagagggtatttgggcagcacctagagtctgcgggcataaaggtgcatacttattacttttctcccacagaaagggaaaataaaaggaaaggattttcttaagaaattctcatctttccaatcaaaattgatctgtccttcattgaatgtctaaacactttaacagtaatttgatttaatagctacttgtctacagacctttctcttgattataggcttcttggcagtagactatgtaattgtttttctgtgttgtccatggctccaagcacaagtggtcaaaagaacaagccagggaatcgtgaggtcaaactgggatgatgagaggccctgatgtatagaaaactaaaatgaggtaaaatacataaagggttttataaactacaaagcgtcaaataaagatgaaatgattttacatacagctagatcataacatgtatttgctgagaaaatggataactgttaaacagacatttgtaatgttataaagccaacaaggccatttcaataattttctctgggtaaagtgttagacaatgggtaggatgaactgtgggtttgaatatctgccaactactatgttcttacctgtgaaatgaagattctcttactagtttttatatcacaaagttttaattttttttaataaaatacctaggaatatagctaactagggaggtgaaagatctctacaaggagaactacaaaccactgctcaaagaaataagagatggcacaagcaaatagaaaaacatcccatgctcatgggtaggaagaatcaatatca

SEQ ID NO: 711775 - DNA, 776 bp, Homo sapiens
aaacaaacaaacaaaacctcttcttttcttttgggactttacttgctttctcccctccttaaaactagaacctcttcctgagttaatctcccagccacttcccttatgatagtactgggaaggctactttaaatccctgattgtatccrcatcttgctcccttagaacatccttcttttccgtttatttaagttttagttgtactgggaaccagttcagacatggagacttttctaacaaaaaatcaacaacaacaacaatagtgaataaaaatactcatttattttacttcctaatacagttgtctaaactctcattcatttattttcatttttatgacttccagaagaagatataatgtaataacgtgagcatgcactttagaatccaagaaatttgggttaatccagactcctactcactggctttctgactccggggaaattacttacttttcccaataccttggtttttatgtgagtaaaatggggcatatactaccactaccttggggaagggtgaggattaaatgagattatatagtctctagcatacagatggaaaacagtaggcatgcagttaattgtcatagtattcatcctttttgtatcttattagtatcttttaccaaatgaaaccttcaccaaatgaatgcctcgtgacttctagattctggcagcattcctccaccacccatctccttccaccttccctgtgtctagtcagccaactactctgtagcccgttcaaagcagaatcaaattcactatcctttt

SEQ ID NO: 711776 - DNA, 725 bp, Homo sapiens
agctattcaaaaaaacatgtcatgaggaatgtaatcattaatatgaggaatttatcacttatgtataatttgattagcaaagccaagctgagtttcaaacagtacaaaatgattttgggttttgaggacagcaagacttgtgagaggattttgactagaaaatatytgatacatatttaagtatccaaaattattattcagttttctttatcaggatttacaacacattaaaaatatttctaacctccaaagtaaaatgggagaaatttcagagatatggcagtttgtactataagcagatggtgtaggataaaggctcatttgtgtgtatctgatgatcttggacctacagtcacctccaaacaatgtgtttgaccttggagagtgatttggcctcccagaacctcgtgttactctcatgttacctgaaaggatagaatgagatcagattatttagcacacatttgtttctggggcacctactcattgtccagagatcttgttaggtgctagagaaatgcaacagtatagacacatagtcttcatggtttgctatcctcacagtcctcacaaggtgtatagttgtatagtttacctcaatcctgtagtctggggaaacttctcctgccactgtggatagagacattcctttaggtttccctacgtaagccatggccaatggaaagcaataaagaagaaaaatgggctggttgaaaagttagaca

SEQ ID NO: 711777 - DNA, 865 bp, Homo sapiens
cttcattcatgcaaatgagtcagcaggaagaattcagatctgtcctggcctatggtttaacatctgctttataaaggaagaaatcttttgaggaactggtcacaggtatgactttctaaataatttggtgccccatcaagtggagtatatggattcaaccttgttttctaaaattgtgaagtttcaaataatttttaattgttattaaagtgattcacatgcatagtgaaaaataaaaacctccttgaaaaaagaacattatttttattatgaattattcattaggagtattattaaaatagtaagtgttccataggcttctaccacaactttccatgcaaattttgtcaggattttttttttcttgaattttcattaatcagaagacagctctctagaattaatctttaatttcattatcttttaatctattcatccctttgacttwttatttttaaatttgagaatctcaagtttatctttaaaacctatttttatgtatatactctcatatttataatttctcagagctttttttcttttggatattcatcagcatccttttctatttttatgaatacactgttatcttatttttttgttacctgcactgctcgtttcctctgtatttcctctctctctgtgtgtttttttgttttgttaggtctgtcttgtattttgaaagcttccttcaaatatcttatgatatcagctttaaatttgcattcaagactaaatcatgaataggccaacttgatgttctgcatgagtagtggcagaatcagcaatatggagtgataaggctaaaagctgtttttttcttgttttaattaagactagtatgaatgagtgtggtcttgttctg

SEQ ID NO: 711778 - DNA, 865 bp, Homo sapiens
cttcattcatgcaaatgagtcagcaggaagaattcagatctgtcctggcctatggtttaacatctgctttataaaggaagaaatcttttgaggaactggtcacaggtatgactttctaaataatttggtgccccatcaagtggagtatatggattcaaccttgttttctaaaattgtgaagtttcaaataatttttaattgttattaaagtgattcacatgcatagtgaaaaataaaaacctccttgaaaaaagaacattatttttattatgaattattcattaggagtattattaaaatagtaagtgttccataggcttctaccacaactttccatgcaaattttgtcaggattttttttttcttgaattttcattaatcagaagacagctctctagaattaatctttaatttcattatcttttaatctattcatccctttgacttattatttttaaatttgagaatctcaagtttatctttaaaacctatttttatgtatatactctcatatttataatttctcagagctttttttcttttggatattcatcagcatccttttctatttttatgaatacactgytatcttatttttttgttacctgcactgctcgtttcctctgtatttcctctctctctgtgtgtttttttgttttgttaggtctgtcttgtattttgaaagcttccttcaaatatcttatgatatcagctttaaatttgcattcaagactaaatcatgaataggccaacttgatgttctgcatgagtagtggcagaatcagcaatatggagtgataaggctaaaagctgtttttttcttgttttaattaagactagtatgaatgagtgtggtcttgttctg

SEQ ID NO: 711779 - DNA, 865 bp, Homo sapiens
cttcattcatgcaaatgagtcagcaggaagaattcagatctgtcctggcctatggtttaacatctgctttataaaggaagaaatcttttgaggaactggtcacaggtatgactttctaaataatttggtgccccatcaagtggagtatatggattcaaccttgttttctaaaattgtgaagtttcaaataatttttaattgttattaaagtgattcacatgcatagtgaaaaataaaaacctccttgaaaaaagaacattatttttattatgaattattcattaggagtattattaaaatagtaagtgttccataggcttctaccacaactttccatgcaaattttgtcaggattttttttttcttgaattttcattaatcagaagacagctctctagaattaatctttaatttcattatcttttaatctattcatccctttgacttattatttttaaatttgagaatctcaagtttatctttaaaacctatttttatgtatatactctcatatttataatttctcagagctttttttcttttggatattcatcagcatccttttctatttttatgaatacactgttatcttatttttttgttacctgcactgctcgtttcctctgtatttcctctctctctstgtgtttttttgttttgttaggtctgtcttgtattttgaaagcttccttcaaatatcttatgatatcagctttaaatttgcattcaagactaaatcatgaataggccaacttgatgttctgcatgagtagtggcagaatcagcaatatggagtgataaggctaaaagctgtttttttcttgttttaattaagactagtatgaatgagtgtggtcttgttctg

SEQ ID NO: 711780 - DNA, 606 bp, Homo sapiens
gatattacctcatctttgtgcttttctaaatgatagaatcaaatgcagatctgtttccagatactcacttataatatggaaatacctattagtagtactaaataagataatagtgctcagttaagaacgatcgcgtcagatgggtgaagtttgcttctggaagccattccaattagctaattcatgaccaagcattcagatcctttatttccyttccaaaatctattgttttcaaaatctattgttccagtgaatgaattagcattaaattgtcctgtcttgtatgacagttaccaataatatacatgttgcgaaatctaacggacacttctacaccctcctatctgttatagcagcagcagtcaatagtgataggcattccctttcagaagctcttatcactcttgcttccatgacactagatttttttgagtttttatcctatctccatggctgcatgttctacatctcctcttcttgcaccacttttgcaataatgtatatatagatatattgctatgtcacaggcagaaacattgccgcatgtatcaatattgaaatgaacaaatatataaacaaaactagtcttcaatgcagaggagtgat

SEQ ID NO: 711781 - DNA, 606 bp, Homo sapiens
gatattacctcatctttgtgcttttctaaatgatagaatcaaatgcagatctgtttccagatactcacttataatatggaaatacctattagtagtactaaataagataatagtgctcagttaagaacgatcgcgtcagatgggtgaagtttgcttctggaagccattccaattagctaattcatgaccaagcattcagatcctttatttcctttccaaaatctattgttttcaaaatctattgttccagtgaatgaattagcattaaattgtcctgtcttgtatgacagttaccaataatatacatgttgcgaaatctaacggacacttctacaccctcctatctgttatagcagcagcagtcaatagtgataggcattccctttcagaagctcttatcactcttgcttccatgacactagatttttttgagtttttatcctatctccatggctgcatgttctacatctcctcttcttgcascacttttgcaataatgtatatatagatatattgctatgtcacaggcagaaacattgccgcatgtatcaatattgaaatgaacaaatatataaacaaaactagtcttcaatgcagaggagtgat

SEQ ID NO: 711782 - DNA, 578 bp, Homo sapiens
ccagatggaaaatggtgccaacatttttttaaaatgcttttgattaaagatcagatccagagcactcacaggagaatgacagtctaaagatgaagctaaggatgtgactatcaaaacttctgtaaatatcttagaaagatcaacttcatgccccaggatactttcattcatacaaagtgttccttataaacattaatggtatgtctcacagatcctctgaataaaacaataatgcttctagaaagctttagagcttttttgtttgtttgtttcaatagagattgagtctrgctctgtctcaggtatctcagccaaggctcgagagagagagaagagcttatcttgtgatttgcaagtggggcatttgtctaaggaagtcaaccccaagatgatttataggagatctgcacagttcttaaaagagttatgtatgcaggaataccaccaccttagacccgaggaaacagacagtacagcattagcagtgacctttggacctgctaaggaaggagactgtgatagctgtttagccataagcacatgctatcctatacaacaaggaaggaagacacagaggg

SEQ ID NO: 711783 - DNA, 578 bp, Homo sapiens
ccagatggaaaatggtgccaacatttttttaaaatgcttttgattaaagatcagatccagagcactcacaggagaatgacagtctaaagatgaagctaaggatgtgactatcaaaacttctgtaaatatcttagaaagatcaacttcatgccccaggatactttcattcatacaaagtgttccttataaacattaatggtatgtctcacagatcctctgaataaaacaataatgcttctagaaagctttagagcttttttgtttgtttgtttcaatagagattgagtctggctctgtctcaggtatctcagccaaggctcgagagagagagaagagcttatcttgtgatttgcaagtggggcatttgtctaaggaagtcaaccccaagatgatttataggagatctgcacagttcttaaaagagttatgtatgcaggaataccaccaccttagacccgaggaaacagacagtacagcattagcagtgacytttggacctgctaaggaaggagactgtgatagctgtttagccataagcacatgctatcctatacaacaaggaaggaagacacagaggg

SEQ ID NO: 711784 - DNA, 1373 bp, Homo sapiens
attacaaaatttaataatagaactgttccatatgcagaaaggaccaagacaaaggaatgggaaggctagggaataacattaacatccacacactgtatactgtgctctctgcttgatgctttgcccacagtgataatttcttcatatagtgcaatgtagtttgtaagctggttttaaatccatgagatctcaagtactctctgccttataggacagatgtagatacggttttggtctttctgtttttacagttttataagagtacaagtgatgctgttttatttgaagcctgagagcttctggttccataaccagaaattgctacctggctcttctaatggaatggagggcttttccattcttagaccatccaactctgaacttgctccgaatctcaaacctttctrttcacagaacaaacgctcaagggctttcaagagtgtttctgtagattaggcttattagcatcaacttcatgacttctaaaatgtgactgctttcatgtccagatagcttgaatacaggtatctaccagtgatatggggtggagaattaataatgcttggttacataaagtcagtgttgcttatttttcaaaactttttttttttttttttttttaccaattatgttattcccttctccccaagaagtgggcagaaaagctttgttaacctccttttacagatgaggaaaaacaagatcagaggtgctaagtgctgtagcctagtgccaggtcttctggccccaattctgggttctccccaagcccatgtttcttcccctttctcacaatctttacttcttcctctgaccctcaccaccacccaaagtacttttaattccagaaaagaaacccagctgcacactggcacacctgaccttcatgcagtcagaagctttggatgattccccatccaaaatattagagatgaaatgaaagcaaagtaggcatctgacaaaagttgctttttcccttctgcattttaggacctcaagtaatgtttatccagaaactgctatcataccagggattcattgtgtatttaacaacataggcatacaatctggcaaatttgaaaaactcttaacatacaccccaaatccctgcccaaatttaagaactagggtggacacagtgcgtttttccatgtcgcatcttctgtgatggggctacgatacgtgggagcagagaatggggagggtggagcgcatgccagatgaggatctatcagcaatgggacggggcctccactttagcatctccaccctgctcctctcagaggaccgcctttcattgcattcagctgtgatggtagcacgaacacaggtgcaccgaggacgaggagagcaggagccttgtgctctctctg

SEQ ID NO: 711785 - DNA, 1189 bp, Homo sapiens
agtgttttaggtctctcactaatttcccctgcaacttcaggggtgaagaacatgacctgagctgagccatctggcacattccactgctgaccatagggattgagctgatggcgatcctacaatcctcctacagcaagccatcctactgcagccagaaacctgtagtgtccattccagaggcatggttccacccaaagctaatgtcctcagagacattaaaaggaagagatgagttcataagggaccctggacaggcaaaagcagcaaatgtccactccagcgtgttggccagtccatgcggagtgagcatcaagacagtgctggagcaagccccttccttcggtaaggaaggatacagccactgacagccaccaggcaagtgtgaaaggcgacattcctgaggcaggccaaccctgaaagaatggagccaaggcactgagagaaactgggtcctttatcatttcagccccgtattaaatggtacatgaaaccccacattgtgtcagttaaatggacctataagccaccatcattgtttaagctacttgaatgttttgttactagtgaaggtatgtctgttctacaggtgtctgacacctatctgaaaagccagcaacttgtagtctccgttctagaaggagtggctccacccacagctaatgtcctaagagaagctaaaaggaagagatgcattcttttacccaaaaggaccctgggcaggcaaaaayagcagatgtccactcaaacatgtccgaccgactaatttttatgttgtgtctaccagaaaaaaaatgctgagccagaaatgagccacatttttatcactgctgctctaaactcggggaatatttcctccagtggtgagacttgtcattgttttcttcagagataatattgtcctaggagctggcttttcagcatcttcaaagttctctctagtagtaatgaaggacacaaatattgttgtatattcatattgaaattgagtgcctctttaatggtgcatcatgataacaagatggacccggagagcaagctgaggaagagcagagatccctttgctgggtcatatcacttagaccaagtatgcaatgatggagagtaaaagctggaaatttctagcatgaacaactataatgggatgaagtcttagcattagtcatctacccatttcaaagctgtttccatc

SEQ ID NO: 711786 - DNA, 801 bp, Homo sapiens
tctcagaatcccagttgagaagagggtcattcaattgtttactgctattgttgttactattcacagaaatcaatgaaaattttatgtctgttcgtgggtattctaaaagatttttcactcaactcaatcacaactttaaaatcgttgtgtatggcatatgtattaggtaaagataaaagtataggtagtattatgtatattaaataagcaaccactgatctattgttggcttagctgcatgtaactcaatgaatcaacattttaattaaaatgatttaccttaacgaagtctctatcagtcttctctttccattcttctccaaatacagtggaaaaggatcctaaagctaaaaaacaaataaataaatagtacattcaataaaatgyaataaattctttcaattaattatttaataataggcttggaaaaacaacaaaactacatcttaatatatcttgtgtactaaaaattattttatagtaaatgatagtcatgataatttcttttgaaatacattgtttttagatttaaagaaaatttgtgttcctacaaattaataatatagactctttttcataataattatacagataataaagaagtgaagagtacttaagagttactccacactggctttcatttatacagaagaaaaatcttaaaaaagcaaactgaggttattgctattaaatttccaggttatcatttaaaatcttcatattaatttcagaaatacttgcataattcacacttcaaaaaacatagagagcaaggcactccatggaaataattcccacaat

SEQ ID NO: 711787 - DNA, 1304 bp, Homo sapiens
tttaaatctactctcttttttaaaaaaaacttactagtgtccctccttcatcctcaaatttttcccttaattctctataacttttatattaactttttatacctcccctttactggtcatttaacagttactgaggaaacagcaagttttatcttgtactagaattgttctcccacaactggcccacaaaatatttgttcttcaaaatcttaatagatactgtaccataaaaggattccataccaattaactctgagaaatatgggtttaaacaggttcctttagctaagagcacttaaagtatgttaatgtgcattgtgaatctataggatacaataagcagcttttgtcagattcacaaatccttccttaaactcccacctacaaacctatccatatcttacaggcagttggtgaaatacagcccygggaaattcagtcagcaacaatcacttccatttttaaaagcctgaaaagcagagttatggtgaagcccttcaaaccaatccaagtaaagtacttccaagaaaaattataacagaaaagtggaggttcctcaacttggcgaaaatatatccattactcttgtaagacttggtacttaccggaaggctagcaagtaatgaccaatgataatctgacctttattccaaaacataatcaacatgttatattttaagggtttagttatactaggcaagtactgagtactcaattgataaaatttgatgtgcctggccaatgccctcatttcaatgggccacaaggaaattaattctgtcaacaatcactgagtgagtttgaaagcagactcctccctagtcaaactttgagatgactgaaacccaggccaaccattgactgcagtcttgattgcaacagattgacagtgacagactcttagctagagtctaagctagaactaaattgtgcccagattcagaactcacagaaactttaagataataaatgtttgttgttttaagtgctgggtttgagggtaatttgtaatgcagccataaataagtagtatgatttctttcagctctgtttttatgggagtgggggatttagtgagattgaaaactacttcataagtaattttaaaaacaaatattactcttaaaagtaaatgctatatttttctttaattttggaggccaattttaacagctaagcaaagaaaataatttcagccgggcgcagtggctcacgcctgtaatcccagcactttgggaggctaaggcaggtggatcgcctgaggtcaggagttcgagaacagcctggccaacatagtgaaaccc

SEQ ID NO: 711788 - DNA, 2217 bp, Homo sapiens
ctagcctgaaattcttcttatttcagttttaaacactctactctctcctggttctgcctttacctctctgacacattcattcattattcattcattcatcaaatatttctgaaatatctatttaatcttaggagttaaaagaaatctaacacctgccttgtgtaagcttatggcctagtggggaaactactccccacatgaattattaatataaacaaagtcaccttcactttctccttcatttccagctacccctcaaatgctgatgattccagggttccttggtttccagcccttcagcctgaaacctaatcatcacccatattgcaaaaaaaattcaccgtgttaaaaacaaatataatcatgctattctttgcttaaaaatctgcagggaacatttatcaccagaacatcaataccactgcaagtatggcccacagaccatcccaagtccaataattactagacattaaatatttgttactaatccatgatgaggtaagtatagaaactgagtgttttatagcaattgtatagaactgatatggtttgcctccatgtccccacccaaatctcatcttgtagctcccataatttccacgtgttgtaggagggacccggtgggagatgactgaatcatgggggcaggtctttcctgtgctgttctcgtgatagtgaatggatctcatgagatctgacagtttttaaaacgggaatttctccacacaagctctctctttccctgctgccatccacgtaagatgtgacttgctcctccttgccttcagccatgactgtgaggcctccccagccatgtggaactgtaagtccaattaaacctctttcttttgtaaattgcccagtctcgggtatgtctttatcagcagcatgaaaacagacaaatacaagaatcactttatgttggttcaacctaaataaaaacttgggactttatttcatttatctttatttcatttttctatgattattttttattgtattttataaaactattaatccatcatggtctgtaaaattttaaaatatatataaacaaccctgatcctacaccatagtctaaatagtgaaataaaggtaaagcattttcacacagtatacaaagccttcaaattctggccctagatttttctagttccttgtaatttttgtaaacgtactgtaaattttatttcttctgcatggaacaattatcccttcttgctcaactaggaaattgagaatttagtcacagccaatgctctgttcccaataatttttggcacatgtatgttactagactgtaatattttcagtaactatttgtctatatttatctctttttgcaggacaaagactaagctatacacaactggtacctataggacctgtcacagtgtcaaacaataatgggaattcaataaatgcttgataaatgttattaacaagctggcaccttagacagattaattgtatcccaaaactaacccactttccccttcagtgagctctttcctccctttgccaactttctgttccttaggactgccaatacgtaagaccccaagttgctccattttgggtacgcaagacagagtgcatctaaccatctacatggcattaaaatacgagacagaaatgagaagttcactctacacagaaaatatgcaaaaacattttcattatccatgtaattttgtaatttatctcaaaagaaaccagaaacacttcttgatataactaaaaagcatttataaactctttccattttcataagaatgccaaatgctccaggtttttaaattatccccaacaattacagtttgctctggaggactttttattttaaaaacatcaaaactgataatttgttaaagcattttataaggacactttaattaacaaatcccaaaatgctctgggatcatttactcattaatccataaaagaaccttctggctgacaaaaatcatggattcttattttamaggaagaaaggagaaaacaaaacactttatataaagctacaaaatcagtttgctaacataaccagaataaaccttccctgttggtatctatagtatttgtgagataataaatttctcccacaagtgcatatcatttttatagtaataaaaattgaggattcaagagaccgtggcagacacaaggcaagactagattgtagctctggacagagcagcatgcaggggcttgcat

SEQ ID NO: 711789 - DNA, 596 bp, Homo sapiens
gttttctgcttaaaaccatgtaatagtttctcaccacctcagtcagaaaaaaaagtccacctccttaccatgactttcaaagcttaacatgatctggccacctacagtctctctaacctgtatctcctacttccctctctcatttattccactccagcaacaccagtctcgttgctattcttcctacacatcagacatatttccatctttgggcctttaaatctctgttccctatgactactgcgctcttcactcaaatacacagaaattcactcttccaytaactacaagtccttacataaagtccttacactttttcaacagaattggcctgtgcattccaagccaccaacccacctgtcactcaaaattgccactaccctgccatagggtaactttctgatacactgtattattttttaatttgcttatcatttttataatttattgtttccctccctacccaaatgaaagttccatgcaggtaggtgtttttatttgttttgttcactaacagatagatgaattaatcatagaccaaagtaatttgttttatatgaaatgaataactaattcaagtctctcattctgaagga

SEQ ID NO: 711790 - DNA, 659 bp, Homo sapiens
tgagacttgcattaaactatagcctcttacacagcacacmcccgcttcacttacacagtggtacgctgttgctaatggagacagcttgtaggcttcccaactagatttcttatgggttctgctgattcattaggaatagacatttctgtataatatatggcctttgttgtaatttatgaaaataacattttaagtttcagaaaaaggctgatgatctaaaatgaccaagaagccaccacaacttagtagaaaacacaaaaaagtaggtgtcttacctattgaatttaattttatttgggatagtttctgttggaattagacttttgttctcatgtgcacgtaagtgggaggtttcattatggagagtgacattaaaataaaggagtgcaacctctgtataatcttgatgtgttaacccatgttttatgaactcaaacttataaattgcatttgttcaatcttgtataggcatgagggtgcatttaatacctcttccacaactgattaattctcttggaagttttttatgtaaagatagacatatgactgaggcatgaatttaatatttggctggaacatagcatcgcaaattccatactggctgtcatcatttattctcagttattatacacccagtaatgctctggcgttttcattta

SEQ ID NO: 711791 - DNA, 2777 bp, Homo sapiens
taattttagtcttttctctttcagatatatcctatcaaggctacttattttatgggattcctaaattctcaactattggatttggtaaacattgctacattataatttaaaatggaatattactccatggaaatttgagaaaatcctgtttttcccactcaaagttactttttaaatggatctctaatttctttttctgtcttattttattatcattatttttaaaatcttacactaatcaccaggatatatcttatccttgatacttcaggaatgagaatatacactgactacagattatctttttaggaaaccatcatttgtttcaccttcaattttgtatttgtctcttttgttgccctgtccgtaggaaagcaaatgccaaggtgtccacctttcgtctctctcatgtttattctactccttgaccatttgcttctcttttctaccccttacacctgggtctaacaaggtcatctttcatgttcctgactttatttgcatcaacatctattttccatttcattttgtccaatgtccctttcatttctgtactggagttatttttctcttctgctttgtttctcagctctgctgggcccattttcctctcctcctgcctgagtttgtaaaatttctgtttctctgagcctttgattctgagatgcatcatttctcaccctgggaatggaattgcccagcaccttttctttcctgagttttccttctgtgttatttgtttttttaaaaaatgatatttgttacctgcccttttcttatcatatccactcataggcctgaagtcaggattttaagtcctctctatctgagccaaaaarttacctagcaaaaagatgtgaggatgagtggagaaggggattgggcagagaagccacgtgacgacagtgggcagtgggtgtggagttagatgtcagagcaaagcttcactctcccctgatgagtgtggccccaatggaggctcaggtacttaacagtgacaatttcattagtgtgttttccttcagatgactctagttatcagctgaaaagatgattgtctgcaatatttctacgaccctccaaaacaggcatctgcttctgccctctgagctctcactgtccctgcaggctgcacaagcgtaggctaagggagaggctgtcagttgggccttcaaatcccggcagaaatgtgtgtgctgcaagagaagattgataccctagccaccattctgggccacattttaccaattttttagctattctttatagcctgggacctatggttttggcccctgaagatggactttcatctctaagttatgtctttcattgttctcaagggaatattagaaaagaaaaaggctttcttttttcctcctttaactggaaaactgtactattttataatcaataaaaataggacatatgtgcaatagaaattcttgaaaacattaatcatagatcagaaattgttgttacatttttggactgttagagaaacgcattctatgggctggcaagtagacattataggaaggacagacttttattattcaaatgttgtagttaatctgactcccttctccattagccttatatttagttgtcattctaagaagattatatgtatatgtttataggtatgtccactttaatttatatattcctagattttatagacattatgctaattgctttataaacattaccttccctctccatagctaggtatttttacctccaaactcccattcactgataaaagaaaagctaagtaattgctcatgcagcaaaatatgggcaaactgggtttaacttccattttctctattgtataattttatcttcttttgcatttatgtgttctatactgaaaagttgatgaggctgtattggggctgttgatcagatggcaccataatccaaaagttaatttttattttatattaagaaatttaattttattatttctagaaatatacagggaagatggcaacacagttaccttatatagagaaaactaaaaaagaaagattaaagagagagagaaagtgagagagagaggaggctaagaacaacataagagtaaaaggtctaaaattttggcaaccttaattaatattaggaacacagtgtgtctattccctccaattcgctttcactaaacatcatttgagatgtttaaccccagaggtaattatctaacttaactgctcctgacaggaggaactctaggcaaatgagttcggaccatattcctctaagccagttacatctaaattccgctcagagcagctctacctcctccctatgtttccaaatatctacataagttccgggactctgctcttctttagcaaccaggagacaagagttgctcctgcaaacagattgtgagaataacaaagagcaaattgtgacaacattagcgtatggtgaaacctgatgttatatgaagtctccaaaaaataaaaataaataaaaatgaaaacctctttttcaaacacacacccttgacagataaaataaaacttgaaaaagtaacagaattcataacagtgagcacttatacagtatttattcagttgtttaaatgattttacttggagttactcattctgttctccccataaccccatgagataggtcttgtgaatatccctaattgtacaaagaaggaaacggagatctatcagtgcacagctgagattagagctcagggctctgactacagacgccacaatgttccattttccctacctaactaggcagaggtg

SEQ ID NO: 711792 - DNA, 1192 bp, Homo sapiens
agaggtgtctacaactactgcttctgtgttcccacacttcactgcaggaagtgcttcctactgtccagcttcaaccccagccccctctgtgatgaccccctgctacaaagaggactgaatttgcctctgttccttgcccagggaagacacagcaggcctcagccagcyatggcctctgatgcaccacagagcccagcactcaccctgctccctggagatctcaggcttgtaccaatacttagaagtgtcctggacaaacttcactttagcccgcgtctccgggctgttgtctaaagcaggagaagggaagaaagtgttatgggttaaattgtgttcacccaaaacatacatcaaagtcctggcccccagtgcttgtgaatttgaccttatttggaaatagggtctttgcagatgtagacaaattaagatgaggtcacacaggattagggtgagccttaatccagtatgcctgtatgcctggtgtccttacaaggagaggagacagagatacacacaggggagagcaccatggaaggtgcaggcagagactggggtgatgcgtctacatgccaagggacaccaaggatgctggcagccacaagaaactgggagagaggcctgggacagattctcccctagaacatcaggaaggagccaaccttgccaacaccttgattttggacttctagcctccagaactgtgagagaacatatttctgtcatttataagccactaagcacatggtcctttgttatggcagccccaggaaactgacatcaaaagctgatgtcctcgaacaccatgcgaacacagtggaagggaccttcggcctcctcatccatcccctatcccctgcccgccatctgggtggctgagccacctcctggtggagggcctggcactgcattcccacagagcccactgaaagccttcctccaccccgtgtccccctttccctagaagactgtgactaaagccttcctacagcttttctcccatggcctaaaacacttgcttctagaacctttctccacaggttcagtttctcaacttcagcatacccaccatgaagatgagggcagaaagatccatttcttcccccttttccccaggcctctcctcactttccacagggaaggcctatgttctgcatcacatagaacaaaaaaaaaatcacttctctttggatca

SEQ ID NO: 711793 - DNA, 1168 bp, Homo sapiens
gtgaggattcgagagtgtgtgtgcagctttgctgagtgatagcactcaggagctaaggctcttaagctagacctggcatatccaagcactctctacttttcctctctccatcccctgctttacatttcaacagctctcatcacccacagggtaaagcccaacccccacgctggaaatgtcagaccttttcccaacaggcctctgcctaccttctgaagcctcacttccttgtcctccatacccagaacaccctccactctactcctactcaactcttcatatgctctttcccctctgtgcatgctgttccttccgtgcaatgcccttcctcatcctgccygtgaaactcccaacctcctgggcaaatgctttcagactcagttcaaacttccctgggaaatttcccttaatctaacttcttccctactgtcctccagactcaggtaaacctctacggtgctcctgttgtcccttgtagacatctctactgtgacaacagtcacccacagaatggtcattactgatgtccatgtctgtcttcccactttgctgagagcttgttgaggaagagcctttatctctctctctctctctctctctccctctccctagggccggttcccagacggtgccatccacaatgtggtctgtgtgaatgatgcctcttgaagttcaatatgtaacctgcatggctgtacagaatggccctagagaagagtgcttgttccataaatgcttcttgccttacaccgagtagccgagaaagctttatgtagttctgtcagccattgagatactcttctttcaccaccacccagtgaaaaatcaggggttctaggtggaccccgagtttctccccaaaggtgagggaagagagtcagtgcagccgaaacatgaagacatgtattcctcatattctgcagcaaaggctgagcatggtggaggtccctgagccagagcctaccccatggcatcccctacagacctctccagctacactccagcccagtggacattaacttccctagacccaggacccctgggagatctggtgaaataagggagttgatgaacaccccaaaaaccatctgtggatcccaagatacaacatatgcatcgaaaagttagggtgctgtctctggggatcctctctgtcacccatgacttg

SEQ ID NO: 711794 - DNA, 1154 bp, Homo sapiens
ggatcccttggcctgaaatttttgagtgaggttagggttttgcatttctgaatcgaagcaactattgattagcctggaatcccgacctaaagcaaaggaaatcacaagtatgaaggcgtcgtcagtcggataaacactagtactctgcatgtgtaaagccactctcgtctcctgaaaaaaggccatgtccaacgtcagtaaaacaagaataggaggaaaaggcacaggggaaaggtacaaggaaatctctgagagctttgttcttgtttaaagatgtttggcaaagtcatgaggcgttaaagggtaaagacgagggtttgtgcattcaattcaaggcttctttacatgcctttacgtgccaatgagaagaaatagatattaaaccagacttgaacccagctctcgagttgatagccaggtacatggttattctaacatccgcaaaactgagacaagttctgtggtagtatatgccttaaaaaaaaaaagaaacgagcgggggactccgggatgattttgttgtyctagaacagtgaccacagcctcacactctgcaggaaaagactgggtcgcaaacaagtcagaggcaaacccagaaagggaactgggggccctaatcctataaacggaattaagggtgtaaacggagagcgatgcctgggagtggggtaccttgcagagcataccgggggttgtagtcggggacattccacagcaccgcccccgcccggactcccggcgctccaggtggagacagcagcttgaccccgcctcccgcgagcgaccctacatgaatatgaggctagcgcccccttttctgagccttagagtttccaagagcaacggggagagagaggggggcttcgcagttaccctggagacgcgctctcgcccgcccccagccgcgggatgccctagatgtccttattaggacaagagactcgagggggcggggccagcccgacagccggcttgaggctccttataaggccgcggcgggcgggaggcgggagccggagcccattggtccaatttagcttggctggggctactgcgccgtgggctaggcacagtcctgaggggcgggactggagctctggcgcccacctctcccttcctcgcaggctggagacctgcgtgttgcgacttccggc

SEQ ID NO: 711795 - DNA, 652 bp, Homo sapiens
tcctcgcaccagcgtcccccgcccggtttccgcctccgcccgaagtgggggcgtgtccttggggcggagtatgggcggggctggctcccaggaagggcgtggcctctgtttgcccacgtctttgggcggggccaggcgggaaagcactgcgtgtccggggatcccccgcctggggcccgcccttyctttccccttgccatccctgcttatccccgcagtcgccctccacgtgaccccggggagggagtctgccgaggaggggacgtgctggtgggtcccgcggcgagcgcctggggctcaggtgaactgcgcagtgcccgctcctcgccactctgccaccaccatccctcccagctgctggggcagaaggttaaataatagctctttaggggccggacgcggtggctcaagcctgtaatcccagcactttgagaggccgaggcaggtggatcacctgaggtcaggagttcgagaccagtctggacaacatggtgaaaccccgtctctactaaaaatataaaaattagccaggcgtggtggcgcgtgcctgtagtcgcagctactcaggagcctgaggcaggagaatcacctgaactcgggaggtggaggttgcagagagcccagatcacactgctgcactccatgggtgaca

SEQ ID NO: 711796 - DNA, 903 bp, Homo sapiens
cgcttaaaaaggcccaagttttaccccaggtaaggggccctcatcagcttctggccagtgtgttccgggaagatcagatgccttccatggccccggaaggtagtcatgcgctccagacccagtggcaaggcctcctgtccactcatggacgtcttgaaaactggcgtgccacacagaccatctggtccrttaagacaattccccaaacttctgcttgtgcactgagtcacgcattctcttttcaccggacttagctctgtcggaagggaactatacagctgccaatcatcagcaactagggaaactgagtcagaacaacagagaagcaagccaagtcacccacgctggggagaaaacgatagaatatcacagcatgtcgaccctggatcaagccacgcttgaacctggagctgcccctggattcagagtcatagagaaggatatgctttctttttacaactatttccttgacatatgaaaaaacacagaggaggaaggcaagatctaacaatagaagagctcaattactctgacttcctaacaagagaaagcactttccagacacgtggcactcatgtagtcacatactagttttcaaaggttaaagtcatggtgagagcctaagggtctcacatactccctggatggcaaactggacatcccaggaaaggtcccaacacacactgtcttggggatgggccctctctaagcttattttgaacactgaagattttcctcttctggccacagaacacagagagctctgaagatcagccgcctcccaggctcccacgctgagaaaatgtttggtccgcccaccaccttgcaaagataaattatcaacatctaaatgttttaagtatctctatggtacttttcaaatgtatttgcgtggcaataata

SEQ ID NO: 711797 - DNA, 933 bp, Homo sapiens
tttgggaggccgaggcgggcggatcacgaggtcaggagatcaagaccatcctggctaacacggtgaaaccccgtctctactaaaaatacaaaaaaattagccagatgtggtggcgggggcctgtagtcccagctactcaggaggctgaggcaggagaatggcgtgaacctgggaggtggagcttgagtgagctgagatcatgccactgcactccagcctgggtgacagagaaagactccgtctcaaaatagtaataattaataataataataattagctaggcacagtgtgtgcacctgtggtctcagctacttgagaggctgaggaaggaggactgcttgagcccaggaggtagaggctgcagtgaactatgatcacgctgccgtaagccagcctgggtgacagagcaaaaccttgtctcaaaaaagaaaaagactcaggacccatccatgaaccccatttccatttccactgaacctgaggaatccccatcctcgctcttttacaggctcccaaaatggggttttgtgtcagcatgacatccttgggcacatatccaatctcccttcgtggattttgaggcaaagattggcgcttctgttgcttcccgtgagggatcttggctaactggagttggaaatcaatagcacygggagtcctaaagggagttaaaggttctagatttgagggccaagaaataaatggggaaaaaactattaaaatattacattattttgagctgaagttcatacctgcattaattctaacctaatcttcgttgatgtttcacacgactgctcttacaaaacctggttggcttgggctgatttgttgagatgcccagaggaatttattctactttccctcttaaaaccccaatgctaaacacgtgggactcctgaccctcccgaggttgacttggaagctgcaacc

SEQ ID NO: 711798 - DNA, 676 bp, Homo sapiens
gcattggagggagctcagatgctcccctgggctcttcatctgggggcagctctcagggtgcagggggctcagactgggctctctgcactgccacacacctgcccggtgacttgggacaaagcatttggctttctcagctggtttcctgtggtgcactaaggagataatgacacctacctttgcagatgttggggctcagagcatgataccccaaggtacaygccttggctgtggtgttctttgagttgcaggatgctgaaaggctctgacgctaggctgtggtctctcattctcctctctcactcctcagcctcccctaaagcagtcgtagaaactggaattcctatgcccctaggccggtcctagaaactagaggccccctccccaaaagcaagccaaaaagcctggaaaggtcactctctcccttctcccttcaagacactcattccagaagggtcctgtcccgtagacagaaggaagaaactgtaggggccaagggaaaaccccctttttaccctctgaaggtttgctaaaagtctactggtgaaaggacgattaataagagtaaaggcacgcagataggaacatgcacggggtgaggaagtggccgcctcaccatgtgatgggacagacgctgatacacccgcccttttaggggaaagggagatggggcgtg

SEQ ID NO: 711799 - DNA, 2483 bp, Homo sapiens
cctacaaaatgaagttaagccattagaaattgggagtgtagacctcattcatggtacctggggtttgaggacctctctgtgccatagaccttgtccctgagagagctccagaggatggaattacaaaacttctcagttcagtgtcatcaaggaattcatagttcagagctaaaaaccaatttcatcgtttttgctcctatttcttacccgtgaatttctccaactgtttattaaaattaaaaaccaaactgaactactattttttagaaaggcaacaatcttcctatggtatttggcaataagctggaagaatctcactgaagaatgtataagatgtcttcaagattggagtgaatggcatctgttttgctgctcaatcatcctaaaaccagtgattctgtagtttcattatccatcttaatttcaaatgaatgataaccgcagaccttgggaggaggcatcagttactttgcttcttttctaaattggagcagtcaaagcaatctcaaaaacaatttcaacaattcatcccgtcttctccccaaatctattcaagtttcagccctgattgctgcatgagtaaatgaaataatttgtttacctctcaagaaatattccatacattacagttaggacacctacataatgacaatgggcctgtttgtgaaatacctcatatcaagggaaacctagaaatatgcatcattttatagcttaatattccatattttctgtcatgcatttccttaagaactgcagaggaatgcatgtaatttagttactagcacattctggctcaatggtaatgtgtcttgctttacataatatatatgctgctaaaatatatatgtaaattatctcacttttggtaaacttggtcttgattttatatttaattgtatggaatttcagaaattatagctcttcattttaaataattttttagttgctaaatactgcagagctaattcaagatatttaattcattgactatttaattgtctaatatgtgcacagtattgtgctagagaaattagacaagtgctggccttgagaaatagatgcatcagaggtagaattatagaataacacacacagacacacacacgtactcatgtctttttaacaaaaactatttttcatcataattgcagcttagcacagtggttcagggtatgggctccagaggcaaacgacctgcattccaggtgctgctctgccacttactaactgtaggacattgggcaaagttatctaacatctctgtgcttcatttgcctggagtatatcataaagataatagtagaacccacatcaaggaggctccatgagaactatatttggagagaacagtgtctaggactcagtgggcactgcataaacattagctaatattgttattttcttgtctgaaaataggaataataatagtaccttttattgagacagtatctcactctgtcacccacactgcagtgcattggtgtgatcacagctcactgcagccttgacctcccaagcaatcttcccatctcagcctcccgagtagcttggattacacgtacacaccaccatggttgactattcttttttatttttagtagagacgaggtctcgcattgttgtccaggttgttctcaaactcctgagctgaagtgatcctcccacctctgcctcacaaagtgctgggattacagatgtgagccaccaagcccggccaatagtatcttctctatagggtagttgagaatattaaatgagttaaagcatttaagcttttagatgctgtcattatcaccagcattaaaaatatatcatcaaaatgtataaggaagcacagagggggtagggccggggaaatttaaatctaaagtattggcaaagttatcagaaatgaagtgaaattcaaaatggtctgaaaagaatgagtaagattttgataggcagagaagagagaggagagattttctggaaaaaaaaaaaaaaaaaggcttttctggaaagtatgagtaatggtcctgaaagataataatgcatttgggtctggagttcaaaggttggatgtggtggtttatgggcataggtataggagagatagttgaaaattaatttggggaagtgtgtaaaccagtttacaagataaatataaacaaccccattaaaaagkgagcaaaggatatgaatagacacttttcaaaagaagacatatatgcacccaacaaacatataaaaaaagctcaatatcactgatcattagagaaacacaaatcaaatccacaatgagatatcatctcacaccagtcaaaatggctattattaaaaagtcaaaaaataacagatgttgatgaggttatggagaaaaaggaacgcttatacactgttagtgggagttcagccattacggaaaacactgtggctattcctcaaagacctaaaaactgaactatcattcaacctagcaatcccattactgagtaaatact

SEQ ID NO: 711800 - DNA, 2483 bp, Homo sapiens
cctacaaaatgaagttaagccattagaaattgggagtgtagacctcattcatggtacctggggtttgaggacctctctgtgccatagaccttgtccctgagagagctccagaggatggaattacaaaacttctcagttcagtgtcatcaaggaattcatagttcagagctaaaaaccaatttcatcgtttttgctcctatttcttacccgtgaatttctccaactgtttattaaaattaaaaaccaaactgaactactattttttagaaaggcaacaatcttcctatggtatttggcaataagctggaagaatctcactgaagaatgtataagatgtcttcaagattggagtgaatggcatctgttttgctgctcaatcatcctaaaaccagtgattctgtagtttcattatccatcttaatttcaaatgaatgataaccgcagaccttgggaggaggcatcagttactttgcttcttttctaaattggagcagtcaaagcaatctcaaaaacaatttcaacaattcatcccgtcttctccccaaatctattcaagtttcagccctgattgctgcatgagtaaatgaaataatttgtttacctctcaagaaatattccatacattacagttaggacacctacataatgacaatgggcctgtttgtgaaatacctcatatcaagggaaacctagaaatatgcatcattttatagcttaatattccatattttctgtcatgcatttccttaagaactgcagaggaatgcatgtaatttagttactagcacattctggctcaatggtaatgtgtcttgctttacataatatatatgctgctaaaatatatatgtaaattatctcacttttggtaaacttggtcttgattttatatttaattgtatggaatttcagaaattatagctcttcattttaaataattttttagttgctaaatactgcagagctaattcaagatatttaattcattgactatttaattgtctaatatgtgcacagtattgtgctagagaaattagacaagtgctggccttgagaaatagatgcatcagaggtagaattatagaataacacacacagacacacacacgtactcatgtctttttaacaaaaactatttttcatcataattgcagcttagcacagtggttcagggtatgggctccagaggcaaacgacctgcattccaggtgctgctctgccacttactaactgtaggacattgggcaaagttatctaacatctctgtgcttcatttgcctggagtatatcataaagataatagtagaacccacatcaaggaggctccatgagaactatatttggagagaacagtgtctaggactcagtgggcactgcataaacattagctaatattgttattttcttgtctgaaaataggaataataatagtaccttttattgagacagtatctcactctgtcacccacactgcagtgcattggtgtgatcacagctcactgcagccttgacctcccaagcaatcttcccatctcagcctcccgagtagcttggattacacgtacacaccaccatggttgactattcttttttatttttagtagagacgaggtctcgcattgttgtccaggttgttctcaaactcctgagctgaagtgatcctcccacctctgcctcacaaagtgctgggattacagatgtgagccaccaagcccggccaatagtatcttctctatagggtagttgagaatattaaatgagttaaagcatttaagcttttagatgctgtcattatcaccagcattaaaaatatatcatcaaaatgtataaggaagcacagagggggtagggccggggaaatttaaatctaaagtattggcaaagttatcagaaatgaagtgaaattcaaaatggtctgaaaagaatgagtaagattttgataggcagagaagagagaggagagattttctggaaaaaaaaaaaaaaaaaggcttttctggaaagtatgagtaatggtcctgaaagataataatgcatttgggtctggagttcaaaggttggatgtggtggtttatgggcataggtataggagagatagttgaaaattaatttggggaagtgtgtaaaccagtttacaagataaatataaacaaccccattaaaaagggagcaaaggatatgaatagacacttttcaaaagaagacatatatgcacccaacaaacatataaaaaaagctcaatatcactgatcattagagaaacacaaatcaaakccacaatgagatatcatctcacaccagtcaaaatggctattattaaaaagtcaaaaaataacagatgttgatgaggttatggagaaaaaggaacgcttatacactgttagtgggagttcagccattacggaaaacactgtggctattcctcaaagacctaaaaactgaactatcattcaacctagcaatcccattactgagtaaatact

SEQ ID NO: 711801 - DNA, 656 bp, Homo sapiens
tagtccatggaaacaagtactccagagaagtgtggagcagtgagagagaaggataaacaggaagaatgagattcctcaagagagaacaaagcttaatttatttactgaagtggcatgggctcccatagcagagtttgcacccacctccccctcatccagtagtgctctgtcttctggtatcatatctgggtcataaaaaagtacctgatacagcccacaccccaaaccacatcctcagtctcttttctctttagaaaaggtgatcaactcattggcacaactggttgttagtattgcagtaaataagtttccagccatattctagcctgcagattcttttaacctgacacttcctgctataacctcttacttgtgtttaggataagttttgaggtaacatggcttttgatcaaastcactgctatcatcaatatttagctcagtgaccacagctatgttttgcatctatagcatggaagcaagtgaaggtagcaagggggagacaggttaaatatttggtaatcaagaaagttaagtggaattaactttatttttattaagtttgtattgtatgcccaacacttccaggaactatggaggatacataatagtgaacctcaaagaacttactatctatttgaggaactggggttgga

SEQ ID NO: 711802 - DNA, 772 bp, Homo sapiens
cgagaaaaagagagatcctatagatgtgtgcaggcgtacaggccatctttggtattctcaaattacttcaaaaggttttttttctctytttttttttttttttttttttgctaatacagtgaacaagaccttgcagtttatttttattttttcagattatgaaaaataccaagttttacctaagggatggggttatcctatgtatgcggcaaacagttgtaaccaagtacttgaaactgccagcctagagtcttgtgttgagttataatttttaaagtagagccagctctgtgataaaattaggtccatacacccggatgcttaaagggaacagagtaaagatagtatagtttgcaggactcacacaagtgaaactggcatatgggggatgtaaagaaaattaagtttgggaacttagaaagtgtgtgtagatttacagtctagagttagtgcattgacttctatttaaacgttatttagaagtttcagcgttcagttcttgtcttgtgggtggcgcatctcattttctttagggtcagcagtcatacaatgttactcaagtgccatacaaaaaagggaacacaggctactcaatctaaaataatagacaatgtggtccagtcacagggaccacataaccaagatgaaatatttgcagcactgtaaaagctaaacccatggggctggcaattccaagtaactaagaccaacaggaagtgaccccaactctgtggtgacactctgctttcgaattgaaacatacttatcaaca

SEQ ID NO: 711803 - DNA, 1294 bp, Homo sapiens
ttgaaacatattttatgacaggactttcccttctgtctctctggcatgcatccagtgtacactatgaagtaacagttggaaaatgacctccacttcttcaaatgtgttgtttctttagtttgcttaatgttaatcatttatttgaaaaaaaaaaaaaaaactagaaatgcttctcagaatggctaaactttcatgctcattgtggctctttgccagagtctaatatgacatcagagtgatgttactttggctgtgccagccatactagaattataatgcattgctstgatgatatattaaacattgacttggaacccgaatacataattgttaatgacaaagggaagcatgatttaatatctcctatgccgccctcctcttcagctgcccccactccccgagttgcttagggccatgtcttctcaatgcattgtcattatttcaagtagtacatagcacacatttgtaagtacctaccaaaatttccttgttggaaatattttatatataatatagcactccaaggattttcccattgttttatgttttaataaagcaaagttaaagtctcaattttatccctgtttcccaataaagagtacaattgctagttaaacattaaatacctgattgttgatagatcaaaaaagcattaaaaatgccttgaaatgtctcacactgaagctcatttgttttcaatctgtccagaaaccatatttgtaaactctcagccaacttttcaaaggaaaaatatccttcacatttttaccaacctagcagaatcaacttctgccatattgtctcattgacatttatttcttataataatcagcaaaaaagtgttattgtgaacaaaatcacaaggcaagaagttcatgatgcccttgagtcactaatttatatttgtctttctctgttttctggagatatttttcatttagtttctctttcaagtatcatcttagctgtcagatattttcctaaaaaccctacaatgtgatttcagaaatgtcttaaatttattatcttgagaagaatctataagacactgatttcccgtttatcttcatttttgtgtttctaacgtctgacattatttggccttgtgagttgcaagaaaagatatagctcacagtttaatgacaatttcctctactctgcctttttcaagtttcaaataatcagatattttaaaaacagttgctattaaacaagtaaaaattttcagcttcagctctttcttcacattttttgttaggaataatagacaaatttgggggccataaactctacc

SEQ ID NO: 711804 - DNA, 650 bp, Homo sapiens
ttgctattgcaattgttaaaactgtttcaaaatatatactttctttttattatactttaatattattaaatatacataataatatatttaataatattattatgtgcacatattatacatctgcacaacgtgcaggtttgatgcatatgtatacatatgatatgttggtttgctgcatccattaattcatcatttacattatgtatttcttctaatgctatccctccctcatccccccaccccatgacaggcccccgtgtgtgatgttccctgccctatgtccaagtgytctcattgttcaatttccacctatgagtgagaacgtgtggtgtttggttttctgtccttggaatagtttcctcagaataatggtttccagcttcatccatgtccctacaaagaacatgaacccatccttttttatggctgcatagtattccatcgtgtatatatgccacattttcttaatccagtctatcattggtggacatttgggttggttccaagtctttgctattgtgagtagtgccgcatttgtactcttgcccaggctctttagtattagagggagactaccatttgcaagtaaaagcctggttatctccccagagctttcaaggcctcactctattctcacactctcctcatgt

SEQ ID NO: 711805 - DNA, 1707 bp, Homo sapiens
aatggtgctcatcattttggggaagtatagtgagatatcaagtgatttgggggtgtttgcctttgtaccttatgtgttttttaaactttctacttgaatacatattattccagagtttcagaaaattcaaaagcattcttgtgaagaagtaaactttgaaagtgcctagattaattaaacaaggatatggtggagcataatgatcaggtcataggaaggcagtgctttacttaagaggtcatccgaaatagtctgctattcaaaatgtttcaaccatctttgaattttctgtgatttaataccactctcttatctacaatatgtctttgatacttttgtcatttgacatcttaaaacttacatgatatggcatcacaatacttgataaactggggttaaatgtggtttaaggtcaatttaaccacctaaacaatattaaaataaattgcacaagtaaagcagaataaaatattgtttactgtaagtttaatggcttcagacattggatagtaaatgtgaatacttaattctactgaattaatagttaaattatattttaatgatttgagaggcagagaaaaaaatgggatagaaatcaagggagggagaaatggaaaggcagaagtagagttggatgaagagaaaggaaaaaagagagaaagatatattagtaatattcagcaagatcctatgcccagattgaaatcttgacacactgttcccttagttgatgagaatgtgagtcagcttcaaaatgtctctgtgtcttcaaaagagagattactatctataggatcccacgccacgaacactctgccttgcagtttgtgctgaatacaaagcttggcatcataaaagttgtacaactaactcttcctctattaaaatgcatatatttattattaattattattaaatttcttaattttagacaattagggggcaatgtaggaattttgttgactcattaggaaaacctaatgtgatattccaaacaatgcaacactgtattaaaagtctgtatttatagcattaattttaagtcctcatttgaactgttatattaaagaagaatacaaaaaaggtaaaaggtaaatctcaaagttaagctgggagctttgcctatttagttttccaatttgctgaacacacaaataagctcataccaccctgcaaattaacttgacaccttctttcttttttatctatttccctctctttggccctctttccatttttttttctctctcctccgtatcccttcttgaaaaygttcttccaccccagtactgtacaaatagaactttgcgtgtttctatgtcagttctgaattccattcatttattcacaatgatgagtaaagacaaattattaaattcacttctaaagcagttaacgttttcagaatcttcatgtgttacagcagttcatgattcagtcaaaatgaatcaaataaaatattgcctatgttttatattcttcttccctgtgtcttgcaatctagttgtactgaaataaaattaggaagttgcttggaattaatttaagcattatactgcattatactaaaagtaatcatatgtgtagtgcattactgtaatgcattatttcttattttctagataatgattacatctgtgatactatagaataataccgtaactagattcaatttttcagcaaaatacacttaattctggtaatcat

SEQ ID NO: 711806 - DNA, 1472 bp, Homo sapiens
gagagctcttgcacaagagctttgaaacctacagggttaaggttgcaggctgtgtcgagtggaggcagaggaagccctggacgcctggcttttccaaaggaacacaatgctgctcggacgctgcggtcagtgaagaggggcccctcagggtggatcgctcccaccggagtttaaatcctgcctccgccatccctgcattcctgcgcgattttatgactgagcagaatccctracctttcagagccacgtttactcatctgtgaagtgggggcctgcggccagtccttgtaaggaatcagagtccctggcccatccctccccaaagcgccggtgccaggcgttttggcctctgtatctctgaaacgaggaggtcccggggcatccccgagcgcccccgtggccatctgtgccactggccagcccagggccaggactgctgtgccggcgtggagattcccgaccctttccaaggaggtgccaagggcgcagcgcagcgcacgcccgagccgccgcggtccctctgagcctctccagcccgccgccgccgccgcccccgcccgcacagccggcttggttgccagggttgccagggcttggggcctgggaggcgccgcgcgcacggcgccggcttcgcgggaggagccccaggcccgcgagcgcaggcgccccgcctctccccgggcgctgcgggccaccggctcggccctgtgcggcgggatctcggggccgcacggagcgggaggccgggcgccatggcgagggccccgcagccccggcgcggccccgcggcgcccgggaacgccctgcgcgccctgctgcgctgcaacctgccccccggcgcccagcgcgtggtggtctccgccgtgctggcgctcctggttctcatcaacgtcgtactgatcttcctgctggccttccgctgagcggccgcgcagggcgccgcgccggggtgagtggcgcgggcgacggcactccagccgttgccacccgcggcctccgcactggtcgcggagggaaggcctccttccaccccatgtgctcactaccagggcctggtccgggggtgtcgccgagcgggtgcctgaggggcgtggtggcacgtgtgtcacagggtccttctgtcctctgtgccctgtggggagtgggggctgcgggggcgaggggggaggccaaaatggcgcgtctctgcgagtaaccgaggatgcggattcagctggggctccccggctgcttgtctggaaacggagtgcatgtgaccgctgggtgagcgacccgcgcttgcatctgtgtaggttgagtcaggtgtgtggaagacccccgggcaccgctgcgcatgttacctgcagttgtttttcccgttttaggccttaaaatacgtggtgtcagtcttcccacgggcagagcctctgccccccttgcacgtgggccctctgaagcccccacccctgctgcacaaactgcgggtgttcaca

SEQ ID NO: 711807 - DNA, 1403 bp, Homo sapiens
tttttagctatttctttaaggcactaaggttggtaaggttagcacaagcgcaagtgggcacctcagaagaacaaatgagtctctaatgtagctccttccccatatctaagcatggytgacttctcatctttctccaaacctttaaaaagagtgccacaagcctcagtcaccccatactccggcatctccaaaatcatgcacgctgaagcttcttgctctctttgcagtttttttcaattcatgctatctgtccttaccaagaaacgaaatgtttttcatttttccccaatctttctctaccacatttaggttctcaaacatacaatccccagcaaacaaaagccagtctccctgtctctaagatgatgttaacagggaagcacactgctgctcactgtgctggcagccaccttctgaccatgaggaaccggctgggggcagctgacgcagagacagcagagctcacactgctgagccacttacttcaccaacccccaaacccacccttacccaagactttctactaagcagcatgatgggtttatcacttaagatggttgaatttggtttcctgcaacttacagcctaaaatatcctaaaacaatcattttacttccaaaaggatttgaagcagagaactaccagcatcatattttcattaaatattcttagaacaccttacttgtgtccagccttgtcctagacactaaggatacagcagtgaccaagccaaaatgctactctcatgtagcttagtacagcagaagaaacaggcgaaacaaaaaggaaggaatgttgtagacagtatcacatctgtgcagtggggttattaacccagaacacaaaaaaatgagagggcaaagcacgtacgcattcacgtcaaatcctagatatttatattcatactacagcttcctgcatccataatgtgaattcccagtatatttcatacaaaaaaaaatgagaacaggctaaaaattactagaaaaggtactgagaactacgtagtcatgacaaatacaaaacctgactgaaacacagccatgcaacttcgcaggcggttacaggacacagtgaatataaaaacgtggagtaacaggagtctcctgaacttctgtggtcaatttctttacatttctaatgggtttgtttgtttctttgtttgtgccatcgcccaggctggagtgcaatgatctccgctcgctgcagcctccacctcccaggttcaagcaattctcctgcctcagcctcccaagtagctagaattacgggcgtgtgccatcacacccagctaattttttgtattttaagtagagacaggatttcgccacgttggccaggcaatccacccgcctcagcttctcaaagtgctgggattacaggtgtgagccaccatgcccagc

SEQ ID NO: 711808 - DNA, 701 bp, Homo sapiens
tgtttaactaaaaattcttaatgaatctctgttgctcaaagtctttttcagttttatctcccactctctggggtgcaaacatactcagatgttctaatccaataaggcctcaaattcattcagtgttctctattatctttgctatttccacaagccagccargagtaatatttcgagtccatagctaaagataatttatttctttttatatataagtccaatatatttgtttgtaatagatgcacagatatactgcatacataagtttaaggattcattcttctttcatcttgtggcttcagcgtgcctcagggcctttgagtcctctgtttaaagttggctgacttgaaaagacaggcaaggtagagatgcattggctttttaacagtctttgcctttaagagacacatatcatttctgtttatattctatcataagaactaactatgttgcccttcatatatccacaagcatctgagaaatgtagtttatggctgggcagccacttcacaatgacaattttatagaagaaccatgaattttgatgaaaagatagctgactttacagcattgtatatcataaatgtgcacttttattcttctctagatcatggcatacagattacttcagttcattaacagaatgtggactctgggatttaaaattatagaaaataggagttagtgaaaatggttttata

SEQ ID NO: 711809 - DNA, 701 bp, Homo sapiens
tgtttaactaaaaattcttaatgaatctctgttgctcaaagtctttttcagttttatctcccactctctggggtgcaaacatactcagatgttctaatccaataaggcctcaaattcattcagtgttctctattatctttgctatttccacaagccagccaggagtaatatttcgagtccatagctaaagataatttatttctttttatatataartccaatatatttgtttgtaatagatgcacagatatactgcatacataagtttaaggattcattcttctttcatcttgtggcttcagcgtgcctcagggcctttgagtcctctgtttaaagttggctgacttgaaaagacaggcaaggtagagatgcattggctttttaacagtctttgcctttaagagacacatatcatttctgtttatattctatcataagaactaactatgttgcccttcatatatccacaagcatctgagaaatgtagtttatggctgggcagccacttcacaatgacaattttatagaagaaccatgaattttgatgaaaagatagctgactttacagcattgtatatcataaatgtgcacttttattcttctctagatcatggcatacagattacttcagttcattaacagaatgtggactctgggatttaaaattatagaaaataggagttagtgaaaatggttttata

SEQ ID NO: 711810 - DNA, 701 bp, Homo sapiens
tgtttaactaaaaattcttaatgaatctctgttgctcaaagtctttttcagttttatctcccactctctggggtgcaaacatactcagatgttctaatccaataaggcctcaaattcattcagtgttctctattatctttgctatttccacaagccagccaggagtaatatttcgagtccatagctaaagataatttatttctttttatatataagtccaatayatttgtttgtaatagatgcacagatatactgcatacataagtttaaggattcattcttctttcatcttgtggcttcagcgtgcctcagggcctttgagtcctctgtttaaagttggctgacttgaaaagacaggcaaggtagagatgcattggctttttaacagtctttgcctttaagagacacatatcatttctgtttatattctatcataagaactaactatgttgcccttcatatatccacaagcatctgagaaatgtagtttatggctgggcagccacttcacaatgacaattttatagaagaaccatgaattttgatgaaaagatagctgactttacagcattgtatatcataaatgtgcacttttattcttctctagatcatggcatacagattacttcagttcattaacagaatgtggactctgggatttaaaattatagaaaataggagttagtgaaaatggttttata

SEQ ID NO: 711811 - DNA, 701 bp, Homo sapiens
tgtttaactaaaaattcttaatgaatctctgttgctcaaagtctttttcagttttatctcccactctctggggtgcaaacatactcagatgttctaatccaataaggcctcaaattcattcagtgttctctattatctttgctatttccacaagccagccaggagtaatatttcgagtccatagctaaagataatttatttctttttatatataagtccaatatatttgtttgtaatagatgcacagatatactgcatacataagtttaaggattcattcttctttcatcttgtggcttcagcgtgcctcagggcctttgagtmctctgtttaaagttggctgacttgaaaagacaggcaaggtagagatgcattggctttttaacagtctttgcctttaagagacacatatcatttctgtttatattctatcataagaactaactatgttgcccttcatatatccacaagcatctgagaaatgtagtttatggctgggcagccacttcacaatgacaattttatagaagaaccatgaattttgatgaaaagatagctgactttacagcattgtatatcataaatgtgcacttttattcttctctagatcatggcatacagattacttcagttcattaacagaatgtggactctgggatttaaaattatagaaaataggagttagtgaaaatggttttata

SEQ ID NO: 711812 - DNA, 701 bp, Homo sapiens
tgtttaactaaaaattcttaatgaatctctgttgctcaaagtctttttcagttttatctcccactctctggggtgcaaacatactcagatgttctaatccaataaggcctcaaattcattcagtgttctctattatctttgctatttccacaagccagccaggagtaatatttcgagtccatagctaaagataatttatttctttttatatataagtccaatatatttgtttgtaatagatgcacagatatactgcatacataagtttaaggattcattcttctttcatcttgtggcttcagcgtgcctcagggcctttgagtcctctgtttaaagttggctgacttgaaaagacaggcaaggtagagatgcattggcyttttaacagtctttgcctttaagagacacatatcatttctgtttatattctatcataagaactaactatgttgcccttcatatatccacaagcatctgagaaatgtagtttatggctgggcagccacttcacaatgacaattttatagaagaaccatgaattttgatgaaaagatagctgactttacagcattgtatatcataaatgtgcacttttattcttctctagatcatggcatacagattacttcagttcattaacagaatgtggactctgggatttaaaattatagaaaataggagttagtgaaaatggttttata

SEQ ID NO: 711813 - DNA, 633 bp, Homo sapiens
atattgttgaacctcacttctctcttaaaactttgttcccttgttttctagatctctactctgtcttagattctcttccagtctttggtatctttcttaatttcttagtttttctcttttcccacctactacttaaatattaataatccaagattcattttttgaccacatttcacttttcacaggccattttgtttcccatagatcatstttgatttttatcttctacctttcaaacccttccttctcttctgctaccagttaattctctaccagatgtactcctataaacgtcttaattcttttttcttcataacactcagataattccgacccactttacctcttgtctggacagctacctccagttaggtttttctgccttttctttttgtacattcactttgccagtaattgaaactccagtacgtgactactcattttctgccaatgtgataattttcctgctactcatgctgttccctgtaactggaatgttcttccttcttttttaaatctcttgtctcatccagtttaagcattctttgtaatactttaccttgtatccctaggtacagtaactcatgcacttctgtttttgtgctgcattttgttcatttcactagtatgact

SEQ ID NO: 711814 - DNA, 938 bp, Homo sapiens
tatcataatgctgtatatgttgaaaacgtaatacctgttaatgtcctaatgaatcacgttttgcagaaaacaccgtaagaaacacttcagtctttctgtagtttccatgcatatttcaccatggttcgcactctgatcctcatctggtttagaaagcaattcagtttctttcaaaccaccataacctaagtgctgccccatccttcacctttaccctagaaaatctgagaatccattggtgtgtactgtgtgacacaatgccaacaagcctctggtttctaatactggcaggaccaacacacatactttagtgggaatataatctgtttagacgataatagagggaaatgccataattaacaaatctcccttcactcaccactatcctcattcttgcagttgtcaaggtgtaagcctcactgtaagttacaaagctaccactcccctctttaagaacacatagcttaggattgccttggcgatgygggctcttttttggttccatatgaacttaagtagttttttccaattctgtgaagaaagtcattggtagcttgatggggatggcattgaatctgtaaattaccttgggcagtatggccattttcacaatattgattcttcctacccaagagcatggaatgttcttccatttgtttgtatcctcttttatttccttgagcagtagcttgtagttctccttgaagaggtccttcacatcccttgtaagttggattcctaggtattttattctctttgaagcaattgtgaatgggagttcactcatgatttggctctctgtttgtctgttgttggtgtataagaatgcttgtgatttttgtacattgattttgtatcctgagactttgctgaagttgcttatcagcttaaggagattttgggctgagacgatggggttttctagatatacaatcatg

SEQ ID NO: 711815 - DNA, 2311 bp, Homo sapiens
gttctgtgttcattatccatctttaggcccttaggtcttttcatgtcagatttttaatcatttcaccaatggaagagggaaccttccacagactggtttcacaggcattaaagcaatgctcttcctccccaagtctatttataaagtatacagaaatgtacatacacggtcacacaaatataccctcatacacaaaacaaggctttgtatatatgggggaaacttatacctcatgcccaaagggcagaaaggaaatattaacctgattttaatttagaggagacctgtagttgctagcaactaaccccgtttgcctgtgcaaagctactcacagatgacatgtccatatgaatgcaatttttctttgattttctttaattttatagttaaaaaaattactggaaactggagaggcaacatatgagttagtgcaagatagtgacttgttctgcatttttggtagggaaagagagtggcaatcttattaggcccctgtgtgggccaaattttcctaattacatggaaatcagaggcagcccctggactgcggtatcttacctgcacagagtaaacactcccctgctgtcactaatgtcctataaatcatgttaaagagaagcataattaacattcttgatcaaatcaagctccaaagccatgaggtgcttgagtgaaaaaagccacatttccaaatcatcactgaatagattctccagggaaggggaatgcttaggatggctctacacttctccctagccacccacccctgccctgtgcataccagcagaaggcaatgaaagtttaggtgagaaaatcctcagcaatgtatcaattacattcagtttcatggaagctcatcatgagcaaagggcgtggggtaagatacagagacaggaagcagccacgtgtctgagaagaatgagcaacttcatgtttttcagtctgctgaaaacgtaccctttctgtgcatatcaaattagttttacttgtctttaaaactatttaaagaagatggtgtttctggttaaagaacaggtgtatttgtgcaaatcatttctgtctttgttttctatgtatcttgagaaaatatccgcccagttgtcaaaggctaaacagatctcaagttcacttggaggtgggtgcccaagtggaatagttgaaatatatttcaaagatgtctagaccccaggacaacatccacagagaatcctggaactcttgccatgggaggcagtgcttttatttctttcagtcatagaaaagagatgttagttgcaaatttccctggaagttgctcattaatttccattcacaccaaggcataagcagttgatagcaaggccttgatgaaagagataaacaaaggtggcagagagcaggggccctggatgtacaagtaggacagtaacagaggggagagagaggccaacaggggaatctaggtatgacatgtaattctcttcctcaacatgacaattctgatctaagtcagggtctggctgtgagaaagtctcaataaacatcatcaacaacaaaaatagaggtggtaatggaggatccctctttcatcccatatacattgtcactgaggaaggacatttgcctcagtcccttctttggcctaggtactcagggagaaagtgccctgagatgctccctgggatgtggggagcaacagttcctgggattcctcctgtattcctgctggctccttccctaacaccttaagtggatttgcattcttctggtttatcattagcactggctttatccctcccacactgagttggggtagagcctccgtgaggaagtgatccctgctacttcctactcgggctggatgcatgggtgcttgggtgtgtgtgttgtggggcaggagggataagcctgaggcttatcttattacttattactaagattccttatttaagtaaataaatacaatatgaagagtccaggaactgtgtgtaccttgaaaagaagtacattttctactagggtagtatagattatgtggactttgatcaatgtatactatatgcattggtatgtgtagcacaaggaccatagattctgggtttctggagtctattccaacttcagactttcaaatattatatttactgatacagatatgtatgtgtgttaatgaactatatatttttagttatataactatattcttttcaagaaaggcatttttaaaaataaygagaaccaaaaagattttacattttatatttgaaaggctttttatataagtgaattcgcaaatcagaaaaataattctttattaggtcatgagttctaa

SEQ ID NO: 711816 - DNA, 2311 bp, Homo sapiens
gttctgtgttcattatccatctttaggcccttaggtcttttcatgtcagatttttaatcatttcaccaatggaagagggaaccttccacagactggtttcacaggcattaaagcaatgctcttcctccccaagtctatttataaagtatacagaaatgtacatacacggtcacacaaatataccctcatacacaaaacaaggctttgtatatatgggggaaacttatacctcatgcccaaagggcagaaaggaaatattaacctgattttaatttagaggagacctgtagttgctagcaactaaccccgtttgcctgtgcaaagctactcacagatgacatgtccatatgaatgcaatttttctttgattttctttaattttatagttaaaaaaattactggaaactggagaggcaacatatgagttagtgcaagatagtgacttgttctgcatttttggtagggaaagagagtggcaatcttattaggcccctgtgtgggccaaattttcctaattacatggaaatcagaggcagcccctggactgcggtatcttacctgcacagagtaaacactcccctgctgtcactaatgtcctataaatcatgttaaagagaagcataattaacattcttgatcaaatcaagctccaaagccatgaggtgcttgagtgaaaaaagccacatttccaaatcatcactgaatagattctccagggaaggggaatgcttaggatggctctacacttctccctagccacccacccctgccctgtgcataccagcagaaggcaatgaaagtttaggtgagaaaatcctcagcaatgtatcaattacattcagtttcatggaagctcatcatgagcaaagggcgtggggtaagatacagagacaggaagcagccacgtgtctgagaagaatgagcaacttcatgtttttcagtctgctgaaaacgtaccctttctgtgcatatcaaattagttttacttgtctttaaaactatttaaagaagatggtgtttctggttaaagaacaggtgtatttgtgcaaatcatttctgtctttgttttctatgtatcttgagaaaatatccgcccagttgtcaaaggctaaacagatctcaagttcacttggaggtgggtgcccaagtggaatagttgaaatatatttcaaagatgtctagaccccaggacaacatccacagagaatcctggaactcttgccatgggaggcagtgcttttatttctttcagtcatagaaaagagatgttagttgcaaatttccctggaagttgctcattaatttccattcacaccaaggcataagcagttgatagcaaggccttgatgaaagagataaacaaaggtggcagagagcaggggccctggatgtacaagtaggacagtaacagaggggagagagaggccaacaggggaatctaggtatgacatgtaattctcttcctcaacatgacaattctgatctaagtcagggtctggctgtgagaaagtctcaataaacatcatcaacaacaaaaatagaggtggtaatggaggatccctctttcatcccatatacattgtcactgaggaaggacatttgcctcagtcccttctttggcctaggtactcagggagaaagtgccctgagatgctccctgggatgtggggagcaacagttcctgggattcctcctgtattcctgctggctccttccctaacaccttaagtggatttgcattcttctggtttatcattagcactggctttatccctcccacactgagttggggtagagcctccgtgaggaagtgatccctgctacttcctactcgggctggatgcatgggtgcttgggtgtgtgtgttgtggggcaggagggataagcctgaggcttatcttattacttattactaagattccttatttaagtaaataaatacaatatgaagagtccaggaactgtgtgtaccttgaaaagaagtacattttctactagggtagtatagattatgtggactttgatcaatgtatactatatgcattggtatgtgtagcacaaggaccatagattctgggtttctggagtctattccaacttcagactttcaaatattatatttactgatacagatatgtatgtgtgttaatgaactatatatttttagttatataactatattcttttcaagaaaggcatttttaaaaataacgagaacyaaaaagattttacattttatatttgaaaggctttttatataagtgaattcgcaaatcagaaaaataattctttattaggtcatgagttctaa

SEQ ID NO: 711817 - DNA, 608 bp, Homo sapiens
cagtaacaatagcagcaacagcaataataaacaagatatgccctgtatgcttccacccaattattagctaataatgcataattatgaataattccactctttaaatgcagattttaaatagcaataaccatttattttatgttttcacgttattttcctgcacgtcctttatgtcaattatgtgttttcaggcacatctgattgtgctgtgctgtggttgcratggtttggtaattgtacattaaaaaaaaaaacaacaacacgtgtttagtataaaaattaattacgttaagcattcctactaattttgccaggcaaaaaaaaatggcatcccacaaattttcagcataaagcgggtggccagcctacttaggagctttatgatctgtggctgggttttgtgagtgagctctgtcaaggcagttttctccaaactggagacggaatgcagtggacggcagtctgcccctgctcagttccctgtgttcccttaaaatttgtctctggcctccatctaatcaaccacttcccaattatgattataataacagcgctgaaaatatcattttgaaatatcgctgcaatccaaattgacagagctcctgcca

SEQ ID NO: 711818 - DNA, 1095 bp, Homo sapiens
aatataataactgctttaaactcccaaacttacagttaactgctttgccatttaacttccttactgagggtagaaaatgccactagtgtcaaagagtttaaattgtaaattataattgtctcaagaactaaaaatgggccgggcgcggtggttcacgcctgtaatcccagcactttgggaggccgaggcgggcggatcacgaggtcaggagatcgagaccatcctggctaamacggtgaaaccccgtctctactaaaaatacaaaaaattagccgggcgtagtggcgggcgcctgtagtcccagctacttgggaggctgaggcaggagaatggcgtgaacccgggaggcggagcttgcagtgagccgagatcgcgccactgcactccagcctgggcgacagagcgagactccgtctcaaaaaaaaaaaaaaaaaaaaaagaactaaaaatggtattctaagacttttaaattcattttcttctgtatgtaattcagaaacatactgtctccaatatttatctctccccatctctgcctccctcctgaaatgttactggaaaatgagatgttttataccctggttaatattttttattaagttctaatattaaaggggtgtaaatggagagaggcattatttaccaactctgaacaaacttaacataattcatttaaactaagaaaataagacctgactttaagatagagcaacccagtaccctcagatctgaccaaaattggaaattgaaatagggaaaaggagaaggaaaccaggtcattttcattaggaaagatgtagggtacaaaagaaaaaaaagtgccaagctgccacctcagttatatcttagggaatatttattttatttgatatatttatagagactattgaggaaatgcttctaatcacattcatgatgatgatttttaaaaaatactctgagtgttgcctatatgacttacagcagaatagacaatataaagcaagaggtattggggatagaattaaataggatttcaaaaccttacgtgtggttctctgagggcatacctgaggaagcctagaaaacttgctgttgacctggaaaagaaaagga

SEQ ID NO: 711819 - DNA, 1095 bp, Homo sapiens
aatataataactgctttaaactcccaaacttacagttaactgctttgccatttaacttccttactgagggtagaaaatgccactagtgtcaaagagtttaaattgtaaattataattgtctcaagaactaaaaatgggccgggcgcggtggttcacgcctgtaatcccagcactttgggaggccgaggcgggcggatcacgaggtcaggagatcgagaccatcctggctaaaacggtgaaacccygtctctactaaaaatacaaaaaattagccgggcgtagtggcgggcgcctgtagtcccagctacttgggaggctgaggcaggagaatggcgtgaacccgggaggcggagcttgcagtgagccgagatcgcgccactgcactccagcctgggcgacagagcgagactccgtctcaaaaaaaaaaaaaaaaaaaaaagaactaaaaatggtattctaagacttttaaattcattttcttctgtatgtaattcagaaacatactgtctccaatatttatctctccccatctctgcctccctcctgaaatgttactggaaaatgagatgttttataccctggttaatattttttattaagttctaatattaaaggggtgtaaatggagagaggcattatttaccaactctgaacaaacttaacataattcatttaaactaagaaaataagacctgactttaagatagagcaacccagtaccctcagatctgaccaaaattggaaattgaaatagggaaaaggagaaggaaaccaggtcattttcattaggaaagatgtagggtacaaaagaaaaaaaagtgccaagctgccacctcagttatatcttagggaatatttattttatttgatatatttatagagactattgaggaaatgcttctaatcacattcatgatgatgatttttaaaaaatactctgagtgttgcctatatgacttacagcagaatagacaatataaagcaagaggtattggggatagaattaaataggatttcaaaaccttacgtgtggttctctgagggcatacctgaggaagcctagaaaacttgctgttgacctggaaaagaaaagga

SEQ ID NO: 711820 - DNA, 1415 bp, Homo sapiens
ctgtgacttctgcggaaggatcagaaacagagaacatctcaggcgtgctggcctcacagggtaaatctcctcatctccctgtctctgcttttcagggcactgtggggataggagcggtgctagcaaaaaaggatacacttcagcaattgtcatgcatagatgggtattctccctccgcaccccttccagggtcagccccaggagattctccataggctacctttctagcctctgcctctgcagccagggcggagggaggacctggagtctcagattactgccaggcccatagatctcacacttccttcccagaagaggaaaagctagcctaaggatctaactccattgtttctccttcctatgggccgggttgttccaggaaggaacttcaacttccctttgaagtcttaattttttatgattattttttaatgagaaatgatcacgaccttggaatcctattggctctgaaaacataatgccttaaacttgcgtcgctttaactagcttttaagccccttcagaacctgagccatccctcacaccagcctcacacagaaacgagcgggacatatttaaattgggaaacgaaatcttcagggtggaaattacattttcctaagaattatctgcattgacatattccacaaatagtgtggatcaacgcagcagacccacgaaggtgaagctcaggttccacttcaagaaaggataggttgagtgtaactagttagcaacctctagcagttaactctttcaggtccatctcagcactggagctaaagttgtgctgttctcagagcggccccaccaatgaccaagcgagggatgatgttacaaaaaccctgtctctaatgggcaatatttgctgtggagctcccttctgggatgataaagactttttcagctctgcatcaatgtctgatgactcctgcccagccttgcttcctctggctttcattcacaggtatttctccccagtagagtacctgcacacacgattgcaacttagcttctacttggagaagacccaactgacacagtggcagcaaagtgggatgatccaagaaagcaagtggttagatgggttttggagactggawcacttgccagtctgtgggcagtgaagaccccacaccaggtagtatgtggggcacagataatccctagcataaaggggtggctcaattgctaacatttccactaatggtaactttagaaagatgttctggtgaagagatatggccaacacgttgattcaagcattttaaaagtatgggaaaaaacaatgcatagaaggacaatgggattgcattgcagtaccaaagggtaatgaaaaatcgaggaccattaacaaagtgtgaagttaagaacatctcttgggtagctcacagaaaagttcttcaaatggttta

SEQ ID NO: 711821 - DNA, 1415 bp, Homo sapiens
ctgtgacttctgcggaaggatcagaaacagagaacatctcaggcgtgctggcctcacagggtaaatctcctcatctccctgtctctgcttttcagggcactgtggggataggagcggtgctagcaaaaaaggatacacttcagcaattgtcatgcatagatgggtattctccctccgcaccccttccagggtcagccccaggagattctccataggctacctttctagcctctgcctctgcagccagggcggagggaggacctggagtctcagattactgccaggcccatagatctcacacttccttcccagaagaggaaaagctagcctaaggatctaactccattgtttctccttcctatgggccgggttgttccaggaaggaacttcaacttccctttgaagtcttaattttttatgattattttttaatgagaaatgatcacgaccttggaatcctattggctctgaaaacataatgccttaaacttgcgtcgctttaactagcttttaagccccttcagaacctgagccatccctcacaccagcctcacacagaaacgagcgggacatatttaaattgggaaacgaaatcttcagggtggaaattacattttcctaagaattatctgcattgacatattccacaaatagtgtggatcaacgcagcagacccacgaaggtgaagctcaggttccacttcaagaaaggataggttgagtgtaactagttagcaacctctagcagttaactctttcaggtccatctcagcactggagctaaagttgtgctgttctcagagcggccccaccaatgaccaagcgagggatgatgttacaaaaaccctgtctctaatgggcaatatttgctgtggagctcccttctgggatgataaagactttttcagctctgcatcaatgtctgatgactcctgcccagccttgcttcctctggctttcattcacaggtatttctccccagtagagtacctgcacacacgattgcaacttagcttctacttggagaagacccaactgacacagtggcagcaaagtgggatgatccaagaaagcaagtggttagatgggttttggagactggaacacttgccagtctgtgggcagtgaagaccccacaccaggtagtatgtggggcacagataatccctagcataaaggggtggctcaattgctaacatttccactaatggtaactttagaaagatgttctggtgaagagatatggccaacacrttgattcaagcattttaaaagtatgggaaaaaacaatgcatagaaggacaatgggattgcattgcagtaccaaagggtaatgaaaaatcgaggaccattaacaaagtgtgaagttaagaacatctcttgggtagctcacagaaaagttcttcaaatggttta

SEQ ID NO: 711822 - DNA, 756 bp, Homo sapiens
atattctttaatgatttctcactcattccaccaagggaactacagtcatttacgtgggcagttgtacactagggaaacaggaatagctacacttttcaaggacctttggacacaaggtaggactgacactgatrccaagaaacccagagtgccatcatggctccttacagcatctgatcagggacgaaagggactactttttttcttgaattacggtgggggatatccttacttaactacccattgtaagttgaaaatatcataagtcaaaaatgtatctaacacacctaacctccccaacatcataggctaacctagcctaccttaactgtgcttggaacacttacattggtgtgcagttgggcagaatcatctaacacaaagcctattttataatgaagtattgaatatcttgtgtaatttattaaatttattaaattctatactgaaagtgaaaaacagaatggttgtataggtactcaaagtatgatttccactgaatgcaccatcataaagttggaaaattgtaagttgaaacatgtaagccaaagattgcctgtacaatccaaaactggctacaataattagctaccatatgttagtgaagaccagcaaatatgtgtgtttctggattttaaagaaccttggatcaaggtggttaggacataaaagttggtaaggaagagtgcactgatttggtgacactttctttgaacatagaatttgctacctgtgaatgaaaaaacaataactcct

SEQ ID NO: 711823 - DNA, 756 bp, Homo sapiens
atattctttaatgatttctcactcattccaccaagggaactacagtcatttacgtgggcagttgtacactagggaaacaggaatagctacacttttcaaggacctttggacacaaggtaggactgacactgatgccaagaaacccagagtgccatcatggctccttacagcatctgatcagggacgaaagggactactttttttcttgaattacggtgggggatatccttacttaactacccattgtaagttgaaaatatcatargtcaaaaatgtatctaacacacctaacctccccaacatcataggctaacctagcctaccttaactgtgcttggaacacttacattggtgtgcagttgggcagaatcatctaacacaaagcctattttataatgaagtattgaatatcttgtgtaatttattaaatttattaaattctatactgaaagtgaaaaacagaatggttgtataggtactcaaagtatgatttccactgaatgcaccatcataaagttggaaaattgtaagttgaaacatgtaagccaaagattgcctgtacaatccaaaactggctacaataattagctaccatatgttagtgaagaccagcaaatatgtgtgtttctggattttaaagaaccttggatcaaggtggttaggacataaaagttggtaaggaagagtgcactgatttggtgacactttctttgaacatagaatttgctacctgtgaatgaaaaaacaataactcct

SEQ ID NO: 711824 - DNA, 1109 bp, Homo sapiens
tttctatttatagaccagtggcagtgtcttcgcccctgcttctaaacctttcaccagaaaagcctgcactcttattaccttctcagaatatttacttgttcacataggtgtatcatgttacgctccaaatacattttctcctgtgtcctcagctgtaaaaccttagcattctcttttttgtgaatctcaagatattatataactccttacactgaactccaaagcagacagctagtcaccctttccttactctctcaacacttttctttttccttcaacctttggtcctgtgtaaatacttgcatctaatagtgtaatatttgagggcagcatgaactgtgagacctatgtgcaaaaatcccagtcgcctttcctcattcatttaataaatgtcttttaagtgaccactatatgtcaaaccctggtatacatgttcagtatttgagaatgaataaggtcagagacaccatccctaaccttaagcatctcagagtcttgggtgaagagaatgggaatgctaagctgtaaggcacatgtacaattagtcatactaccatgctctattacactgcagtactatactcaatatatgtgagaagtgctaaggcaaaagagaggaaagcaatattaattccacatgacatttgagccaggtttagaagggttactacaaaatcatccggaggcagggcaagaaccttctaaagagaaggaacgtaagtttgggatgaaagaagcccagtgagagggagtattattattaatatttagttcaatttgccaaggtagcatatgacatcatgtactagatggcagtaaagaaatgctgctgtctacaatggagacacacccccaagttaaacctgagtaaacytggctccctctgtgaactgtcacccttgaataaacgaatactgcctgggtcctgtggcatcttttctgggcacaaaattttattttaaaggacattgggaagctaatcatgaagcagcagaaacaaaagctgtctacattcccctgctgcaaaaaaaaaaaaagaaagaaaaaaaaagaaaaaggggctccgttagaggagatgttgagtctaagaaaacaaataaaagttgttc

SEQ ID NO: 711825 - DNA, 1109 bp, Homo sapiens
tttctatttatagaccagtggcagtgtcttcgcccctgcttctaaacctttcaccagaaaagcctgcactcttattaccttctcagaatatttacttgttcacataggtgtatcatgttacgctccaaatacattttctcctgtgtcctcagctgtaaaaccttagcattctcttttttgtgaatctcaagatattatataactccttacactgaactccaaagcagacagctagtcaccctttccttactctctcaacacttttctttttccttcaacctttggtcctgtgtaaatacttgcatctaatagtgtaatatttgagggcagcatgaactgtgagacctatgtgcaaaaatcccagtcgcctttcctcattcatttaataaatgtcttttaagtgaccactatatgtcaaaccctggtatacatgttcagtatttgagaatgaataaggtcagagacaccatccctaaccttaagcatctcagagtcttgggtgaagagaatgggaatgctaagctgtaaggcacatgtacaattagtcatactaccatgctctattacactgcagtactatactcaatatatgtgagaagtgctaaggcaaaagagaggaaagcaatattaattccacatgacatttgagccaggtttagaagggttactacaaaatcatccggaggcagggcaagaaccttctaaagagaaggaacgtaagtttgggatgaaagaagcccagtgagagggagtattattattaatatttagttcaatttgccaaggtagcatatgacatcatgtactagatggcagtaaagaaatgctgctgtctacaatggagacacacccccaagttaaacctgagtaaacctggctccctctgtgaactgtcacccttgaataaacgaatactgcctgggtcctgtggcatcttttctgggcacaaaattttattttaaaggacattgggaagctaatcatgaagcagcagaaacaaaagctgtctacattcccctgctgcaaaaaaaaaaaaaraaagaaaaaaaaagaaaaaggggctccgttagaggagatgttgagtctaagaaaacaaataaaagttgttc

SEQ ID NO: 711826 - DNA, 715 bp, Homo sapiens
tttattggttctgtttcaaccaaatgaaactactgcaatttgccataccaaacacaaactttyccctttccaagccctttctttaagtgtactctctgttttattagatgagctccctctgctcttcttacatctaaaggctttctactgaaagactgaaagaccactatttttacaaggtttttccagaatcttcactatcataagatatttttctctttcccaaactcccaatgtaccttatacatatatgtatacatacgtaatctctctctgtctctctttccctctatctgtaagagaatgacttgaatctcctagaagagaataacaatgtaatcttcattgtacctcttggttgtgttctgcctttcatacaatagacacctaataatcatttctaatacagaatttggtgtgaggcttgtctgttatccatggccaaaaatgtagaattatggagatgccggagaaaaggtactctcaacataaataattttactgtgaagaataactaaagtgcctctatatcatgtccgaattacagaagggggtatgagctagctattgtcctgtctacaccagtcagaacttctagcaaggaaatagaaaggccatggaaatagtttgtgcagagacaattggcgaccctaaaaaattaattaagatgtggtgcaattaaaatactgtgcttcacgttcaaaagaggaaaaga

SEQ ID NO: 711827 - DNA, 715 bp, Homo sapiens
tttattggttctgtttcaaccaaatgaaactactgcaatttgccataccaaacacaaacttttccctttccaagccctttctttaagtgtactctctgttttattagatgagctccctctgctcttcttacatctaaaggctttctactgaaagactgaaagaccactatttttacaaggtttttccagartcttcactatcataagatatttttctctttcccaaactcccaatgtaccttatacatatatgtatacatacgtaatctctctctgtctctctttccctctatctgtaagagaatgacttgaatctcctagaagagaataacaatgtaatcttcattgtacctcttggttgtgttctgcctttcatacaatagacacctaataatcatttctaatacagaatttggtgtgaggcttgtctgttatccatggccaaaaatgtagaattatggagatgccggagaaaaggtactctcaacataaataattttactgtgaagaataactaaagtgcctctatatcatgtccgaattacagaagggggtatgagctagctattgtcctgtctacaccagtcagaacttctagcaaggaaatagaaaggccatggaaatagtttgtgcagagacaattggcgaccctaaaaaattaattaagatgtggtgcaattaaaatactgtgcttcacgttcaaaagaggaaaaga

SEQ ID NO: 711828 - DNA, 1266 bp, Homo sapiens
ttcagaagactgggtgtttttttaatgagagaattggatttgttaagggtttagccatgattccaaacacacacatatttttcattatttgtataccgtacatgttttatatctaaaaatttccatatgaatattatattatttcataatatatgaaaaaagcactcattccaataagtgtttgtattttttcccatctttyactaaacaaacccctgacaaatattcttctattaaaatgttgcaaatatcctctttttaatcctaggataaatttctagaaatagaattgctgagcaaaatggtttgtacaattttaaggccattaatatatattactaaactgccacccagcaaagtaatgtcaatttctattcccatcagcaatgaatgagagtcattttctctcattctttgccaacactgaacataatgaagaagaaaaaaatctctgccaatttgatcagtgaaaatttgtgtttcatattttctctaacttgcatttctttaactactagtgtgattaaacctttttaaagtttttacccattttttactttttcttctattaattgcttattaatggtttttattctgttagggtattattattcttatgtatttataaggttatataattaaagatttcgaacttttgtctgtctaatttgtggtaggcagaataaggcttcccccaaatgtccacatcttagtcctcagaaagcctccaaacatcttatgttacatgacaaaagggaatggaggttatagatggaactgaggttgctaatcaactgacctaaaatagggagattatcttggattatccagcggactaaatggaattacaaggttcttagaagtaggagagaggtggaggagggatcagagtcagagagaggcttgaaagcgctgtactgctggcttaaagatggaggaatggagccacaaaccaagaaatgctggggggctctagaagctggaaatggcaaagaaatagatgcgctcttgaagcttgcagaagaacacagctctgccagcatcttgatttttgtcaaatgagactcatttcagacttctgatctccagaactgtaagataaatagatttgtgttgctttaagccacctattgtgtgataatttgttgtaatggaaatgggaaactgattcacaagttgcaaatgttttcccgatttttatatacataatctttacaaagcaatcaaaatgtcccttatatttagtaccattttaaaatgtattca

SEQ ID NO: 711829 - DNA, 1442 bp, Homo sapiens
ttcttataatcaatttcttataatcaatggcatgttaagtttaattagctgtgggttttctctagtgatttataaattaacaacacataatatatttaatgaaatatggcattattcccattttgctgataaatcacagcagagaggttgagtaacttgcccaagtcatatagttggttaggaaaagagctgggattcaaatcaaggcagcctgactcaaaggctcaagtctgtgctcttaacctctatgccttactgtaacagtctcacattgaggactacatagttatgaataatggtgtttcatacatttctgcatttgaaaatatttgaatatgtccatccttggattctaatttcattcaccatacccactatccaaactattatattcaagctctgagatggcatacaragagtaccacataaccaagtagactgtagataccacaatatggatttgggaaacaatctaatttgcatgtgctttcttaccatctacactagcatcatccaccaaaatgatttccttcagcagtattgcaggtgaagaatagagcacactgtggacagttctaagcaacgtggaccacgcttcattatgaaaaactattatgacactggtggtgggcaggggagggcagcgcttaaatttttgttcaatacatctagaagaagtcagagaagtagaaaaacaattacaaattttattattttatttcacagctataccattgctaacattatcattattgaatctttatcactgaaaaaggatagttttcttgtatgtgatataatctcaatgctatataaaatgtaaataaatcaaaacaatttttttacaagcaaatcactcacccagagatgatgtctaccaacagagatgacaacatatcaaggattacaacatgttattatagctttctcaacaatgtaattttaaatgcaaataacattttaaataatgaaaataacctacaatgaggcagcatgtaaaaatgacaaacccttataattgctcaaataaaaaccaaatttttcttatttcatgcagaaatcattcatttttcatatttgcaactttaaaaattgtaccactttattaatttttttttttttatggagtctctctctgtcgcccaggctggagtgcagtggcacgatctcggctcactgcaagcttcacctcccaggttcacgcatttctcctgcctcagctcccgagtagctgggactacaggcgcccaccaccacacccggctaatttttggtatttttagtagagacggggttttaccatgttagccaggatggtctcgatcacctgaccttgtgatccacccgcctaggcctcccaaagtgctgggattacacacgtgtgccactgcgcccacaatattaaatcatttttataaagattatctttaattagatattta

SEQ ID NO: 711830 - DNA, 1442 bp, Homo sapiens
ttcttataatcaatttcttataatcaatggcatgttaagtttaattagctgtgggttttctctagtgatttataaattaacaacacataatatatttaatgaaatatggcattattcccattttgctgataaatcacagcagagaggttgagtaacttgcccaagtcatatagttggttaggaaaagagctgggattcaaatcaaggcagcctgactcaaaggctcaagtctgtgctcttaacctctatgccttactgtaacagtctcacattgaggactacatagttatgaataatggtgtttcatacatttctgcatttgaaaatatttgaatatgtccatccttggattctaatttcattcaccatacccactatccaaactattatattcaagctctgagatggcatacagagagtaccacataaccaagtasactgtagataccacaatatggatttgggaaacaatctaatttgcatgtgctttcttaccatctacactagcatcatccaccaaaatgatttccttcagcagtattgcaggtgaagaatagagcacactgtggacagttctaagcaacgtggaccacgcttcattatgaaaaactattatgacactggtggtgggcaggggagggcagcgcttaaatttttgttcaatacatctagaagaagtcagagaagtagaaaaacaattacaaattttattattttatttcacagctataccattgctaacattatcattattgaatctttatcactgaaaaaggatagttttcttgtatgtgatataatctcaatgctatataaaatgtaaataaatcaaaacaatttttttacaagcaaatcactcacccagagatgatgtctaccaacagagatgacaacatatcaaggattacaacatgttattatagctttctcaacaatgtaattttaaatgcaaataacattttaaataatgaaaataacctacaatgaggcagcatgtaaaaatgacaaacccttataattgctcaaataaaaaccaaatttttcttatttcatgcagaaatcattcatttttcatatttgcaactttaaaaattgtaccactttattaatttttttttttttatggagtctctctctgtcgcccaggctggagtgcagtggcacgatctcggctcactgcaagcttcacctcccaggttcacgcatttctcctgcctcagctcccgagtagctgggactacaggcgcccaccaccacacccggctaatttttggtatttttagtagagacggggttttaccatgttagccaggatggtctcgatcacctgaccttgtgatccacccgcctaggcctcccaaagtgctgggattacacacgtgtgccactgcgcccacaatattaaatcatttttataaagattatctttaattagatattta

SEQ ID NO: 711831 - DNA, 1442 bp, Homo sapiens
ttcttataatcaatttcttataatcaatggcatgttaagtttaattagctgtgggttttctctagtgatttataaattaacaacacataatatatttaatgaaatatggcattattcccattttgctgataaatcacagcagagaggttgagtaacttgcccaagtcatatagttggttaggaaaagagctgggattcaaatcaaggcagcctgactcaaaggctcaagtctgtgctcttaacctctatgccttactgtaacagtctcacattgaggactacatagttatgaataatggtgtttcatacatttctgcatttgaaaatatttgaatatgtccatccttggattctaatttcattcaccatacccactatccaaactattatattcaagctctgagatggcatacagagagtaccacataaccaagtagactgtagataccacaatatggatttgggaaacaatctaattwgcatgtgctttcttaccatctacactagcatcatccaccaaaatgatttccttcagcagtattgcaggtgaagaatagagcacactgtggacagttctaagcaacgtggaccacgcttcattatgaaaaactattatgacactggtggtgggcaggggagggcagcgcttaaatttttgttcaatacatctagaagaagtcagagaagtagaaaaacaattacaaattttattattttatttcacagctataccattgctaacattatcattattgaatctttatcactgaaaaaggatagttttcttgtatgtgatataatctcaatgctatataaaatgtaaataaatcaaaacaatttttttacaagcaaatcactcacccagagatgatgtctaccaacagagatgacaacatatcaaggattacaacatgttattatagctttctcaacaatgtaattttaaatgcaaataacattttaaataatgaaaataacctacaatgaggcagcatgtaaaaatgacaaacccttataattgctcaaataaaaaccaaatttttcttatttcatgcagaaatcattcatttttcatatttgcaactttaaaaattgtaccactttattaatttttttttttttatggagtctctctctgtcgcccaggctggagtgcagtggcacgatctcggctcactgcaagcttcacctcccaggttcacgcatttctcctgcctcagctcccgagtagctgggactacaggcgcccaccaccacacccggctaatttttggtatttttagtagagacggggttttaccatgttagccaggatggtctcgatcacctgaccttgtgatccacccgcctaggcctcccaaagtgctgggattacacacgtgtgccactgcgcccacaatattaaatcatttttataaagattatctttaattagatattta

SEQ ID NO: 711832 - DNA, 1639 bp, Homo sapiens
ttactttcatagtcatacctcaataggaatgtctctgatacccttttttaacagcaagtctttagaatggattatttgtagtgattaaaaaaaggagttggattggggtaaaatatcaagagaagatgtcaacaacagattagaaaaaggagaggatggattctgagtgaaagtggcattgctcttcagtttcttcatgatttcaaagcatgatacaggtgcatgggcggaaaaaataagcaccttcttcatcattcataaataaaaacaaattatttattctaaattgaattttggataaactaccaattaataaaaaagctcaaacacaaactattaatatacacacttgaaccacaactacacagaaataaatgactaaatataagcttatattttgaacccataaaagtttataaccaacataaactagaagtaaaaattatgaaaaattccatattgtggtattttatttttaaagaaaaaaaaaagaggaaacctatgatttgttataagcattttgaggagaaagtgaaattctgagtataagatttttttcctacctttatttgctatgtggttaattaatatagtattaatcgataattataaaatggttttgaagatttaaagtataaaatttcacaaaaattcatactagtaaaatgttatcactttaatcttgcaagattttccgtcagtttaaactaggatttatttgcttaactgataattaccaatatcaagtamaaatgtcatatcaatacaagtaataaaatttcacaatataatttcataaaccccattcattttgaaacaacatgttaaatgtatgctttgaaaattgttttacatatttaaaatagtgcaattaaaataacttgccaaagtgactgtatcattccagtcaaaccatttgaaaaacctggcacatagaaacatgcttaaattatcagtcacatgaccatctggctttgggagaaactaggtctatatttctaatgagcatggaaaacattagcagttcttcagaaaatgtgttatttgctgatactggttacattcaaagtaaaaaacaaatctttttttttttttttttttttttgagacagagtcttgctctgtcaccaggctggagtgcaatggtgcaatctcggctcactgcaacctccgcttcccgggttcaagtgattctcctgcctcagcctcccaagtagctgggactacaggcgcacatcaccatgcccacctaatttatgtatttttagtagaaatgaggtttcaccatgttggccaggccaggcacagtagctcatgcctttaatcccagcactttgggaggccaaggcgggcagatcacgaagtcaaaaaacaaatctttaccacctgtacaaaaccctgtccaaagtaagaaataattaaatcttcactccaaccaaaaaatgttgttaatgtgcttacttgtttttcacttacttagcgattaacattattgaaaattattgcagcttcttaatgctatattgggagaaaaaagctcattttgagctgtcactgattgtcatgtcaaaagaataaaaatcatgattattgatttttaatgtagattacttttcaatcaaaacctctcttcaagtca

SEQ ID NO: 711833 - DNA, 1639 bp, Homo sapiens
ttactttcatagtcatacctcaataggaatgtctctgatacccttttttaacagcaagtctttagaatggattatttgtagtgattaaaaaaaggagttggattggggtaaaatatcaagagaagatgtcaacaacagattagaaaaaggagaggatggattctgagtgaaagtggcattgctcttcagtttcttcatgatttcaaagcatgatacaggtgcatgggcggaaaaaataagcaccttcttcatcattcataaataaaaacaaattatttattctaaattgaattttggataaactaccaattaataaaaaagctcaaacacaaactattaatatacacacttgaaccacaactacacagaaataaatgactaaatataagcttatattttgaacccataaaagtttataaccaacataaactagaagtaaaaattatgaaaaattccatattgtggtattttatttttaaagaaaaaaaaaagaggaaacctatgatttgttataagcattttgaggagaaagtgaaattctgagtataagatttttttcctacctttatttgctatgtggttaattaatatagtattaatcgataattataaaatggttttgaagatttaaagtataaaatttcacaaaaattcatactagtaaaatgttatcactttaatcttgcaagattttccgtcagtttaaactaggatttatttgcttaactgataattaccaatatcaagtacaaatgtcatatcaatacaagtaataaaatttcacaatataatttcataaaccccattcattttgaaacaacatgttaaatgtatgctttgaaaattgttttacatatttaaaatagtgcaattaaaataacttgccaaagtgactgtatcattccagtcaaaccatttgaaaaacctggcacatagaaacatgcttaaattatcagtcacatgaccatctggctttgggagaaactaggtctatatttctaatgagcatggaaaacattagcagttcttcagaaaatgtgttatttgctgatactggttacattcaaagtaaaaaacaaatctttttttttttttttttttttttgagacagagtcttgctctgtcaccaggctggagtgcaatggtgcaatctcggctcactgcaacctccgcttcccgggttcaagtgattctcctgcctcagcctcccaagtagctgggactacaggcrcacatcaccatgcccacctaatttatgtatttttagtagaaatgaggtttcaccatgttggccaggccaggcacagtagctcatgcctttaatcccagcactttgggaggccaaggcgggcagatcacgaagtcaaaaaacaaatctttaccacctgtacaaaaccctgtccaaagtaagaaataattaaatcttcactccaaccaaaaaatgttgttaatgtgcttacttgtttttcacttacttagcgattaacattattgaaaattattgcagcttcttaatgctatattgggagaaaaaagctcattttgagctgtcactgattgtcatgtcaaaagaataaaaatcatgattattgatttttaatgtagattacttttcaatcaaaacctctcttcaagtca

SEQ ID NO: 711834 - DNA, 621 bp, Homo sapiens
tcaaggttttactcttttcagttgctgtattagtattaaaagaaaacctcttaggttcctaagtaaagacatttttgatgacatggtaataaaatttttgaacattaatgtcttttgacatgataagtccaaatctatacctattcccaaggcccaacctggatctattattactaaagatattaatacatgctttgagttatttgcaatataagtaagtcagatgctacatatcgtcctctttccttgacagtctgtgagctccttgagttccatcctgcatactttttagactgtgcttccgttttgacttcaatcattttcatagaattaacctacagtgattccttaccctgtatccatccatatacccaactacctatgrttgtctccatctgaatgcccctccccagcccacccttaccttctcagagccttaagaatttggtttaggtatcacctcttctagaaaacttacctttcatatatagttcaagagttcctcttctgagtacttacacgttacattacatacttcatgtaatgtgactagttgggaacacacatgcttgatatataattagtatatcatgaatagttaaagtcacttcgtcctttcaa

SEQ ID NO: 711835 - DNA, 535 bp, Homo sapiens
ctccacaccagaagaaatcaagaaaaggaagaaggctgtcatttttatttttatttttttttgtttcagtgcaggcaaaaagtgcttcatggtagaagaaggcacagagatcttggtggagatgttggcgtaaccacaactggtcctttcaaacattttgtgggaatgcttcctgaaaacgattgctgctatgctttgtatgatgcacactttgaaactaaggaatccagaaaagaagagttgatgggtttttgtggggtttttaaaattttttttktgtgtgtgggcacccaactagaacctatgaaaagtaaactgagctatgcaagctccaaagatgcaatctaaaaggaattttaaggcataaacatgaatgggccagaagatctcaatcgggcttgtattgctgaaaagctaggtgggtccttaattgcaacctttgaaggatgccctgtgtagatcatcattcagtgccatacattgagagcttccgtgtttaatgttattctttcactatataaataaagcatatata

SEQ ID NO: 711836 - DNA, 1465 bp, Homo sapiens
ctgtctcccagaatgtcttctaaactttctgatacctgaaaatccacaataaagtttctcccacatgatacgaagctcacacagagtccatgaagctgctgtagaacacacgctgccataaccaaagccgctgtctccttgatctgctaccactaaattcccaaagaatccaagggctgaaagccccagccactatgcctgagccctccagacccagaaaccactctgtggattcagctgaaatgaaggaacagacacctacttccgtgttacacttggttgcagagtttgcctcgtgctcccactgtctgagagagagcatggaaacactaacccatttttgcttgcagctttctatcactaggaccagaattcattgtacttgtcagagaattatcaagaaacagatgctattatgagactttatccttggttaatacttgtgcactctggctttctttccccttayggtgaattatctaattgtttaaagcaaaccatgccaagatgctactagttatgcgcatccttagatttagcctggtttcaaaacctatgctacctgggataatatactatacaatgtgtaaagagcattttatgaggcaaaatagttacataattatgagcagactctagagcctggctgcttgcatccaaatcttgactccatttgtaaccttaagcaagttagtcattgtctcagcctgttcaggttactacaacaaaatcttataaactgcatggcatataaacaacagaaacttatttctctcaattctgcagactgggaagttcaagatcaaggtacaagtaaattcagagtctggtaaggggccccttccttgttcatagatagtgccctcttgctgtttcctcacatgctggaagtgggtgagaggtctctgttggttctctttataaaggcactaatcccattcatgaaggctttgcctcatgaccctaatcacctcccaaatcccctatggcctaatactattgtcgtgggctttaggatttcaacacaagaatatgcaagggagggacgcaaacattcagactatagcaattattctttctaggttttgggttcctcatctctataatgagggtgatagcagtagtacctgctacataagattgtagtgaggataaaatatgtcaatgtaggcagagcacttggaggagcggctgccacagtaagtgcttcataaatggaaactgttattttgcattcctgtcattttgaaaatgtaaccagatatcatgttgtcataccaggataattctcacttcagcaccaagatctctatttcatccacctgaaatctaaattttggagttcctcagagctctgtgatggattttcattttttcccctggtcattttcttttctaaatgatcttatgctttactctgactatatatcatttaagtgtcatcaactccaaaatttatttctca

SEQ ID NO: 711837 - DNA, 1465 bp, Homo sapiens
ctgtctcccagaatgtcttctaaactttctgatacctgaaaatccacaataaagtttctcccacatgatacgaagctcacacagagtccatgaagctgctgtagaacacacgctgccataaccaaagccgctgtctccttgatctgctaccactaaattcccaaagaatccaagggctgaaagccccagccactatgcctgagccctccagacccagaaaccactctgtggattcagctgaaatgaaggaacagacacctacttccgtgttacacttggttgcagagtttgcctcgtgctcccactgtctgagagagagcatggaaacactaacccatttttgcttgcagctttctatcactaggaccagaattcattgtacttgtcagagaattatcaagaaacagatgctattatgagactttatccttggttaatacttgtgcactctggctttctttccccttacggtgaattatctaattgtttaaagcaaaccatgccaagatgctactagttatgcgcatccttagatttagcctggtttcaaaacctatgctacctgggataatatactatacaatgtgtaaagagcattttatgaggcaaaatagttacataattatgagcagactctagagcctggctgcttgcatccaaatcttgactccatttgtaaccttaagcaagttagtcattgtctcagcctgttcaggttactacaacaaaatcttataaactgcatggcatataaacaacagaaacttatttctctcaattctgcagactgggaagttcaagatcaaggtacaagtaaattcagagtctggtaaggggccccttccttgttcatagatagtgccctcttgctgtttcctcacatgctggaagtgggtgagaggtctctgttggttctctttataaaggcactaatcccattcatgaaggctttgcctcatgaccctaatcacctcccaaatcccctatggcctaatactattgtcktgggctttaggatttcaacacaagaatatgcaagggagggacgcaaacattcagactatagcaattattctttctaggttttgggttcctcatctctataatgagggtgatagcagtagtacctgctacataagattgtagtgaggataaaatatgtcaatgtaggcagagcacttggaggagcggctgccacagtaagtgcttcataaatggaaactgttattttgcattcctgtcattttgaaaatgtaaccagatatcatgttgtcataccaggataattctcacttcagcaccaagatctctatttcatccacctgaaatctaaattttggagttcctcagagctctgtgatggattttcattttttcccctggtcattttcttttctaaatgatcttatgctttactctgactatatatcatttaagtgtcatcaactccaaaatttatttctca

SEQ ID NO: 711838 - DNA, 1465 bp, Homo sapiens
ctgtctcccagaatgtcttctaaactttctgatacctgaaaatccacaataaagtttctcccacatgatacgaagctcacacagagtccatgaagctgctgtagaacacacgctgccataaccaaagccgctgtctccttgatctgctaccactaaattcccaaagaatccaagggctgaaagccccagccactatgcctgagccctccagacccagaaaccactctgtggattcagctgaaatgaaggaacagacacctacttccgtgttacacttggttgcagagtttgcctcgtgctcccactgtctgagagagagcatggaaacactaacccatttttgcttgcagctttctatcactaggaccagaattcattgtacttgtcagagaattatcaagaaacagatgctattatgagactttatccttggttaatacttgtgcactctggctttctttccccttacggtgaattatctaattgtttaaagcaaaccatgccaagatgctactagttatgcgcatccttagatttagcctggtttcaaaacctatgctacctgggataatatactatacaatgtgtaaagagcattttatgaggcaaaatagttacataattatgagcagactctagagcctggctgcttgcatccaaatcttgactccatttgtaaccttaagcaagttagtcattgtctcagcctgttcaggttactacaacaaaatcttataaactgcatggcatataaacaacagaaacttatttctctcaattctgcagactgggaagttcaagatcaaggtacaagtaaattcagagtctggtaaggggccccttccttgttcatagatagtgccctcttgctgtttcctcacatgctggaagtgggtgagaggtctctgttggttctctttataaaggcactaatcccattcatgaaggctttgcctcatgaccctaatcacctcccaaatcccctatggcctaatactattgtcgtgggctttaggatttcaacacaagaatatgcaagggagggaygcaaacattcagactatagcaattattctttctaggttttgggttcctcatctctataatgagggtgatagcagtagtacctgctacataagattgtagtgaggataaaatatgtcaatgtaggcagagcacttggaggagcggctgccacagtaagtgcttcataaatggaaactgttattttgcattcctgtcattttgaaaatgtaaccagatatcatgttgtcataccaggataattctcacttcagcaccaagatctctatttcatccacctgaaatctaaattttggagttcctcagagctctgtgatggattttcattttttcccctggtcattttcttttctaaatgatcttatgctttactctgactatatatcatttaagtgtcatcaactccaaaatttatttctca

SEQ ID NO: 711839 - DNA, 1465 bp, Homo sapiens
ctgtctcccagaatgtcttctaaactttctgatacctgaaaatccacaataaagtttctcccacatgatacgaagctcacacagagtccatgaagctgctgtagaacacacgctgccataaccaaagccgctgtctccttgatctgctaccactaaattcccaaagaatccaagggctgaaagccccagccactatgcctgagccctccagacccagaaaccactctgtggattcagctgaaatgaaggaacagacacctacttccgtgttacacttggttgcagagtttgcctcgtgctcccactgtctgagagagagcatggaaacactaacccatttttgcttgcagctttctatcactaggaccagaattcattgtacttgtcagagaattatcaagaaacagatgctattatgagactttatccttggttaatacttgtgcactctggctttctttccccttacggtgaattatctaattgtttaaagcaaaccatgccaagatgctactagttatgcgcatccttagatttagcctggtttcaaaacctatgctacctgggataatatactatacaatgtgtaaagagcattttatgaggcaaaatagttacataattatgagcagactctagagcctggctgcttgcatccaaatcttgactccatttgtaaccttaagcaagttagtcattgtctcagcctgttcaggttactacaacaaaatcttataaactgcatggcatataaacaacagaaacttatttctctcaattctgcagactgggaagttcaagatcaaggtacaagtaaattcagagtctggtaaggggccccttccttgttcatagatagtgccctcttgctgtttcctcacatgctggaagtgggtgagaggtctctgttggttctctttataaaggcactaatcccattcatgaaggctttgcctcatgaccctaatcacctcccaaatcccctatggcctaatactattgtcgtgggctttaggatttcaacacaagaatatgcaagggagggacgcaaacattcagactatagcaattattctttctaggttttgggttcctcatctctataatgagggtgatagcagtagtacctgctacataagattgtagtgaggataaaatatgtcaatgtaggcagagcacttggaggagcggctgccacagtaagtgcttcataaatggaaactgttattttgcattcctgtcrttttgaaaatgtaaccagatatcatgttgtcataccaggataattctcacttcagcaccaagatctctatttcatccacctgaaatctaaattttggagttcctcagagctctgtgatggattttcattttttcccctggtcattttcttttctaaatgatcttatgctttactctgactatatatcatttaagtgtcatcaactccaaaatttatttctca

SEQ ID NO: 711840 - DNA, 770 bp, Homo sapiens
gtcagtctactcaggaaactcctatggatcaaagattttgtaaccatagtatctataaaacctatcatctgtgccttaaaacacaggttgcttttatccatagaaaatttttccacattgaatcccccacaacggttcaataaccacgactcctaataactccacacaaacatgcccctctcccccaacaagatacaaactatggaaaatcaatcaatctttattctggattaatgaagctaaagcataatacaaagacaagttcatattacctcacttagatcatgctgtttatgaataataagggatctactcactgctactcaatgctgttcctccttgctatcaaaaaattcatatttaaaacctaagacctgctgtgatagtattaagagrttggacttttgcgaagttattaagtcatgaggctccaccctcgtgaacagaattaatgcccttcttaaaaaggcacagaaaaacctcccttcttccttctcccatgtgaagacgcagcaaggcattatctatgaagcagagagcaagcccttaccaacaatgactctacaccttaaccttaaacttctcatcctccagactgtaaactagttcaaccattgtggaagacagtgtggcgattcctcaaggatctagaactagaaataccatttgacccagccatcccattactgggtatacccaaaggattataaatcatgctactataaagacacacgcatacgtatgcttattgtggcactattcacaatagc

SEQ ID NO: 711841 - DNA, 770 bp, Homo sapiens
gtcagtctactcaggaaactcctatggatcaaagattttgtaaccatagtatctataaaacctatcatctgtgccttaaaacacaggttgcttttatccatagaaaatttttccacattgaatcccccacaacggttcaataaccacgactcctaataactccacacaaacatgcccctctcccccaacaagatacaaactatggaaaatcaatcaatctttattctggattaatgaagctaaagcataatacaaagacaagttcatattacctcacttagatcatgctgtttatgaataataagggatctactcactgctactcaatgctgttcctccttgctatcaaaaaattcatatttaaaacctaagacctgctgtgatagtattaagaggttggacttttgcgaagttattaagtcatgaggctccaccctcgtgaacagaattaatgcccttcttaaaaaggcacagaaaaacctcccttcttccttctcccatgtgaagacgcagcaaggcattatctatgaagcagagagcaagcccttaccaacaatgacyctacaccttaaccttaaacttctcatcctccagactgtaaactagttcaaccattgtggaagacagtgtggcgattcctcaaggatctagaactagaaataccatttgacccagccatcccattactgggtatacccaaaggattataaatcatgctactataaagacacacgcatacgtatgcttattgtggcactattcacaatagc

SEQ ID NO: 711842 - DNA, 579 bp, Homo sapiens
aaggaagttaatgaaattctgagaggtaaccacaataaaaacttatcatattaaaatggtgtcaggaccagcaatcaggatatccccattgctagtgaatgaagttaaaccctcaccttataccatatgaacaacttaacttaaaatcactgatctaaatgtaaaagataaaactataaattttaagaaaacataggcataaatattcagaaccatggatttggcagtattttcttaaatatgataccaaaagcacaagtaacaaaaaaaataaaagataattcggactttatcaactttaaaaactcttgtgcttcaaaggctactattaagaaagtgaaaacacaacsctcaaaatgggagatactatcatttagaattatatatctaataaggtcttgtatctaaaatataagaacaattataactcaataataaaaagactaacaactatttaaaaattagcaaaggatatgaatagacacttctccaaagaatatatacaaatcgtcagtaatcacatgaaaaggtgctcatcatcattagttatcaggaaaatgcaaacacacacacacacac

SEQ ID NO: 711843 - DNA, 579 bp, Homo sapiens
aaggaagttaatgaaattctgagaggtaaccacaataaaaacttatcatattaaaatggtgtcaggaccagcaatcaggatatccccattgctagtgaatgaagttaaaccctcaccttataccatatgaacaacttaacttaaaatcactgatctaaatgtaaaagataaaactataaattttaagaaaacataggcataaatattcagaaccatggatttggcagtattttcttaaatatgataccaaaagcacaagtaacaaaaaaaataaaagataattcggactttatcaactttaaaaactcttgtgcttcaaaggctactattaagaaagtgaaaacacaacgctcaaaatgggagatactatcatttagaattatatatctaayaaggtcttgtatctaaaatataagaacaattataactcaataataaaaagactaacaactatttaaaaattagcaaaggatatgaatagacacttctccaaagaatatatacaaatcgtcagtaatcacatgaaaaggtgctcatcatcattagttatcaggaaaatgcaaacacacacacacacac

SEQ ID NO: 711844 - DNA, 645 bp, Homo sapiens
ttctgagataagaaaacaagcttttccctttgggacccacttagtcattttgatagaaaagcatatttaactgctgtctttggaatattctttagtatatttttgatttaaaaaaatctatcctttacttgcacattacagttatggagataaagagatagctccttaagtactaaygcgaagaggggaataaaaggaatggaggcaacgtcacttgggttcccaaagcatcatcaccctacagagacagagttcttgactttgccattagcgacagttggggctgttaaagtcaaataaaaatatagaaacaaatcactatgcaaagtgtttcatttgggaatgcatataaaaacagaatcactatttagggcatacatacagaatggcatggtctttggcatgtttgaagaacaaagaaaaggttggaagttctattagaaagggacatgttacacatttgaaaggaagctcagtggcactagtgaagttttggggacctgacactctttaattagtgaatgacaatggtaggtaaaactggtcttaacgtcacagcacacatctagtccgtatcagcagccactaggtaaaactgatcttaaggttacagcaggccatttcagcagccaagctggtggatca

SEQ ID NO: 711845 - DNA, 1120 bp, Homo sapiens
ctgaaagatgttaattgctggccccatccccctgttaatatcgtaatcattgtttggcaacattttctaaatcgtatctgagagcctggctgctgtgacgcattgattcattgtggttggcaccatatgctyccatctgctgtgagcagtataattgttctcagtcatcagcatcgagcacccatggctaattcatggggaaaaactccagtgctttgcaccaaagtccaactcgtctgtcagttcactcctgtggaagggggccaggctctcagcatgcctctccctcctgtcctgggcattggtctcaatcagaccaggtactcagctctagcttttcatggctaccagtaaggacaagcctttcatttctgcaaaaagaacttcgcttgacttttagaatgagatcccttgttggatctttgttgcatatacatttgatatgctattttcaatactagttgatctgggttcaaatcctacttctacccttcagtagcctgacattgggccagtaactacacctcactgaggttggcgtttcttaacctccctctgagatgtcacttcttcctctgtagcatggggcaaatatctaccttgccaagggtatggtgaagatttaacttaattagctggggtaagtaaagcattaagcacagttcctggctgatagtaagtgctcaataaatggtagtgactattgtcactggagtgcctattctttgctcacagagcattttgaagactggttattattttaactttctccacaggcatttctagttctctagaagcttgctcctcaaattatggtccttggaacagcagatgtttatgatcagcagagaaaacgtgttgctaataaagcatcctgcacgctaaagcattcaggtgtgtgggacttaggttcattctttccagggttaggttagctgctgatgcagctaatataggcagtcgtccttgtcgtaggagtttcaggaaagccaggcttgctggagaatgccatgttaaaagtgtattccccaagagtgaatactccttaatgcaaataaattcaaaataacttagtttctggtggagacgaggaaacttaagcgaagagactaatatttca

SEQ ID NO: 711846 - DNA, 1120 bp, Homo sapiens
ctgaaagatgttaattgctggccccatccccctgttaatatcgtaatcattgtttggcaacattttctaaatcgtatctgagagcctggctgctgtgacgcattgattcattgtggttggcaccatatgcttccatctgctgtgagcagtataattgttctcagtcatcagcatcgagcacccatggctaattcatggggaaaaactccagtgctttgcaccaaagtccaactcgtctgtcagttcactcctgtggaagggggccaggctctcagcatgcctctccctccygtcctgggcattggtctcaatcagaccaggtactcagctctagcttttcatggctaccagtaaggacaagcctttcatttctgcaaaaagaacttcgcttgacttttagaatgagatcccttgttggatctttgttgcatatacatttgatatgctattttcaatactagttgatctgggttcaaatcctacttctacccttcagtagcctgacattgggccagtaactacacctcactgaggttggcgtttcttaacctccctctgagatgtcacttcttcctctgtagcatggggcaaatatctaccttgccaagggtatggtgaagatttaacttaattagctggggtaagtaaagcattaagcacagttcctggctgatagtaagtgctcaataaatggtagtgactattgtcactggagtgcctattctttgctcacagagcattttgaagactggttattattttaactttctccacaggcatttctagttctctagaagcttgctcctcaaattatggtccttggaacagcagatgtttatgatcagcagagaaaacgtgttgctaataaagcatcctgcacgctaaagcattcaggtgtgtgggacttaggttcattctttccagggttaggttagctgctgatgcagctaatataggcagtcgtccttgtcgtaggagtttcaggaaagccaggcttgctggagaatgccatgttaaaagtgtattccccaagagtgaatactccttaatgcaaataaattcaaaataacttagtttctggtggagacgaggaaacttaagcgaagagactaatatttca

SEQ ID NO: 711847 - DNA, 1120 bp, Homo sapiens
ctgaaagatgttaattgctggccccatccccctgttaatatcgtaatcattgtttggcaacattttctaaatcgtatctgagagcctggctgctgtgacgcattgattcattgtggttggcaccatatgcttccatctgctgtgagcagtataattgttctcagtcatcagcatcgagcacccatggctaattcatggggaaaaactccagtgctttgcaccaaagtccaactcgtctgtcagttcactcctgtggaagggggccaggctctcagcatgcctctccctcctgtcctgggcattggtctcaatcagaccaggtactcagctctagcttttcatggytaccagtaaggacaagcctttcatttctgcaaaaagaacttcgcttgacttttagaatgagatcccttgttggatctttgttgcatatacatttgatatgctattttcaatactagttgatctgggttcaaatcctacttctacccttcagtagcctgacattgggccagtaactacacctcactgaggttggcgtttcttaacctccctctgagatgtcacttcttcctctgtagcatggggcaaatatctaccttgccaagggtatggtgaagatttaacttaattagctggggtaagtaaagcattaagcacagttcctggctgatagtaagtgctcaataaatggtagtgactattgtcactggagtgcctattctttgctcacagagcattttgaagactggttattattttaactttctccacaggcatttctagttctctagaagcttgctcctcaaattatggtccttggaacagcagatgtttatgatcagcagagaaaacgtgttgctaataaagcatcctgcacgctaaagcattcaggtgtgtgggacttaggttcattctttccagggttaggttagctgctgatgcagctaatataggcagtcgtccttgtcgtaggagtttcaggaaagccaggcttgctggagaatgccatgttaaaagtgtattccccaagagtgaatactccttaatgcaaataaattcaaaataacttagtttctggtggagacgaggaaacttaagcgaagagactaatatttca

SEQ ID NO: 711848 - DNA, 600 bp, Homo sapiens
agaagtgttggtttaagcagggtttctcaaacggatgggtagaatcaccttagagtgcctttttaaaatgcaaattcccaggccctttcttggtgactttgatttgggaggcctgggttgggacatagaaatcagaatgtttgacaggcattccaggcaagtaagggatatgtttatgagctgcaaatagaatgaaacttcagaggccttgtatttggttcacagagcagtctttgaaacttcaatgcttctttgctgacaataggttttgaaggatggccttttgttaaatttactaaatttatrtttggagatgatatttatacaagtgatttatacagatcatttatgtagtgtcattatattctgactggcatgtgaaagtaaaactttccagacgcatgactgtgataggcagaaaaatggctccccagaagatatccacattctaatccctagaaactgtaaatgttactttatttacaaaaagagtctttgcagatatgatttaaattaaagatctttagatgagattattttggattaaccaagtgggccctagattccatcacaaacatccttataagagacggagcagag

SEQ ID NO: 711849 - DNA, 623 bp, Homo sapiens
tattctctaaaagaaatacacatattgtgggaattagtgtttccctatgatttttttttgtttctttttattttggcttatagaaattgataagaacaatatgagaaactcccatatatcttttatacagattcacccatgatttaaatgctgtcttgtttgtttcatcattatctgtctatctatctatctatctatctatctatctatctatctatctatctacctattatctatctatctctcatctattgatatctgttcttaaggtctttttctccatctcagggatatttttaaaaacaaaacaaaacaatttttgaatcttttcctcctgagattgtctcagcgttcttctctgggaattcccartggttaaattttggaacttttgagtggtatagttcatatattttcacttttctctcatatttccatcttttagttctaatttcatctatatattctagaaagtgtcaaggactatgtattacattgtatgatattaatggatttcttaatgttgtgccaaacttgcattcctggaacaaatcaggtttggttttcttaatgtagtgctgaatctgtaaatattttattttatatgtttgcattgaaattca

SEQ ID NO: 711850 - DNA, 1301 bp, Homo sapiens
tataatggacaaattactattatttaggaactttttaaaatgtttttatatgaataaatatctttccgaaagaatggttttaaaccataatggatggaatttgtacattcacatcagggttgctctttgaaacatttctgtgggatgttgttggcttattccaagtttgctgctattacccaaaacattgtttgaactttgcttctgaaactgcctccasaatcagtatacaagacatacaagaaaaccagcctcatttttcaagtcacatatatttccatcaagtatattttcctcttccaggatacttgtgagagttgctctccactgattttcattaacctaatgtccaaccttaaggtcaggaatagagtagtcaagcatcattaatttggaatccactattttggaataagaaatagttcagacaagtaaacttcaaccatacagttgctttctttgaaagaaggatttgtcaagcaaactaatcatatatgcaaatcaaaaggcaactatttaaagctactcaaaagaataaactgattaagcattctcaagtacatacaccctatattaaagcatctttacccaacatatttgtaggctcattacaaattgtctattaaccagtcgttccctcatgggactgtagaaagcctttctttgttgacctgtttcctgtcactgtcaatacttgaatgcaatgacattgtatctcttttaaaagatttcataattcaaacttttcactaattcagaccaagcttccacaaattagtctgaattaaagaagtttggctgtactaggttgacccatatgaaattggtgctatgcaaccattttttacctaaaaaatgacaattttatatggttcaatctaatacatttcttttctggtgcccctttccaaggaactaaaagcattctttattcccatgctttcctcctatggtattttaaaaataaaagcagaagagtgggattgactgccacagcccccaaccacctgcccctcagttcacaagtacagaaactgggagatttaacagaaagaagaaaatcattcaaaacacaacttctgctttctttgctgtacagagcttttacattcgatgtggtcctacctgcttactttcgtttttgttgcctgagcttttggtgtcatttccatattatcattgccaagaactatgtcacaaagctttcctgtatgtgttctaggagttttagggtttcaggtttcatgtttaagtctttaatccattttgagttgatatttatgtatggtgtaagataaggg

SEQ ID NO: 711851 - DNA, 1301 bp, Homo sapiens
tataatggacaaattactattatttaggaactttttaaaatgtttttatatgaataaatatctttccgaaagaatggttttaaaccataatggatggaatttgtacattcacatcagggttgctctttgaaacatttctgtgggatgttgttggcttattccaagtttgctgctattacccaaaacattgtttgaactttgcttctgaaactgcctccacaatcagtatacaagacatacaagaaaaccagcctcatttttcaagtcacatatatttccatcaagtatattttcctcttccaggatacttgtgagagttsctctccactgattttcattaacctaatgtccaaccttaaggtcaggaatagagtagtcaagcatcattaatttggaatccactattttggaataagaaatagttcagacaagtaaacttcaaccatacagttgctttctttgaaagaaggatttgtcaagcaaactaatcatatatgcaaatcaaaaggcaactatttaaagctactcaaaagaataaactgattaagcattctcaagtacatacaccctatattaaagcatctttacccaacatatttgtaggctcattacaaattgtctattaaccagtcgttccctcatgggactgtagaaagcctttctttgttgacctgtttcctgtcactgtcaatacttgaatgcaatgacattgtatctcttttaaaagatttcataattcaaacttttcactaattcagaccaagcttccacaaattagtctgaattaaagaagtttggctgtactaggttgacccatatgaaattggtgctatgcaaccattttttacctaaaaaatgacaattttatatggttcaatctaatacatttcttttctggtgcccctttccaaggaactaaaagcattctttattcccatgctttcctcctatggtattttaaaaataaaagcagaagagtgggattgactgccacagcccccaaccacctgcccctcagttcacaagtacagaaactgggagatttaacagaaagaagaaaatcattcaaaacacaacttctgctttctttgctgtacagagcttttacattcgatgtggtcctacctgcttactttcgtttttgttgcctgagcttttggtgtcatttccatattatcattgccaagaactatgtcacaaagctttcctgtatgtgttctaggagttttagggtttcaggtttcatgtttaagtctttaatccattttgagttgatatttatgtatggtgtaagataaggg

SEQ ID NO: 711852 - DNA, 1301 bp, Homo sapiens
tataatggacaaattactattatttaggaactttttaaaatgtttttatatgaataaatatctttccgaaagaatggttttaaaccataatggatggaatttgtacattcacatcagggttgctctttgaaacatttctgtgggatgttgttggcttattccaagtttgctgctattacccaaaacattgtttgaactttgcttctgaaactgcctccacaatcagtatacaagacatacaagaaaaccagcctcatttttcaagtcacatatatttccatcaagtatattttcctcttccaggatacttgtgagagttgctctccactgattttcattaacctaatgtccaaccttaaggtcaggaatagagtagtcaagcatcattaatttggaatccactattttggaataagaaatagttcagacaagtaaacttcaaccatacagttgctttctttgaaagaaggatttgtcaagcaaactaatcatatatgcaaatcaaaaggcaactatttaaagctactcaaaagaataaactgattaagcattctcaagtacatacaccctatattaaagcatctttacccaacatatttgtaggctcattacaaattgtctattaaccagtcgttccctcatgggactgtagaaagcctttctttgttgacctgtttcctgtcactgtcaatacttgaatgcaatgacattgtatctcttttaaaagatttcataattcaaacttttcactaattcagaccaagcttccacaaattagtctgaattaaagaagtttggctgtactaggttgacccatatgaaattggtgctatgcaaccattttttacctaaaaaatgacaattttatatggttcaatctaatacatttcttttctggtgcccctttccaaggaactaaaagcattctttattcccatgctttcctcctatggtattttaaaaataaaagcagaagagtgggattgactgccacagcccccaaccacctgcccctcagttcacaagtacagaaactgggagatttracagaaagaagaaaatcattcaaaacacaacttctgctttctttgctgtacagagcttttacattcgatgtggtcctacctgcttactttcgtttttgttgcctgagcttttggtgtcatttccatattatcattgccaagaactatgtcacaaagctttcctgtatgtgttctaggagttttagggtttcaggtttcatgtttaagtctttaatccattttgagttgatatttatgtatggtgtaagataaggg

SEQ ID NO: 711853 - DNA, 1301 bp, Homo sapiens
tataatggacaaattactattatttaggaactttttaaaatgtttttatatgaataaatatctttccgaaagaatggttttaaaccataatggatggaatttgtacattcacatcagggttgctctttgaaacatttctgtgggatgttgttggcttattccaagtttgctgctattacccaaaacattgtttgaactttgcttctgaaactgcctccacaatcagtatacaagacatacaagaaaaccagcctcatttttcaagtcacatatatttccatcaagtatattttcctcttccaggatacttgtgagagttgctctccactgattttcattaacctaatgtccaaccttaaggtcaggaatagagtagtcaagcatcattaatttggaatccactattttggaataagaaatagttcagacaagtaaacttcaaccatacagttgctttctttgaaagaaggatttgtcaagcaaactaatcatatatgcaaatcaaaaggcaactatttaaagctactcaaaagaataaactgattaagcattctcaagtacatacaccctatattaaagcatctttacccaacatatttgtaggctcattacaaattgtctattaaccagtcgttccctcatgggactgtagaaagcctttctttgttgacctgtttcctgtcactgtcaatacttgaatgcaatgacattgtatctcttttaaaagatttcataattcaaacttttcactaattcagaccaagcttccacaaattagtctgaattaaagaagtttggctgtactaggttgacccatatgaaattggtgctatgcaaccattttttacctaaaaaatgacaattttatatggttcaatctaatacatttcttttctggtgcccctttccaaggaactaaaagcattctttattcccatgctttcctcctatggtattttaaaaataaaagcagaagagtgggattgactgccacagcccccaaccacctgcccctcagttcacaagtacagaaactgggagatttaacagaaagaagaaaatcattcaaaacacaacttctgctwtctttgctgtacagagcttttacattcgatgtggtcctacctgcttactttcgtttttgttgcctgagcttttggtgtcatttccatattatcattgccaagaactatgtcacaaagctttcctgtatgtgttctaggagttttagggtttcaggtttcatgtttaagtctttaatccattttgagttgatatttatgtatggtgtaagataaggg

SEQ ID NO: 711854 - DNA, 1301 bp, Homo sapiens
tataatggacaaattactattatttaggaactttttaaaatgtttttatatgaataaatatctttccgaaagaatggttttaaaccataatggatggaatttgtacattcacatcagggttgctctttgaaacatttctgtgggatgttgttggcttattccaagtttgctgctattacccaaaacattgtttgaactttgcttctgaaactgcctccacaatcagtatacaagacatacaagaaaaccagcctcatttttcaagtcacatatatttccatcaagtatattttcctcttccaggatacttgtgagagttgctctccactgattttcattaacctaatgtccaaccttaaggtcaggaatagagtagtcaagcatcattaatttggaatccactattttggaataagaaatagttcagacaagtaaacttcaaccatacagttgctttctttgaaagaaggatttgtcaagcaaactaatcatatatgcaaatcaaaaggcaactatttaaagctactcaaaagaataaactgattaagcattctcaagtacatacaccctatattaaagcatctttacccaacatatttgtaggctcattacaaattgtctattaaccagtcgttccctcatgggactgtagaaagcctttctttgttgacctgtttcctgtcactgtcaatacttgaatgcaatgacattgtatctcttttaaaagatttcataattcaaacttttcactaattcagaccaagcttccacaaattagtctgaattaaagaagtttggctgtactaggttgacccatatgaaattggtgctatgcaaccattttttacctaaaaaatgacaattttatatggttcaatctaatacatttcttttctggtgcccctttccaaggaactaaaagcattctttattcccatgctttcctcctatggtattttaaaaataaaagcagaagagtgggattgactgccacagcccccaaccacctgcccctcagttcacaagtacagaaactgggagatttaacagaaagaagaaaatcattcaaaacacaacttctgctttctttgctgtacagagcttttacattcgatgtggtcctacctgcttactttcgtttttgttgcctgagcttttggtgtcatttccatattatcattgccaagaactatgtcacaaagctttcctgtatgtgttctaggagtttyagggtttcaggtttcatgtttaagtctttaatccattttgagttgatatttatgtatggtgtaagataaggg

SEQ ID NO: 711855 - DNA, 1301 bp, Homo sapiens
tataatggacaaattactattatttaggaactttttaaaatgtttttatatgaataaatatctttccgaaagaatggttttaaaccataatggatggaatttgtacattcacatcagggttgctctttgaaacatttctgtgggatgttgttggcttattccaagtttgctgctattacccaaaacattgtttgaactttgcttctgaaactgcctccacaatcagtatacaagacatacaagaaaaccagcctcatttttcaagtcacatatatttccatcaagtatattttcctcttccaggatacttgtgagagttgctctccactgattttcattaacctaatgtccaaccttaaggtcaggaatagagtagtcaagcatcattaatttggaatccactattttggaataagaaatagttcagacaagtaaacttcaaccatacagttgctttctttgaaagaaggatttgtcaagcaaactaatcatatatgcaaatcaaaaggcaactatttaaagctactcaaaagaataaactgattaagcattctcaagtacatacaccctatattaaagcatctttacccaacatatttgtaggctcattacaaattgtctattaaccagtcgttccctcatgggactgtagaaagcctttctttgttgacctgtttcctgtcactgtcaatacttgaatgcaatgacattgtatctcttttaaaagatttcataattcaaacttttcactaattcagaccaagcttccacaaattagtctgaattaaagaagtttggctgtactaggttgacccatatgaaattggtgctatgcaaccattttttacctaaaaaatgacaattttatatggttcaatctaatacatttcttttctggtgcccctttccaaggaactaaaagcattctttattcccatgctttcctcctatggtattttaaaaataaaagcagaagagtgggattgactgccacagcccccaaccacctgcccctcagttcacaagtacagaaactgggagatttaacagaaagaagaaaatcattcaaaacacaacttctgctttctttgctgtacagagcttttacattcgatgtggtcctacctgcttactttcgtttttgttgcctgagcttttggtgtcatttccatattatcattgccaagaactatgtcacaaagctttcctgtatgtgttctaggagttttagsgtttcaggtttcatgtttaagtctttaatccattttgagttgatatttatgtatggtgtaagataaggg

SEQ ID NO: 711856 - DNA, 1525 bp, Homo sapiens
tgaattcaaaggcccaagaaccaagaaagtcaatggtcttaagttccagtccaagtcctagtccaaagacagggaaggactgatgtcccagctcaaataagtcaggtagagagtgaattttctcttagcattttgttctactgtrgccttcaaatatgtatatgagggccacccacattgggaaggacaatcagctttactcagtctataaacttaaatgttactctcatctagaaacatccttacagacacaccccaagtaatgtttaaccaaatatctggtcactgtatagcccaatcaagttgacacctaaaattaaccatcataggtatcccataaccttcacctgtgctgaagaagtgaggtaagtatacgttagcacctttgaaactaagaagtactggacacacttattacgtattgttaagatggccaaaaatggcaacaaatagctagctacataagaattataatggctcctatttttaggacattttgaggatttataatatgcttggtactgacctaagggctttatgtacattaatttattcaaccctcacaataaccctttgaggtaaggattagagtttctctaatttacccatcagctacaggaaggttaaataacttgaccaagatcacagaattagcaggtggcagaccccagtttcaaacccagatgttttggatctagagtccatgctctaacagccacataccatcacctgcctgaggctagtgggaatgacaaccagcccgaaggtctgaacacatctgctcacttctctggccctttgcttttcagccatggcgtcaggtatccctttaaagcatcctaaagatgtcctaatgcagagacggttagaaacatggccaattttaacgagagggtactcaagatggagagaaaaggcagagaggtctgggtatgaaaaacccattggggtgtgggtagaaatggttagaactaggctagtgaatcattgcccatcaatatccaccatcaacccatgccccccaaggtggggatatcactcagggtaattaacttctaattcttagattattttatctggtcaccagcagaacctgagaggatggagatatagggttggtgagattacctaaggggaagtagggagagagggaggtctgagtggagggacggatgctcagtggcccaggcaggggtaccctgagggcaggtttactggtcagtgggcagcatgagagctctggtctgaaggcctatgtgagatgagctcagaggtggtggtgggcagagcaagggaactcaagacagccattgtccactgcaagatcttgtctctgccacatccaataagcatgatgttcataattccattaacaaaagttgttagattgtgcagaggctggctcctgtgcataggaggcgttgtgggaggctgaggaggggacaaggacagagcgcaggcagggccagggtctataaatgaccttggcaaatcaggtgcctcactgaactaccattgacccatc

SEQ ID NO: 711857 - DNA, 1082 bp, Homo sapiens
taaggagggtgttgccagcacagcccatcccaatgtctggtggaatttcctgtctgggagaggtccgtgggttctcacccaaacaccacagaccacagtagtgtttcccgggctaatgttcctgtcttttcacagtactctgctgattcagtctttagataactggtcttccttcctcttcataggatctatacccctgaagtgtggatcctaaactgaggggcttctcgaaagtctttggattctgtagaagagaccctggcacttactgtgcgctcaaagatcactctccatgtccacaatatgttaggaagatctttacccttcagaaagggaaaaatattccctctgatgccccctgttgtgggttgaactgtgtcccacccaatttcatrtgttcaaattctaaccccagtatctcagaatatgactatatttgaagatagggcctttaaaaagacaaaggcaatgaaattaaaatgaggtaattgggatgaaccttaattcaatatgaccagcattcttataagaagatattagcacacagacaggcacaaagtaaagaccatgatgtagagacacaaggagaagggtggccatctgcaatccaaggagagaggcctcagaagaaacctaccctgccgaaaccttggtcgtggatgtctagactccacaatcgtgagaaaatgaatttatgttatttaagtgatccagtctgtggtactttgttatgacagccctagtaaactaatacagctgctctcttggggagtgaggaggaagaagaggggctgtcagagaacgaagaagaggagaagatcagaagaaagtcaagaaggcagagaaggagaagatgcagagcaagaggaagaagagaagaaacagtttaaaatcagagatattttaaggactaaaatttaaacctacttattttatacagattctaaattcttctttttttcttcagccccacttcctcttcctggtcccagctccagaatctcctcctctttcttctccctttactatgttcccctgaacttcactcatcttctggatccggttctccttcaccatctctg

SEQ ID NO: 711858 - DNA, 1082 bp, Homo sapiens
taaggagggtgttgccagcacagcccatcccaatgtctggtggaatttcctgtctgggagaggtccgtgggttctcacccaaacaccacagaccacagtagtgtttcccgggctaatgttcctgtcttttcacagtactctgctgattcagtctttagataactggtcttccttcctcttcataggatctatacccctgaagtgtggatcctaaactgaggggcttctcgaaagtctttggattctgtagaagagaccctggcacttactgtgcgctcaaagatcactctccatgtccacaatatgttaggaagatctttacccttcagaaagggaaaaatattccctctgatgccccctgttgtgggttgaactgtgtcccacccaatttcatgtgttcaaattctaaccccagtatctcagaatatgactatatttgaagatagggcctttaaaaagacaaaggcaatgaaattaaaatgaggtaattgggatgaaccttaattcaatatgaccagcattcttataagaagatattagcacacagacaggcacaaagtaaagaccatgatgtagagacacaaggagaagggtggccatctgcaatccaaggagagaggcctcagaagaaacctaccctgccgaaaccttggtcgtggatgtctagactccacaatcgtgagaaaatgaatttatgttatttaagtgatccagtctgtggtactttgttatgacagccctagtaaactaatacarctgctctcttggggagtgaggaggaagaagaggggctgtcagagaacgaagaagaggagaagatcagaagaaagtcaagaaggcagagaaggagaagatgcagagcaagaggaagaagagaagaaacagtttaaaatcagagatattttaaggactaaaatttaaacctacttattttatacagattctaaattcttctttttttcttcagccccacttcctcttcctggtcccagctccagaatctcctcctctttcttctccctttactatgttcccctgaacttcactcatcttctggatccggttctccttcaccatctctg

SEQ ID NO: 711859 - DNA, 1036 bp, Homo sapiens
gaattctgtcttcaggagccagattgtgaaactgctttttcatgaatttcaattcatttaaagaattctaattgagttgaaattccttactattaatttctttaggcactttggtagataagccccttgaacaggtgccagatcatacccaccttatatagaggattgttactatagtgagaagccaaaaacatatatttttgaatcacatttacttttactttattttgtgggataggtaagttttgaggatatatagacatgttaatatccataaatagtatagacagaagatttcctactctacttaccctaaatctcctctttcaagtaaggataattatcaacccaataagatagcaagaaagagaaaaatccagttatttaaaacatcagtgtatgcactatagtaatctcaattattcacatacaaaatgttgccttttttgattacctgaagcaaaatgttgatcccagatcaactttctctggctatccatcatttatctagatagcttcttcctagcatcagtagttgttaagaaaaaaaaaaaaaaaaaaaaaaaacatgtaaatatgaggccaatgaaaacaarcaaataaaactaaccatgcaaaactaacttcacttctttctttgttagttattagactgatagctttggggaatgacatttggaatcctaacttcagtatgtgacttgactcagcttcttatgatctcttttgggtaagtttgagtcaaacatttgaataagatgactctgaaaaacaatcttaatttagcagatgtcttaggataaaaaaaatattgggagatggaatgatgagttgaattttaggatgagggaaatagagtttgacagcagcatgtatagaaaagacttaagtgttttaatagatggtaagataagatgaatcaatactgatagatggttgctaaaaagattaataggaattttattcctggaaatccagtacttagggaaaaattttataaaggtgatcatcatgcatttcttcccatttgtcagtc

SEQ ID NO: 711860 - DNA, 650 bp, Homo sapiens
gtaatcccagctactcgggaggctgaggcaaaagaatcgcttgaaccagggagtcagaggttgcgtgagccgagtttgtgccactgcactccagcctggtgacaaagcgagactctgtctcaattagaaagaaagaaagaaagaaagaaagaaagaaagaaagaaagaaagaaagaaagaaagaaagaaagaaagaaagaaagaaagagagacagagagaaagagagaaagaaagaaagaaagaaagaargaaggaaggaaggaaggaaagaaagaaagaaagaaagaaagaaagaaagaaagaaagaaagaaagaaagaaagaaagaaagaaagaaagaaagaaaaagtattcaaatgatctgagttgtccaaagatggaattgctgatcaggaatgtggtccattataagctaacaggaaattcaagcaaaagatggcctttgtggcttcttcatcagtgaaagtctatgaacctagaattaaaaagggaatttgactgaagtgagcatctaaggcatattctgaagaccatattcattttttataacatctgcaccctgctcctctctgttaacctgggtatttaaaagccagtggtgtgtaatctaaagaccttctcaaaacactataccatatttacattcaaca

SEQ ID NO: 711861 - DNA, 1204 bp, Homo sapiens
cagaggagagacaatgccaaagcattcaggggagcgggaacatgctactggggatgctgcaggcagagggagaggtagagcactccagctaaaagaattaaaacccatagtttaaagtcaccacataccctgatacataaacaatccagactgaaagggaaagttagcaattagctagcaaattatttttacattcgttctcctttttgaaaaatcactttgcagtattaatatcaagagtgactgcctacacagagttctcygcctcaattacagccatgtttgcatatagattgaacagaatggaattcaagggttgtttggatccagtgccaggttcaaattacaccttgagtttcaagtattagttgtgtcatctggattatagtcttagctctgcaatgagtctgccagattactcaatgtctttgagcccccatttcctcatctataaaatgggaataatactgtctatcttgcatggttttaggaaagataaatgaaatatatatgagcttctgattttgtgcctgattcataatcagagcaactgatgtctctttactcatccttcttcgttctttaacactcaaattcatcatcactgcatcaatccacaagcaattaattattacataaccctgatggcctatcttaccagctaaaatgaagtttccatggggctagaatcattgcattttactcagcccagggacttagactaaaagctcaacaaatattagtggatttaggagagagtgggatgataaacctgtacaacaactgatgagttcaagggaagagaagattatagttttcctaatttgattttttagccacattcttatacaaattatcattagtagtaaccttttcaaaaatattctttctctatttttatgtacagaaaatgagagagagaaagaaagaaagagagaaagagagagaaacagagaaagaagataatccttagaagcttcctatgctaaatagcagtctctgacccatattaaccagaatgctcacagaaaacaaaccaatcacttctaaggataattactactaattatcttcattagtaaagatattgtaaggccagatgattactttactactgttcgttgcaggcatgataaagtttgaatcaaactctgatttactattaattctctttattagtaaagataactagcagtaataatat

SEQ ID NO: 711862 - DNA, 1204 bp, Homo sapiens
cagaggagagacaatgccaaagcattcaggggagcgggaacatgctactggggatgctgcaggcagagggagaggtagagcactccagctaaaagaattaaaacccatagtttaaagtcaccacataccctgatacataaacaatccagactgaaagggaaagttagcaattagctagcaaattatttttacattcgttctcctttttgaaaaatcactttgcagtattaatatcaagagtgactgcctacacagagttctctgcctcaattacagccatgtttgcatatagattgaacagaatggaattcaagggttgtttggatccagtgccaggttcaaattacaccttgagtttcaagtattagttgtgtcatctggattatagtcttagctctgcaatgagtctgccagattactcaatgtctttgagcccccatttcctcatctataaaatgggaataatactgtctatcttgcatggttttaggaaagataaatgaaatatatatgagcttctgattttgtgcctgattcataatcagagcaactgatgtctctttactcatccttcttcrttctttaacactcaaattcatcatcactgcatcaatccacaagcaattaattattacataaccctgatggcctatcttaccagctaaaatgaagtttccatggggctagaatcattgcattttactcagcccagggacttagactaaaagctcaacaaatattagtggatttaggagagagtgggatgataaacctgtacaacaactgatgagttcaagggaagagaagattatagttttcctaatttgattttttagccacattcttatacaaattatcattagtagtaaccttttcaaaaatattctttctctatttttatgtacagaaaatgagagagagaaagaaagaaagagagaaagagagagaaacagagaaagaagataatccttagaagcttcctatgctaaatagcagtctctgacccatattaaccagaatgctcacagaaaacaaaccaatcacttctaaggataattactactaattatcttcattagtaaagatattgtaaggccagatgattactttactactgttcgttgcaggcatgataaagtttgaatcaaactctgatttactattaattctctttattagtaaagataactagcagtaataatat

SEQ ID NO: 711863 - DNA, 1204 bp, Homo sapiens
cagaggagagacaatgccaaagcattcaggggagcgggaacatgctactggggatgctgcaggcagagggagaggtagagcactccagctaaaagaattaaaacccatagtttaaagtcaccacataccctgatacataaacaatccagactgaaagggaaagttagcaattagctagcaaattatttttacattcgttctcctttttgaaaaatcactttgcagtattaatatcaagagtgactgcctacacagagttctctgcctcaattacagccatgtttgcatatagattgaacagaatggaattcaagggttgtttggatccagtgccaggttcaaattacaccttgagtttcaagtattagttgtgtcatctggattatagtcttagctctgcaatgagtctgccagattactcaatgtctttgagcccccatttcctcatctataaaatgggaataatactgtctatcttgcatggttttaggaaagataaatgaaatatatatgagcttctgattttgtgcctgattcataatcagagcaactgatgtctctttactcatccttcttcgttytttaacactcaaattcatcatcactgcatcaatccacaagcaattaattattacataaccctgatggcctatcttaccagctaaaatgaagtttccatggggctagaatcattgcattttactcagcccagggacttagactaaaagctcaacaaatattagtggatttaggagagagtgggatgataaacctgtacaacaactgatgagttcaagggaagagaagattatagttttcctaatttgattttttagccacattcttatacaaattatcattagtagtaaccttttcaaaaatattctttctctatttttatgtacagaaaatgagagagagaaagaaagaaagagagaaagagagagaaacagagaaagaagataatccttagaagcttcctatgctaaatagcagtctctgacccatattaaccagaatgctcacagaaaacaaaccaatcacttctaaggataattactactaattatcttcattagtaaagatattgtaaggccagatgattactttactactgttcgttgcaggcatgataaagtttgaatcaaactctgatttactattaattctctttattagtaaagataactagcagtaataatat

SEQ ID NO: 711864 - DNA, 2512 bp, Homo sapiens
cccagtacatcacttttaataaaaacaaccaaacaatgtttaatctgtccaaacagtgttctgacttccaatcactgaggcagtttattagggtagatccaaaactagctagactgcaaattactgtgaagcaaagcaggtatgtctgtctacctgtttaggtcaaaaggtatgaggctttctggtcataggcattaaaggatctgaagggagaaattttaatctgttgattaatttaggagattaactgccctgccaagctgctgtcatgtcttcagtacctctatttccttctctgaaaaatgtaaataatacatcctgagcttctataagaaatgayggtgtaaaacaacagaaagcactaagcaaactgtaaagtgctttaaaacaattatttcatatgttaagcagcttacaaaatagcaatttcttcaaatgcccttgcaaagcaaatgagacacagctgctaaaatgctctgcaaagaggcggaaatccagctctttaaaatgtccaaggggaaaacgcacactgtaaaattactccaaagatgaattttacaagaaggatggaagtgtcatcaagtttttccatggttaattctaaaagagtgccagcatcgaaaagataaaaaaaggcagttcttcaacagaaacctgggaaaatattcttcaatgacgttgcataatagaaataggaattaaacttacctgaggagcagaagcgaggaagccaagtttatgagttcttctcaattttgtccaaagacaagtctgttgggaataaaaaatattaagagaacttaaaaaaggaaaaaggaaaagggaaaaaaaaaggaaagtcaagaaggatgagctgtcgtggaatgctgtgaagtttgagagtgactcagcactagctaaggggcagcaacaattaaatgagtttgttgaaagaaccctaataaaactcagcattccctgtaatctcagaacaaggttgcaccactaaagaaaatgttaaactgtgcattaggggggctgtggtttcatgaagttggttgggggtgggggaactcagggctgagtcactggctccttggaggcagcaccattgggtctctgccctcttgcctgtttctctccctctctccagggagttcagttcctctacaattagccaaaagaagcaagtgagctggccattgaacgatgacaaattgtgattcacttgtagcataaattataaaatacatacactgtataaataagtcctgagatggagaggggaaaagaacttctgccacatctgggcccacgagaatcatgagtgcaggtgcctgtttctagatggaagagcaactaggttatccaaaatggatgctgagcagatttttaaaattctctgggaaaaagaagatcacaattcctcctagtaactaatttatatctttagttactctttctagccattaagccccatgctaaaactaccctaaatctctcctgttctaaactggccttggtggttgcgggtgggcaaattgttttttcattattgaaaaatataaatccttcatatatttgcacagagttattcttatactaagctcagaatggaaaccaggcagttctcctctcccttccagaatgagaattctccacctctccatccaagttacagaaagaaagaaacattttgaggctctggcatcatgttttcctgttttcatggggtcagctatagactcagtgaagagtttacatgttcacgtctttaaaaaaacactcaaagggttaaaaactggaggtttgacatttccataataagtgttctaaatgcttgtattgatatatattttgttctagaataaactcaggtacaaaatataatatttgtaagttgttctgccagccaaactgttctccttcatttataaatgaagttgctaagtgttcaacaactgattgccataaatgaatggggtatgacatccttccaagtctccaaagagttgctacaacttggttttccccttgggagaaaaaaaaagttattgttctaattgattttttctgttctgaatagaaaaaaataaattagatccttccttccttccttcctccctccctccttctttccttctttctttcttttctttctttctttctctttcttttttcttttcttttttttctttctgttttcctatttctgcattcctacaggaagagagaaggaatattgtgcttttcatcaaccacagcaagagtcatttgagtttgaaacacagctagtttttaaggaaactataccatggtcttctggaatgggaaaagctttttctttcaagggacaaaaggtgagattttctttttgtcttcagcctttaccagtacaaaagagtgaaccatctctacatacatgttcagaggcaaatccgatgactaattgcagagtaagcaaatttcttgattctgatcaaaccagcaacatgcatttgaatttaggttggatttagatgagcaagtcaat

SEQ ID NO: 711865 - DNA, 836 bp, Homo sapiens
cattgaaaacctagtaatgctatctttcagtttctaaagtattctatttttaattacttaaattctagaggatagtttacagaccctattttttacaagtaaacatttaaattgccaaaagaattatcctgttgaaatctagttctgatgatgaaatagggaaaagtcactaaaccttgcaaaaagtaaggtgtgagaaaataccagaattggctatgaactacaatattcacttgtgttttcagcaggtttgtttatatcagtctataacttcagcaatgccagaaatctagaatcagctggaagtggtaatatgaatgagtcatgtggaatgttcatcacagctgtcttctagagacaactcaaattctctctgcacacgtcctcttccactgcaagatttctataaatggaatcatgctgtctacatttgagaygtagtaattctgcagttttcctcagcagtgaataataagaaagtttaagtttgtatctctactcgacccattgttctctgtaatttaagtttgtccataactgtcagatctagagactttcaggaataattttttttttgaatgttttctttttttaactgggatcctgtctgtgtttctccatcccaaaaaacttcctgagtcaccccaggaacccacaggaggtaacactttcagtatttcctcactaaaagggatctttctgaagcagattttaaaagaatactggcctcacttatctcattaatcttcttatagtgtgtgaatactcatttattaaatacagtttctctgttttctgagtttagccttcttttcattttctgaggtctctctgat

SEQ ID NO: 711866 - DNA, 836 bp, Homo sapiens
cattgaaaacctagtaatgctatctttcagtttctaaagtattctatttttaattacttaaattctagaggatagtttacagaccctattttttacaagtaaacatttaaattgccaaaagaattatcctgttgaaatctagttctgatgatgaaatagggaaaagtcactaaaccttgcaaaaagtaaggtgtgagaaaataccagaattggctatgaactacaatattcacttgtgttttcagcaggtttgtttatatcagtctataacttcagcaatgccagaaatctagaatcagctggaagtggtaatatgaatgagtcatgtggaatgttcatcacagctgtcttctagagacaactcaaattctctctgcacacgtcctcttccactgcaagatttctataaatggaatcatgctgtctacatttgagatgtagtaattctgcagttttcctcagcagtgaataataagaaagtttaagtttgtatctctactcgacccattgttctctgtaatttaagtttgtccataactgtcagatctagagactttcaggaataattttttttttgaatgttttctttttttaactgggatcctgtctgtgtttctcyatcccaaaaaacttcctgagtcaccccaggaacccacaggaggtaacactttcagtatttcctcactaaaagggatctttctgaagcagattttaaaagaatactggcctcacttatctcattaatcttcttatagtgtgtgaatactcatttattaaatacagtttctctgttttctgagtttagccttcttttcattttctgaggtctctctgat

SEQ ID NO: 711867 - DNA, 573 bp, Homo sapiens
tttaatctcattgttttccagtgagcaaactgagacagacttgtaaatgtattcagaaaattactcaaatccatgtcttcttacactgaacttggaatgtgtcctagagtatgcttcattttggaatctgctaactaagattctatttttgagtactctctgtatccaaatagtgctgtgaataaaaccatgtcccactgttctgtacctctttctacagtgtctattttctcctctctcactaccttgctcaacccaagaattcagaaaaaatactcgtggcatatttggtttttggtgacagtcatgagttagttcacttgagttcaaattaattgctgaaaattagaatattgtacgtaagtgttgtaaaaattgtggtataggcaaggataaatcccagctccttataagatagacagagagtcagaccaagtaattcctatagggaacaatgtaattaataatatcacagcaatttttacagttcagagtcctgtctaatgaaagacgagtgaagactgaacatccttcaaggcatgaaggaatgaagtctmacagtagaaggcagta

SEQ ID NO: 711868 - DNA, 1780 bp, Homo sapiens
tttttgggtgaggaactcagtagagacttactaaatatttatcgtgtgtaaatcactattcaggatacaacagtgaagatgtgcaatggatgtaatcatattcctgttcacgatctcattacaggtcctgttctcctgagctctcacctctgatacaagcctgatagaagagtaaatgagacctaataacartattacagaatttgtcctcctgggcttttcacaggatcctgatatgcaaaacacattatttgtcatgtttttactcacatacattgtgacagtggtggggaacctactcgttgcggtgactattattgtcagcccttccttgagctccccaatgtaattcttccttgcttgcctgtcattaatagatgctgtattatccaccaccatttctcccatattgattgtagacctactctgtgacaaaaagactatttccttcccagcttgcatgggccagctatttacagaccacttgtttggtggaactgagatcttccttctggtggtgatggcctatgatcgctacgtggccatatgtaagccactgcactatttaaccatcatgaatcgacaggtttccatccttctgttggtggggggccatgactggaggtttccttcattctgtgtttcaaattgctgttctgtacagtctccctttctgtggccccaatgtcattgaccactttttctgtgacatgtacccattattggaactggcgtgcactgacacctactctataggcctcactgtagttttcagtggtggagcaatgtgtatggtcatcttcgcccttctactaatctcctatggagtcagcctaaactcccttaaaacttatagtcaggaagggaggcgtaaagccctgtctacctgcagctcgcacatcaccgtggttgtcctcttttttgttccctgtattttcatgtatgttagacctgtctcaaacttccctattgataaattcgttactgtgttttatacatttatcacacccatgctgaatccttttttatacacgttgagaaattcagagatgataaatgctataaaacacctgttgtgtaagaagctaactatagttagaataagagtgtccctcctcatgtagataaggatgtatgtagacaagctcttcccagtgaaattttcagacttctaagggtaattcaaggatcccacaatggaagacaggatttaggtgctccgagctcaactgagaaatcatcccattatgacatctgtttgaatttcaagatctcaacctctatatccagactgagagtggatggggggctttggctcaggtcctattgtgcatgttttaaattatggtttttctctattacacatttattgagacacagtatttctcccaaatgcccagcagagaatgggaaaagggaggaataggtcattaaaatatatgctcctgttcaaaagcgaagactatggtggtttttcagtgtaatttatttaaagactttgtgcaatatagaagcaccatattcacaaatatctttgaaactcgcctttctcagacttgagctgaaactctatgtgcagttagataatactcttaagaatattataattatgtttgtgtagcttaaagtacttatgagacacaccagaaatttttcatagtgtcttaaactccacaactttgaaatgatttttatttggatggcctttcttacttttagagtacttagctctttgcagagactggaaagggaagccatttttatctttgaaatcagcaag

SEQ ID NO: 711869 - DNA, 676 bp, Homo sapiens
tgatcactatgtggccatctctaagccactgcactatttgatcatcgtgaatcgactggtttgcatccttctgttgggggtggccgtgactggaggattttgaattctatgtttctttttttttaatttatttatttttttattattattatactttaagttttagggtacatgtgcacaatgtgcaggttagttacatatgtatacatgtgccatgctggtgtgctgcacccattaactcatcatttagcattaggtatatctcctaaagctattgctcccccctcccaccaccccrtaacagtccccagagtgtgatgttccccttcctgtgtccatgtgttctcattgttcaattcccacctatgagtgagaacatgcggtatttggttttttgttcttgtgtttactgagaatgatgatttccaatttcatccatgtccctacaaaggacatgaactcatcattttttatggctgcatagtattccatggtgtagacgtgccacattttcttaatccagtctatcattgttggacatttgggttggttccaagtctttgctattgtgaatagtgtcacaataaacatacgtgtgcatgtgtctttatagcagcatgatttatagtcctttgggtatttacccaataatgggatggctgggtcaaatggtatt

SEQ ID NO: 711870 - DNA, 676 bp, Homo sapiens
tgatcactatgtggccatctctaagccactgcactatttgatcatcgtgaatcgactggtttgcatccttctgttgggggtggccgtgactggaggattttgaattctatgtttctttttttttaatttatttatttttttattattattatactttaagttttagggtacatgtgcacaatgtgcaggttagttacatatgtatacatgtgccatgctggtgtgctgcacccattaactcatcatttagcattaggtatatctcctaaagctattgctcccccctcccaccaccccgtaacagtccccagagtgtgatgttccccttcctgtgtccatgtgttctcattgttcaattcccacctatgagtgagaacatgcggtatttggttttttgttcttgtgtttactgagaatgatgatttccaatttcatccatgtccctacaaaggacatgaactcatcattttttatggctgcatagtattccatggtgtagacgtgccacattttcttaatccagtctatcattgttggacatttgggttggttccaagtctttgctattgtgaatagtgycacaataaacatacgtgtgcatgtgtctttatagcagcatgatttatagtcctttgggtatttacccaataatgggatggctgggtcaaatggtatt

SEQ ID NO: 711871 - DNA, 676 bp, Homo sapiens
tgatcactatgtggccatctctaagccactgcactatttgatcatcgtgaatcgactggtttgcatccttctgttgggggtggccgtgactggaggattttgaattctatgtttctttttttttaatttatttatttttttattattattatactttaagttttagggtacatgtgcacaatgtgcaggttagttacatatgtatacatgtgccatgctggtgtgctgcacccattaactcatcatttagcattaggtatatctcctaaagctattgctcccccctcccaccaccccgtaacagtccccagagtgtgatgttccccttcctgtgtccatgtgttctcattgttcaattcccacctatgagtgagaacatgcggtatttggttttttgttcttgtgtttactgagaatgatgatttccaatttcatccatgtccctacaaaggacatgaactcatcattttttatggctgcatagtattccatggtgtagacgtgccacattttcttaatccagtctatcattgttggacatttgggttggttccaagtctttgctattgtgaatagtgtcrcaataaacatacgtgtgcatgtgtctttatagcagcatgatttatagtcctttgggtatttacccaataatgggatggctgggtcaaatggtatt

SEQ ID NO: 711872 - DNA, 2886 bp, Homo sapiens
taaaggctgacagaaagaaaaaatatatatagataattaacagagagtagtggctatttgggtggagatgagtggaggaaaaaaagtattaagaccgaaagctaacacaaagatttaagtctatatgactaggatattggtaatatcattaataggattaggtgaatctggtttggcagtagaagcaaagtgagggagaataaggggtgctgatgacaaccttggtttaagatacagttgatttaaagacgaaaatgttctgtggctaaaaagaaaagtggtgctgaagcttagaagaaaggacactcatatttggggatcttctattgatcagtggagtatcaaaatcatacacagcctctaagggaaagcacaaagatagaaaaggtgagggctagaaataaaatctgtgagattattcacacttcttagtcaaaatggaacagccagacaaagaggacaggaacaaggattttggctgctctggagatctttgctaaggtgcactcacctgcaagagagtataaccggaacgagaagaaaaaaatctcatggcttgggcctgggagattactagagatggaaatgtatttttgtcataaaaaattgaactgattttttattcttcccactgggtttccacctttttcttctacaatttgtatccaaggagggtctgagaattaatttgttctgtgatgagcagcagagtttctttctggagcccattttaagaaatgttgtcatacaagaatcatctttctctgttttatttctaatgtggattgtactattcaaaatatttgctgtacctttctgaagcaggatttttatatttgtgcttcactgatatcaggcttggacatgtgacctgctttagtcaatgaaatgtgagtagaaatgacatgcattatttcaagcaaaagtttaagagcatttttcatcattttaccatgccgtcttctgattcacagctgacaatatcccagaaaggggttatattttagcctggatcccaggctcaagattacatagaggaaagctatcaaagaccccaaaatggggcataagaaacaaaccttagtgttaagggtcgtcgagatttgggggttgtttgttagcacagcatagcttagcctaagctggctgatgtaacctctaactgaggcgttctgctttgctgtcctaaagatgggggtcaagggtgtgtgttaggccattcttgcatggctagaaacaaatgcttgaggctcagtaattgataggaaaagaggtttaattagctcatggttctgcaggctatacaggaagcatagtggcctctgctcctggggaggtctccagaggcttaaaaacatgacagaatgtgaagggggagcaggcacttctccctttttcttctgaagcttggatccagggggttgggggtctgaggatttacttgttctatgatggcagagtgggagcaagagagagagggagtcaggtgcaggagaggtgacacacacttttaaatgaacggattttatgagaactcactatcgttatcacaaagacagcacaaagctgtgaggaatgtgttcccacgatccaaacccctcctaccaggccccatctctactgttagggattgtaatttagcatgagatttgggcagtgacaaatatccaagctatatcagatagactatggcaaaaaaaaaccccgggctgacgtgaaatagtctaccccgtgtttctcagttgtaaggagagagttgctgttgacattttggattagacaatttttcctttagaggagtattgcaattggttagcatcactaatgcctaaatactaaatgcttttatcacatatcacctatccctgctagatcctaatactatcccaattattaaaacaaacaaaaccaaaaaactctggtgggtgataatactgcacttttttgttaaccactagaccagctgatgcctaaaaattgtaaattgagaatgggtgaatggtaagtgtatcacttaaacatacagccctagagtgcaggaaataatcctgtgtttttttgtatctcctccagttcttaacaaatactgtcgtatgagcaatactcataaaaaattaaatgagtaatatcgttttgaattctgatctattccaaaaagagaaccacaatctctttatcttcaacctataggcaatttgtatacaggaagcagaattcccaaagtctcatatagaaaatatgagaagttatgcatactcatgcctttagttcaacatataaatacactctctcctgggagttttatcctcaagtaaaattctcttttcccattgcccagtctaaaaaaaaaaagtaaatggttattagaaaagttcaggttataggaagtatttagtgaacctgcaccaatggaaacatgttacatgattccttttccatcaattccagatgtgaatcrtagccctgggcagctagcaaagtgcctgggcctttgttctgagatcacagagagaatagataggcagctatgcacaaatcatgtctagagtgttgctttctctctgtggggctcataccagaatctgtgtgttgttgcaaacagagctgctcctttccctgctaattggatcatggatggtaaaaagtgccaggtttatccttaggcaatgtaaagcattgaggctgaaagaagaaaaaggaataatctctagtgagagaaagctggcaggaagacaggcacagacatcaattttctcaaatgctgagcagtggaaagtgtcatacctaagggatttaggcctaggatatcagtactccttattatagttgttcaagatcctctatcaaaggactggaaaggacaagagaacccacagaccatcaggt

SEQ ID NO: 711873 - DNA, 1444 bp, Homo sapiens
ctttcaacttttctgtaggtttgaaatttttaaaaacaaaacaaagtcctgcctgaatagtatttgtcaccgatgcccctgatatttatgagaacataaatgaaataggagtgtgtgtatgtactcacaatagcctggccaaatttgtttcatgaggtttaagttctggactctttatcttctttctggtatagtgtgaaaactttggcttaattccttgttctttcatgagaatggttgctgacattttctggaaataaatcacaagattcagtttcatttggtaatcttttataaaaatctaaggtgtttccaaggttgcaaatacaaaataaattttttaaatgaagtaattttttaaaaaaaatttaaaacctctgactgagccctgctggtctaggcactgagaaggtaaggagtatgattggaagcaagcttttctcttttgcctgactgaatcctcccacactttacccacacaaaatcagtttagtgttacctcctccaggaagccttctgccaccaccatggtcctaatacagtgtatcttctatgtgttccatagcctggccattagcccctcagcttggactgcgattgcttattttgctggaccatgacttccatgaggtcagggctgtgtctctcctgattcctgctggcacaggatctatacataataagtttttagttaatatttgcagaagaaaagaagggtaaggggagataaaagaaagcattggaaaacagtagtaaatagatattgaactcgagctgtggatggatcttgcagaactccctcttaggatgtgaactgagaaggtcatgtgatggtgggtggccaagcgtaggagacagagacacagagtgggcaacctgaacactgtctggagccagcatcaaagctctccaacaccaggtcttagggaaacttgcctggtctggctgagtagagggcggaggcagattcctttgcacaaggctgtttatgatatccaaactctctggctgctgcgatggaagaagagctgtgaggatgtaataatggcactgcagcagactggaggggttgagagggagataacaccatgggctttggcaagtttgggcagattcctgccccccacccccaaccgcccctaccttggatggaggacctgagaagggttctgagggggttttagttggttaggaaagggagaaggtttagaaaagcctaggataggacagagtttccaggaatgatgatcacagcaaccatttatgtgccatttccttacataatctcatttaatcctcaaacgaactttctgagctgatattattgaacttactttaccagtaagaagaaaaataggagwcagtgagaggactagccttagaggagttctgggacttttttgggtcacacagctggtatagacagtgtgtggcaggatttgaa

SEQ ID NO: 711874 - DNA, 606 bp, Homo sapiens
cttgctgccgagaatccatttgggagcatgcattcacagagcaaaaaggcaagatgcatttttattcctttatgcctccttaaccttcagacagttactgtaactcaggggctaatggcagtcctggtgcctgcagctgtgtggcgctctggttttacaatcagaatggccacttttttgtttgtttgttttgagagagtggatctcactatgttgcccrggctggtcttgaactcctgagcttaagcaatcctcctgcctcagccttctggagcagctgggactccagacttgagccaccatgcccaggtagaatggtcactttgatgtggtcagaggcaatggctttatgacagagagagaaccttcttagcctattcttcttgtaaaaatgctgtagtttaccctcccctcctaaaacttatccttctcccccacctatctaacccaacttcctaggcaacattagcattattaggtggcttggcaggtgcttattttctaggaaagagtgtgcttctcttatctgcttaatgcttactctatacagctgaccttggagtgatctattataaaaacgtttaaacccgcaaagcatttgctttg

SEQ ID NO: 711875 - DNA, 596 bp, Homo sapiens
tagcacccagcactggtattgagcaatgccattctgattcccagatttttgtatgtcatcttttctctttttctctgaaaatttttggcatctcctttaacccctgtgttgtgaaattttatgatgatatgccttgctgtggaccttttcatttattttcccgggtactcagcagccattttcaatctacaaattcatgcctttgggttatacagaaatttattctattattatgttgattccttttttttcttctgtttctcttctggaatctttcattttcatgctagagctcctggactgatctttcaactttggttaccacttctcttcttgtccatctcttttattctactttttgggaaatttctcatgtttacgagcctcttcactattactcatttttcctttgtacaacttctattaattgatcctctcattttcttaactcttcttccttattgttcattttaaaatctaatttcttggacatgtgttccaagttttacatatttyttattagttttctcaatttctaagaattctttagtaatcatttaacatttaagactgttttctgatcattcatcttaaag

SEQ ID NO: 711876 - DNA, 1000 bp, Homo sapiens
ttgtgaacaaagtttgttgaataaactttagcttctgtcttgatgataattccactcaaggcttctatttctttgtgttttatattttgaaattattgtatgttaaaaatattgtcattggtgcaaaagatatgtaacagactgaaaactgccttatggtttgttggttttttaagaatataatttcttattaatttaaaaatgtaaagtatttgtaatcacaaatgaagcctgtacgatttccacttttaggaagtattwatatatggctcaataaatgatcaatttgttagtattctgtgagtggcaaagtgcatattacatattgcatatttttgaatattttagaagatatgagtttgagggtctaaaattataagaaacatggccttatcaaattcttgataaaacacatttctgaactaaaataacacactgttattaacagattaacagactcgggaagttttaggagaaaaaagtctttaaggaatctttaagcatattaaataaggataaaaccctataattattctggctggtgaaacagggataaacatgccatgtataaagaaaaagtccaactagcctcattcttctttatgacacttaattcctagaaaaaaggaaaaagtcaacagaaatttgaagaaaaatgtgaaggcaacaaaaaatattttttaaatgtgtcagaaaatacaccagccatacataccatttccatcttttattttttatttttttatttttattgttatactttaagttttagggtacatgtgcacaatgtgcaggttagttacatatgtatacatgtgccatgctggtgtgctgcacccattaactcatcatttagcattaggtatatctcctaatgctatccctccccagagtgtgatgttccccttcctgtgtccatgtcttctcattgttcaattcccacctatgaatgagaacatgtggtgtttggttttttgtccttgcgatagtttactgagaa

SEQ ID NO: 711877 - DNA, 1000 bp, Homo sapiens
ttgtgaacaaagtttgttgaataaactttagcttctgtcttgatgataattccactcaaggcttctatttctttgtgttttatattttgaaattattgtatgttaaaaatattgtcattggtgcaaaagatatgtaacagactgaaaactgccttatggtttgttggttttttaagaatataatttcttattaatttaaaaatgtaaagtatttgtaatcacaaatgaagcctgtacgatttccacttttaggaagtattaatatatggctcaataaatgatcaatttgttagtattctgtgagtggcaaagtgcatattacatattgcatatttttgaatattttagaagatatgagtttgagggtctaaaattataagaaacatggycttatcaaattcttgataaaacacatttctgaactaaaataacacactgttattaacagattaacagactcgggaagttttaggagaaaaaagtctttaaggaatctttaagcatattaaataaggataaaaccctataattattctggctggtgaaacagggataaacatgccatgtataaagaaaaagtccaactagcctcattcttctttatgacacttaattcctagaaaaaaggaaaaagtcaacagaaatttgaagaaaaatgtgaaggcaacaaaaaatattttttaaatgtgtcagaaaatacaccagccatacataccatttccatcttttattttttatttttttatttttattgttatactttaagttttagggtacatgtgcacaatgtgcaggttagttacatatgtatacatgtgccatgctggtgtgctgcacccattaactcatcatttagcattaggtatatctcctaatgctatccctccccagagtgtgatgttccccttcctgtgtccatgtcttctcattgttcaattcccacctatgaatgagaacatgtggtgtttggttttttgtccttgcgatagtttactgagaa

SEQ ID NO: 711878 - DNA, 1000 bp, Homo sapiens
ttgtgaacaaagtttgttgaataaactttagcttctgtcttgatgataattccactcaaggcttctatttctttgtgttttatattttgaaattattgtatgttaaaaatattgtcattggtgcaaaagatatgtaacagactgaaaactgccttatggtttgttggttttttaagaatataatttcttattaatttaaaaatgtaaagtatttgtaatcacaaatgaagcctgtacgatttccacttttaggaagtattaatatatggctcaataaatgatcaatttgttagtattctgtgagtggcaaagtgcatattacatattgcatatttttgaatattttagaagatatgagtttgagggtctaaaattataagaaacatggccttatcaaattcttgataaaacacatttctgaactaaaataacacactgttattaacagattaacagactcgggaagttttaggagaaaaaagtctttaaggaatctttaagcatattaaataaggataaaaccctataattattctggctggtgaaacagggataaacatgccatgtataaagaaaaagtccaactagcctcattcttctttatgacacttaattcctagaaaaaaggaaaaagtcaacagaaatttgaagaaaaatgtgaaggcaacaaaaaatattttttaaatgtgtcagaaaatacaccagccatacataccatttccatcttttattttttatttttttatttttattgttatactttaagttttagggtacatgtgcacaatgtgcaggttagttacatatgtatacatgtgccatgctggtgtgctgcacccattaactcrtcatttagcattaggtatatctcctaatgctatccctccccagagtgtgatgttccccttcctgtgtccatgtcttctcattgttcaattcccacctatgaatgagaacatgtggtgtttggttttttgtccttgcgatagtttactgagaa

SEQ ID NO: 711879 - DNA, 626 bp, Homo sapiens
atcccccaactcacaaggaggcgcgattatcatgtgacyttcaggtctcttcgttgctccccctgaacgatgtgccaagagggtctgtgctctccaaggcggagatgaacaaccactggctaactcattacgctccaaagttttaatgaaagagctccaattaccaagctctctgcctttggcacttgagaatccatctcaatttcccctttctttctgaagcgacagtgattaaggattcattctgcacataaaacaagtgatcaatggcttctggcagttgccattgtctctctctccccctatcagtagacaatgtatcttggggagctgccggggcctgagaaaagtgagtttgccagacacagttctattttgatttagatcacaaatagctcagctcagtttttacattgataacaaggagatgggttccatttcctgagctctgtaattcgaataagtccatctctattgaaagacagggagaggaagagagacggatctttttgtgtgttgtaatacactggacccggatttttatgtcaggctgacacacaaggaaccatagtctaactggcatagcccatttcctggaacctccgagatgggtggggtctggtctt

SEQ ID NO: 711880 - DNA, 626 bp, Homo sapiens
atcccccaactcacaaggaggcgcgattatcatgtgaccttcaggtctcttcgttgctccccctgaacgatgtgccaagagggtctgtgctctccaaggcggagatgaacaaccactggctaactcattacgctccaaagttttaatgaaagagctccaattaccaagctctctgcctttggcacttgagaatccatctcaatttcccctttctttctgaagcgacagtgattaaggattcattctgcacataaaacaagtgatcaatggcttctggcagttgccattgtctctctctccccctatcagtagacaatgtatcttggggagctgccggggcctgagaaaagtgagtttgccagacacagttctattttgatttagatcacaaatagctcagctcagtttttacattgataacaaggagatgggttccatttcctgagctctgtaatycgaataagtccatctctattgaaagacagggagaggaagagagacggatctttttgtgtgttgtaatacactggacccggatttttatgtcaggctgacacacaaggaaccatagtctaactggcatagcccatttcctggaacctccgagatgggtggggtctggtctt

SEQ ID NO: 711881 - DNA, 626 bp, Homo sapiens
atcccccaactcacaaggaggcgcgattatcatgtgaccttcaggtctcttcgttgctccccctgaacgatgtgccaagagggtctgtgctctccaaggcggagatgaacaaccactggctaactcattacgctccaaagttttaatgaaagagctccaattaccaagctctctgcctttggcacttgagaatccatctcaatttcccctttctttctgaagcgacagtgattaaggattcattctgcacataaaacaagtgatcaatggcttctggcagttgccattgtctctctctccccctatcagtagacaatgtatcttggggagctgccggggcctgagaaaagtgagtttgccagacacagttctattttgatttagatcacaaatagctcagctcagtttttacattgataacaaggagatgggttccatttcctgagctctgtaattcgaataagtccatctctattgaaagacagrgagaggaagagagacggatctttttgtgtgttgtaatacactggacccggatttttatgtcaggctgacacacaaggaaccatagtctaactggcatagcccatttcctggaacctccgagatgggtggggtctggtctt

SEQ ID NO: 711882 - DNA, 626 bp, Homo sapiens
atcccccaactcacaaggaggcgcgattatcatgtgaccttcaggtctcttcgttgctccccctgaacgatgtgccaagagggtctgtgctctccaaggcggagatgaacaaccactggctaactcattacgctccaaagttttaatgaaagagctccaattaccaagctctctgcctttggcacttgagaatccatctcaatttcccctttctttctgaagcgacagtgattaaggattcattctgcacataaaacaagtgatcaatggcttctggcagttgccattgtctctctctccccctatcagtagacaatgtatcttggggagctgccggggcctgagaaaagtgagtttgccagacacagttctattttgatttagatcacaaatagctcagctcagtttttacattgataacaaggagatgggttccatttcctgagctctgtaattcgaataagtccatctctattgaaagacagggagaggaagagagacggatctttttgtgtgttgtaatacactggacccggatttttatgtcaggctgacacacaaggaaccayagtctaactggcatagcccatttcctggaacctccgagatgggtggggtctggtctt

SEQ ID NO: 711883 - DNA, 593 bp, Homo sapiens
tcaaactcctcaaactgtccctctgggacagggcctgtgtcccagagctcagaaactctctgggtcaatttctccagggtcaattgccgtcccaggtcccccaccgccaccatcccacacttagccctttcccccaccatctcctgccaattcaggagaagggatattagcaggctgcggaaggctggggatgtcttaaatttgctcattttaagacttcgagttaatccccttgttttcagtttcatgcaacactcgggattctctttatgagtgtgcagcattcagatgcttactattgtcgacagcgtcccccatcaaagcctctgggttccagstttatccggtttgctaagtcaattgcagtcgttcctcccctcagtgttgttgacatctcatccaccgcgcttacctttgccgttcctccactggcattggggcgggggacgggaagagtgcagacacatatggggtggaatcttgcttcctttaacctgatgcctccagggtggaattccttaggtcgtttgaccctcgcctctcttcccatttttccctccttgccttttgccaagacccagagtcactccagg

SEQ ID NO: 711884 - DNA, 828 bp, Homo sapiens
ttaaagccttttggcgggccgtggtggctcatgcctgtaatcccagcactttgggaggctgaggcatgcggatcacaaggtcaggagttcgagactagactgaccaacatggtgaaactcatctctactaaaaatacaaaaaaaaaaaaaattacccaggcgtggtggcacacacctgtaatccyagctactcaggaggctgaggcagtagaacagcttgaacccgagaggcagagattgcagtgagccaagatcgcaccactgcattccagcctgggcgacagagcaagactcggtctcaaaaaaaaaaaaaaccccaaaaaaacaaaaataaaaaaacctttcaaagaacactagtcattctaagctcatttcttattcttcagtaaggctttaattaaatataagcctattgacctttgcttcacaattttaatattaatgaaaatttcattctgagtttgaagtgacgtttcttcaagggtctgacccatttgggtggtggcgtagaagtggactgctagcatatacatggttacaaaattagagtaaaaactaaaaggtgaaaaaactagaaaacccaatactagctattccagaaaactaaaactaaaggattgcttgaaaaattgtctttagcaagataaagcagagtgacttatagacaagaccagtgattgttttttctccctgttggagcccctgaggtctgtgattaagatggcaattggggtctgagaagtctcactgatgactgcttcatcaatttttgctgctgtctcgttgactgtgcatcctcaatggcattacatgctctctgtaaagtaa

SEQ ID NO: 711885 - DNA, 828 bp, Homo sapiens
ttaaagccttttggcgggccgtggtggctcatgcctgtaatcccagcactttgggaggctgaggcatgcggatcacaaggtcaggagttcgagactagactgaccaacatggtgaaactcatctctactaaaaatacaaaaaaaaaaaaaattacccaggcgtggtggcacacacctgtaatcccagctactcaggaggctgaggcagtagaacmgcttgaacccgagaggcagagattgcagtgagccaagatcgcaccactgcattccagcctgggcgacagagcaagactcggtctcaaaaaaaaaaaaaaccccaaaaaaacaaaaataaaaaaacctttcaaagaacactagtcattctaagctcatttcttattcttcagtaaggctttaattaaatataagcctattgacctttgcttcacaattttaatattaatgaaaatttcattctgagtttgaagtgacgtttcttcaagggtctgacccatttgggtggtggcgtagaagtggactgctagcatatacatggttacaaaattagagtaaaaactaaaaggtgaaaaaactagaaaacccaatactagctattccagaaaactaaaactaaaggattgcttgaaaaattgtctttagcaagataaagcagagtgacttatagacaagaccagtgattgttttttctccctgttggagcccctgaggtctgtgattaagatggcaattggggtctgagaagtctcactgatgactgcttcatcaatttttgctgctgtctcgttgactgtgcatcctcaatggcattacatgctctctgtaaagtaa

SEQ ID NO: 711886 - DNA, 610 bp, Homo sapiens
caatgattctttttgccaaatctcagttgcaccatctgtgaataacgaaaacaatgccaatgtagagctctgagcagtcagagaattggagtatttccttgcagtctggtyctgaaacttcttccagacatcctttgggaatgaatgatactacctggcagatgcctgtgatctcagaagtcttcaaccttggagctgaatcatgctggcaaagaatataatcatctaactaaatgtccagagggaaaagctagctagttttctacacaatcctcccacatatccatgaggaattcttagaggaaaatgaggcagtaggcatcttttgaatctgcatgataatagaatagttatgaaatatgtttactttctacttatttgtaaacctctggctcattgatgaaggaataattatacaaaatagacaaatatgaaatagcaaactattttgcttattaagaaattacaaggtataaatgcagagtttaaaattaatctgtgatagtaatgatcaagtagagatatgtgatttcatacagtgatctgttatgcaaagatcaataagaccacagtcaacatgtatgattattaaacaagtagagaggtcctt

SEQ ID NO: 711887 - DNA, 602 bp, Homo sapiens
caaaggaatggccaagtgctgaaaatcaggcgatagaagtgaatttcaaagtacaaatttgtattgcccctaaatgttccacaatgtacgctataaattttaattttaatttgatatgcatacttaactttaaccacatacatttaggcatccaccattctagacttgtaaattaactgaatccccgaaaactgatttcataattctacttgtaggagatagttaagtaatttaacaccagctccctgtttgattttactcagtaatattactagttaygtccttttcgcattttatttaaaaattgtttatgcatttgaaattgacaaataaaacttgcatacatttatggtgttgtacagcatgatgttttgaaaatgtgtatacattgtaggatagctaaattaagctaattaacactgcattaccttatatagttgtctgttttgtgtttagaacacttgaaaaatattctgttaacaatttttgggtatataatgcattgttactaactatagttaccatttgtataataaatctcttgaacttattcctcctatctaactgaaatttagtaacctttgaccatatctccccaatct

SEQ ID NO: 711888 - DNA, 602 bp, Homo sapiens
caaaggaatggccaagtgctgaaaatcaggcgatagaagtgaatttcaaagtacaaatttgtattgcccctaaatgttccacaatgtacgctataaattttaattttaatttgatatgcatacttaactttaaccacatacatttaggcatccaccattctagacttgtaaattaactgaatccccgaaaactgatttcataattctacttgtaggagatagttaagtaatttaacaccagctccctgtttgattttactcagtaatattactagttacgtccttttcgcattttatttaaaaattgtttatgcatttgaaattgacaaataaaacttgcatacatttatggtgttgtacagcatgatgttttgaaaatgtgtatacattgtaggatagctaaattaagctaattaacactgcattaccttatatagttgtctgttttgtgtttagaacacttgaaaaatattctgttaacaattttkgggtatataatgcattgttactaactatagttaccatttgtataataaatctcttgaacttattcctcctatctaactgaaatttagtaacctttgaccatatctccccaatct

SEQ ID NO: 711889 - DNA, 590 bp, Homo sapiens
gatgaattgagtgaccatgttggagaaatccatgtggcaaggtgtgtagacagcttctagccacttctggtggcctctaagacctcagagcagccttcagacaacagcctgtagaaagccaggcccctcattcaaattgctgtcaggaaatgaatcctgtcaactgcctgaatgatctgggcatcagattcttcccagttgaacctgcagatgaaaayacagcccaccaatacattgattacagccatgtgacatattttgtagactgacttgcagatggcttgattattgaatgcaggatcatctgagagaaagaggagaatcaagaaaaacctagcttggttttgcactgggtggtggtgacttactaaacaagacagaccacggagaaacagatgaagggaagtaacagtggaaatcaaaaattctgtattgactacactaaatttgaggtgtttacaatatccataagtggaaatatttaaaattaaaaacttttataataacctcaaaacaaacaataggttttctcccctctttcccctgcagctttgcacttaaaccaatattaaattcttaagaatttctgg

SEQ ID NO: 711890 - DNA, 645 bp, Homo sapiens
cccatcaaggacactgaaggggcttttctgtcccttagttgcctgtccatagggcaacaatggggaggagctctggagctctgagcaattagtattcaaggcttcatcctatatcctggaaaggtacaacaaattgatcagataataaattaggcttttgttaaatccactcagtttgacagtaatggttaaattcaaaactagatcatcaatagcattgaaaagtaagttgactagtcactttgatgtgccatgggctgccatgatcttttgggagcaaatagacagaattcaccatttcattccaaaagattcttttgtaattgcatttaagttactttaaggcctggctacttatttggtgaaactgtacaaaagtatctggcggttcagcatactaatgagataagtttacattgaggtagctaggtgccaaaataagtcaccatggctataaaattaatccggcactccagaaaccaggatgtgyagagtcattataaacaacaatgttgctcccataacaaaagccatccattccacatggctcaatggggacgactgtgcaagtagaatcctataagagattataagtctaaggcttagttctgcagccaaccataatttgaagtgtggctctctggt

SEQ ID NO: 711891 - DNA, 677 bp, Homo sapiens
cctgagtcactgctgtatccaccccaagattttgaatagttttgacacatagtgagtacttccatagacattcgtcaaatatctgagtgagtgaataagaaagaaaaggaaaaaatgtctattagtttatttgggctgctgtaactgaacaccacaaacttggtggcctaaaacaacagaaatttattctctcagagttgtggaaaccagaaatctgacatcaaggtgttggcagggcggtgccccctccaaagactccagagaggatttgtccttgtcccttccagcttctggcggctccaagtgttccttggctgtggcagcgtcactccagtctctgcctgtgtctctgaacgccttcttctctggctgtctcctctatttataaggacacttctcattggatttagggcccacctgggtaatcctggattatctcatcttgggattcttcacttgatttttcctgtgaagaccttgtttttccccccaaataagctcatattcccttgcagaagggattaggatttggacatatcttcttgggacccacagttcaacccactacagaatatcacttccatgcttaagtcttcaattactctctactcttyaccgttttagggtaaaatatgaattcctttaaacaatcgacaggaccctaagagtgtgaccct

SEQ ID NO: 711892 - DNA, 838 bp, Homo sapiens
caaaaggaacattaattccttgtactgtgctttagcttttttaccccttggaataatactgctgtggttttatatgccacaccttcttcttaaatgcaactgaaatttgtttcactgtgcctaaatggtatttaagatactttcttttttttttttttttgagacagagtttcactctgttacccggrctggagtgcggtggcatgatatcagctcactgcaacctccgcctcccaggttcaagcgaggtaaagcgaggtaaaggtaccttttcctccattttcaaattttcacagaatctggggacacttttaggactggaaacaaatttattctcttccatttatgatctaaagtctcccttctaattttccagcctaataaacacctgttctaattacttttaatcattttctgctggagattttgtgtgtgtattggctataggcaggtgttttgtaataattaggggaaatagcctgtaagacactccttagttatgctctatatactaataaatgctactttttctatttgtctcatgtcttgaaagccttttgtgtgaatttttgataggtttccaaattctacaaaaatatacacatggattttgtattacttaggatcttagtgcaagagtttttttaatttatgtttttagagatgagatctcactatgttgcccaggctacctttgaatgcctaggttcaagcgatactcttgccttagcttcatgtggctggtactacaggcatgtaccaccatgcatggctttggtgctagagttttgttattttgttctgttttatttgatattgttgtctaatgggtcctcgt

SEQ ID NO: 711893 - DNA, 558 bp, Homo sapiens
tcaagggcagggtagagtggagcaaatggctcaatataaggatggaaagtgggtagccaggttggcgggacctaatcctaaagggccttgaatactctgttaaggagtttggacttattttctaggtgacttaagccttcagaacagaaaggagtctgtttagattacgtgtgagagctcatctgtccaatgttcaaccacacaatctcaataatgataaagatactaacaaagatgaactagccaaaaccattaatctgcttccataacgagctagcctatgagtttttaaaatatgtttctagccattaataaccagggaatttcacattaaagttcagatttatrgattctcttaaaaaaaaaaaaaagacctggtgatgacagaccagttattccaaacggcgacagagccaagggaggtgctccctttccaaagcatatgtgccgtccagcggtccaagtgcctcctctacctgccacactcacaccacctgcctaggggcactaaatgtttgggtttgcaccttttcttttagagagatgccctcttttatt

SEQ ID NO: 711894 - DNA, 644 bp, Homo sapiens
gatttwaaaaatgataaaaagttagacctaagaactcaaaaagtatggcagcatggagccatttagcataggggcaaagagccaaccacacctgccgagtttctgagtgcatcctgtattacagcatactgtacacaccataataattaatggttataatgactttgaatcactaaggacgtattaacccatgaactctaagaagacagggacttacataatatattttgaaagctccccttccccctataaagtgatttagtttaggcacttatagaaatacgctgcagaaaattaattttttatgatgtacctcattttctgatactgccttgaatgtgacatggtatacatacctaaaataataaccctaactatttaagaccttacactcaaggacttaggtgttcttgtttcagtaagctgtgttctgaagcatactggaaaaataaagcgtgttccataggaagctacctgcattatacacaggcattttatttaactctaatattagccaaatatcaataaagtaaaaactcttcaaacacaaccctttccccctatttaaagctagaatgtttttgtaaatatttactggagtgatgagtgttcagggctcaagtttatttatacatcattctgtg

SEQ ID NO: 711895 - DNA, 1104 bp, Homo sapiens
ctcctgcagttgtaaaaatatcagaatatgtgtttggctagcaaataattttgtaaacgttaagtagcatacaaatgaggtacactgttcttgttgacgtttctgtcttcagtggctggaataaagtgcagatcttggacgcagccacttggaccactagtggcccatcagttaatgacctgttcccagagtcctccctctgtctctatcagttaataggactcttcaagaacacagtgggtaccaactaacttttggtggcagaacctgcaggcatggctctgggaagcaagaggtggcaggaagattccaggaagttgggattctggaatgggaaggaaatgggagtggaggcacatttgcctacttcctaattttatgccacactggccatgacagatcacactctgagcctatttcaccagctgtccattagttgtgatgggaattagttgatcgatattaactaaaggcaagtggaagtatcgttggtctcagctctgaagggcttcagataaaaatctgccagcattggttaagagaagattggagaatttcaaatgagccatttcagagtttctaatttgcttccatgaggtgtttctacagtcagggactcttacatatgttgaataactctgctgtgtccaccagagtaattacagctaagttcatttcagcagacatgcattgagggtctgctttgtgcaaagccctgaccaggagatattggaaaaatgaactaagatatcctggactccgcctttgagatttccaacccaagcaaggattgrtattttcaatctttaggaatatggtggccaaatcaccttcttttcgagcaacagagtagaacaggttcttcttggcttaggctggagtcctcgaagctccgtgctgtgggaagtgacaactgagcacccctttgctgtccctgccctgctcagagccctaggcgaaggatgacaaagggaagcccacaagtcacatggccaggtgaaatggggtgttgtaaaaacttacaagtccagaaaaattagagatgtgagaacaaaaaacattcagtcatcgaccaatgtattcttcgagatctgattctcggaa

SEQ ID NO: 711896 - DNA, 802 bp, Homo sapiens
tgccaataccctcaaatatttcaaatcacatagtgaaataacttataactatgtttttagtataacaagtattcagcactaataaatgatttctttgaatagtggtacttttgtgatgcaaagtgtgctttcttacacatggtgacactgatttctgatcaggttgattatcttcctttccctctaattgaagtttgtggcttctgtaactatttctgggtttggatttacttgtagatgctataaatagctccactaggtttttatttttcacattatggtagcactgacttcacagaaaaaaattccacttatgaatacttttgaaaaggtcattaatgaggccatttttctaaccaccaaatacatgatttcttaactggcaggcctaagagcaattcctgagggccactctccatccttttgtatcaaaggaaactataaacaaatgaaatctataaactgtctgggccccaattaatcattctcctgactttgaatagaaatttaagctgcacttgatttattacaatatttgctctgtccttaactgcatcatgtgtactgctactaaagtcacgaggagcccagaaccgcatgtgcttaatcagtcatgattaataatagctgtgatcctccacgcccatattcatcttttgactcacagattaaatctttgggcttttctgttaaaaggatacacctgaatgccctaatcagtctcaaaacctggcgtacacacacacacacacacacacacacamaaaaaaaacttgttttttaaattaagaaagtcggccgg

SEQ ID NO: 711897 - DNA, 802 bp, Homo sapiens
tgccaataccctcaaatatttcaaatcacatagtgaaataacttataactatgtttttagtataacaagtattcagcactaataaatgatttctttgaatagtggtacttttgtgatgcaaagtgtgctttcttacacatggtgacactgatttctgatcaggttgattatcttcctttccctctaattgaagtttgtggcttctgtaactatttctgggtttggatttacttgtagatgctataaatagctccactaggtttttatttttcacattatggtagcactgacttcacagaaaaaaattccacttatgaatacttttgaaaaggtcattaatgaggccatttttctaaccaccaaatacatgatttcttaactggcaggcctaagagcaattcctgagggccactctccatccttttgtatcaaaggaaactataaacaaatgaaatctataaactgtctgggccccaattaatcattctcctgactttgaatagaaatttaagctgcacttgatttattacaatatttgctctgtccttaactgcatcatgtgtactgctactaaagtcacgaggagcccagaaccgcatgtgcttaatcagtcatgattaataatagctgtgatcctccacgcccatattcatcttttgactcacagattaaatctttgggcttttctgttaaaaggatacacctgaatgccctaatcagtctcaaaacctggcgtacacacacacacacacacacacacacaaamaaaaaacttgttttttaaattaagaaagtcggccgg

SEQ ID NO: 711898 - DNA, 1108 bp, Homo sapiens
tgcagaattctctttttcttttataagtttgctrgtgttcttatttttggttatatattctagaagcgttattcttttttaatgcccacaccactccccatcctcctccttgcccctgccaaaaaaaaaaaaaaagaagcattttatgtttttttgaagaaccagctcttggatttatcttctagttggttaaggctttcatctttactatttttgttttattttttcttagaattgttttggtgtttttaatttaaattttcagttcatatatttttactctttcttgtttaataataaaaaaatttaagatacacatttgctattgattactgtttggccatatttcattaatttggattatgcaatattttcattttgttatgttccaaaaaacctctaattataatttgggtttcctttgtgatccattaattatttaggacactgtgtcttaattgtcgagcagctgatgctttttggctttaaatgtttagtattaatttctagttttcttgcattttagtcagagaatatggcctatatatttcctggaattccttgagattttctgaacccatttttgtaaatgttcatgaaacttggaagagaagatatattatctctgtgtagactgtaaaggttataaagagtttagatgttgtttcttcacttttttttttttttttgagacagagtctgttgcccaggctggagtacagtggtgccatctccgctcactgcaacctccgcctcccaggttcaagtgattctcctgcctcagcctcctgagtagctgggactacaggtgtgcgccactaagcccggctaatttttgtatttttagtagagatgggatttcacgatgttggtcaggctagtctcgaactcctgacctcaagcaatgtgcctgccttggcctcccaaagtgctgggattacaggcataagccactgtgcccagtccacttttttgttatattagtaaaaatctatgccaaaatcatgaacaaattcaggccaaaaggttagttataaaaacatgtggcatgaacaagacccattagcaggagaggtagctatctcaaggtaaaaagagagatccgaag

SEQ ID NO: 711899 - DNA, 762 bp, Homo sapiens
tgctcccgctaggggtttgagctgcccggagatggaacaggcaagccacacccctgctacctgtcccacgaagggaatcagagaactctcccatttcactatgaattaagaatttttttttacattttcaaatggttaacaaaatcaaaaataatttcatgacacatgaacattatataaaatcaaattttagtatctgtaataaagttttattgcaatgcagccacacccattggtttacacaatgtctttcactctacaacaccaaagctttgtagttgtgacagagaccatatggccagtaaagctgaaactattttctatgtggccctttacagaagaaggtttgttggtctgtgatctagattcatgcttatagactgtgatctagattcatgatctagattctagctaaacttgtggaaaacgaaccatgaactttagacattcatcgccttttttttttttttttttgagacagggtctcatttttttgcccagggcagagtgcagtggtatgatcatagctcactgcagccttggactcttgggctcaaatgatgttctcaccttggcctcccaaagtgctggaattacaggcataagccaccctgcacagcytatttgttgactttaatattctatgtatgcataacatagggggatgcacaagctgcattatacaattacctgctgtggaaaattcttttgaaatatttcaaagtcattgtcttgtggaataacagctttcttttctaacca

SEQ ID NO: 711900 - DNA, 596 bp, Homo sapiens
aggatggcagcaggcaaagagaggagcttgtgaaagggaatttccctttttgaaaccatcagatctcatgagacttattcacggtcatgagaacatcatggraaagatttgcccccatgattcaattgcctcccaccgggatcctctcacaacatgtgggaattcaagataagatttgggtggggacacagccaaaccatattagtaggggataagcaagatggtgaaaagttgcataattttcaccttccctgggacctccaaaatatcacaacaaagagttctttgtttgttaggaacatattaggctgcaaataatagaatactagactcatggtcgcttacatcaatgggagtttatttaaaatcagagctatgtagcagttggcatggattcagctgttcaacgatgccatcagggacccagacactgtctatatttccactttaccatccttgttctgttggcttttgtgctcatgcttgccacattatggtcttagggtagttgctatgggctcacacattacgtttatatttcaaggcagggagaaggaaaatgaggaaaaaggtaccaacaatggccatgttcttct

SEQ ID NO: 711901 - DNA, 596 bp, Homo sapiens
aggatggcagcaggcaaagagaggagcttgtgaaagggaatttccctttttgaaaccatcagatctcatgagacttattcacggtcatgagaacatcatgggaaagatttgcccccatgattcaattgcctcccaccgggatcctctcacaacatgtgggaattcaagataagatttgggtggggacacagccaaaccatattagtaggggataagcaagatggtgaaaagttgcataattttcaccttccctgggacctccaaaatatcacaacaaagagttctttgtttgttaggaacatattaggctgcaaataatagaatactagactcatggtygcttacatcaatgggagtttatttaaaatcagagctatgtagcagttggcatggattcagctgttcaacgatgccatcagggacccagacactgtctatatttccactttaccatccttgttctgttggcttttgtgctcatgcttgccacattatggtcttagggtagttgctatgggctcacacattacgtttatatttcaaggcagggagaaggaaaatgaggaaaaaggtaccaacaatggccatgttcttct

SEQ ID NO: 711902 - DNA, 596 bp, Homo sapiens
aggatggcagcaggcaaagagaggagcttgtgaaagggaatttccctttttgaaaccatcagatctcatgagacttattcacggtcatgagaacatcatgggaaagatttgcccccatgattcaattgcctcccaccgggatcctctcacaacatgtgggaattcaagataagatttgggtggggacacagccaaaccatattagtaggggataagcaagatggtgaaaagttgcataattttcaccttccctgggacctccaaaatatcacaacaaagagttctttgtttgttaggaacatattaggctgcaaataatagaatactagactcatggtcgcttacatcaatgggagtttatttaaaatcagagctatgtagcagttggcatggattcagctgttcaacgatgccatcagggacccagacactgtctatatttccactttaccatccttgttctgttggcttttgtgctcatgcttgccacattatggtcttagggtagttgctatgggctcacacattacgtttrtatttcaaggcagggagaaggaaaatgaggaaaaaggtaccaacaatggccatgttcttct

SEQ ID NO: 711903 - DNA, 1396 bp, Homo sapiens
gcgtgcgcccctcaactagacagcgtccagggtctggccgcgcttacaccaccctggctcgctcctctactccgaacttgcagtccggccggccggatggctggtttcgtccggggacaagccttcccggcctaactctgaacgtgccgcatgccggccaggtcgaaggaagcctagcagcggccgtacgctcctgggtcttcccgggggagaagcgggatgcactgggcgggaaggcagctcaggcagagcaagcagcgccgcgcctggagagggcagagcacccggccccgctccaggcgctccccgcctgctggtgcccctcaccttgtcccagcgcagccactgggcggtctcctggtccagccgggcgtcctcgcctagaccgctgccttctggagccgccatcgctgagcttgtgctaccgctgcagagggaagcaggcggtgagatctgccttccggcccggccccaagacgtggaggcggaggcgggggcggggagagccgcggcggagccagtcggtccgggggaaagtgacgcgcgccgcggcgggcacgcctccttgccgtttgcrggtgcgctgcagggggtgggagtgagcgaggaggaattgcggggctagggtgggttgctggaacctggcacgtgtgagaagggtttgccatcgtctctgatgcatccaggctacagccagccgtgagttcctgctgcgcgccaggcacatgtcagatgctgggataccaggaagtgcacccagataggggcctgaagactatgtagaaactcagagggtcaagaacagccagaaaaaaatcttgaaaaagaaaagcaaagtaggaagaccagtggaacataagatagagaccagaaacaaaaatacacgtgtatggacaatttatttcagaggcggggctgcagagcacaggaaggaactatttttggttaatggtgctcggtcaaagggatatccacgtagggaaaagaaaaaagggaacttggccccctacctcccatcacacacagctctgaactccagatcaattgtatctctaagtgcgaaaggtagtgtagcaggaggagccgcagacaaaactcctcagacaccggattaaagaaggaagaggtttttattcggccgggagcgtcggcagactcgcgtcttaagagccgagctccctgaaaaagaaattcctagccattttaagggcttacaacgctaaggggtctgtctacgtgaaagggtcatgatagatcaagtaagcgtgaggaacgtgactgggggctacatacatcagctaacagaacaagaagttttacagtgctttctcatacgatgtctggaatttacggataacgccagtagttttggtcaggggttaatattattattatt

SEQ ID NO: 711904 - DNA, 1396 bp, Homo sapiens
gcgtgcgcccctcaactagacagcgtccagggtctggccgcgcttacaccaccctggctcgctcctctactccgaacttgcagtccggccggccggatggctggtttcgtccggggacaagccttcccggcctaactctgaacgtgccgcatgccggccaggtcgaaggaagcctagcagcggccgtacgctcctgggtcttcccgggggagaagcgggatgcactgggcgggaaggcagctcaggcagagcaagcagcgccgcgcctggagagggcagagcacccggccccgctccaggcgctccccgcctgctggtgcccctcaccttgtcccagcgcagccactgggcggtctcctggtccagccgggcgtcctcgcctagaccgctgccttctggagccgccatcgctgagcttgtgctaccgctgcagagggaagcaggcggtgagatctgccttccggcccggccccaagacgtggaggcggaggcgggggcggggagagccgcggcggagccagtcggtccgggggaaagtgacgcgcgccgcggcgggcacgcctccttgccgtttgcgggtgcgctgcrgggggtgggagtgagcgaggaggaattgcggggctagggtgggttgctggaacctggcacgtgtgagaagggtttgccatcgtctctgatgcatccaggctacagccagccgtgagttcctgctgcgcgccaggcacatgtcagatgctgggataccaggaagtgcacccagataggggcctgaagactatgtagaaactcagagggtcaagaacagccagaaaaaaatcttgaaaaagaaaagcaaagtaggaagaccagtggaacataagatagagaccagaaacaaaaatacacgtgtatggacaatttatttcagaggcggggctgcagagcacaggaaggaactatttttggttaatggtgctcggtcaaagggatatccacgtagggaaaagaaaaaagggaacttggccccctacctcccatcacacacagctctgaactccagatcaattgtatctctaagtgcgaaaggtagtgtagcaggaggagccgcagacaaaactcctcagacaccggattaaagaaggaagaggtttttattcggccgggagcgtcggcagactcgcgtcttaagagccgagctccctgaaaaagaaattcctagccattttaagggcttacaacgctaaggggtctgtctacgtgaaagggtcatgatagatcaagtaagcgtgaggaacgtgactgggggctacatacatcagctaacagaacaagaagttttacagtgctttctcatacgatgtctggaatttacggataacgccagtagttttggtcaggggttaatattattattatt

SEQ ID NO: 711905 - DNA, 573 bp, Homo sapiens
tttgaagatgaagttaaatactgcttgcacaatgcctagcatatagctagtgcccagcataaactactatgttttctttctaaacagctttgctttcttagatgtcatagggcagcagttcccaatctttttggcagcagggaccaatcggtttcctggaagacaatttttccacctaggcgacagtggagggatggttttggaatgaaactgttccacttcagagatcatcaatcatcaggcattctcataaggagcatgcaacctggatccctcacatacgcagctcacaatcgggtccgcacttttatgagactctaatgccacagctgatccaacagaaggtagagctcaggcagtaatgctcactcacctcytgctgtgcatcccagttcctaacaggacacacactggtacaggtctgtggcccgggggttgggagcccctctcatagggtagaattattccatatagataaaacttttaaagtgcacagtttatatagcaatagatatgggagaaataataacttacatttctagagcaccttatgagtacaaactactttcacag

SEQ ID NO: 711906 - DNA, 1467 bp, Homo sapiens
agggagggtgagggtggttaaggaaagaaaaattatctattgggtacgaggtaggctactctggtgatgcgtacattaaaatttcagacttcaccacaatacaattcatgcatgtaacaaaaaaccacttgtacccctaaagctactgaaataaaaaaaataaaawtttttttttttaaaaaaagcatcgttccatccagtgcctgattgtgttgtgttttccttggtgactccaatattaaaatcaaataggcagaaatgctgatttctacttctgatataggcaagagatgccacttcctccacagtccctactttgcaaaagaagaaactgagtcaaagagtacttaagtgacttgtccaaggtcacccagtgaataagaggttgagattcaataggccagacctattttattcaaaaaaatgggctttaatccacacttttctccctataagcttttcttatgtaacttaccattccaataaagaaggaatgtggaggattcagatgagattgcagatgcctatgtatcaatgagcttcatgaagctttctgttttagcagtatctgttatagcccaatatgctttaaactgaggcactagtgtggcataaagctaactcaaatctatttattgctacaatcaagaggttgacatgctttgagaacattcaagttaaaagaacaggaggtgaaatataatgaaagagaaggatacagaaagaaaggactgaaaatatgattaaatgtcagagaagaattcagaagtggtgttgtagaactcctaagtgctcacacattttcattaatcataccattgcaggatactatgaattgtgatcatctactgcccatttatttttattttgtttttgagatggactctcgctctctgttgctcaggctggagtgcagtggcatgatctcggctcactgcaagctccgcctcccaggttcacgccattctcctgcctcagcctcccaagtagctgggactacagttgcccgccaccatgcctggctaattttttgtgtttttagtagagacagggtttcaccatgttagccaggaaggtttcgacctcctgacctcataatccactcaccttggcctcccaaaatgctgggattataggcgtgagccaccacacccggcccatcacaggtattttctaagttgtaagatctatttcctcattatccttcacacaataaataactacctttataaaatacctaatgtgtgtgaagtatccttgtacatgctattcataactatatcccatcacccatcataattttataaggtaggtaaaactttaaacttcattttagaaacatgatttggagaaaagagaatgcttatgcactattggtgggaatgtgaattagttcagcccctgtggagagcagttggagatttctcaaagaacgaagagttgaattaccatttgacccaacagtcc

SEQ ID NO: 711907 - DNA, 1467 bp, Homo sapiens
agggagggtgagggtggttaaggaaagaaaaattatctattgggtacgaggtaggctactctggtgatgcgtacattaaaatttcagacttcaccacaatacaattcatgcatgtaacaaaaaaccacttgtacccctaaagctactgaaataaaaaaaataaaaatttttttttttaaaaaaagcatcgttccatccagtgcctgattgtgttgtgttttccttggtgactccaatattaaaatcaaataggcagamatgctgatttctacttctgatataggcaagagatgccacttcctccacagtccctactttgcaaaagaagaaactgagtcaaagagtacttaagtgacttgtccaaggtcacccagtgaataagaggttgagattcaataggccagacctattttattcaaaaaaatgggctttaatccacacttttctccctataagcttttcttatgtaacttaccattccaataaagaaggaatgtggaggattcagatgagattgcagatgcctatgtatcaatgagcttcatgaagctttctgttttagcagtatctgttatagcccaatatgctttaaactgaggcactagtgtggcataaagctaactcaaatctatttattgctacaatcaagaggttgacatgctttgagaacattcaagttaaaagaacaggaggtgaaatataatgaaagagaaggatacagaaagaaaggactgaaaatatgattaaatgtcagagaagaattcagaagtggtgttgtagaactcctaagtgctcacacattttcattaatcataccattgcaggatactatgaattgtgatcatctactgcccatttatttttattttgtttttgagatggactctcgctctctgttgctcaggctggagtgcagtggcatgatctcggctcactgcaagctccgcctcccaggttcacgccattctcctgcctcagcctcccaagtagctgggactacagttgcccgccaccatgcctggctaattttttgtgtttttagtagagacagggtttcaccatgttagccaggaaggtttcgacctcctgacctcataatccactcaccttggcctcccaaaatgctgggattataggcgtgagccaccacacccggcccatcacaggtattttctaagttgtaagatctatttcctcattatccttcacacaataaataactacctttataaaatacctaatgtgtgtgaagtatccttgtacatgctattcataactatatcccatcacccatcataattttataaggtaggtaaaactttaaacttcattttagaaacatgatttggagaaaagagaatgcttatgcactattggtgggaatgtgaattagttcagcccctgtggagagcagttggagatttctcaaagaacgaagagttgaattaccatttgacccaacagtcc

SEQ ID NO: 711908 - DNA, 1467 bp, Homo sapiens
agggagggtgagggtggttaaggaaagaaaaattatctattgggtacgaggtaggctactctggtgatgcgtacattaaaatttcagacttcaccacaatacaattcatgcatgtaacaaaaaaccacttgtacccctaaagctactgaaataaaaaaaataaaaatttttttttttaaaaaaagcatcgttccatccagtgcctgattgtgttgtgttttccttggtgactccaatattaaaatcaaataggcagaaatgctgatttctacttctgatataggcaagagatgccacttcctccacagtccctactttgcaaaagaagaaactgagtcaaagagtacttaagtgacttgtccaaggtcacccagtgaataagaggttgagattcaataggccagacctattttattcaaaaaaatgggctttaatccacacttttctccctataagcttttcttatgtaacttaccattccaataaagaaggaatgtggaggattcagatgagattgcagatgcctatgtatcaatgagcttcatgaagctttctgttttagcagtatctgttatagcccaatatgctttaaactgaggcactagtgtggcataaagctaactcaaatctatttattgctacaatcaagaggttgacatgctttgagaacattcaagttaaaagaacaggaggtgaaatataatgaaagagaaggatacagaaagaaaggactgaaaatatgattaaatgtcagagaagaattcagaagtggtgttgtagaactcctaagtgctcacacattttcattaatcataccattgcaggatactatgaattgtgatcatctactgcccatttatttttattttgtttttgagatggactctcgctctctgttgctcaggctggagtgcagtggcatgatctcggctcactgcaagctccgcctcccaggttcacgccattctcctgcctcagcctcccaagtagctgggactacagktgcccgccaccatgcctggctaattttttgtgtttttagtagagacagggtttcaccatgttagccaggaaggtttcgacctcctgacctcataatccactcaccttggcctcccaaaatgctgggattataggcgtgagccaccacacccggcccatcacaggtattttctaagttgtaagatctatttcctcattatccttcacacaataaataactacctttataaaatacctaatgtgtgtgaagtatccttgtacatgctattcataactatatcccatcacccatcataattttataaggtaggtaaaactttaaacttcattttagaaacatgatttggagaaaagagaatgcttatgcactattggtgggaatgtgaattagttcagcccctgtggagagcagttggagatttctcaaagaacgaagagttgaattaccatttgacccaacagtcc

SEQ ID NO: 711909 - DNA, 1455 bp, Homo sapiens
acctggctaatatggtgaaaccccattgctactaaaaaatacaaaaattagctgggcgtggtggtgcgtgcctgtagtcccagctacttgggaggctgaggaaggagagttgcttgaacccaggaggtggatgttgtggtgagccaagatcgcgccactgcactcctgcctggggaacagaacaagactccatctcaaaaaaaaaaaaaaaaagaagaaaaygtaactttttttgttaaaaatagatcatttaaactattatagagaggataaagcgtatcttatagaattgaggacgtgatagctgtggacttgagatatacaggtgtatgggttcttttctttcttgtatttaattaaataacaacataatgactggagcattcacatctccaactcacacttgagtctctgctacgcaagaaacccaaaccactatggcccacataaacttctcttaacttccagtccttactcacaacacatgtcctagttcccagtactaccatgtagtgataccatagaatagtaggttttccagtgttctaattgctttttatttcaattgtattacttaacacattgcaaggatctagtgacccaagtctcactggtggttgctagatgggttgattctttcatttaacaaatactttctgtaggttattgaagaaaatttggacttttggggaaaataatgaaagtttggagagaaaagtgttatgatatggtttatattttcagtggatcattctaatggatgtcttcatgggggaatgggaaaggtagaagtatgaaaaccactttggaggcttttgctgttactagaaatgatggtgcaaattagagtggtagagataacaggtgcttgttttctattgtactttacaaagtgcctgctatgtgtctgtttctgacatattgtttaataaatacaatactgtattcctacctgccttacacctctccacctcccaaacttttgacctttcaataaatatagaaaactcttatctctgcagatttacaaaatagtctcaggatccaagctgatggggaaggaatggggtgcattacatagttgctgtgtttagcaaaatccttcttttgcatcatatgcagttcagtgcatcttgattttgaatagattcatttcatttttttgcataggccgacaaaagaatggaataaatgtagactgtatattctgctaatgcaacatcaaaaagccctgcaatatttagacaaactgagtgactagaaactgattttggcaatctgccttttcataataaagaggaatgtggcagtagtgtaatattggaggtctcatccctaatagttcaatttgctagtgctaggaatgatggcgaaatgaactcttttaatagtaaagtgctgctttgtgagatgttgtatcttaacatggaaaaaaattttaagctgaacaggtcc

SEQ ID NO: 711910 - DNA, 654 bp, Homo sapiens
tccccttataaaaccatcaaatctcatgagacttattccctaccacaataacagtatgggggaaatgaccyccatgattcaattatctcccactctgtccttcccacaacacttgggaattaggtgaactacaatccaagatgagatttggattgggacacagccaaaccatatcaccagctttctcttagtcaaaggccgagtatttcttacataggttactcacattatttcctcttattttgttccattcctgtgttcctttttttccctgaccataaacatcaccaaggttggccaatctcctatgcacctgcctcatttcttcttcctacagctatggcagagcctcctagttgaccatggctttctttccccctgagcccacacacggtctcagcacatttttttcacatgcactccagtgaccttgaccctcagcagaaactagatttcaggacggaactcatcatccactctgagtaggccctagagagacagtgtctcatagccacagtttctctctagctcaccacgcatagtagatgctcaaaaactatttggtgagtgaatgaagagacatgactagtaatagaaccgtagtaaattcatctggaaacttacaaataatcttggaagagggaagacaagatt

SEQ ID NO: 711911 - DNA, 1341 bp, Homo sapiens
caaccaaaacaaataaataaacaataaaaaagaaacaaaacaacgactaaaccccaacaactagttatattggcttaaacaatcagaagtcttatttttctcatgaaataatttcaaaagttgcacttatccatgtcattaggaattcaggggtggagcttttgtccacccttgaatggttgcaaggtggctgctgatcatcaaaggaggaggtctgcatcctaatctggaaaaagacacagggacataaaatgaaaaggaatgttagacacatctaaccttttggaaagctctctgagagtttccacccagtgatatctcattggctagaatttagccacttggtgatccatgactgaaagaaagatgagaaagctttttttttcttttattatacttaagttctgtgatacatgtgcagaacgtgcaggtttgttacatcggtatacacatgccatggtgatttgctgcaccaatcagcctgtcatctacattaggtatttctcctaatgctatccctcccctagccccccaaccccccaacaggccccagtgtatgatgttcccctccctgtgtccatgtgttctcattgttcaactctcacttatgagtgagaacatgcagtgtttggttttctgttcttgtgttagtttgctgagaatgatgatttccagcttcatccacgtccctgcaaaggatatgaactcatccttttatggctgcatagtattccrtggtgtatatgtgccacattttctttatccagtctatcattgatgggcatttgggttggtttccagtctttgctattgttaatagtgctgtagtatatatacgtatgcatgtgtctttatagtagaatgatttataatcctttgggtatatacccagtaatggaattgctggattaaatggtatttctggttctagatccttgaggaattgccacactgtcttccataatggttgaactaatttacactcccaccaacaatgtaaaagcattcctatttctctacatgctctccagcatctgttgtttcctgactctttaaagatcgccattctaactggcacgagatggtatctcattgcaattttgatttgagaaagcatttttttttagtaggccaattgtgacttcacatacaatctgtttctgctggtaaagaagaaaaagaaagggatattgggtagcagttatctcctgcagtgcaacaaatgaccttaaaacctagtggtttaatgcaacaaccactttattttcttgtgatttttatgggccaggaactagggcagggcttaggatggatggttcatctcttctctacatgtctggg

SEQ ID NO: 711912 - DNA, 1341 bp, Homo sapiens
caaccaaaacaaataaataaacaataaaaaagaaacaaaacaacgactaaaccccaacaactagttatattggcttaaacaatcagaagtcttatttttctcatgaaataatttcaaaagttgcacttatccatgtcattaggaattcaggggtggagcttttgtccacccttgaatggttgcaaggtggctgctgatcatcaaaggaggaggtctgcatcctaatctggaaaaagacacagggacataaaatgaaaaggaatgttagacacatctaaccttttggaaagctctctgagagtttccacccagtgatatctcattggctagaatttagccacttggtgatccatgactgaaagaaagatgagaaagctttttttttcttttattatacttaagttctgtgatacatgtgcagaacgtgcaggtttgttacatcggtatacacatgccatggtgatttgctgcaccaatcagcctgtcatctacattaggtatttctcctaatgctatccctcccctagccccccaaccccccaacaggccccagtgtatgatgttcccctccctgtgtccatgtgttctcattgttcaactctcacttatgagtgagaacatgcagtgtttggttttctgttcttgtgttagtttgctgagaatgatgatttccagcttcatccacgtccctgcaaaggatatgaactcatccttttatggctgcatagtattccatggtgtatatgtgccacattttctttatccagtctatcattgatgggcatttgggttggtttccagtctttgctattgttaatagtgctgtagtatatatacgtatgmatgtgtctttatagtagaatgatttataatcctttgggtatatacccagtaatggaattgctggattaaatggtatttctggttctagatccttgaggaattgccacactgtcttccataatggttgaactaatttacactcccaccaacaatgtaaaagcattcctatttctctacatgctctccagcatctgttgtttcctgactctttaaagatcgccattctaactggcacgagatggtatctcattgcaattttgatttgagaaagcatttttttttagtaggccaattgtgacttcacatacaatctgtttctgctggtaaagaagaaaaagaaagggatattgggtagcagttatctcctgcagtgcaacaaatgaccttaaaacctagtggtttaatgcaacaaccactttattttcttgtgatttttatgggccaggaactagggcagggcttaggatggatggttcatctcttctctacatgtctggg

SEQ ID NO: 711913 - DNA, 1341 bp, Homo sapiens
caaccaaaacaaataaataaacaataaaaaagaaacaaaacaacgactaaaccccaacaactagttatattggcttaaacaatcagaagtcttatttttctcatgaaataatttcaaaagttgcacttatccatgtcattaggaattcaggggtggagcttttgtccacccttgaatggttgcaaggtggctgctgatcatcaaaggaggaggtctgcatcctaatctggaaaaagacacagggacataaaatgaaaaggaatgttagacacatctaaccttttggaaagctctctgagagtttccacccagtgatatctcattggctagaatttagccacttggtgatccatgactgaaagaaagatgagaaagctttttttttcttttattatacttaagttctgtgatacatgtgcagaacgtgcaggtttgttacatcggtatacacatgccatggtgatttgctgcaccaatcagcctgtcatctacattaggtatttctcctaatgctatccctcccctagccccccaaccccccaacaggccccagtgtatgatgttcccctccctgtgtccatgtgttctcattgttcaactctcacttatgagtgagaacatgcagtgtttggttttctgttcttgtgttagtttgctgagaatgatgatttccagcttcatccacgtccctgcaaaggatatgaactcatccttttatggctgcatagtattccatggtgtatatgtgccacattttctttatccagtctatcattgatgggcatttgggttggtttccagtctttgctattgttaatagtgctgtagtatatatacgtatgcatgtgtctttatagtagaatgatttataatcctttgggtatatacccagtaatggaattgctggattaaatggtatttctggttctagatccttgaggaattgccacactgtcttccataatggttgaactaatttacactcccaccaacaatgtaaaagcattcctatttctctacatgctctccagcatctgttgtttcctgactctttaaagatcgccattctaactggcacgagatggtatctcattgcaattttgatttgagaaagcatttttttttagtaggccaattgtgacttcacatacaatctgtttctgctggtaaagaagaaaaagaaagggatattgggtagcagttatctcctgcagtgcaacaaatgaccttaaaacctagtggtttaatgcaacaaccactttattttcttgtgatttttatgggccagraactagggcagggcttaggatggatggttcatctcttctctacatgtctggg

SEQ ID NO: 711914 - DNA, 1341 bp, Homo sapiens
caaccaaaacaaataaataaacaataaaaaagaaacaaaacaacgactaaaccccaacaactagttatattggcttaaacaatcagaagtcttatttttctcatgaaataatttcaaaagttgcacttatccatgtcattaggaattcaggggtggagcttttgtccacccttgaatggttgcaaggtggctgctgatcatcaaaggaggaggtctgcatcctaatctggaaaaagacacagggacataaaatgaaaaggaatgttagacacatctaaccttttggaaagctctctgagagtttccacccagtgatatctcattggctagaatttagccacttggtgatccatgactgaaagaaagatgagaaagctttttttttcttttattatacttaagttctgtgatacatgtgcagaacgtgcaggtttgttacatcggtatacacatgccatggtgatttgctgcaccaatcagcctgtcatctacattaggtatttctcctaatgctatccctcccctagccccccaaccccccaacaggccccagtgtatgatgttcccctccctgtgtccatgtgttctcattgttcaactctcacttatgagtgagaacatgcagtgtttggttttctgttcttgtgttagtttgctgagaatgatgatttccagcttcatccacgtccctgcaaaggatatgaactcatccttttatggctgcatagtattccatggtgtatatgtgccacattttctttatccagtctatcattgatgggcatttgggttggtttccagtctttgctattgttaatagtgctgtagtatatatacgtatgcatgtgtctttatagtagaatgatttataatcctttgggtatatacccagtaatggaattgctggattaaatggtatttctggttctagatccttgaggaattgccacactgtcttccataatggttgaactaatttacactcccaccaacaatgtaaaagcattcctatttctctacatgctctccagcatctgttgtttcctgactctttaaagatcgccattctaactggcacgagatggtatctcattgcaattttgatttgagaaagcatttttttttagtaggccaattgtgacttcacatacaatctgtttctgctggtaaagaagaaaaagaaagggatattgggtagcagttatctcctgcagtgcaacaaatgaccttaaaacctagtggtttaatgcaacaaccactttattttcttgtgatttttatgggccaggaactagggcagggcttaggwtggatggttcatctcttctctacatgtctggg

SEQ ID NO: 711915 - DNA, 1084 bp, Homo sapiens
tgttcattgtcagattttttcactctgtttctccatatcctctgctccaaggtactttgatgaaatgtgtcctgccatggctgctttatgatctgatattgaaaaggactgtaggcatttagaatgcatatattttattgtctttagatatccagtactacaacataatgtcttccacaaagtgtttcgagtcctgctatagctgtggcttagctcttcttgtgggaacctgtgtgtcttatgttctctgcttcctccaggagccccagttatctcttcaggattgaagggagatcagcatggctgcctcttggatatttgactgctcaatatcatttctaccagatggtgcaagagggaaatcaaaaaacgctgcaactcaaaccagtttgagttttagcaattttgctacttggttctaggtctggtaaatgactggaccacagaaggaagttgaagttgtaggtttttcgtaaccatttagctcatttcccagaggttttgctggccagggtgtttgaagatagaaagtggctagagtgtggtttcagatctggggcttgtctctctcatgagagaaaatgggataaaatttaaaggtcattcctatgtttgaaaaaatgattgaccaggcttatacatgagattatttctgcaacaccatttggagggtgtgtatgccaatcatgtggctctgtaaggtggaaggaggcatgatgttcagttatggttgtttttatctcaagttctttgacattcagggcatgagacaaaagtatatagttttggtttggcattctgtgacaatccagctgagtttgttttcttcctcttcttttatgaggtattttaaggtttagatgttctttttacygtgaaatctaatttaattgtggttattttatttttctgtatatgtgcccagagatttttggtttattggtaaactttaaaaaataccacagtgcgtgtaaacatatataatttaagaaccagtcatgattgaggcctatgatatcctttggaacattcttacttggaagcaattctaattaacaagatattttctggtttccttcttgta

SEQ ID NO: 711916 - DNA, 1896 bp, Homo sapiens
atgtttaatatagccaggcattgttttaagcactttatttatggtaactcatctaactctcacagccctttgtggtatgaaatattgctgtctctatattaaagctggcaaaactaagacacagagaagttaagtaacttgtctaagatcacacagccagcaagtagtgaagccaagatttaaacccagaatttctgctccagagtccatgcttttaggcactatgccacactcaggtaatagttccaatgacttcattcactcacaagttgagaatcaaatatctgtttctcactgccatgtgcacccytcctcatgcaggccagggagccatggactttctatcacctcattaaaacaaaagtagctgggtgcagtgtcccatatctgtaatcccagcacaatgggaggctgaggcaggataacagcttgagcccaggagttcaagaccagcctgggcaacatggtgaaactctgtcttcacaaaaaatacaaaaaaattagctgggcatggtggtgtgtgcctgtagttccagctactcaagaggctgaggtgggaggatcgcttgagcccaggaggtcaagactgcagtgagctgaaatcatgccactgcactccagcccatgcaacagaatgagacaaaaaaaagtagttgagccaaagagaggcatgttagccgccattattgctattactatattattatattatattatcacttacatctgagccaaattcccactcagtccttggtaactaaacctcccctccatgaataatgaatcattctcatagtctcacactcagtgggcttcagttacctttgaagacagatcagttcaggtgatgcaatattggtttgtagggaagcaaactaatgatttctaacctagtcatgcaacagatgctttacatgtggtgcttttaaaagaacaagtaagggtcttctttctgctaagttagttttttgaatacttgaagttcagtcttttaaagagaaccattttggggatagggaaggggacatatttctaactgataataaacagaacactgtcctgttagagtatgtggagaatagtagaatcttattttactgttgaggtcattttaagacagcaatcatagcaccttgctacttcttggatcagagagacatgtagagttttttggccctgtatatatggtcttaggtagctgtgctttttgagttcccacacttatctttttaatgatagtcttctggtgtcctcaatggagttcatcagttgtcacatctgttgacgttcttaatgccctttgtctagcaatcatccctctcctaatttgtggcttctaatttgctacagtttggaaaaccactcatgccataagtatgaatctataaatgtacttatgcataaatttacaaatgcatatacacttatccctttccacaaaggatgtatggcagctttttaaaattatgcaattacaaaaaataatttttgaaggaatttgaacaaaaggaaaataagaatatattaaagaataagaaaaataataaagccaaggtaggtaacacacgcagactgcatgctctgtacctctctgtaattgctagtgctaggtagcaaacagctctggatttcctggaagccaaagcaaagataaaaaggcaatccattagttacaggttcacaatgctcagaaaataaaaacaaaccagctattcagaaaaagtactaccactcttaacattaagacctaagagaattttttcatcatattcataaagaagggtaatataggatagaataatgtcttcaatggcattctgacaatagctaatgtgatacattccaaatagtgcttgttatgaaatcgctttaatataagccaaaagcaaaaaccca

SEQ ID NO: 711917 - DNA, 1896 bp, Homo sapiens
atgtttaatatagccaggcattgttttaagcactttatttatggtaactcatctaactctcacagccctttgtggtatgaaatattgctgtctctatattaaagctggcaaaactaagacacagagaagttaagtaacttgtctaagatcacacagccagcaagtagtgaagccaagatttaaacccagaatttctgctccagagtccatgcttttaggcactatgccacactcaggtaatagttccaatgacttcattcactcacaagttgagaatcaaatatctgtttctcactgccatgtgcacccctcctcatgcaggccagggagccatggactttctatcacctcattaaaacaaaagtagctgggtgcagtgtcccatatctgtaatcccagcacaatgggaggctgaggcaggataacagcttgagcccaggagttcaagaccagcctgggcaacatggtgaaactctgtcttcacaaaaaatacaaaaaaattagctgggcatggtggtgtgtgcctgtagttccagctactcaagaggctgaggygggaggatcgcttgagcccaggaggtcaagactgcagtgagctgaaatcatgccactgcactccagcccatgcaacagaatgagacaaaaaaaagtagttgagccaaagagaggcatgttagccgccattattgctattactatattattatattatattatcacttacatctgagccaaattcccactcagtccttggtaactaaacctcccctccatgaataatgaatcattctcatagtctcacactcagtgggcttcagttacctttgaagacagatcagttcaggtgatgcaatattggtttgtagggaagcaaactaatgatttctaacctagtcatgcaacagatgctttacatgtggtgcttttaaaagaacaagtaagggtcttctttctgctaagttagttttttgaatacttgaagttcagtcttttaaagagaaccattttggggatagggaaggggacatatttctaactgataataaacagaacactgtcctgttagagtatgtggagaatagtagaatcttattttactgttgaggtcattttaagacagcaatcatagcaccttgctacttcttggatcagagagacatgtagagttttttggccctgtatatatggtcttaggtagctgtgctttttgagttcccacacttatctttttaatgatagtcttctggtgtcctcaatggagttcatcagttgtcacatctgttgacgttcttaatgccctttgtctagcaatcatccctctcctaatttgtggcttctaatttgctacagtttggaaaaccactcatgccataagtatgaatctataaatgtacttatgcataaatttacaaatgcatatacacttatccctttccacaaaggatgtatggcagctttttaaaattatgcaattacaaaaaataatttttgaaggaatttgaacaaaaggaaaataagaatatattaaagaataagaaaaataataaagccaaggtaggtaacacacgcagactgcatgctctgtacctctctgtaattgctagtgctaggtagcaaacagctctggatttcctggaagccaaagcaaagataaaaaggcaatccattagttacaggttcacaatgctcagaaaataaaaacaaaccagctattcagaaaaagtactaccactcttaacattaagacctaagagaattttttcatcatattcataaagaagggtaatataggatagaataatgtcttcaatggcattctgacaatagctaatgtgatacattccaaatagtgcttgttatgaaatcgctttaatataagccaaaagcaaaaaccca

SEQ ID NO: 711918 - DNA, 1090 bp, Homo sapiens
tcagctgccttggcagctgctgtgtggtaaactgaagtgagcagaccaaaagaaataaaaagacaccgaaagcacaactttaaatgatatcctttaatctctggctgctgggaagagcagccgcagataatctagtttgtgtgctaggatcccaaaagagctgacaaactatgagcaagattaactcttaagaaaaaaaaaggtaaagtctctgatagcaacaggtattgtaaacagtggtcactgttgctaatgagagaatgggcttgctgtgtatctgggccacaaaagacctgtgcctctcccaggcttcccagtgagtcttgtgaagcggccctgtcaatactggtcttttccaggggacaatccaggagatcacactcacccatttctagctattttcttatatagctctagtttactaagaaagacattcagagacatttagtgtaattattgttactaccttttctgccattaaaaattattttatatgacttaaaagtgtatactgtgtaaataaaacttttttccacatgtctacggtacctggcaagtctcagttcattatttgttgaaatgttcaccttaagcattaggaaatctgcatatttcttgctatttatccttaaaacagaacaaaacctcaattaaaaaaaaaaattagctgggtgtggtatctcatgcctgtaatcccaggctgaggcaggcatatcacttgaacccaggagttctagaccagcctgggcaacatagtgagaccctgtctctacaaaaaaatacaaaaaattacccaggcatggtggcatttgcctgtaatcctagttacctgggagaytgagatgggaagatcacttgagcctgggaggttgaggcagcagtgagccatgattgcactgccaatgggagaccctatctcaaaaaaactgaaaaggatttagacgtgtgtgaagttcattctacaattcagtgtgacacttttataaccaaatgagtaccaatacccttatgaacacacatatataaaggaaagaaaataaagagagaaagaaaaagaagaaaaagaaatgtggttagaactccttgtttc

SEQ ID NO: 711919 - DNA, 1090 bp, Homo sapiens
tcagctgccttggcagctgctgtgtggtaaactgaagtgagcagaccaaaagaaataaaaagacaccgaaagcacaactttaaatgatatcctttaatctctggctgctgggaagagcagccgcagataatctagtttgtgtgctaggatcccaaaagagctgacaaactatgagcaagattaactcttaagaaaaaaaaaggtaaagtctctgatagcaacaggtattgtaaacagtggtcactgttgctaatgagagaatgggcttgctgtgtatctgggccacaaaagacctgtgcctctcccaggcttcccagtgagtcttgtgaagcggccctgtcaatactggtcttttccaggggacaatccaggagatcacactcacccatttctagctattttcttatatagctctagtttactaagaaagacattcagagacatttagtgtaattattgttactaccttttctgccattaaaaattattttatatgacttaaaagtgtatactgtgtaaataaaacttttttccacatgtctacggtacctggcaagtctcagttcattatttgttgaaatgttcaccttaagcattaggaaatctgcatatttcttgctatttatccttaaaacagaacaaaacctcaattaaaaaaaaaaattagctgggtgtggtatctcatgcctgtaatcccaggctgaggcaggcatatcacttgaacccaggagttctagaccagcctgggcaacatagtgagaccctgtctctacaaaaaaatacaaaaaattacccaggcatggtggcatttgcctgtaatcctagttacctgggagattgagatgggargatcacttgagcctgggaggttgaggcagcagtgagccatgattgcactgccaatgggagaccctatctcaaaaaaactgaaaaggatttagacgtgtgtgaagttcattctacaattcagtgtgacacttttataaccaaatgagtaccaatacccttatgaacacacatatataaaggaaagaaaataaagagagaaagaaaaagaagaaaaagaaatgtggttagaactccttgtttc

SEQ ID NO: 711920 - DNA, 744 bp, Homo sapiens
ggccctaggctgttctccaaaccctcacaatctctgggtcatccccaggaagaaaccattgaggaaaaggtacaagttacattctttcttatagtttttgacacactgtatatttatgaagttgagaacattttacccttctaatttgactacattggatgccatggagaaaaggagggtcacaaactcaaaagccctgagggttcaggcacacaaactaagtcagcagagagtaggctgcagtgcatgggtggagtgtcctgtccgaaggggcatctgctactctgcttcacttattgctaccatgtgggaatgtggaggcccaagttgctagatattctgatttgtcaatagaagttctcagtcctgctttttatgggaattctgcatagttttaaatgtgggcaattattytgaataaaaatcaaaacattatgaatgttaacccaaacatggctctggattggatgtctggggctgcttgggttcaacccctagactttgctcttgactcactactggtagactttgcatttatcatttgcttaggttctataactgtcaagtagcataatttatttacacattttccttcttactctggttagtactgcataaagaacacaagttttggagttggggagagatgtagattttactagttccagattttaccaaattgtgacttgcagcctcttaatcccttgaaagcctctcttatgccatgcagaaatgaaaacctat

SEQ ID NO: 711921 - DNA, 2443 bp, Homo sapiens
tatgtgtccctggaaagctcctgggtggtttgcagtggtaggcgtcagagctggcatgaaaaccacttttctctgtgctgcagcttcagctgtgctttaacaattttgtcttgtaagtgcattttgaaaagtattcacatacatatatgcatatatatacayatatatttttttttccaaaaaggctaacccatttaagagcctgtagtttagtagagatagcagccaagtatgtgctccttagttgaagaccatcaagacatttaggaactaattctcttgcactttcatgggactctttctgcctcagtttctactgaagaggcatgaataacaaagaagcaagagacagactctccctcccctacccatcactctgctctctgccccattgccagatgtgcaatgaaatgtataaaggggaacttgttcggtaattcttgaccccatcacccatcttgaggcaataaaaatggaaaagaaggggaagaagatggggtaattggtaaagaaattgtcaatgaacagagcgatgtcatgctgaatcctgctcctctagtgaaaggggtggagaaaggcacctcccaatcccaggcctgtgagggggttgctgcaggggaatccccaacaagattttgaaatatgtttcctgtaggttggactcagcaaaaatgtctcaaacttttgtggactcagtctccttcctgcctgcaaccttgagaggaggcccaagaccttcgtggggtcaaaggctggagactgctactgtcctggaagaggactgtcaggacaggtgatgtatgagtgtcctagaggtgaatggggttaatgtgggtcctacccaaaaggggttcctggagaggtgaggagaaattaggagacagaggctgaaaatggactcctgggcacacaggatgctcatgagtaagcaagagcgacccatctgtcccaagttttttgaattacaagggaaagtgcccagcagaaaaaaaattttttggggtatgtgtttgcaacttagagggacccttagaacttaaaggtgctcttagaactatcagttacctaaaagtaggtagaaaaatcttgggcctgctagaattttcattcaggggcaaggaactctgacaaccactcaacacattttaagggtcaattagcaaaaataaagatgcatttagaatggtcccccacatctgcctgagccttgggttaccacctaccatggctcaaaaatactcaaggaaaaaaaaacccaacaaaaatatacaaataaaaataatataaataaaaagtcaatatgctagaacaactataatattaggtataagtatctagaggtgatttaaaagtatggaggatatgcaaatattacaccattttatataagaaacttgaacattctcagattttggtatctttgggggaaagggggtatcatggaacaaattccctgtgggtatcaagggatgactgttcaacatgttagatacactcctctttccccaaggatcagagttgatgggaagttagcaaaggaaattttcccagaggaaatccatatcatttttcatttcaactggccaagtttttgcctttacattaattcatgtgtactgcttccttctgaaagtttgaagaccaggtctcctggccagacacatcatgccaagtgcttttcagaatgtatggggcagatgtgccatatcttgattccaccattcccaccctccatgggccaagagttggttccctctagtctgagatggaagaagggccaagtgggtaacgatctgcaggcagtgctagaggacttgtgtagtgactcagtaaggggaataaggaaatgaatggcgaggtcaacaatctccttgaaaaatcacaggaaggtttcagaccccacccccgcgagatgtggagtggcactcagtgtttttaagaagggataataaagtcatcttttctgtgtctttctctcacttctctcttgagtctccaaacatacagggctgtctgtttcgctgtgttttcctttggttctaaggaacttttttcccctgtggaagcaaacccaacaatctgcatcctgagcttgagaagttaaaggcaaagtgtgtttttggcatgatcaggcttacagataaagactggtgagtaacgtgtgggcattcatacaaatgaccactcacatgaaggtggaggagatacactgttctgggactgccatgtgaggttttaaaagatgaaatgtcagaaacattaaaaaatatgtacttaaaaacatctttcttctaatgtcagacttgcaacaagtttgaatttccttggctctgtaaatgtttttcattttttttttcctgggagctgaagatgatcctttaatgctagacttttccactttcactctgaaggcaatctgttctacatctttgcttcatgagtg

SEQ ID NO: 711922 - DNA, 2443 bp, Homo sapiens
tatgtgtccctggaaagctcctgggtggtttgcagtggtaggcgtcagagctggcatgaaaaccacttttctctgtgctgcagcttcagctgtgctttaacaattttgtcttgtaagtgcattttgaaaagtattcacatacatatatgcatatatatacatatatatttttttttccaaaaaggctaacccatttaagagcctgtagtttagtagagatagcagccaagtatgtgctccttagttgaagaccatcaagacatttaggaactaattctcttgcactttcatgggactctttctgcctcagtttctactgaagaggcatgaataacaaagaagcaagagacagactctccctcccctacccatcactctgctctctgccccattgccagatgtgcaatgaaatgtataaaggggaacttgttcggtaattcttgaccccatcacccatcttgaggcaataaaaatggaaaagaaggggaagaagatggggtaattggtaaagaaattgtcaatgaacagagcgatgtcatgctgaatcctgctcctctagtgaaaggggtggagaarggcacctcccaatcccaggcctgtgagggggttgctgcaggggaatccccaacaagattttgaaatatgtttcctgtaggttggactcagcaaaaatgtctcaaacttttgtggactcagtctccttcctgcctgcaaccttgagaggaggcccaagaccttcgtggggtcaaaggctggagactgctactgtcctggaagaggactgtcaggacaggtgatgtatgagtgtcctagaggtgaatggggttaatgtgggtcctacccaaaaggggttcctggagaggtgaggagaaattaggagacagaggctgaaaatggactcctgggcacacaggatgctcatgagtaagcaagagcgacccatctgtcccaagttttttgaattacaagggaaagtgcccagcagaaaaaaaattttttggggtatgtgtttgcaacttagagggacccttagaacttaaaggtgctcttagaactatcagttacctaaaagtaggtagaaaaatcttgggcctgctagaattttcattcaggggcaaggaactctgacaaccactcaacacattttaagggtcaattagcaaaaataaagatgcatttagaatggtcccccacatctgcctgagccttgggttaccacctaccatggctcaaaaatactcaaggaaaaaaaaacccaacaaaaatatacaaataaaaataatataaataaaaagtcaatatgctagaacaactataatattaggtataagtatctagaggtgatttaaaagtatggaggatatgcaaatattacaccattttatataagaaacttgaacattctcagattttggtatctttgggggaaagggggtatcatggaacaaattccctgtgggtatcaagggatgactgttcaacatgttagatacactcctctttccccaaggatcagagttgatgggaagttagcaaaggaaattttcccagaggaaatccatatcatttttcatttcaactggccaagtttttgcctttacattaattcatgtgtactgcttccttctgaaagtttgaagaccaggtctcctggccagacacatcatgccaagtgcttttcagaatgtatggggcagatgtgccatatcttgattccaccattcccaccctccatgggccaagagttggttccctctagtctgagatggaagaagggccaagtgggtaacgatctgcaggcagtgctagaggacttgtgtagtgactcagtaaggggaataaggaaatgaatggcgaggtcaacaatctccttgaaaaatcacaggaaggtttcagaccccacccccgcgagatgtggagtggcactcagtgtttttaagaagggataataaagtcatcttttctgtgtctttctctcacttctctcttgagtctccaaacatacagggctgtctgtttcgctgtgttttcctttggttctaaggaacttttttcccctgtggaagcaaacccaacaatctgcatcctgagcttgagaagttaaaggcaaagtgtgtttttggcatgatcaggcttacagataaagactggtgagtaacgtgtgggcattcatacaaatgaccactcacatgaaggtggaggagatacactgttctgggactgccatgtgaggttttaaaagatgaaatgtcagaaacattaaaaaatatgtacttaaaaacatctttcttctaatgtcagacttgcaacaagtttgaatttccttggctctgtaaatgtttttcattttttttttcctgggagctgaagatgatcctttaatgctagacttttccactttcactctgaaggcaatctgttctacatctttgcttcatgagtg

SEQ ID NO: 711923 - DNA, 2443 bp, Homo sapiens
tatgtgtccctggaaagctcctgggtggtttgcagtggtaggcgtcagagctggcatgaaaaccacttttctctgtgctgcagcttcagctgtgctttaacaattttgtcttgtaagtgcattttgaaaagtattcacatacatatatgcatatatatacatatatatttttttttccaaaaaggctaacccatttaagagcctgtagtttagtagagatagcagccaagtatgtgctccttagttgaagaccatcaagacatttaggaactaattctcttgcactttcatgggactctttctgcctcagtttctactgaagaggcatgaataacaaagaagcaagagacagactctccctcccctacccatcactctgctctctgccccattgccagatgtgcaatgaaatgtataaaggggaacttgttcggtaattcttgaccccatcacccatcttgaggcaataaaaatggaaaagaaggggaagaagatggggtaattggtaaagaaattgtcaatgaacagagcgatgtcatgctgaatcctgctcctctagtgaaaggggtggagaaaggcacctcccaatcccaggcctgtgagggggttgctgcaggggaatccccaacaagattttgaaatatgtttcctgtaggttggactcagcaaaaatgtctcaaacttttgtggactcagtctccttcctgcctgcaaccttgagaggaggcccaagaccttcgtggggtcaaaggctggagactgctactgtcctggaagaggactgtcaggacaggtgatgtatgagtgtcctagaggtgaatggggttaatgtgggtcctacccaaaaggggttcctggagaggtgaggagaaattaggagacagaggctgaaaatggactcctgggcacacaggatgctcatgagtaagcaagagygacccatctgtcccaagttttttgaattacaagggaaagtgcccagcagaaaaaaaattttttggggtatgtgtttgcaacttagagggacccttagaacttaaaggtgctcttagaactatcagttacctaaaagtaggtagaaaaatcttgggcctgctagaattttcattcaggggcaaggaactctgacaaccactcaacacattttaagggtcaattagcaaaaataaagatgcatttagaatggtcccccacatctgcctgagccttgggttaccacctaccatggctcaaaaatactcaaggaaaaaaaaacccaacaaaaatatacaaataaaaataatataaataaaaagtcaatatgctagaacaactataatattaggtataagtatctagaggtgatttaaaagtatggaggatatgcaaatattacaccattttatataagaaacttgaacattctcagattttggtatctttgggggaaagggggtatcatggaacaaattccctgtgggtatcaagggatgactgttcaacatgttagatacactcctctttccccaaggatcagagttgatgggaagttagcaaaggaaattttcccagaggaaatccatatcatttttcatttcaactggccaagtttttgcctttacattaattcatgtgtactgcttccttctgaaagtttgaagaccaggtctcctggccagacacatcatgccaagtgcttttcagaatgtatggggcagatgtgccatatcttgattccaccattcccaccctccatgggccaagagttggttccctctagtctgagatggaagaagggccaagtgggtaacgatctgcaggcagtgctagaggacttgtgtagtgactcagtaaggggaataaggaaatgaatggcgaggtcaacaatctccttgaaaaatcacaggaaggtttcagaccccacccccgcgagatgtggagtggcactcagtgtttttaagaagggataataaagtcatcttttctgtgtctttctctcacttctctcttgagtctccaaacatacagggctgtctgtttcgctgtgttttcctttggttctaaggaacttttttcccctgtggaagcaaacccaacaatctgcatcctgagcttgagaagttaaaggcaaagtgtgtttttggcatgatcaggcttacagataaagactggtgagtaacgtgtgggcattcatacaaatgaccactcacatgaaggtggaggagatacactgttctgggactgccatgtgaggttttaaaagatgaaatgtcagaaacattaaaaaatatgtacttaaaaacatctttcttctaatgtcagacttgcaacaagtttgaatttccttggctctgtaaatgtttttcattttttttttcctgggagctgaagatgatcctttaatgctagacttttccactttcactctgaaggcaatctgttctacatctttgcttcatgagtg

SEQ ID NO: 711924 - DNA, 2443 bp, Homo sapiens
tatgtgtccctggaaagctcctgggtggtttgcagtggtaggcgtcagagctggcatgaaaaccacttttctctgtgctgcagcttcagctgtgctttaacaattttgtcttgtaagtgcattttgaaaagtattcacatacatatatgcatatatatacatatatatttttttttccaaaaaggctaacccatttaagagcctgtagtttagtagagatagcagccaagtatgtgctccttagttgaagaccatcaagacatttaggaactaattctcttgcactttcatgggactctttctgcctcagtttctactgaagaggcatgaataacaaagaagcaagagacagactctccctcccctacccatcactctgctctctgccccattgccagatgtgcaatgaaatgtataaaggggaacttgttcggtaattcttgaccccatcacccatcttgaggcaataaaaatggaaaagaaggggaagaagatggggtaattggtaaagaaattgtcaatgaacagagcgatgtcatgctgaatcctgctcctctagtgaaaggggtggagaaaggcacctcccaatcccaggcctgtgagggggttgctgcaggggaatccccaacaagattttgaaatatgtttcctgtaggttggactcagcaaaaatgtctcaaacttttgtggactcagtctccttcctgcctgcaaccttgagaggaggcccaagaccttcgtggggtcaaaggctggagactgctactgtcctggaagaggactgtcaggacaggtgatgtatgagtgtcctagaggtgaatggggttaatgtgggtcctacccaaaaggggttcctggagaggtgaggagaaattaggagacagaggctgaaaatggactcctgggcacacaggatgctcatgagtaagcaagagcgacccatctgtcccaagttttttgaattacaagggaaagtgcccagcagaaaaaaaattttttgggrtatgtgtttgcaacttagagggacccttagaacttaaaggtgctcttagaactatcagttacctaaaagtaggtagaaaaatcttgggcctgctagaattttcattcaggggcaaggaactctgacaaccactcaacacattttaagggtcaattagcaaaaataaagatgcatttagaatggtcccccacatctgcctgagccttgggttaccacctaccatggctcaaaaatactcaaggaaaaaaaaacccaacaaaaatatacaaataaaaataatataaataaaaagtcaatatgctagaacaactataatattaggtataagtatctagaggtgatttaaaagtatggaggatatgcaaatattacaccattttatataagaaacttgaacattctcagattttggtatctttgggggaaagggggtatcatggaacaaattccctgtgggtatcaagggatgactgttcaacatgttagatacactcctctttccccaaggatcagagttgatgggaagttagcaaaggaaattttcccagaggaaatccatatcatttttcatttcaactggccaagtttttgcctttacattaattcatgtgtactgcttccttctgaaagtttgaagaccaggtctcctggccagacacatcatgccaagtgcttttcagaatgtatggggcagatgtgccatatcttgattccaccattcccaccctccatgggccaagagttggttccctctagtctgagatggaagaagggccaagtgggtaacgatctgcaggcagtgctagaggacttgtgtagtgactcagtaaggggaataaggaaatgaatggcgaggtcaacaatctccttgaaaaatcacaggaaggtttcagaccccacccccgcgagatgtggagtggcactcagtgtttttaagaagggataataaagtcatcttttctgtgtctttctctcacttctctcttgagtctccaaacatacagggctgtctgtttcgctgtgttttcctttggttctaaggaacttttttcccctgtggaagcaaacccaacaatctgcatcctgagcttgagaagttaaaggcaaagtgtgtttttggcatgatcaggcttacagataaagactggtgagtaacgtgtgggcattcatacaaatgaccactcacatgaaggtggaggagatacactgttctgggactgccatgtgaggttttaaaagatgaaatgtcagaaacattaaaaaatatgtacttaaaaacatctttcttctaatgtcagacttgcaacaagtttgaatttccttggctctgtaaatgtttttcattttttttttcctgggagctgaagatgatcctttaatgctagacttttccactttcactctgaaggcaatctgttctacatctttgcttcatgagtg

SEQ ID NO: 711925 - DNA, 579 bp, Homo sapiens
ctattttttgatgtattttaacccacaatatatttacatatattttattttggatgtaatttaacccacattaaattaaaatgctttctcagttgtcatcttggctttactaagatctatgaagtatgtacccactcttcaaaataaggaatctgacagatgacgtatcttctcttgaaaaccaaatggtcattcttttgcaaggataatgatcctttacaaatgtttatttgtttttgttctcaaaagcaagctcatgccttaaatgtttttcaactgctggcaaaattttatcacatcttccaatatatttcactaaggtcacttatggtcgtatgtgtgacagtaatcaaagatgtccaataaatggamaaattctgagaccacctggtacaccaaaaagagaacttactatttgacctgagtcagacatttagtcctctggggcacaattttctcatgacaaaaattagaagtatattttggtaaaaatcaaatgacctttaatgttctcttccatttaaagtactagtattctagatctatgcactccaatatggtgccactagccatatgtga

SEQ ID NO: 711926 - DNA, 799 bp, Homo sapiens
aaaaaggctatgggcatcttcatcaagatctttctaaatagtcaggaaaacatggcaaactctataaactatggccaaccatacaattcctacttcctcagctcagtctgccaattacagtcaggctgatgctagaccatgtaccatttcatgatgtgtttatttcagaacctcttcatgatctaagttgtttcatttggttagattattgagtaaaatccacagagggttgaggatgagatcctggctaactagacccattgcattggacgtgaaaataaataaacactgtggttaggctgtgtgaaggagaaccagagctgttaaaaacaacataaagtggtaaaaacagattttattcaggactactgcaatagaggaaaggagacctcagaatagaactgggctcaattccaaacacacatgggaatgtaagaatttatagccaaggagctaactggaggtcagaggatggaaaattactaagagaaaacatcaggggtaaggtgggattctggataaaatcacctaacaggatccttgctaaaagcaggccagggtgatcagatatcagccggggatggtagaggctgaggaacccaattagrtatcaagcaggggattctggctaagccaacgtaacaggattcttgctaaaaataggacaatgcaaagacgatcatagaaataaaaaaatctaggcttagttgcaaaagagctcaggggagcctgagtagagttgagtttggtcaaggagagaatctttgtcagttgtaccaaacggaaaaaaaacactttt

SEQ ID NO: 711927 - DNA, 528 bp, Homo sapiens
attgtttaaaacactgattttagtttaaagacatgtttttcagtcaattaaagcaataatatttcgaaccattttgtagcaagcaatgatggaaaaaaaaagttatttttaaaattcaacagactatcccctaggaccacatgaagcataagagactttatatgcatgccaggcaattttcaagttaatgtgattattagtactccttgaagagcttatatttcttgattttttctcatattttcttacataattattactatgttaaatactccctttttatggatgtatatattatgagcagagggaaaaattcagattaaatcaagagagaaggctaataaagtgattttgttcttttgtgtaattatgaaagtattaaaaccttctctacattttatactttttaaatctttcagtttgaaaaacagtggttgyaatagcaataaatacatgaattttttaagaatccatgacagaaatatatattcaaatttgtatggctaaatactgaagttgaaatcacat

SEQ ID NO: 711928 - DNA, 1547 bp, Homo sapiens
caatcttattcctttccatgtgcatatactgttgtcttcacaccatttgtcaaaaacactattctttatcctttgaattttcttgtaattcttgtcaaaaatcagttgactatacatttaaggatctatttctggattctcagttctattccattgatctccgtgtctaactttattaactttaccacactatttctgtagctttgtagtaagttttgaaatcgagtagtgttactttgcacttcttcgagattttgttttgggagtcttgcatttccatatgaatattaggatcagctttgtcaatttctgtaaaaaagccagctggaattgcatgtggaattttaaaaaatcatagttattaatccgaaaatacatactctctatagaaatggttaaattcttctttaaattgcatataaatttatattggataagatttactgcaacaggttagcagttttggaagaaactgaatctggtataggtggtgtgcaaatgctttctgaggcagagaataaagagatataattagtattttagtaaagtgagaggaaattattgagctaggtaagtgcaggaacagtgccccacaaagagaacacartatgtgttagcatggagatatatggagacatcagtattttcaggaaactgagtgttcactagagttgtatgttaggtttgatgatgcaaaaatcaatcagcattttttcaatcagtcaggattattcataaggaaattctaagtcatcaatcatggatattttcatatattcatattttaaatatagttttaaattctgacagtatttaatcatactatggaaaaagtgtctaagatacaaataatacataaatgtgttaatctctgtaactttaaaaagagttatctgagatatctgtcatggtacctgagatagggttgacaggaaagtcattcactggaaaaccaaacacattctcaaagcaccgttaaacaaaaagtaactgtatcaccttgcaccaaaaggaggaagacttttggcttgctccttttagggttagagttagtccttttggtagatgccccaacagtactagtagaatggactgtttaccactaaaaaacacccagttccaatctactaacttcattttatagattaggtagctgaagtttagagatatctaggaactctagagttgtttcatattcagtgaaaaacacattggttcatttgtatatttacttactcatcaatgtaaattgtttctgaccccctaatttgattaaattcctaactaggcattgagggaaagaagaatgagataattcttgctagcagtgcaattagactgggggtctaatgagaaatcaaaatgggagcaagtcattataatatgatatgacaatatttgtaattgaatatccttggaagcataatggaaatggtgccagtgggactgaaggtaggaaagaaagcttcactgagaagtccagttgagctgagacttaagcagaagtgacagagataggtaagtgtaggaacagcactccaacagtg

SEQ ID NO: 711929 - DNA, 624 bp, Homo sapiens
ttagctggagtaaaaatggtcccagtaccatttcctgttcccttcactayaacctacatttttgtcacattaagtttttccccattccaggacaggtcaggccctttaaaaatttcaacagctttattgagatataattgatataatttaaaaaatcctgcacatgtgtcatgctggagccctattgattccaacagggatggcgccttgtccaagaagagacccagagccagtgaatgggacatagggtttatttaggacttaaatacagatgtggtccagtggcagtgggctggacaggaccgctactatttgtaaagagtatgtagtttatataacatttctacttagcactctccacttagcaacctccatttaacccaaaataaaaggccttggttccttgcacatcctgagttccaacggacaggcagggagttcaagtgtccttcacagataagaagtgaatctctctgggttggccattcccggattccttagcttagactctgaacacatattcttcttagaccatacagtcattctcagggtatgcttgagttaatgctgtcggatgcatctgtcatacaaagtgtttaacatatacgatttcatgattttgga

SEQ ID NO: 711930 - DNA, 624 bp, Homo sapiens
ttagctggagtaaaaatggtcccagtaccatttcctgttcccttcactataacctacatttttgtcacattaagtttttccccattccaggacaggtcaggccctttaaaaatttcaacagctttattgagatataattgatataatttwaaaaatcctgcacatgtgtcatgctggagccctattgattccaacagggatggcgccttgtccaagaagagacccagagccagtgaatgggacatagggtttatttaggacttaaatacagatgtggtccagtggcagtgggctggacaggaccgctactatttgtaaagagtatgtagtttatataacatttctacttagcactctccacttagcaacctccatttaacccaaaataaaaggccttggttccttgcacatcctgagttccaacggacaggcagggagttcaagtgtccttcacagataagaagtgaatctctctgggttggccattcccggattccttagcttagactctgaacacatattcttcttagaccatacagtcattctcagggtatgcttgagttaatgctgtcggatgcatctgtcatacaaagtgtttaacatatacgatttcatgattttgga

SEQ ID NO: 711931 - DNA, 1009 bp, Homo sapiens
taactagcagaactcttgtgtctacgtgcaaacaaattagtgttttgtgcacctgacagctcataccaatattgcaaatatccatgaccagcaagaactgtgtttggatttcacaggtgggattttccacctcttgcatttcactgggagctaaagacggtgctaaagaaacagctccaaggaaaagtatgacacttgccttcaacatttagcttttcaaactgaagtgttaataaaagtatttattaacttcatttccctttctgttgtgacacgtagaatgtatcacttgcagcaaaatccatcagttagaaccaaatgatggtaagatgagaaaggtggataacagattgtgctaaataactttatgatttataagaagcacaatttcagcttaaccttctgtgtgaattagaaatgtccagagttattttaaacattgctttcagtgaaacaatacatcttgaataccatccacataggtggtttatagacataaatcattaaccagtaaaggcagctgacayaccagattttataaagtaacaagagacctgaaagggatttctagagctcaatcctaagatttatctattaattacaccaaattaaatgatcataattgtatattacatggcaggatggcttcttgcttagaagcatataatataaatgtcaataacatcccccatgacattatctacagtgataactgttgtattcaaatccacaccggccttcctggccatcttatgaagggcagcagcatacttgggggctcagtacccctctactgctaagagcttacatgcctgccagaagagaaccaccaaagcaatcactctgatgggagctcagtcaccagtttacattcaataaactgctttttcttcccaattttttttccttttggagggaaaacactaaaggcaatgacatccacatgtgtttaagtggctacagccacttctggtgtttatgatcattagatgcatggctagtaaatgat

SEQ ID NO: 711932 - DNA, 793 bp, Homo sapiens
tttgtttttgttttggtttttattttcatagatttaggggttaccagtgcagttttgttacacagatatatggtttagtggtgaagtctgggcttttagtgtaaccatcatcggaatgatgtacatgtactcaataggtaatttctcatccctgacccctctccgaccctcccaccctttggagtctccagtgtctattaatccactctgtatgtgcatgtgtgcagatttttagctcccacttataactgagaacatgctgtatttgtctttttgtttctgaattaccaaaatctaattttaaacttcaatagaaaaaaactgatacccggggggttttaaattctttttgcaacaagaaatgattatggcatatcttcagtattaaatactctaacaaagaggaagtatacaagatttgagattgtctaatggaaataaggccttcttaggtaaagcaggtatggttactctcctgtgtagggcagtggttgtcctattttactgtgtataataatcatctggggatakttgttaataaaatgaagattcttggggtccactcccatatactcttcttcggtagatctggaaaggggctgaggaacctaacatttttaacaaagtgaaacagagtaatctaaggagcattttaagaaatagtcgcttagaagaaattctaagtacttaaaatagaaataaaacgtctttacgtcattaaatggctttatacaacttctcttagttacctaatttgtatttgatcccataattctcttctaatagctgactg

SEQ ID NO: 711933 - DNA, 1033 bp, Homo sapiens
tatgatgatatataaatatttaaattaataattatacttggttatttgcctatgatgacaaactgggggatagaaaaaataccacgagaatctaaatttcaaacttgttaaaatacttaactattttccaacttttcaagatactcaacataatccatatgtgattttttaggaaggctctcaatgactgcagtattttgttaagggaggaagaatatcaactgtattagattaaaaggatacatttcaatatgttaaatttcaaatatgtataaaattattataaaatagaatttttttgcaaaaacttcagtaaatgatacagttgaacttttttgttgtgagtaacctataaattcaaatatatataaattccttggaaaagaattccaaatataaaatttaaatacaaacacaaacacacacacaagcctgtatatatttagatttcatgtgtgtatgtgtgtgtataatatatatatgtatatatgaagacatgtgaggacacatctgagttcatgtgtatacgcacacacacaaggatagtagacaaagggaaaaaagtctatgaaaagctagaaatttcacaagggctaaagggaarttataactggaaagagaaaacaagcctaaacaccttagaaaaggcaagggaaatgaggaaaaaggcacagtagaatctcaaaaatttggacaaaaggttgtggacgaataggctagataggttatggtgtgctctggagagaatatggggagctgccgtcagtaaggcatattttgaagagagcccaggcccaggttggctttttgatattgcactttgggtagcagcaagtatggaaactgcttccaaaattttacaccaaatagtgcaacagacactgaacttaatgtctgcggatatgagtggactgacgtctcaacaatgaaaaatctttgctatgtttccttaagcatttttttttttgagacagagtcttgttttgtcacccaggctggagtgcaggggaacaatttagcttccctggaacct

SEQ ID NO: 711934 - DNA, 1033 bp, Homo sapiens
tatgatgatatataaatatttaaattaataattatacttggttatttgcctatgatgacaaactgggggatagaaaaaataccacgagaatctaaatttcaaacttgttaaaatacttaactattttccaacttttcaagatactcaacataatccatatgtgattttttaggaaggctctcaatgactgcagtattttgttaagggaggaagaatatcaactgtattagattaaaaggatacatttcaatatgttaaatttcaaatatgtataaaattattataaaatagaatttttttgcaaaaacttcagtaaatgatacagttgaacttttttgttgtgagtaacctataaattcaaatatatataaattccttggaaaagaattccaaatataaaatttaaatacaaacacaaacacacacacaagcctgtatatatttagatttcatgtgtgtatgtgtgtgtataatatatatatgtatatatgaagacatgtgaggacacatctgagttcatgtgtatacgcacacacacaaggatagtagacaaagggaaaaaagtctatgaaaagctagaaatttcacaagggctaaagggaaattataactggaaagagaaaacaagcctaaacaccttagaaaaggcaagggaaatgaggaaaaaggcacagtagaatctcaaaaatttggacaaaaggttgtggacgaataggctagataggttatggtgtgctctggagagaatatggggagctgccgtcagtaaggcatattttgaagagagcccaggcccaggttggctttttgatattgcactttgggtagcagcaagtatggaaactgcttccaaaattttacaccaaatagtgcaacagacactgaacttaatgtctgcggatatgagtggactgacgtctcaacaatgaaaaatctttgctatgtttccttaagcatttttttttttgagacagagtcttgttttgtcacccaggctggagtgcagkggaacaatttagcttccctggaacct

SEQ ID NO: 711935 - DNA, 1033 bp, Homo sapiens
tatgatgatatataaatatttaaattaataattatacttggttatttgcctatgatgacaaactgggggatagaaaaaataccacgagaatctaaatttcaaacttgttaaaatacttaactattttccaacttttcaagatactcaacataatccatatgtgattttttaggaaggctctcaatgactgcagtattttgttaagggaggaagaatatcaactgtattagattaaaaggatacatttcaatatgttaaatttcaaatatgtataaaattattataaaatagaatttttttgcaaaaacttcagtaaatgatacagttgaacttttttgttgtgagtaacctataaattcaaatatatataaattccttggaaaagaattccaaatataaaatttaaatacaaacacaaacacacacacaagcctgtatatatttagatttcatgtgtgtatgtgtgtgtataatatatatatgtatatatgaagacatgtgaggacacatctgagttcatgtgtatacgcacacacacaaggatagtagacaaagggaaaaaagtctatgaaaagctagaaatttcacaagggctaaagggaaattataactggaaagagaaaacaagcctaaacaccttagaaaaggcaagggaaatgaggaaaaaggcacagtagaatctcaaaaatttggacaaaaggttgtggacgaataggctagataggttatggtgtgctctggagagaatatggggagctgccgtcagtaaggcatattttgaagagagcccaggcccaggttggctttttgatattgcactttgggtagcagcaagtatggaaactgcttccaaaattttacaccaaatagtgcaacagacactgaacttaatgtctgcggatatgagtggactgacgtctcaacaatgaaaaatctttgctatgtttccttaagcatttttttttttgagacagagtcttgttttgtcacccaggctggagtgcaggggaacaattyagcttccctggaacct

SEQ ID NO: 711936 - DNA, 1033 bp, Homo sapiens
tatgatgatatataaatatttaaattaataattatacttggttatttgcctatgatgacaaactgggggatagaaaaaataccacgagaatctaaatttcaaacttgttaaaatacttaactattttccaacttttcaagatactcaacataatccatatgtgattttttaggaaggctctcaatgactgcagtattttgttaagggaggaagaatatcaactgtattagattaaaaggatacatttcaatatgttaaatttcaaatatgtataaaattattataaaatagaatttttttgcaaaaacttcagtaaatgatacagttgaacttttttgttgtgagtaacctataaattcaaatatatataaattccttggaaaagaattccaaatataaaatttaaatacaaacacaaacacacacacaagcctgtatatatttagatttcatgtgtgtatgtgtgtgtataatatatatatgtatatatgaagacatgtgaggacacatctgagttcatgtgtatacgcacacacacaaggatagtagacaaagggaaaaaagtctatgaaaagctagaaatttcacaagggctaaagggaaattataactggaaagagaaaacaagcctaaacaccttagaaaaggcaagggaaatgaggaaaaaggcacagtagaatctcaaaaatttggacaaaaggttgtggacgaataggctagataggttatggtgtgctctggagagaatatggggagctgccgtcagtaaggcatattttgaagagagcccaggcccaggttggctttttgatattgcactttgggtagcagcaagtatggaaactgcttccaaaattttacaccaaatagtgcaacagacactgaacttaatgtctgcggatatgagtggactgacgtctcaacaatgaaaaatctttgctatgtttccttaagcatttttttttttgagacagagtcttgttttgtcacccaggctggagtgcaggggaacaatttagcttccctgsaacct

SEQ ID NO: 711937 - DNA, 1307 bp, Homo sapiens
tgggactaccatcatgtatgtggtccattgttgaatgaaatgtaattatgtagtgtatgcatgtatataataagaaattcttcatgagtcttcttttctgaactccaaaacttttattgacacagttcactatgcaaccattaagaatatattgacattaacgactgagatgaaagctatataccatcccagctttataatttttattttcaccaacaacatgaactgtggtggttgtatattaggctctgaactaagctatcaaagaaatatatatatacataaactatagccaccatatctttgctgtgcttgctttaaatgttttatcatttcttcagttaatcttcatagcaatattgtgagccatttattatcatcatcactttacagatagtaaaattgaagttcaaaggtatacactaaacagctcaaggtcattcaattagtaactggcagaaatgtgatccaaagcagtcttttgttaaagccaatgatatctttcatacaatcctaactgtgtgacacaacatagatggcagcatatagtattagcatttttaaagatgactgtaaaacataaatctccaaggagcactgaaacaatctcacaaaatgtaattctacaaaaggaatgtcttcctgggataggaagagatagagcatctcaaacacctaagataggttgacagcttgtcaggtaccatcacaaagtatcgtactcctgtctgtagaatttataaaaatggtttttcattggttgtgtggaaaaaaagtcatagagctctggccttgtatttgccacatgagttgcctataaaytgatggattgattttaatttggccttggcaacttttgttacccttttgaggtattagtcttgctctgttccagaccttttcccttgaactctgcctttggacactactcttcttccaaagatttgtccctggagtcctaggcagtctgtcagtcataactttgttggccatgaacaatatggtgtgtcaaacctttagtaattttgccagttctattttgtaagaaaatataccatagttgtctggaatggtaatctatactttaagaatttagttagaaaaaatagaactcattcaatgcaaataatgtttttactagtagtaataataactatattattaataatattgtttttatctaaaaacactaggtttttgcacatgtgattccatattctgcttcacctacctaagcattgttaaatgtacgtctgctcagaaatggataggtacttgagaaatattaaccatattcaaactaacca

SEQ ID NO: 711938 - DNA, 1307 bp, Homo sapiens
tgggactaccatcatgtatgtggtccattgttgaatgaaatgtaattatgtagtgtatgcatgtatataataagaaattcttcatgagtcttcttttctgaactccaaaacttttattgacacagttcactatgcaaccattaagaatatattgacattaacgactgagatgaaagctatataccatcccagctttataatttttattttcaccaacaacatgaactgtggtggttgtatattaggctctgaactaagctatcaaagaaatatatatatacataaactatagccaccatatctttgctgtgcttgctttaaatgttttatcatttcttcagttaatcttcatagcaatattgtgagccatttattatcatcatcactttacagatagtaaaattgaagttcaaaggtatacactaaacagctcaaggtcattcaattagtaactggcagaaatgtgatccaaagcagtcttttgttaaagccaatgatatctttcatacaatcctaactgtgtgacacaacatagatggcagcatatagtattagcatttttaaagatgactgtaaaacataaatctccaaggagcactgaaacaatctcacaaaatgtaattctacaaaaggaatgtcttcctgggataggaagagatagagcatctcaaacacctaagataggttgacagcttgtcaggtaccatcacaaagtatcgtactcctgtctgtagaatttataaaaatggtttttcattggttgtgtggaaaaaaagtcatagagctctggccttgtatttgccacatgagttgcctataaattgatggattgattttaatttggccttggcaacttttgttacccttttgaggtattagtcttgctctgttccagaccttttcccttgaactctgcctttggacactactcytcttccaaagatttgtccctggagtcctaggcagtctgtcagtcataactttgttggccatgaacaatatggtgtgtcaaacctttagtaattttgccagttctattttgtaagaaaatataccatagttgtctggaatggtaatctatactttaagaatttagttagaaaaaatagaactcattcaatgcaaataatgtttttactagtagtaataataactatattattaataatattgtttttatctaaaaacactaggtttttgcacatgtgattccatattctgcttcacctacctaagcattgttaaatgtacgtctgctcagaaatggataggtacttgagaaatattaaccatattcaaactaacca

SEQ ID NO: 711939 - DNA, 776 bp, Homo sapiens
tattttgaatataagtagtgggtatttacatgttcatattgcaggcatggatgygaaggttaaggaaagtaaaaatatttttcccaaaattgttttaacaaaacatgtgtcctattgaaataagacttccctcaacttataattatgaaccatgcattttcttgccaatgcggtaaaaaagagagaatccatttaaaaaaagaaagagagagattaaaattagtgacaatggtgaggctggaaattttatcaattatacctcaaaaaagataaaagtaaacctcaaatatttgtacaagacaatgaaaaaaattgtttagacttgatcctggcccttttcaggcctttttttgtgattatatataattacaaaattgttattttatatatatatatataaacaatttaggattttatttccctctaagtagcaaatttttttctttgagataataaaatatatatatatatatactgccagatacctgagtgtctgagaaagtcaaaaacagtcagatggcatttattttgcatatcaacatgacaatataacaacaagaaaaatgttccttagtgaagcagaatatgcttcaaggtatatttgactgaggaattttgctaggaagaactattcatcattaaagatttatctgtgtttagtcaaccaacccatcaattaggttaattctaatagctcatcaattccatggaagtcacattacttgagctcaactgcattgacttattgaactgaccacatggttcaatctaaatat

SEQ ID NO: 711940 - DNA, 776 bp, Homo sapiens
tattttgaatataagtagtgggtatttacatgttcatattgcaggcatggatgcgaaggttaaggaaagtaaaaatatttttcccaaaattgttttaacaaaacatgtgtcctattgaaataagacttccctcaacttataattatgaaccatgcattttcttgccaatgcggtaaaaaagagagaatccatttaaaaaaagaaagagagagattaaaattagtgacratggtgaggctggaaattttatcaattatacctcaaaaaagataaaagtaaacctcaaatatttgtacaagacaatgaaaaaaattgtttagacttgatcctggcccttttcaggcctttttttgtgattatatataattacaaaattgttattttatatatatatatataaacaatttaggattttatttccctctaagtagcaaatttttttctttgagataataaaatatatatatatatatactgccagatacctgagtgtctgagaaagtcaaaaacagtcagatggcatttattttgcatatcaacatgacaatataacaacaagaaaaatgttccttagtgaagcagaatatgcttcaaggtatatttgactgaggaattttgctaggaagaactattcatcattaaagatttatctgtgtttagtcaaccaacccatcaattaggttaattctaatagctcatcaattccatggaagtcacattacttgagctcaactgcattgacttattgaactgaccacatggttcaatctaaatat

SEQ ID NO: 711941 - DNA, 776 bp, Homo sapiens
tattttgaatataagtagtgggtatttacatgttcatattgcaggcatggatgcgaaggttaaggaaagtaaaaatatttttcccaaaattgttttaacaaaacatgtgtcctattgaaataagacttccctcaacttataattatgaaccatgcattttcttgccaatgcggtaaaaaagagagaatccatttaaaaaaagaaagagagagattaaaattagtgacaatggtgaggctggaaattttatcaattatacctcaaaaaagataaaagtaaacctcaaatatttgtacaagacaatgaaaaaaattgtttagacttgatcctggcccttttcaggcctttttttgtgattatatataattacaaaattgttattttatatatatatatawaaacaatttaggattttatttccctctaagtagcaaatttttttctttgagataataaaatatatatatatatatactgccagatacctgagtgtctgagaaagtcaaaaacagtcagatggcatttattttgcatatcaacatgacaatataacaacaagaaaaatgttccttagtgaagcagaatatgcttcaaggtatatttgactgaggaattttgctaggaagaactattcatcattaaagatttatctgtgtttagtcaaccaacccatcaattaggttaattctaatagctcatcaattccatggaagtcacattacttgagctcaactgcattgacttattgaactgaccacatggttcaatctaaatat

SEQ ID NO: 711942 - DNA, 776 bp, Homo sapiens
tattttgaatataagtagtgggtatttacatgttcatattgcaggcatggatgcgaaggttaaggaaagtaaaaatatttttcccaaaattgttttaacaaaacatgtgtcctattgaaataagacttccctcaacttataattatgaaccatgcattttcttgccaatgcggtaaaaaagagagaatccatttaaaaaaagaaagagagagattaaaattagtgacaatggtgaggctggaaattttatcaattatacctcaaaaaagataaaagtaaacctcaaatatttgtacaagacaatgaaaaaaattgtttagacttgatcctggcccttttcaggcctttttttgtgattatatataattacaaaattgttattttatatatatatatataaacaatttaggattttatttccctctaagtagcaaatttttttctttgagataataaaatatatatatatatatactgccagatacctgagtgtctgagaaagtcaaaaacagtcagatggcatttattttgcatatcaacatgacaatataacaacaagaaaaatgttccttagtgaagcagaatatgcttcaaggtatatttgactgasgaattttgctaggaagaactattcatcattaaagatttatctgtgtttagtcaaccaacccatcaattaggttaattctaatagctcatcaattccatggaagtcacattacttgagctcaactgcattgacttattgaactgaccacatggttcaatctaaatat

SEQ ID NO: 711943 - DNA, 625 bp, Homo sapiens
gggcactcaggcccctggccaaatgtgcctgagcctgcaccgcctcttccctgggtccatttcaaagggcaaactgtgcttgtccaaatggtgcccaaggctctgctgtctgaaggggtgagacttgtgcatggagcttgcatggggcctagggagtccacacaggggtacgccaggcttctcaagtgaggacagggctatctacaatgaaagggaaaagtgtcgcctggggctgaggatcagctcttcctctgctatcacattcctgtgcagagcaccaaggagtctgagaattctacactcgactttgaccttgtgggttattatggaggtatatttatcaaagtaggagaatagaacatatttagctctttgttggcttgatttataactcataattattagacataatgcaaatatgggctggaattcatkttctgatttttatggccttgagctaaggcaaagggacccagggaaatgggctttatatgcttggatggctgcatagaatccccaacttcattagcttccgtgacgactcacggttgttactaaaatcaactttgtattatctctaaaaaccaagggatattatttaggtcagcagttagaaggcattaga

SEQ ID NO: 711944 - DNA, 625 bp, Homo sapiens
gggcactcaggcccctggccaaatgtgcctgagcctgcaccgcctcttccctgggtccatttcaaagggcaaactgtgcttgtccaaatggtgcccaaggctctgctgtctgaaggggtgagacttgtgcatggagcttgcatggggcctagggagtccacacaggggtacgccaggcttctcaagtgaggacagggctatctacaatgaaagggaaaagtgtcgcctggggctgaggatcagctcttcctctgctatcacattcctgtgcagagcaccaaggagtctgagaattctacactcgactttgaccttgtgggttattatggaggtatatttatcaaagtaggagaatagaacatatttagctctttgttggcttgatttataactcataattattagacataatgcaaatatgggctggaattcatgttctgatttttatggccttgagctaaggcaaagggacccagggaaatgggctttatatgcttggatggctgcatagaatccccaacttcattagcttccgtgacgactcamggttgttactaaaatcaactttgtattatctctaaaaaccaagggatattatttaggtcagcagttagaaggcattaga

SEQ ID NO: 711945 - DNA, 1595 bp, Homo sapiens
gggagtgagacagcaatctccaaccggcctgtgcaccggggtggaccctcggcaagttcacgcccttcgcactggggaggagcccggccccacctctttctgggtggaatctaggattcaaattggcagacaggaagggcaccagcagggactctggcttcgcagagggtcccttttcctcccttttttccttttcacccaataaaaccctgctttactcacccttcaaaccgtctgcaagcctacattttcgtggccgtgggacggacaaggaccccgtggttggctgaactaagggaaagtcctgtaacaggaacagggaaggaggtctgctgagggtccggagatcttgcagctgaactaagggaaagtcctgcaacaggagcatggagggaggtctctgctgagggtccggagatcttgcacaagaggcagggcttcaggtcagacttgcaggatgagtaggtgatgggcaggggcgtgggagtggggaggggaggaagtggaaacagcccggatccaggaaagaggcagaaggcaaatgccrggaaaacgcacatcattccctggagctggagggagaagaccagcacacaagagccggagagtacaaataggagacgaaacgtgtgctggatcctggtcacaaaggagctgctgttcccttcgaaggaggggacactaccttgaaaagctacagagggatttcaagcagagaagagctgcaacctgatgtgtcaatctgaagagcactctttgtcatttatgagtaaggaaacgttggaactttaagagacacagagcgacgtctgcatacttccttttgtatggcaacttcctgtattaagggtgagaaacccttaatacagattctcatgattatgtgtattgtgaggtggtattggggttctcaaaggagagggttattcctggttgttagttgttttttaaatttttgtttcttttaaaattatttgttttggggccgggcgcggtggctcacgcctgtaatcccagcactttgggaggccgaggcgggcggatcatgaggtcaggagatcgagaccatcctggctaacacggtgaaaccccgtctctactaaaaatacaaaaaattagccgggcgtggtggcgggcgcctgtagtcccagctactcgggaggctgaggcaggagaatggcgtgaacccgggaggcggagcttgcagtgagccgagatggcgccactgcactccagcctgggagacagagccagactccgtctcaaaaaaaaaaaaaatttgttttggtttttctgttttttgtttgttgctggttttttagaggtgggtctcactatgttgcccaggctggtctggaattcctgggctcaagccatcctccccactcagactcccgagtagctgggaccacaggtgcacaccattgctcctggctttggtgctgctttttattaaggggattttcaagtgtatacaaaatcagacaaaactgaataatgtacgcttatgtccccctcaccactctcaacaaccagcatcctctggcctttacactggaaactgtaaagataaagtctcctcagcattgtttaga

SEQ ID NO: 711946 - DNA, 856 bp, Homo sapiens
taatagtgaaaactgtacagaacatttaaaacatcttaagtgacaaattatttaaaaacattttcattgtagcattttcagttctacaatgtttaaacaaaagctataaaaatttacaagacattgcatcattaaagaaaataggaaacttcaattttagtaagccttattttatgtgtgctataatacaaattgcttgtagcttccacaggtggataggaaatcttttaaacagtaaaatctcagatgaattattccatattgctataagttaaaatgcagtagaaactttttcagatagtactcaaattgtaaacatcttgtttgttgtaaaaagccagaacattctacatactcttaccatcccaactagatagakaaagaacacaaattagatagaacagactgcttagatgcataaaacaaaaggtaaaatcttcttaactaatggtaaagaccagcaactggcttttcctatgataaaaggtaaagtttagaaaaaatacattttacagagtttaattgagcaaagaacaatttgcagggctacagaatcaaaataggttcagagtaacatcagggctgccacatggtcaggtaaaatttaagacagaaaaagaaaagtgatacacagaaagtgaaactgaggtacagaaaacaggaaaattggttacagctcagcatttgccttatctgaatacagtttgagcagtccgctggctgtgattggctaacactcagccacagtgattgagattcagctatttcttacaagagtaggctacagtctgtttacacatccagttaggctacaggtcactatgtagcaagaaacctttaggccaaacttaaaata

SEQ ID NO: 711947 - DNA, 1434 bp, Homo sapiens
atatagattattattagaatattagaacattattagaatattagaatattattaatattctaatattggactattagaatattattaatattctaatattggactattagaatattattaaatattggaatattagaatattgacctggaagaaccttacttactaaaccagaagctacctcctgtctttttaacatgagagatgttatttgggggttgctctccatgcagccctcttacagaattgtgtacaaatgaggatcatgcacttttttttttttttagatggaatcttactctgtggcccaggctggagggcaatggtgcgatctcagctcactccaacctccatctcccaggttcaagcaattctcctgcctcagcctcctgagtagctgggattacagttgctcgccaccatgcctggctaatttttttgtatttttagtagagacggggtttcaccatgttggccaggctggtcttgatctcctgacctcaggtgatccacctgcctcagcctcccaaagtgctgggattacagacgtgagccactgtgctcagccaagatcatgcccattttttaatgccatttccaccattcccacacacagagagactttcatatagaacaatcataaagtcaatactaagtaacactgccaagaaaaccccacactaatgtaccttatttattaaaaacatactttacctatctttattttcttcatttttcctatctgtgcttatttaatgaatgatcagacaattcaaatgttactcaaggtttctttcagttttaagactacattgatgttagaatgatgagaactagtgagttataattaccatgtaaagtgaaatttactttaaaaataatggcaaattgttgaataggtgaaaactctgccagtatgtttattaccatctccaaatagtgctagttccttaaagagaactatagttgttacaatatgatttttatcctttgggtttttttatgctttcttaagtctgggcattgtattatccatatttgtttcatggttgaatatgaataaaacatgaaaaactaagttatatgtccaggtaatataaaactggcttgacctctctgtaaatatcatcaaatctagcaggaaaacacattttctttatttccaaactagaaggtggtttctttagaagtaaattacatgcatttgaaaatatggatataggaaacgacaaagaagaaaaagagcatgtaggtcgaggtaatgatcctttgcttatcacaagctgaccaaaatctataaatgttaaaatactttttaggttaytttctctgcacaaatttcaagtatttgaaaaactggcacagaaatgctatttttcactactgttttctaaacacaacccaattttccttttggtgttaacactcgtaagaaa

SEQ ID NO: 711948 - DNA, 605 bp, Homo sapiens
ttgaatacaacaaaatgctataaagcaaagagttgtcagaatacagtagaagagctattctgaaacaaatgaagagtcaagatcttaaaacagtgacaagtatttttaatgtatgacagacactgaaataccatgcagaaagtaaacagaactattttttgaagtggtacttacaaagcacagatgtagccttcataatgcaagaaacatagcaaattaacttamcacctccttcaaataaaagtgagaacctcttgggagaatttaagcaccattagcagacagatcctatagcagttaatgaaatgttttgtatttcagtagaaaactatttcagcggtgaaaacgatgtaggaatcagaagcatattctgctgagatactaggtagttgacactttcccgaactggaaaaacatttcatagaaaggcatatagagttactgactgaaacacatttgttctaaaaataattcatgcctagtcaaacagcttaccagctgccacaactctgggatcctcatgggacttatgtctcccagctgcacgactatctgcactctcattccaccaaagaacatgaactgcagaaataaaccacaagtag

SEQ ID NO: 711949 - DNA, 624 bp, Homo sapiens
ctgctttgtatttttaatagacacaggatttccccatgttgctcaggctggtctcgaactcctgggctcaagcagtccacctgccttgccctcccaaagttctgggattacaggattacagatgctgtgcccggcccaacctctaattttaattttctcttcaaattgttcaataagatttagtttcaagacattttcctggccgggcatggtggcttacgcctataatttcaacactttgggaggccgaggcaggtggatcacttgaggtcaagagttcaagaccagcctggccagcgtggtgaaaccccatctctactaaaaaatacaaaaattagccgggtgtggtggtacatgcctgtaatcgtagctattgtggaggccgaggcatgagaatcgcttgagcccgggaagcagaggttgcagtgagttgagatgacaccactgaaatccagcccgrgcaacagagtcagactacgtctcaaaaaaaacaaaacaagctgggcgccgtggctcacgcctgtaatcccagcactttgggaggccgaggccggtggatcacgaggtcaggagatcgagaccatcctggctaacacggtggtgaaaccctacctctagtaaaaa

SEQ ID NO: 711950 - DNA, 1272 bp, Homo sapiens
tgagtaatggttttgagttaatcagttaggcctgaactacttttctggaagttagtaaattatctcacaggcagccctgtgagccatgggaaaatgtgtatatggtctttctaggccacagtcarattacaggtatatttgtcatggcttctcttgatgaaaggcccagtatcggtttgtctgaagatatataatagcattgcttttgggggtaatatgggcagtaactctgtccacatctttgggcaggctgtggttctgcctttatatgctatgtcagtgtaaacctacgcgattaatcatcagtgtacagtttaggactaacaatccatttattagtagcagaaagaagtttaaaatcttgctttctgatataatttgttttgtaggccccaatatgggaggtaaatcaacatatattcgacaaactggggtgatagtactcatggcccaaattgggtgttttgtgccatgtgagtcagcagaagtgtccattgtggactgcatcttagcccgagtaggggctggtgacagtcaattgaaaggagtctccacgttcatggctgaaatgttggaaactgcttctatcctcaggtaagtgcatctcctagtcccttgaagatagaaatgtatgtctctgtcctgtgagaaggaaaagtatatttgcagattctcatgtaaaaacatctgagaatgtttgtcttagtttaatagttgttttcctgtggactttatatactttgtattgtcttaaaagagtgattgatggtagctacggaaaactttgatttttaaaattgtctctttaagtagacaatttataagctactggtacgagttcaccttataaatctccactaccatgtttttgcttggactgttcacacttcctggaatggtccttcttgccgtttatccaacttctttctaatttttaagtccctaatgatgggaattctatttctgtagtgatttttctggtcatacgaccgtaaggtcatgggtgtttttctctgaattcctcttgagatgcctgtaacttgaaccacgtttttattctagacattactgaaatgttttgtctttatttcactttttaggagcttccttgaaggtagggactataccttctatttcttggtatctttttctttctttttttaaaagttttttagagagacagggtctcactcttttgcccagactggtctcgaactcctgggctcaggtgatcttcctgccttggcttcccagagtgctgggattacaggc

SEQ ID NO: 711951 - DNA, 1272 bp, Homo sapiens
tgagtaatggttttgagttaatcagttaggcctgaactacttttctggaagttagtaaattatctcacaggcagccctgtgagccatgggaaaatgtgtatatggtctttctaggccacagtcaaattacaggtatatttgtcatggcttctcttgatgaaaggcccagtatcggtttgtctgaagatatataatagcattgcttttgggggtaatatgggcagtaactctgtccacatctttgggcaggctgtggttctgcytttatatgctatgtcagtgtaaacctacgcgattaatcatcagtgtacagtttaggactaacaatccatttattagtagcagaaagaagtttaaaatcttgctttctgatataatttgttttgtaggccccaatatgggaggtaaatcaacatatattcgacaaactggggtgatagtactcatggcccaaattgggtgttttgtgccatgtgagtcagcagaagtgtccattgtggactgcatcttagcccgagtaggggctggtgacagtcaattgaaaggagtctccacgttcatggctgaaatgttggaaactgcttctatcctcaggtaagtgcatctcctagtcccttgaagatagaaatgtatgtctctgtcctgtgagaaggaaaagtatatttgcagattctcatgtaaaaacatctgagaatgtttgtcttagtttaatagttgttttcctgtggactttatatactttgtattgtcttaaaagagtgattgatggtagctacggaaaactttgatttttaaaattgtctctttaagtagacaatttataagctactggtacgagttcaccttataaatctccactaccatgtttttgcttggactgttcacacttcctggaatggtccttcttgccgtttatccaacttctttctaatttttaagtccctaatgatgggaattctatttctgtagtgatttttctggtcatacgaccgtaaggtcatgggtgtttttctctgaattcctcttgagatgcctgtaacttgaaccacgtttttattctagacattactgaaatgttttgtctttatttcactttttaggagcttccttgaaggtagggactataccttctatttcttggtatctttttctttctttttttaaaagttttttagagagacagggtctcactcttttgcccagactggtctcgaactcctgggctcaggtgatcttcctgccttggcttcccagagtgctgggattacaggc

SEQ ID NO: 711952 - DNA, 562 bp, Homo sapiens
caacccagagagatactgccatgaaaatgcaaccgaaaagctcaataactgtgcaagagcatctgaccaaagcaggactcttgtgaatgttttaatttctcctcttaaacctctcattaactctcaaacaatccagtaatatgtggggagggccagatactgatttagaatcagacactctttaagcatcctgagttagagaaattagaatgagaagaaataaatccctacaaaattgtgcaaccgtggggagttcaaatatttcttacttattttgttatttccttctgacctagtacagtgccttgaacctaggggatttcagtaagtgttgaggaaagtgaattggaatgaggtctccttctaccagctactgatgatcatattagcctcttcttgtcccttccattgttttctttttttactagcctttttttttttttttttttttttgcgacggagtctcactctgttgccaggctggcgtgcartggcacaatctctcctcactgcaacctctgagtcctggattcaagcaattctcctgcctaagcctcccaag

SEQ ID NO: 711953 - DNA, 1647 bp, Homo sapiens
tttctatgcatccatgtgttctcatcatttagctcataggtgaaaatatgtggtatctggttttctgttcctgtgttagtttgctaaggataatggcctccagctccatccatgtccctgcaaaggactggatctcattcttcttaatggctgcatagtattccatcacatatacataccayaatttctttatctagtctatcattgatgggcatttaggttgattccagtctttgctattgtgaaccgaaagaagacatacatgtggccaaaaatcatgtgaaaaaaagctcaccatcactgatcattagagaaatgcaaatcacaatcacaatgaggtaccatctaacactagtcagaatggctattatgaaaaagtcaagataatagatgctgctgaggttgtggagaaaaaggaatggttatacactgttggtgggaatgtaattgagtttgaccattgtggaagacaatgtggtgattcctcaaagacctaaagacagaaataccatttgacctagcaattctactactggggtatataccccaaaggaatataaatcattctattataaaatcagaagaaagtttaagtgcaaaggtgtggaaatgagagacagcacggaatattcagagaagagaaagtagctagaccgagaagtgagtgtgacatgttcaactttattattatacaaacatctattttccgtttagaagttagcatggttgaaaacaattattttcactggagataatgcaactgtagagctgtttaacttctaatgtgtacctcagacccctaactaccaaagaaataaagacgtagcaaagtgggacctgaggctgataggacacagactaagcacatctgccctccgctccaacttttcatacatcactaaattgttccttggagtaatttgagaaccaggaattaaataacaaagccctaatttgaggggatttagctctaaatcatactggaattgtagtagcaagatggtagaaaaaaggaaggaaactataaatgaataggaccaacataaaacgatagacatgcatataagaatggatttcagaggaggtcaaatttagatcctctgaattggatggtaaacttgagttcaacagtagcagaaatctataatacagattttcaagaaatggcaatattcaggcaggtaattcttatgggtatctggtttaagaatctgaagatagtgataataagaccccgcctccatggaaaaggaagaaatagtggcaaggaatatctacacagtgtcagagccctaacctagaggaatgtagtttcatcagaaaaactgaaaagaaaataaagaaatcaatccagaaatgtagtcatacgaattgggaagatacaatggggtgttttaaagcctgaatctcaaggatcacagggaccctgggataaactccctacattatgatgccaggccttagacagcataatgaataaaggtgcctgcttgtagctaaccattggggttctgaaagtactgactgcagagagctgactccagaattggtatcagtaagtctgcaggacaacaatatcagagacttcaagggctagggagggccaggctggatagcaaggtaaaaacatatcaatcatattccaga

SEQ ID NO: 711954 - DNA, 1647 bp, Homo sapiens
tttctatgcatccatgtgttctcatcatttagctcataggtgaaaatatgtggtatctggttttctgttcctgtgttagtttgctaaggataatggcctccagctccatccatgtccctgcaaaggactggatctcattcttcttaatggctgcatagtattccatcacatatacataccacaatttctttatctagtctatcattgatgggcatttaggttgattccagtctttgctattgtgaaccgaaagaagacatacatgtggccaaaaatcatgtgaaaaaaagctcaccatcactgatcattagagaaatgcaaatcacaatcacaatgaggtaccatctaacactagtcagaatggctattatgaaaaagtcaagataatagatgctgctgaggttgtggagaaaaaggaatggttatacactgttggtgggaatgtaattgagtttgaccattgtggaagacaatgtggtgattcctcaaagacctaaagacagaaataccatttgacctagcaattctactactggggtatataccccaaaggaatataaatcattctattataaaatcagaagaaagtttaagtgcaaaggtgtggaaatgagagacagcacggaatattcagagaagagaaagtagctagaccgagaagtgagtgtgacatgttcaactttattattatacaaacatctattttccgtttagaagttagcatggttgaaaacaattattttcactggagataatgcaactgtagagctgtttaacttctaatgtgtacctcagacccctaactaccaaagaaataaagacgtagcaaagtgggacctgaggctgataggacacagactaagcacatctgccctccgctccaacttttcatacatcactaaattgttccttggagtaatttgagaaccaggaattaaataacaaagccctaatttgaggggatttagctctaaatcatacyggaattgtagtagcaagatggtagaaaaaaggaaggaaactataaatgaataggaccaacataaaacgatagacatgcatataagaatggatttcagaggaggtcaaatttagatcctctgaattggatggtaaacttgagttcaacagtagcagaaatctataatacagattttcaagaaatggcaatattcaggcaggtaattcttatgggtatctggtttaagaatctgaagatagtgataataagaccccgcctccatggaaaaggaagaaatagtggcaaggaatatctacacagtgtcagagccctaacctagaggaatgtagtttcatcagaaaaactgaaaagaaaataaagaaatcaatccagaaatgtagtcatacgaattgggaagatacaatggggtgttttaaagcctgaatctcaaggatcacagggaccctgggataaactccctacattatgatgccaggccttagacagcataatgaataaaggtgcctgcttgtagctaaccattggggttctgaaagtactgactgcagagagctgactccagaattggtatcagtaagtctgcaggacaacaatatcagagacttcaagggctagggagggccaggctggatagcaaggtaaaaacatatcaatcatattccaga

SEQ ID NO: 711955 - DNA, 1647 bp, Homo sapiens
tttctatgcatccatgtgttctcatcatttagctcataggtgaaaatatgtggtatctggttttctgttcctgtgttagtttgctaaggataatggcctccagctccatccatgtccctgcaaaggactggatctcattcttcttaatggctgcatagtattccatcacatatacataccacaatttctttatctagtctatcattgatgggcatttaggttgattccagtctttgctattgtgaaccgaaagaagacatacatgtggccaaaaatcatgtgaaaaaaagctcaccatcactgatcattagagaaatgcaaatcacaatcacaatgaggtaccatctaacactagtcagaatggctattatgaaaaagtcaagataatagatgctgctgaggttgtggagaaaaaggaatggttatacactgttggtgggaatgtaattgagtttgaccattgtggaagacaatgtggtgattcctcaaagacctaaagacagaaataccatttgacctagcaattctactactggggtatataccccaaaggaatataaatcattctattataaaatcagaagaaagtttaagtgcaaaggtgtggaaatgagagacagcacggaatattcagagaagagaaagtagctagaccgagaagtgagtgtgacatgttcaactttattattatacaaacatctattttccgtttagaagttagcatggttgaaaacaattattttcactggagataatgcaactgtagagctgtttaacttctaatgtgtacctcagacccctaactaccaaagaaataaagacgtagcaaagtgggacctgaggctgataggacacagactaagcacatctgccctccgctccaacttttcatacatcactaaattgttccttggagtaatttgagaaccaggaattaaataacaaagccctaatttgaggggatttagctctaaatcatactrgaattgtagtagcaagatggtagaaaaaaggaaggaaactataaatgaataggaccaacataaaacgatagacatgcatataagaatggatttcagaggaggtcaaatttagatcctctgaattggatggtaaacttgagttcaacagtagcagaaatctataatacagattttcaagaaatggcaatattcaggcaggtaattcttatgggtatctggtttaagaatctgaagatagtgataataagaccccgcctccatggaaaaggaagaaatagtggcaaggaatatctacacagtgtcagagccctaacctagaggaatgtagtttcatcagaaaaactgaaaagaaaataaagaaatcaatccagaaatgtagtcatacgaattgggaagatacaatggggtgttttaaagcctgaatctcaaggatcacagggaccctgggataaactccctacattatgatgccaggccttagacagcataatgaataaaggtgcctgcttgtagctaaccattggggttctgaaagtactgactgcagagagctgactccagaattggtatcagtaagtctgcaggacaacaatatcagagacttcaagggctagggagggccaggctggatagcaaggtaaaaacatatcaatcatattccaga

SEQ ID NO: 711956 - DNA, 1647 bp, Homo sapiens
tttctatgcatccatgtgttctcatcatttagctcataggtgaaaatatgtggtatctggttttctgttcctgtgttagtttgctaaggataatggcctccagctccatccatgtccctgcaaaggactggatctcattcttcttaatggctgcatagtattccatcacatatacataccacaatttctttatctagtctatcattgatgggcatttaggttgattccagtctttgctattgtgaaccgaaagaagacatacatgtggccaaaaatcatgtgaaaaaaagctcaccatcactgatcattagagaaatgcaaatcacaatcacaatgaggtaccatctaacactagtcagaatggctattatgaaaaagtcaagataatagatgctgctgaggttgtggagaaaaaggaatggttatacactgttggtgggaatgtaattgagtttgaccattgtggaagacaatgtggtgattcctcaaagacctaaagacagaaataccatttgacctagcaattctactactggggtatataccccaaaggaatataaatcattctattataaaatcagaagaaagtttaagtgcaaaggtgtggaaatgagagacagcacggaatattcagagaagagaaagtagctagaccgagaagtgagtgtgacatgttcaactttattattatacaaacatctattttccgtttagaagttagcatggttgaaaacaattattttcactggagataatgcaactgtagagctgtttaacttctaatgtgtacctcagacccctaactaccaaagaaataaagacgtagcaaagtgggacctgaggctgataggacacagactaagcacatctgccctccgctccaacttttcatacatcactaaattgttccttggagtaatttgagaaccaggaattaaataacaaagccctaatttgaggggatttagctctaaatcatactgkaattgtagtagcaagatggtagaaaaaaggaaggaaactataaatgaataggaccaacataaaacgatagacatgcatataagaatggatttcagaggaggtcaaatttagatcctctgaattggatggtaaacttgagttcaacagtagcagaaatctataatacagattttcaagaaatggcaatattcaggcaggtaattcttatgggtatctggtttaagaatctgaagatagtgataataagaccccgcctccatggaaaaggaagaaatagtggcaaggaatatctacacagtgtcagagccctaacctagaggaatgtagtttcatcagaaaaactgaaaagaaaataaagaaatcaatccagaaatgtagtcatacgaattgggaagatacaatggggtgttttaaagcctgaatctcaaggatcacagggaccctgggataaactccctacattatgatgccaggccttagacagcataatgaataaaggtgcctgcttgtagctaaccattggggttctgaaagtactgactgcagagagctgactccagaattggtatcagtaagtctgcaggacaacaatatcagagacttcaagggctagggagggccaggctggatagcaaggtaaaaacatatcaatcatattccaga

SEQ ID NO: 711957 - DNA, 654 bp, Homo sapiens
tgttgaggaagaacatatactaaaaagatattataaatatatcataaggtttgttgtaaaagattataaaacagtaaaatcccattgcttaaatgggattttatatgtatataaatggagaaaaagtaaccacgatacacacaaaaatatgaataaagtgatttgagcctaggtagtagaaatatggattttcttttttgtattttatatgtttcctaaatgttctataaaaaacaaatcttacatttacgtaagaaaaataagaaataaaaattattcacaattgagacttttggtgttcaaaatacttgaacattactaagaatgggtactatgcagaaacaatttgtcattagcagattacctatgctcctttggagtgatttctctgtgacttttcacactatttcacaattctgtcctaggctttatcaaaatccatggacatctgatcgaaacaaaaattaacagcaatctgcaaaagagctattagggacattactcttgtgaatagatagtcagcactctggggacagacactktgttatctttctcatcttaaatttcactgctgggcttaacggtgctttgtgcctaccagtgttcaatcattggatcaatgttgaatgactgttaaactccttgatgtcagag

SEQ ID NO: 711958 - DNA, 646 bp, Homo sapiens
tcccaaagtgctgggattacaggcgtgagccaccgtgcccggcccatatcttcttaatgagaacatacagaggcaggggaacaatcacattagtccctgactctgagcattcacacrcccctccgtgatatcactgggacctcagcctcgtgggatacacattctcacagacacctgcccagaaaccaggctcatgcctcacacatcatgtctcattcctaaaacctgaagcctctggtttgaggattcctaaagcaaggatgatctaggtgtggggaaattatttacctactctatgtactgccccaggaatgttgtatgcactcattcacttaatccacacaaaaaaccccgtgagttaaatactgtaattcctattcagtcgatgacaaaacagaggctcagaaacattaaataacgtgtcctgtgtcaagggtcaatggtcaagatgtgcatgtagactggtctggttccaaagcccatgttctttccactgtagagacagcacaggatagggctggacagcctgggctctggagttaggttgtgtgggtagaatagactccaccacccactagttatgtgaccttgggcatatttcctaactgcttggtgactccatttcctgagtaaaatgagggaaata

SEQ ID NO: 711959 - DNA, 646 bp, Homo sapiens
tcccaaagtgctgggattacaggcgtgagccaccgtgcccggcccatatcttcttaatgagaacatacagaggcaggggaacaatcacattagtccctgactctgagcattcacacgcccctccgtgatatcactgggaccwcagcctcgtgggatacacattctcacagacacctgcccagaaaccaggctcatgcctcacacatcatgtctcattcctaaaacctgaagcctctggtttgaggattcctaaagcaaggatgatctaggtgtggggaaattatttacctactctatgtactgccccaggaatgttgtatgcactcattcacttaatccacacaaaaaaccccgtgagttaaatactgtaattcctattcagtcgatgacaaaacagaggctcagaaacattaaataacgtgtcctgtgtcaagggtcaatggtcaagatgtgcatgtagactggtctggttccaaagcccatgttctttccactgtagagacagcacaggatagggctggacagcctgggctctggagttaggttgtgtgggtagaatagactccaccacccactagttatgtgaccttgggcatatttcctaactgcttggtgactccatttcctgagtaaaatgagggaaata

SEQ ID NO: 711960 - DNA, 646 bp, Homo sapiens
tcccaaagtgctgggattacaggcgtgagccaccgtgcccggcccatatcttcttaatgagaacatacagaggcaggggaacaatcacattagtccctgactctgagcattcacacgcccctccgtgatatcactgggacctcagcctcgtgggayacacattctcacagacacctgcccagaaaccaggctcatgcctcacacatcatgtctcattcctaaaacctgaagcctctggtttgaggattcctaaagcaaggatgatctaggtgtggggaaattatttacctactctatgtactgccccaggaatgttgtatgcactcattcacttaatccacacaaaaaaccccgtgagttaaatactgtaattcctattcagtcgatgacaaaacagaggctcagaaacattaaataacgtgtcctgtgtcaagggtcaatggtcaagatgtgcatgtagactggtctggttccaaagcccatgttctttccactgtagagacagcacaggatagggctggacagcctgggctctggagttaggttgtgtgggtagaatagactccaccacccactagttatgtgaccttgggcatatttcctaactgcttggtgactccatttcctgagtaaaatgagggaaata

SEQ ID NO: 711961 - DNA, 603 bp, Homo sapiens
tcaatacaaatacactgttattgcatttggagagttaaaactacaactcaaatctccaggctccctgtccagtactccctgccctacaccatcctggctctcaacctttctcattctgttggtcatttaattattttgctaccttttagtcatttggccatttcaggtctgtgtgcctgtcggcatcaagactaggtgggcatggtagctctcgcctgtaatgccagcactttgggaggccaaagcaggtggatcacttgagatcaggagttcaagaccagcctggccaacacggcgaaactcygtctctactgaaaatataaaagttagccaggtgtggtggcacatgcctgtgatcccagctacttgggaggctgaggcagaagaattgcttgaacccgggaggcggaggttgcaatgagccaaggtcacgcgactgcactccagcctgagcaacagagcaagactccgtctcaatttaaaaaaaaaaagaagaatataagttctttcaagacagtaatacatcttctacatccactgtttcttcacagcaccaagcacaatattgaatataaagtaagtatttgaaaaacactcaataaa

SEQ ID NO: 711962 - DNA, 3306 bp, Homo sapiens
gttgttaagtagcctcctgtctggagttcctgcttccacactacactcaccccaaaaccatcttttacacggtcaccaaaatgttctttataaagaaggaatgaaagcatagcattccccttcttgattcatgtgaaataaaattgagatttcttactggcaagtaaaagtccttgttgaacaattgttcccagaatttacagggttgactccttctgccaatgtgattcttaattataatgtcacctcctcagagaagtccccccgactgttcctctaaagtcacctgccttccttcttgtacacccaccattagcccatgattatatgcccatggatatgtgatgtgctgtcatttactttgtggtgtcggccacaacccagaatctcactggctgggtttgcttacttctttcctgtttacctactctagtacctgcacaggaaaaagtaccatgagaccaggcaccttgtctactaacagccagcacttaattggcacaaaaagacagtcagtaagtatttgttgaatgggtacatagatatatcaatccagcctcattctctcagcataggcaacaaggttcatctggaattacttgattttcataatctgttgtagtttctaaggaattacttttgtttctatgggcttaataatttttccaaaagtttagttgagtatgttgctaaagattggtagaattcttacagctctatagtttcttcagacttaactctctacattttggaaatattaacatatttcttccactaatttattcattcagtagataccatttatttagcctttaagataccaggcatcttgcaacactctaggaacatcagaaaataagacctttttctagactttatcagtcttgtatttgtactttgaagcacttttcttgtgattacatgtcatcagttaactgcgtgattgtctaacatctgcttcccctgactcgacaagatagttttgcacagtgccctggattgtcaacattgccaaatgttggaatctgaaattctcttggagataacacatcctaatgaatcttctaatacccagatactttttttattcacaaaatcaaagttagcaacctacgattcctgagcatatgcagctccacgtacaaagtttagctgttgactgggccaagagcttctgggcttgcatgcttccaatcctctatcccttgcctgtgttctcagacctagttctacctgagaatcaccttgggacatatatgcttttaacatacctactctggctgcacttcaattagatcatgatctctgggtagggtctccagtgcttgtataagcattttgttgttgttggttctaggcaagcgtgatgaggaaccagaatttaaagctgttatctcaaacatcacttcattcttagtctgcactatcatttccgtgtctgtgattgctaatcctaaggattttaaatgaaatctgaaaacttgagaagtcagtataatgttaaatatatgggctctgaattcaaaccaacagacatagaaacttgacttcaccacctactagttgggtaatcttgggcaatcttgggtcctctgtggacaccagtttccttttctatgaaaagaaaggtaatactagtgttgcttcaaccaagtaattgtatgaaacagtgctttgcataatgtaagcacccaaaaagtgttagttacaagcatcgttaccttcgtcagatatttaggctgctcaccaaacttccctatatttttttttcccactcttactcaggaccacatctcatctgtatgtccaaggaaggtcagcttttttatataccaggtatccaaggatttcagcaccttcgtcaggccatctggagtctaggctacctgaagttctggctggggggcttccatttgaatttctttaaatatgggaaagctaattaactttatttatttatttatttttttgtatttttttagtaaagacggggtttcaccgtgggtctcgatctcctgacctcgtgatccgcccgcctcagcctgccaaagtgctgggattacaggcatgagccactgcgcccggctaattaactttttttttttttttttttttttttttttggggacggagtctcgctctgtygcccaggctggagtgcagtggcgcaatcgcggctcactgcaagctccgcctcccaggttcacgccattctcctgcctcagcctcccgagtagctgggactacaggcgcccgctaccacgcccggctaattttttgtatttttagtagagacggggtttcaccgtgttagccaggatggtctcgatctcctgacctcgtgatccgcccgcctcggcctcccaaagtgctgggattacaggcgtgagccaccgcgcccggcccggctaattaactttaaaaaacattataaattctgataaagttaatgatctgtcaggcctcccagtctcattatgaattacaaacatcattttgtacttcaggtcgcctctgttccacacaagaccttgctcctatttggttaattactcgcaagtggtatcatccaaaattcatcactctcagagctgaagtcatattctccttcctcagataaatactcttgtaattccagcttcagctgccctctttgttgctgttctcatcatctgggatcatttgtcatacatggtagaggccacacagttgtaaatctcacctctgacatgctaaggcccatacagccctatcacagggaacttcagaaggcacagtttacagctctgtcagccctccaagtggggagggacaggatgacagcagtcagacctggggcattggcagtccaatgtgaactttgattcccactttgtaaatcatagcatttttaagagttggaaaaatcttccaagatgccagattcattgcagtcccctcattagatttgagaataaatgaaatttcctacccttctttctcatagttcctataggaatgactgaaaaatctcttctatgaagagacaaatgtacacacatacatggaataacaacactaaaataaaagacactgtgatcttccatcttaaatcaatgacttctttataacttttctgactggttgaggatctgaaggctccttcaacagtcaacaaacattacccagtaggctccctgtgctaggcttcagagatacaaaaataaataagacaatccttgccctttaggaactcacagattttcagaagctacaaaaggtagataaacaaatgctcataaatatggaggtttaggaaaccaagtc

SEQ ID NO: 711963 - DNA, 3306 bp, Homo sapiens
gttgttaagtagcctcctgtctggagttcctgcttccacactacactcaccccaaaaccatcttttacacggtcaccaaaatgttctttataaagaaggaatgaaagcatagcattccccttcttgattcatgtgaaataaaattgagatttcttactggcaagtaaaagtccttgttgaacaattgttcccagaatttacagggttgactccttctgccaatgtgattcttaattataatgtcacctcctcagagaagtccccccgactgttcctctaaagtcacctgccttccttcttgtacacccaccattagcccatgattatatgcccatggatatgtgatgtgctgtcatttactttgtggtgtcggccacaacccagaatctcactggctgggtttgcttacttctttcctgtttacctactctagtacctgcacaggaaaaagtaccatgagaccaggcaccttgtctactaacagccagcacttaattggcacaaaaagacagtcagtaagtatttgttgaatgggtacatagatatatcaatccagcctcattctctcagcataggcaacaaggttcatctggaattacttgattttcataatctgttgtagtttctaaggaattacttttgtttctatgggcttaataatttttccaaaagtttagttgagtatgttgctaaagattggtagaattcttacagctctatagtttcttcagacttaactctctacattttggaaatattaacatatttcttccactaatttattcattcagtagataccatttatttagcctttaagataccaggcatcttgcaacactctaggaacatcagaaaataagacctttttctagactttatcagtcttgtatttgtactttgaagcacttttcttgtgattacatgtcatcagttaactgcgtgattgtctaacatctgcttcccctgactcgacaagatagttttgcacagtgccctggattgtcaacattgccaaatgttggaatctgaaattctcttggagataacacatcctaatgaatcttctaatacccagatactttttttattcacaaaatcaaagttagcaacctacgattcctgagcatatgcagctccacgtacaaagtttagctgttgactgggccaagagcttctgggcttgcatgcttccaatcctctatcccttgcctgtgttctcagacctagttctacctgagaatcaccttgggacatatatgcttttaacatacctactctggctgcacttcaattagatcatgatctctgggtagggtctccagtgcttgtataagcattttgttgttgttggttctaggcaagcgtgatgaggaaccagaatttaaagctgttatctcaaacatcacttcattcttagtctgcactatcatttccgtgtctgtgattgctaatcctaaggattttaaatgaaatctgaaaacttgagaagtcagtataatgttaaatatatgggctctgaattcaaaccaacagacatagaaacttgacttcaccacctactagttgggtaatcttgggcaatcttgggtcctctgtggacaccagtttccttttctatgaaaagaaaggtaatactagtgttgcttcaaccaagtaattgtatgaaacagtgctttgcataatgtaagcacccaaaaagtgttagttacaagcatcgttaccttcgtcagatatttaggctgctcaccaaacttccctatatttttttttcccactcttactcaggaccacatctcatctgtatgtccaaggaaggtcagcttttttatataccaggtatccaaggatttcagcaccttcgtcaggccatctggagtctaggctacctgaagttctggctggggggcttccatttgaatttctttaaatatgggaaagctaattaactttatttatttatttatttttttgtatttttttagtaaagacggggtttcaccgtgggtctcgatctcctgacctcgtgatccgcccgcctcagcctgccaaagtgctgggattacaggcatgagccactgcgcccggctaattaactttttttttttttttttttttttttttttggggacggagtctcgctctgtcgcccaggctggagtgcagtggcgcaatcgcggctcactgcaagctccgcctcccrggttcacgccattctcctgcctcagcctcccgagtagctgggactacaggcgcccgctaccacgcccggctaattttttgtatttttagtagagacggggtttcaccgtgttagccaggatggtctcgatctcctgacctcgtgatccgcccgcctcggcctcccaaagtgctgggattacaggcgtgagccaccgcgcccggcccggctaattaactttaaaaaacattataaattctgataaagttaatgatctgtcaggcctcccagtctcattatgaattacaaacatcattttgtacttcaggtcgcctctgttccacacaagaccttgctcctatttggttaattactcgcaagtggtatcatccaaaattcatcactctcagagctgaagtcatattctccttcctcagataaatactcttgtaattccagcttcagctgccctctttgttgctgttctcatcatctgggatcatttgtcatacatggtagaggccacacagttgtaaatctcacctctgacatgctaaggcccatacagccctatcacagggaacttcagaaggcacagtttacagctctgtcagccctccaagtggggagggacaggatgacagcagtcagacctggggcattggcagtccaatgtgaactttgattcccactttgtaaatcatagcatttttaagagttggaaaaatcttccaagatgccagattcattgcagtcccctcattagatttgagaataaatgaaatttcctacccttctttctcatagttcctataggaatgactgaaaaatctcttctatgaagagacaaatgtacacacatacatggaataacaacactaaaataaaagacactgtgatcttccatcttaaatcaatgacttctttataacttttctgactggttgaggatctgaaggctccttcaacagtcaacaaacattacccagtaggctccctgtgctaggcttcagagatacaaaaataaataagacaatccttgccctttaggaactcacagattttcagaagctacaaaaggtagataaacaaatgctcataaatatggaggtttaggaaaccaagtc

SEQ ID NO: 711964 - DNA, 790 bp, Homo sapiens
aaaacaaaaaattagccgggcttggtggcaggcgcctgtaatccagtctacgcgggaggctgaggcaggagaatcgctagaaccctggaggcggaggttgcagtgagctgagatggcgccattgcactgcagcctgggctacagagtgagactcctccaaaaaaaaaaaaaggagggggaaacaacaacaaattaaaatcaaaccctgcagtcataaatttgccataacagatctacacactgaatttaagggataattttcttcatgttatttatttacagtagtccctttccgcaaggatgtgaggcaacttacagagataccataaaacatgaaaacyagatgaggctgggcgtggtggctcactcctgtaatcccagcactttgggaggccgaggcgggcggatcacctgaggtcaggagtcggagaccaacatgtcgaaacccgtatcttctaaaaatacaaaacattagctgggcatggtggcgcgtgcctgtaatcccagctactcggtagggtgagacaggacaatctcttgaacccttaggaggtggaggctgcagtgagcggaaatcacgccactgcactccagcctgggtgacagaacaagactccatctcacacacacacaaaaaaaatgctagagtaagaaatcagaggaatgggaaaatgaggggtggattaaatgaaatacgcataaattactatacaaaatgcctgcagtgaaagcccgttgaatttgttgagatagattgcaaattttactttagtcttcccagaagtcacgg

SEQ ID NO: 711965 - DNA, 790 bp, Homo sapiens
aaaacaaaaaattagccgggcttggtggcaggcgcctgtaatccagtctacgcgggaggctgaggcaggagaatcgctagaaccctggaggcggaggttgcagtgagctgagatggcgccattgcactgcagcctgggctacagagtgagactcctccaaaaaaaaaaaaaggagggggaaacaacaacaaattaaaatcaaaccctgcagtcataaatttgccataacagatctacacactgaatttaagggataattttcttcatgttatttatttacagtagtccctttccgcaaggatgtgaggcaacttacagagataccataaaacatgaaaactagatgaggctgggcgtggtggctcactcctgtaatcccagcactttgggaggccgaggcgggcggatcacctgaggtcaggagtcggagaccaacatgtcgaaacccgtatcttctaaaaatacaaaacattagctgggcatggtggcgcgtgcctgtaatcccagctactcggtagggtgagacaggacaatctcttgaacccttaggaggtggaggctgcagtgagcggaaatcacgccactgcactccagcctgsgtgacagaacaagactccatctcacacacacacaaaaaaaatgctagagtaagaaatcagaggaatgggaaaatgaggggtggattaaatgaaatacgcataaattactatacaaaatgcctgcagtgaaagcccgttgaatttgttgagatagattgcaaattttactttagtcttcccagaagtcacgg

SEQ ID NO: 711966 - DNA, 1324 bp, Homo sapiens
tctgaagccttcacatatgtctctgcttccagaaaaagcactaaatccagactgtgacatttaaatacatatcaaaacacaggttattaaaaaaagttcaacccatgtccacagaaaaaataattatcttagtttttaaggctaaaagaaatacacttactaagaaaactcttcgctaaacgtgaagctatagttaggcagaaaaggtatttggttatggctgcatcaaagttgagaaccgatcatgaaaatacaacctcatgctagatgctgaggatataataaacacagaagatatttgtccctgatcttatcacacattaaccatttccagagtattacaaatttaaagttgttcattcacttaacatatttaagtcattgaaatgatgacacatttcctagataaagcaaaaatccttaatattaagaactattaatgatctgaatttgtcatgtgttcctttctcatgttccagtgcactaggaaattcagcttttacttccttgactttgacaagctcattcgtgtttccaggaatttactatgttctgcaatttgctttaaatgtcttttcaatacatccccacttgtgaaacctatatattgtaatattgcacacaagagtcatctctgagtaatcattcagatcttgcctaacaggcatcattcatgattcagatattcagagatagttctccacacttaaggaaatgaaaaaaaaagtcttttgaaagactatcaagtgtgaagtggacaaggtatacacaattataatattaaaatgcagtattataagtaatattaattatttcaatattataagtcatattaattatttcaattaattatatgtattactcatattaatagtattatcatattgtcattgagacaagttattacactgaggaacaaattcgtactgtataaaactggagagctaaacagttgttattctaaagttttcagagatcgaagtgcccagttcacctayactttgacaaactaatgtcctttatagcctcagaaaaagtatctaaaaactgaaatatgcaaaaagatgatttctaaaatcctgatcacttgccaacattgatatgaaaatttatacaaaaagtaagtacaggacacttatctgtgtaaacctaaaaagtcatgttccagaaaagaaatcttagtcgttgggactcaccttccagccaaactacggaactaaaatacagtattaggaaatagtgctagaacaaatatatttcttcatgaaaaacaaaacaaacaaccaaaaatatttaacccctatctcatatcatacacaaaaat

SEQ ID NO: 711967 - DNA, 3454 bp, Homo sapiens
tgcacttcagaattttcttaagtagcacaccagatccatggtcttcatgagacaatccaaaacccatgctaggatgcttagccctgaaaataaaataaaaacaaagaaaaaataacaagcaaataccctcctaatcctgaaaaaattagtttattttaaaacaagtttacaaaaggagggctgaaataaacgttaagctgaagaaataagtctgtgtctggtcttttcctcacttctctccagtctcgaagatgtgtaaaaccaagcctagaccatgcatttcatgccctcagttcctgtccttcctcctctgtgtgacttgctgggttaattattccccatctcctcaacctcatcttcccatcagcttcttccctgcacttcaacttggttactgtctctcatatacaaaataataataataaaacccttccctaaaccctgacttgtcttcacaacttcagcacttccttttacatgtactgaactgtcttcctacttccacttagcaaactatggccagcagtctaaatcccacctccatctgtttttgtaaataaagttttcgcagaacacagccagggccatctgtttacatattgtctctgggttcacacaacaatgacagagttgtatcatcacaacagagacctaatggcctgcaatgcctaaattttttacacaaaaggcttaggggtcatatggaatcaaatgtcctgaaagaaaagtctacatttgctgttacttccttccctctcctcacccctcaagccaccatgctcagacttccaccacaacccttgtaaagtgacaccatgtttaaaaattattaataccctcgttattaaaaatttctcaaacactaaactcttgtctctgaatctaaattttgatcactcttttatctctgtcttctcttggtcttcttattcctccatgtcattatttttctgggttttttgtttgtttgtttgtttgtttctgttactctcttccctctgcattctagttctaagcaatcttacctagttcagcgacttcaattgttgagcctatgtggacgatgtccaaattactcccagccctgatctctcttccaagctcaacatttcatatcatatacaagacactgaacattacatggaaaattccaaatgtcaaaactagaacatcttattcttttgtgatcactagttcttctagggattagtaatggcattactaatttcctagttcccaagcctggaaattctggaaatatcatgctctttcattccaaccatctaaatgcttaccaaatgtcacggtatgaatccatcctgcacccacaatagctattgcacccattcctcctttccatttccacaaccccatctacaatttaggccctcacactcttcctccaggacagttgtgagactcctacatggtttcctgtctactctaatactctgtatatgtggcttctgtgttaatcttcccacagcacaatccagttctagccttctcctaacccgtttttttctcattggaagtcccaagtccttaatgcatgagtcagtctcagcaggaaacagatgactcaagctggatgactgaggagagtttagtgaaagcatactaagtataggcagagtggaaggacatcaagtgtaatgtaggatccggaggctaatgataatggagaacctctctactcctaatcctgaagaagcaagagaaagcagaacttgccagaacctagaggggataacaggtggagagggctgcttgacaggagctgtggcccattgtagagggactcagacaacctgcagagaagaaggtcagagaacaaacccagacctcactccccagctacatgccatcacctctggtgctccttgatggctgaactcaactggagcccagtgaccaaggaagaacagtccatacagggcagcatcctggggcataacatagaaaagagtagaacgtgaatctggaagaaagatatccagcacatcaccttaacatttaatcactccctgatctatcctcaaatgacatttctactttactgcaaatcccctttacactttctttaatcaagccaaactagaattctctctaaatattcagagattttttctttttgcctttttttccacatgttcaaattaaaattttaaattccataggcttctagcaaaaacttaagatgacactaggtgtgaatttcatcccttctaacatctctgtttccaaacttgtctgtcattctggtaggttgcattaataactttagtccttcactgctcaccatatctttgtggtgcccttgcactctgatattgagctagacatatgaccaatttggggcaatggaatgaggcagaggtggcgatgaaatcctgtgccacaagaaatcctgtgcctctgtcatcaccctgagaagaatttgcctgagctttgcctgatgataccaggaggtgaatgggagaaccaaggagcagatccaacatgcagacatgtgatagggctgactgaagcacaggtgcatgcaggagtccagcccaaatcagctgagccctgcagatgcaagagaaataatcggtcatttttatatgccacaggttttgagattgcttgctcaacatcaagtactacaatattatatattctaacctcatttcttgctgtctgagagatgcccctactcctcctcaatgttacagttctgtctttagccctatgtataaccacttcaaggtattactccagggaaaaaaattctctaatatctttaatctccccttctctacttgttatttttccctctacctgcaaatatatgaatctaccccacacaaaacctaaccttctgcactgtgataggaagaattttgagataatcctgatgacttatgctttgtatgatcttctcccatctgagtatggtaggaacctgtgaatataatgaataccaccactgtggttagtttatgttatatgccacagttgaccataagaaaggaagattgtcctcagtgggcctgacctagacagctgatccattaaaagggatggggctttcccttgacagaaaaaaaaaaaaaagatttgaagtgagagagagcatgggacagtctctattgctggctctgaagatggaggggggcacatggcaaggaatgtgggcaacctccaggagctgagagtggcccctgtctgaccccagcaagcaaagagggacctcagtcctccagccacaaagaaccgaattctgacaacaacctgagtgtgttcagaagcagattcttcccagaatctccagaaaggaagacagcccatctaacatcttgattcacacttgtgagaaacgagctctacccaggctcctaccctccagaayggtgagataataaatggctgttggtttaagcctcaaagtggatggtaatgtattatgtac

SEQ ID NO: 711968 - DNA, 607 bp, Homo sapiens
  misc_feature 511: n = A,T,C or G
tccacatccctaattgtaatcttgttaacatggaagaggtcattgagaaagtagagatttaatcatttcatttttttaaaatgcttatgtcatactttaattacattcagacaccctggaggattccttaaatattcaggcatgtgtaaagcaaccaacacaccaacacaccattacatggacaaccacatgttaaatggataactgacacaattattygggtcatatagaacaaattcactttactcctacctgtcattatcaatctcacatcaaagtggaatttggcactttttaaaaaaatctgtgatctgaattacttaagtaatagctttaattttcccttaaaaaatctaaaccaaaaataggaaagtgttgcctgaagatttttcaaataggcattaagtatatttcatgctactggcattatttcttctcagaatgcttctacagtatccaaattattcaaataaatgattgggtttggtagaatttttatgagcccatattntcagatattcagcaacactcatcagccattggtcatgtgcttactaagtgtcagttctcaatctaaaataaataacaaaaaaaggcaaatgtcttg

SEQ ID NO: 711969 - DNA, 668 bp, Homo sapiens
tagtgatttgcacataataggtacccataaatatttcataattctacaattgtggaactgttataagtattcagtcaaatgagaccataatacccttttggtatgctgttctccctttttctcacatttccattcacccccaaccccccaaatttctctaaaatcctaataagtcattttcactgtaacttaccttgttcttcatggaattattagataaaaattagactaatgaatatacattttccttcttttgaataaaaataagccatattcctgacataatgtccatatctgacattcaataaatamttgaggaaagagtggatcaattaatcaatcaatcaattgccctgccaaaatctcagtgaatctagcatgactagcataaagctatggacccctcagatttcgttgtccgtttctgtcttgcgatacctatgaagtagtggtagatgtctcctgattgtatacagtggtcttataaattgaataagagcagtgtattaacagattacatgatgttgcttccttaaagataatgtctttactcactcatggtaacaaaagtgtaattttgactatattaagccatataagtccccaaggggactcatcccaagattaagcactgagtaaatattacaataattgctgctgctacttga

SEQ ID NO: 711970 - DNA, 2895 bp, Homo sapiens
ggagtttcacttttgtcacccaggctggagcgcggtggcttgatctcggctcactgcaacctccgcctctcaggttcaggctattcaactgcctcagcctcctgagtaagctagactacaggcatgttttggagctgggcgccagcagagcccctcttttgtcccggacactctgcatctgatggtaccaaaataggagggcaaagctgggtgcagtggctcatgcctgtaatcccagcactttgggagggcgaggtgcgtggatcacttgaggttaggagttcgagaccagcctggccaacatggtgaatccctgtctctactaaaaatacaaaaattagctcrgcatggtggtgcatgcctgtagtctcagctattcaggaggctgaggcacaagaatggtttgaacccgggaggcagaggttgcagtgagcccagatgttaccactgcactccagcctgggcaacagagtgagactccgtctcaaaataataataataatatttctttaaaatgtttttttctttctccaccatctcttaccacctttaatttgtactatcatttgaagtttatgagaaccctcacctaaatattatccatttaatcctttcaagacgtaagagtagaccactgtttatagaagagaagatttagagaagttttgctacttgtgaaaggtttcagggtgagtagagactctttttcccactggtcacaaaatgaaatcagatactattttataacctgccttattcatgtaacataatcattgagtattttattcacattcccaaatattcttcaagcatgtcattttttatttctttattcttaccgtgatcattttaaatgtgtaatcttgaagttattaaaacataaatatgtgatgtgcacaggaaaagatttgagggtgttcatgctaaagtgtcaccgctagttatggacagctaaatgtggtgtacatgacttttttaaaaacagatttacaatgcatttattacttttgtaacaaaaagtatgacaagtatagaacaaagaattattaattttctatctgctaagagatttgacacaggagattctataacttttaattaattgactaaactgaataaatacgcattgtgtaaaagcactttaaaggactagaacaatgatcatgcaataatctacaagtaagaatgtcattttttaaattggctgcttctggctgggtgcggtaatcctagcactttgggaggcacaggtgggaggattgcttgtggctaggagttggacatcagtctgggcaacatagtgagattccatctctgcaaaaaattagctgagtgtggtggcacataactatagtctcagcttctggggaggctgaagcaggaggatcccttgaccccaggaggtcaaggctgcagtgaactatgattgtgtcactgcacctcagcctgggcaacggagcaagaccttatctcttaaaaaaattgctgcttcatattcctttatttgtatacaacctgattagtactagattattggagatttgttttctctgatttttgtaaatatttatgttatctgcaatcaatagccttgataaatacatttttgaggacatttttgaccatttccttaggaaaaaaatcctataagtgaaattgctgggtcaaaggctatgtacaattgaaaagtatttttaaaaaatatgtgttgctaaattgccttccaaaataattgtacaaatttaaattctcaccagcactgtatgagactgcccatggaaaactttttaatggagcaaggccagttggtctgtagcactttggttgctgtcaatatttaagtcaagtatttcacaatggagtgctttgtgacccagacgcacccatttcgtctttgttatgttgttgcttactttattcccaggtctgctttggattttcagggtccaaggtggtgttgctcaattttttctggagctactttctcccttaactctctctgtgtaaaccttacttatccttctagatgagcttgggtctctctacgtatttatgagacaaagaacacaggttcaccattttccctcagcagttactaagtttccttatacctttgtccaattccaggaattccagttccatagtcacagatatcaggactttcagtgctgaaagggactttggaggtcaccaggcccatcggtccatccacagcagactgacacttgaccaaggatcatcaaatagctggatatggccgggcatggtggcttctgcctgtaatcccagcacttggggaggctgaggtgggtggatcacctgaggtcaggagttcaagactagcctggccaacctggtgaaatcccgtctctactaaaattgcaaaaaaattagctggtatgatggtgggcacctgtaatcccagctactcaggaggctgaggcaggagaattgcttgaacccaggaagcagaggttgcagtgagctaagattgcgccattgcactccagcctgggcaacaagggtgaaactccatctcaaaaaaaaaaaaaagaaaaaagctggatgttcatctctctaggatgtgtctggttccagtgttgggtcattctttttttaaatttatttttaatgtatttttaatttagagacataatcttgctattttgcccaggctggttttgaactcctggactcaaagtgatcctccttccttggcctcccaaagtgctgggattacagacctgagccactgtagctggtcccattgctggatctttcaagctgttatattgagagcaagtctagtttccttagatattaaaaaattatgaagtctttcaaaaacacaaaaatgcagaaaataatacaatacctgtgttcctaccacttgga

SEQ ID NO: 711971 - DNA, 625 bp, Homo sapiens
ttaggaggccgaggcgggtgggtcgtttgagcccagcagctcgagtccagcctgggcaacatggtagaatctcgtctgtacaaaaaagtacaataattagcgggcatggtggtgcaagcctatagttgcagctacatgagaggctaaggtgggaggatcacctgagctcagggaggtcagtgctgcagtgagctgtgatcatgccattgcactccagcctgtgcgacagagtgagaacctgtctaaaaatatatatgtgtttatatatatatatttatataaacattagtgggttttaaaaaaaattaactaactgctagctcctaaaacagtattttgccattagctttggaaasgtttgctcagaaaatgaatttctaagcactcccttcattgcatttattggtcaaactaatggtcctggatggttatctttgaaacttcctaacctgttgggtccccgtcgttaaacttatgccaacagaactaaactcactggatgtgaattgcatcagagatgtaaacatttaaaagcgtattaaggctgggcgcagtggctcactcccgtcatcccagcactttgggaggccgaagcgggcggatcatgaggtcaggagatcgagac

SEQ ID NO: 711972 - DNA, 1104 bp, Homo sapiens
gaaagtagctaccatcctggccctgattagaacttcccactgaaatgccgtcctgcctaaaggtagcacaggctyccattatggtggtggtggggagggggcgggaatatatatatatatatggtaaagcattcggcattcttttaaagtacaactatccttgaaaagggttacatattaaaccatttttaccacagccaaaggggaggagaaagatccaaaagtcctgtggatctgctttaacatcaataaaacagttatccacccttcgtagcttttagtgaaggctacaaaagtatgctttttatggattacacatgtgcacgcaactactttaattactacagaaaaaaacgaggctccttattaaaaaaaaatcagaaacaagtccaacagactctgaggaaatgaagcaagagtgaattctgaaaaggtctaataaacagtatggaaatatccttgtgggattgttcttcagctatgcataaacatgtaattatcatcattactgtgatggggaaaaacacggaccctaattctgaaacaccctggtagcgagagacgggcaggaggggctgctgcgcactcagagcggaggctgaggaggcggcgtccccttgcaaaggactggcagtaagcagatggggacactcgagctgccccgcgacctgggccgagctgcctacaacctgggcccaggtgcctgcaagaattagacctccgataacgttaacacccactttctcactgctctaattgtgtgcatcccggcgcccaggggcttgtgagcagcaggtgcgcgttccaggcagctccagcgacccttaaacctgaccgcgcgcacgtccggcccgagggagcagaacaagaggcacccggaccctcctccggccagcacccaccttcacccagttccgtcagtcgccaccacctcccttcccgcgtccgcagccggcccagctggggagcatgcgcagtggccggagccgggttgcccgcgccccagcaggtagctgtactgcaactgtcggcccaaaccaaccaatcaagagacgtgttattgccgccgaggtggaactatggcaacgggcgaccaatcagaag

SEQ ID NO: 711973 - DNA, 1104 bp, Homo sapiens
gaaagtagctaccatcctggccctgattagaacttcccactgaaatgccgtcctgcctaaaggtagcacaggcttccattatggtggtggtggggagggggcgggaatatatatatatatatggtaaagcattcggcattcttttaaagtacaactatccttgaaaagggttacatattaaaccatttttaccacagccaaaggggaggagaaagatccaaaagtcctgtggatctgctttaacatcaataaaacagttatccacccttcgtagcttttagtgaaggctacaaaagtatgctttttatggattacacatgtgcacgcaactactttaattactacagaaaaaaacgaggctccttattaaaaaaaaatcagaaacaagtccaacagactctgaggaaatgaagcaagagtgaattctgaaaaggtctaataaacagtatggaaatatccttgtgggattgttcttcagctatgcataaacatgtaattatcatcattactgtgatggggaaaaacacggaccctaattctgaaacaccctggtagcgagagacgggcaggaggggctgctgcgcactcagagcggaggctgaggaggcggcgtccccttgcaaaggactggcagtragcagatggggacactcgagctgccccgcgacctgggccgagctgcctacaacctgggcccaggtgcctgcaagaattagacctccgataacgttaacacccactttctcactgctctaattgtgtgcatcccggcgcccaggggcttgtgagcagcaggtgcgcgttccaggcagctccagcgacccttaaacctgaccgcgcgcacgtccggcccgagggagcagaacaagaggcacccggaccctcctccggccagcacccaccttcacccagttccgtcagtcgccaccacctcccttcccgcgtccgcagccggcccagctggggagcatgcgcagtggccggagccgggttgcccgcgccccagcaggtagctgtactgcaactgtcggcccaaaccaaccaatcaagagacgtgttattgccgccgaggtggaactatggcaacgggcgaccaatcagaag

SEQ ID NO: 711974 - DNA, 667 bp, Homo sapiens
ttattttcatatgtatctctgagatagagaaatatttcagtcagtgctgctaaaattgttccttataactcgtttatccttttaggtccttccagaatctctcattggtactgaaactcaaatgggtactttcttcaccatttatttctttagaataagtaataagaatttyataagcttttttatatttcacgtaatttgagactattgaaaatccagttaagtctctctactgtgttgagaggcattgattcaagtacctgtgttactttcctgtgctgccaaaacagatcacctcaaactaagcggcttaaaataatagaacttaagttctcgtgattctggaggccagcactttgaaatcaaggtgtaggctcaattttactccctctggaggccctagggggaatctgttcttgtgggtttcaacttctggtgactggtggcattccttggcttggggccccatcacttcaacctctgccttacagtccttgctgccacctcttctgtctcacatctcactctccctttctcttagaaggatgcttgtcattgggtttagagcccacctggatattccgggatgatctcttcatctcaagatccttaattataactgcaaagagcctttttccaaataagaaaacattcacaggttccaggg

SEQ ID NO: 711975 - DNA, 667 bp, Homo sapiens
ttattttcatatgtatctctgagatagagaaatatttcagtcagtgctgctaaaattgttccttataactcgtttatccttttaggtccttccagaatctctcattggtactgaaactcaaatgggtactttcttcaccatttatttctttagaataagtaataagaattttataagcttttttatatttcacgtaatttgagactattgaaaatccagttaagtctctctactgtgttgagaggcattgattcaagtacctgtgttactttcctgtgctgccaaaacagatcacctcaaactaagcggcttaaaataatagaacttaagttctcgtgattctggaggccagcactttgaaatcaaggtgtaggctcaattttactccctctggaggccctagggggaatcygttcttgtgggtttcaacttctggtgactggtggcattccttggcttggggccccatcacttcaacctctgccttacagtccttgctgccacctcttctgtctcacatctcactctccctttctcttagaaggatgcttgtcattgggtttagagcccacctggatattccgggatgatctcttcatctcaagatccttaattataactgcaaagagcctttttccaaataagaaaacattcacaggttccaggg

SEQ ID NO: 711976 - DNA, 647 bp, Homo sapiens
ggggggccccataagtgtttgttggctgcctccaactctcaaccactggaagctaacattctttctggtttgttcggtttagcaagtgcgtgaagtacctcttgaagattgactctgcggtgctcactcactcacacactgacatgtaatcaaatgttttactgcagttccattatcttttcatcaacacattttgaaaaaaaatgactgacaccaccaagttgattcagttgtggacaaacaatcttcaaagcagagttatctcttcctgatctagctcaatagtttacaatattaacttcataaattaaattacttctgcttcagactgacttttcttgaaagcacatattmttctctttctttttacatactcaatcatgaattaaagtaggtaacacagattgtttgctacaggtcaatttctctataaaactacaaaagggaagatcagaaagaagagggtgaagactgtagattgctaaaataaaagctttgtaaagaaaatcttaaactacttattcctttggctcccaggaaatcatattctcttctctttctaagttattgtggtggaggggttgtttattttcattttaacttttttatttttaaatttgatgcatacataatagttgtacataata

SEQ ID NO: 711977 - DNA, 902 bp, Homo sapiens
gtttttgtcatatatgctgcaaatatttatcttgatttatctcttgccttttatttttcttgcctacgaagaaattgaaacatggcatgactcaatggaaaaagattcagaactcctgcatcggcagggtttccctcatggaaattacaacttagtaaagaaaatgagtcatatacaaacggaaatatagcaagtaatgagaggtaagagagtaaatacgaaataagtagtatcaatagtaatggcgagagttgtctactttgtaaagcttgttccattgctgtgcagttcaggtgagctatttttgtatcatggaggtagtgggtaatattcaccattgaagtgtctgttatgaagtgatgtttacccttgaagcagtgtgaagtttggattggaagatgatttgaagctatgagactatccaagagawtgttgccataatctgggaatgaggagatgaggagcttgattaggatacaacctcagaaccttaatggcaagtgaatcttgaaaatgtagtttccagtcttccagtcctttcatacagatagagagcatactccctgtctcaaggagacctctttaaactgttgtcctaataatcctgtacttactactcacctagaattgatcccactcttcatgcatctgtttctcccctggagtgtgaacttcttgggagtggaaattaccccatttctctttgtctcttcagcaccaaacagagagcctgattcatagtgttcagtaatgactcctgaatacacagatggccctgccagaatcactgatttagtatggggagatcacattgtttatgaacttagagcaaggagccagaggaaggaaagacagcaggatagatcggagatagaggaaacagatgggagataggagagatg

SEQ ID NO: 711978 - DNA, 639 bp, Homo sapiens
aaactttctatcacttggttacaccataagttccttgtctacctcccttttaaaatttttagattgtacccatgcttaggtttttggttcttgtttgattttattttgttattacaagtaattttaatgggttttaattttcgctattgtaagtaatttttaaaaattgttagtaaattttttaaagatcgtacccatgcttaggttttgggttcctgtgtgattttatgttgtaattataagtgatgttttggtgggcagctttgttgaagactgggttttctttcctttgaagtcatttgaaggactaatgaagagtgagactaaactgtaaaactycattttgtcagatagctggaacattagggacatgcttgggtaggtggtgatcttagatattgaaaactaatcagggaaagtagattgagagagaagtggatgggatgtgtttctgaggagcacaaaatgttctacatgcagattagctgtgagaaaaaggcatagcataaactcaacttgtatgatgtttaattttttttttttaaatctgggagaagagacataattataccttctaaactgctgtggagcagggattcttaacctgggctctatggatgagctttagggaaatcttga

SEQ ID NO: 711979 - DNA, 2538 bp, Homo sapiens
cttcccaatttgtctttagtctgaagcaggccatgtcccattatatgctcttggcatttttatttcccctgttggagcccttatcacaattgtaattaattggtcataggattgtctgtgcttttctaccctgaaagccatgacagtgaagactttgttctcttttgaatccctggggcctaggtcgtaatagatgcccagtaagtatttaccgagtggacacctgaatcaattaggtgtgcctgacattcaggttatggagccctgatctcacccactcttaaagtctcattctgtgaaccaacacctcagctctcctggtcttcagctttatggggaggactttcagcaggggcttcacatccctggtctagctctgtaacccacctgaactcctagccttaccatgtgacccagttgtagggtaattactctctctttagtttgcagttagttgaactgtgtcagcatgagttgtagacaatgctaagaccaccttccattctagacctgctgtgtgaccctaagcaagtcacctaacagattgaaccccagccttttataagtaaacgcaatctcatctctgctggcctcacatggtagttgtgggaatccaatctgaaaatgaggtcaagtcatttcataaagctcttcttcaaccattagcaatggaggtacattcacaggattgaaataagacttcaaccagcttttttgccatggctcagaaatttwaaaaaaacaggtttattgagatataattaacagatcatatagttcaccattttaaagtgtacagcccagtggtttttagtatattcacggagttgtgcagacatcaccataatcaaatttcaaacattttcattgtcttcaaaagaaacctcatatctgttagtagttacatcccatttctccttcaaccttcccagcctgaggcaaacactagtctactttctgtctctaggtttcatataaatggaattattcaatatgtggccttttgggtctggtttctttcagttagcagaatgttttcaaagttcatccatgctgtggtgtggattccttcattccttttatttccaaattatattgcattgtatggatataccacatcttgtttattcattttttggttgatggacattcgacttgtttccactttttggctattatgattaatgctgctataaacattcatctacaagtttttgtgtggacgtacgttttcgtttcccttgagtggaattgctgggtcatatggtaactccatgtttaacaccatggctcaggaatttgctggctggagaatagaaaagtgaggctcttctggatggcaaggagaatttgagtctgtgtgtgtgtgtgtgtgtgttgtacacagatgtgtgcaggagcagcgctgctggggtaggagcagcaacttttgactatcatattcaaagtaattcttggccaaattcctggtaactctgaaatttctgcccacctactcctttgtctgaatgttgcccctattgggtggtcgtcctcagacagctcttcagtcaattagaagactttggcaaaaatcgacaaaagcattctggaagaatcaattagttatatgaaatgtacaatagagagtattataaatgttattattagttgtcacttgtgttttacaccttttatatctacaacatttataataaatgaatggacatatacacgtatacacattttttcccccaaagagttgttgtggacatgtgcctgcacacactgggtctgcagtgtcagaggagcagtgccaccgggtcgtctgtcagtgttctgagcaactggactaggagctctggtggaggtgggagcagagaaggaaggtgagtgtttaaatttaccaggacaacgctgggtaactgacaaaatattaactgtcatccttccatacccttgtccttcccctctgtagcaatccttccagggcctctgagaagggcctgttcctcacttaggacacctccttttaggactagcttcttctggcctcacatttccccaatcactctgaatcgcccccacttcatgttaaggggtcccatttaagtcaactcctgtgtccacccaggtctgagttccaagacgggatgtttgtgctagtctttttcactgttgtctccctgttgcacaacgtactctgctcgtaccctgtcctgatttcctatcctggagtcctataccctgtgtccagcaaggtatccatgacaaacacacatcaggatggccccggtgtgcttcccttttggtaagaatggcccttggcaggagaataatctctggacagacatcagaaagatattcttgtgtttccatgctttggttgcacgtgctttccttgcattgccttttattgccagtgcagatgcgaagagcctgctggcatcactgggagtcagctgccatctctgcagtaggtgcctcctgagtggcggaatgttagttcccagttgatgacagtctctgataatacttttagcgtttttcttctgagtc

SEQ ID NO: 711980 - DNA, 2538 bp, Homo sapiens
cttcccaatttgtctttagtctgaagcaggccatgtcccattatatgctcttggcatttttatttcccctgttggagcccttatcacaattgtaattaattggtcataggattgtctgtgcttttctaccctgaaagccatgacagtgaagactttgttctcttttgaatccctggggcctaggtcgtaatagatgcccagtaagtatttaccgagtggacacctgaatcaattaggtgtgcctgacattcaggttatggagccctgatctcacccactcttaaagtctcattctgtgaaccaacacctcagctctcctggtcttcagctttatggggaggactttcagcaggggcttcacatccctggtctagctctgtaacccacctgaactcctagccttaccatgtgacccagttgtagggtaattactctctctttagtttgcagttagttgaactgtgtcagcatgagttgtagacaatgctaagaccaccttccattctagacctgctgtgtgaccctaagcaagtcacctaacagattgaaccccagccttttataagtaaacgcaatctcatctctgctggcctcacatggtagttgtgggaatccaatctgaaaatgaggtcaagtcatttcataaagctcttcttcaaccattagcaatggaggtacattcacaggattgaaataagacttcaaccagcttttttgccatggctcagaaatttaaaaaaaacaggtttattgagatataattaacagatcatatagttcaccattttaaagtgtacagcccagtggtttttagtatattcacggagttgtgcagacatcaccataatcaaatttcaaacattttcattgtcttcaaaagaaacctcatatctgttagtagttacatcccatttctccttcaaccttcccagcctgaggcaaacactagtctactttctgtctctaggtttcatataaatggaattattcaatatgtggccttttgggtctggtttctttcagttagcagaatgttttcaaagttcatccatgctgtggtgtggattccttcattccttttatttccaaattatattgcattgtatggatataccacatcttgtttattcattttttggttgatggacattcgacttgtttccactttttggctattatgattaatgctgctataaacattcatctacaagtttttgtgtggacgtacgttttcgtttcccttgagtggaattgctgggtcatatggtaactccatgtttaacaccatggctcaggaatttgctggctggagaatagaaaagtgaggctcttctggatggcaaggagaatttgwgtctgtgtgtgtgtgtgtgtgtgttgtacacagatgtgtgcaggagcagcgctgctggggtaggagcagcaacttttgactatcatattcaaagtaattcttggccaaattcctggtaactctgaaatttctgcccacctactcctttgtctgaatgttgcccctattgggtggtcgtcctcagacagctcttcagtcaattagaagactttggcaaaaatcgacaaaagcattctggaagaatcaattagttatatgaaatgtacaatagagagtattataaatgttattattagttgtcacttgtgttttacaccttttatatctacaacatttataataaatgaatggacatatacacgtatacacattttttcccccaaagagttgttgtggacatgtgcctgcacacactgggtctgcagtgtcagaggagcagtgccaccgggtcgtctgtcagtgttctgagcaactggactaggagctctggtggaggtgggagcagagaaggaaggtgagtgtttaaatttaccaggacaacgctgggtaactgacaaaatattaactgtcatccttccatacccttgtccttcccctctgtagcaatccttccagggcctctgagaagggcctgttcctcacttaggacacctccttttaggactagcttcttctggcctcacatttccccaatcactctgaatcgcccccacttcatgttaaggggtcccatttaagtcaactcctgtgtccacccaggtctgagttccaagacgggatgtttgtgctagtctttttcactgttgtctccctgttgcacaacgtactctgctcgtaccctgtcctgatttcctatcctggagtcctataccctgtgtccagcaaggtatccatgacaaacacacatcaggatggccccggtgtgcttcccttttggtaagaatggcccttggcaggagaataatctctggacagacatcagaaagatattcttgtgtttccatgctttggttgcacgtgctttccttgcattgccttttattgccagtgcagatgcgaagagcctgctggcatcactgggagtcagctgccatctctgcagtaggtgcctcctgagtggcggaatgttagttcccagttgatgacagtctctgataatacttttagcgtttttcttctgagtc

SEQ ID NO: 711981 - DNA, 843 bp, Homo sapiens
gaaatgaaattccttaacctgtttaagtattgaaaactattaaagaattggtatgttgcattgcattttctttataatgcttcaaagtgccagaacaatcatttatacttatgatgtggctattcaagccaaacttcaaagcaaaaacattttctcattctcatgcttgtttttcattcttggctctgtcttctaaaattgtgagtttgctttgtaattctggtctacttgtctcatagcaaccataaaagcacacaggtaaatggctattctatgattaaataaccttttaaagtttctccatatattgctgtaattcaacttayaatgtgagctacagaatttgacatttattatggtcatccgtactttggcaaaagtttttttcagtaatattttgtttccttaataaaaagtaatctgaagcaaaaaaaagttaacatttgatattagtgggaacacagatgataattttattttgtaccttttcaattagttttaaaggttttattatttaaaatttcaaaaaccttaaatatcaacaaaaaaagaataatgtttaaaagaataatacctttcatccattgtgggaatccctcactagagttttatacagtgacagtacttctaggtcataaataaaataaaatttccattattcaaacataaggaactggaattgtcaattaagttaaaatttggggacattaaaattttagatgaaagaagcaatatgtgttatgaatcactacagatttcagctttattctcctgtgattatgacatctacaaattatgtaataataaaagctgaaaaagataacctggaaacactgtaagatc

SEQ ID NO: 711982 - DNA, 1501 bp, Homo sapiens
ttttttcacattttatagtgtagttgttatattctagacatggtcataagctgacttttaaataaagtgtgatatgtctatggcaagaaaacagcatttcaatagatgaatttaagccaaaacatttttagggggtccaaaataaaagacttcatcaattgaactgaccagttcaagagctttaatttttttttaattcccaagtcacttttgtgtgtaaagacatctataacctacctgaccttgctccattaatgatgttcagactcctacacactggaaaagcagcaagtcactagggaaaaatgctctgcaagtgcagccattgttctcgcacttctcaactcccaggtgcatgtacatactatttaaatagagtcttatccagggtgccacttactataaatggctttctagttaggcagagatagcagacccacagctaagctccttaaaccggaataatcacagtcagatcttatcacaggatatgacttgaaattttcacatggactagccaattctaagagtttcataaaattaaatttcttatttaaaatccattatttcgtagaagccctcgatgtttcttgaacataaatttattttagcttgaattactatttcttgagcctccttaatctaaggtggaagaaacaaaacagattagtcaggtcttattgcctataagaatgtgtctcatagttaacctactgcttctagtaataaggatgacattttagagaaaatagatttacttttctatcattgtgtgtcattgatatgaattgattctgtttgttattcagtatgatcaatcagttagtacttcttaattatcaagtctgattaagtttttgcaaatattttaatgtgaatggtattcactcatcatgtttctgatgtgatgtggtgaattatcaaatgtgtattaattggtaagtttaagtaagtgaatttattaagtattacctaaaccaataattaatatccttctccagattggaaacaatgaattatctctcgttggcttaatatctttcaaagattcattgtgtcaacctgagtcctccatgaaggagacactaaaacagatttagatttacaggagatttattaaaaggtaacacctgtgaaagatagaggaggaagcggtataaacaggaaaagctttcaaacaacaatgataatctgaygacagtgaaagaagtcagggagaaagaaagatcaggaagaactatcctcacagtgctgtgcaacacagagaaactttcagtcatactaatggcaagctctagcctaaaaattgccccacaggagtcttaccttgagcataatggccagaccctgtcactccatgtacacttgtggtaggcagataatgatcccccaaatatactcacatcctaattctcaaaacttctgaacatgtcatgttacatagtaaaggaaaattaaaattgctgttggaattaaagattctaatcaggtgacctaaaaa

SEQ ID NO: 711983 - DNA, 598 bp, Homo sapiens
catatataggaaatccaaaaagaaacattgaacgtgctttccttggcaccagcagggaaggtcaaaccatgtaaactcaggcagtaggcaagagaaactcttacccaatcctaacccctaaacacaataaataccaaagctacaagcccttcccattgcctaagccatttaaggccagcaatggctgctttcctctcccaagaaaacatatagaaatgccaaaacataattattcaaactcttaagttagtctccaccatcaaccaggcattgtccagttaccctgaggccacctgaaagaggaaaaaaatgtagaaacattaatgttcccttttttaraaaagtttaaaaatgttcacttattaaatattctttgggttatatcatagacagggctctctatttttgaatgtctacttaatgcatcctagaatacagtaattacttagattagaaggattcaaaatcagacaggatctagtaagtaacagcatgagaaacaggtcattagaatttcagatgaaatgctaggaaaatatttgacttagcacaagatctaatctggaatttgtaaatactgatgcttttaaaatttgag

SEQ ID NO: 711984 - DNA, 598 bp, Homo sapiens
catatataggaaatccaaaaagaaacattgaacgtgctttccttggcaccagcagggaaggtcaaaccatgtaaactcaggcagtaggcaagagaaactcttacccaatcctaacccctaaacacaataaataccaaagctacaagcccttcccattgcctaagccatttaaggccagcaatggctgctttcctctcccaagaaaacatatagaaatgccaaaacataattattcaaactcttaagttagtctccaccatcaaccaggcattgtccagttaccctgaggccacctgaaagaggaaaaaaatgtagaaacattaatgttcccttttttaaaaaagtttaaaaatgttcacttattaaatattckttgggttatatcatagacagggctctctatttttgaatgtctacttaatgcatcctagaatacagtaattacttagattagaaggattcaaaatcagacaggatctagtaagtaacagcatgagaaacaggtcattagaatttcagatgaaatgctaggaaaatatttgacttagcacaagatctaatctggaatttgtaaatactgatgcttttaaaatttgag

SEQ ID NO: 711985 - DNA, 613 bp, Homo sapiens
tgaaagacatcaaaactatgcttagtgttcattagccatgttgcccaggctggtcttgaactcctgggctcaagtgatccgcatgcttcagcctcccaaagtgctgggattacaggcatgagccactgcacctggcctagatttgagttttttatgctaagtacacaataacagtgaaaatgaagagtacactttttaaaaagatagcttcatgtagcctagaaagtaacaaaattaagatcctcagagcaacaactgtagcgacaagttaaaagttatcctatgtatagtataaaggaagatcattaataatttctaactggtattaatcatattgwtaaataattcagaataacctcttccactaaagattctttatagaaatcaagtaatgtacttacatatagtaaatcaaatcttgaggctaaatctcacccacagttgaagaacatggtatataaattggtttggaaggctaagtgccctggctatacaaatatacaacagcatatcccttaggagcaccactatgactaatctaaaagttatgcaattcctcctgttcccttaaatggataacactaaacagttagcttttattaacgccttaggg

SEQ ID NO: 711986 - DNA, 623 bp, Homo sapiens
aagagattccagctcagttgtcccacttctcccgggactcggctggcagccacagcctcctgttgtcttggcaaacacgtggacagtagggcagacaacttcataactgccactacaggtagctagggaggcaattcctgctggagctgccagtccagcagtcctactactatgtgaactcagacagagggcacaacctcctgttgtcccaggaaacatcacccagagagcagggtgggcaaccccacccacccctgcaactagtagccagrcaggcaactccttctagagcttccagctcagtgatccctcttctgccttaatgcagccagtgaggaaagcctcccattggcccgggaaacacccagacagcagggtgagttaccctacccattctcactgctagtagccaggcaggcaattctggctaaagtttctagtccagcagtcctgtttctgtgtgaactcagccagtgggtacagcctcctgttgtcctggagagcactgggatggcagagcaggtgactagatctacccctgctactggttacatgtgggaaatacctgctagagctttcaggccagtggtcccacttctgtctaaacttagccagtgtgctca

SEQ ID NO: 711987 - DNA, 654 bp, Homo sapiens
agctcagtggaccttacaaataaggtctgccattttctgtagagtataaaatgttctctgatctgggcccaaacaaaatcatacagagttgtattattgagaaagaaaatgaaacaccaaaattktatatggatcaagatcaatgggtcctgaaaacagcttttcagagtatttaattagtttgataggaaccatccacaattctctaaatttccatcactgaggaaaaaatacaatattcctttgtttaccatggtctttgaaagcagaacaaagagagaatccacttagattgccttaatacctttattttccaacattataaaagacaatctcatttgtacccaaaataatagtggctggcacatgtgcactgtttgccaggcattcttctaagcttatatatatattggcttgtttaaggaattcagcttagccagaccataagaaaattggaatctgaagtcttcatttgtatcttccaggattgcatggtattttaaatttctgcttctccttagttcctgagaactggaaaattaggatgcacagactccttttctttgtatcttttaggggttgcataatatcgctcatgtgtgttacacattaattttcctcctaaccctttcctgtttgcacatggccagagat

SEQ ID NO: 711988 - DNA, 654 bp, Homo sapiens
agctcagtggaccttacaaataaggtctgccattttctgtagagtataaaatgttctctgatctgggcccaaacaaaatcatacagagttgtattattgagaaagaaaatgaaacaccaaaattttatatggatsaagatcaatgggtcctgaaaacagcttttcagagtatttaattagtttgataggaaccatccacaattctctaaatttccatcactgaggaaaaaatacaatattcctttgtttaccatggtctttgaaagcagaacaaagagagaatccacttagattgccttaatacctttattttccaacattataaaagacaatctcatttgtacccaaaataatagtggctggcacatgtgcactgtttgccaggcattcttctaagcttatatatatattggcttgtttaaggaattcagcttagccagaccataagaaaattggaatctgaagtcttcatttgtatcttccaggattgcatggtattttaaatttctgcttctccttagttcctgagaactggaaaattaggatgcacagactccttttctttgtatcttttaggggttgcataatatcgctcatgtgtgttacacattaattttcctcctaaccctttcctgtttgcacatggccagagat

SEQ ID NO: 711989 - DNA, 971 bp, Homo sapiens
ctattgagatagacttgattgaaatagggtaatagaaataagattttcatcattcttactgaaaatccactgtagagaatctttaaattgttggccaaagggcttgctgacactctttgcttcctgatccagtttagaccttaggaaagccttcctaaagaaaagtttaggtctagagtaggaacacttatccaggatggctgtctcatcctagtctggcactgaaagaaaaaaagggaaaaagaaatcctagtgttgcaaacttttaatagatcaactccatcagcttgagaaacaggaccaatgtgtttccactaagacgagttaactcattctccattgtgaggagcaaagggcttacaaaaggccaaaagttccctctggtgaaggtcccttcacagggaaacctgaaaccaaggaaaggatgttctctttgcccccaacaccaaaccagcatgctgtaatggttctccttaaaaaggttttaaaagcactctcaagtctgccactgttgtagagcaactagcccacatctctgcttttcttcagacaacataccttaaaacagttagaaagtcttccttggaagayttgtagatactcacatctctacttccattccttagcatgctccaatccaggttttctctccctgactattccactgaaactgctctcaacaaggttgtcaattgtcttgttcaggcacatacagcatcaattctctgtcctcttcttgaaccctcagcagtcgtggagtgctccttttttcctgagattttcttcaccacttttccaagttacactctgactctctgtctcttaatctctcttgctcactcacttttctttccatccttgagcatttctgtctttctatctcatcctttgttacataaacaggtcaaagatttccctgttggaaataagagcttggagtcgcaaggaaaatgagcactcaaacaaagaat

SEQ ID NO: 711990 - DNA, 636 bp, Homo sapiens
aagtacacttgaaaagatttatgtggagtttggtatttctctatgtctgttcatttgttyctcagataactgagcacattctgcattcaggcaaaatttcaggctttaggaggaaaaacaccatctcctgctttacaaagcttccctactaatgaggaagacaggcaagaaacaagaaaacacataaataaataaacacagaactgtaagacaaaacaaagtgtgtgattgggcaaagactcctttgaggtcttcacatgtgaactgaggttggccaggcaagccggactgagctgcgggggaacttggcagcctgagcattccaagtaacagagccgcagtgcctctggagcaccgctgtgagggaggagagaagggtgggagatgaggctggagggctagatggcgtagggccttggaggcctcattaaggtaccctgtcctaagggtaatgagaggcccatagaaaatttaaatcaaggagtggcatgatataattttttattccaaaaatattattcatactgctctatttgtataatattgtgggggcagagggacaaaagtgaatgcagacaggcaaattaagaccttttaattgcccaggaaagatgatagtggtatggactatggagt

SEQ ID NO: 711991 - DNA, 2536 bp, Homo sapiens
tgccctatattatttctcataggagtacaggttagagactgtatctgcattgtttcaggattctaactattttgagaatacagtgaaattattttcttaagttgtattagtcagggttctccagagaaacagaaacaatagaaaatacatagaatgatatttattataaggtattggctcatgcaattacagaggctgaaaagttccacaatctgtggtctacaaaccagagaccaaggaaaggtggtggtgtggttccaatcccagtccaaaggcctgacaactgtaagtgtgataatgtaagtgtcagtccaagggcaggagaagagtgatgccatctcagctcaagcagtcaggcagagagagagttcaaccttcctctagacttttgttccattggggtcctccatggatgggatgatgtctgctgacactggggagggccatctgctttactcagtccaccaattcaaatgctaatctcttccagaaacatgctcacagacacatccatacattctgtttaaccagggatctgagcagcccatggcccagtcaaattgacacataaaattaactatcatagaaggtcacatgatctaatggaaattagttctcagatagagatgttccacatgtaactcatctatattacacgatgcactcttatcctatttgaaatgtctccaatgatcctgagttgcactgtagggaaagaatggttggtacttgattgtggcagtgaagctattacagagctcctcaccaactcacattgttacaggaccaccaggttcaaatgcctgctgtacaggaacagaccatcagggtttgcagcagagaaagagcttaataatcgcaggttggtcaagtgsggatgtgggaggagatcttcaaatccatctaaccaaggagttctgggatgggatttttaagggggtcatggatggagaggtactggaaaattggggtctttgattggttggggcagggggatgaaatcatcatcttatggaaaccgcattctttgatgagtcagctccttgtgagaccagctagcatcagtgggttccgtcacatcggctgagtctgtagtttcatcagtatgcaggacctgaaggaacaatctcaaatggaaaacttaacgcttgaccatgctcaaagttgttagataacaactagagcagttaagggagctataatcttgtgactgggtctgtatgattctggggcaatagggaccaaacaactgtgaggaaggggtcagagagcagctgaccccatgacgaatgctgatgtgctgcaacctgggtttatttttatttctcctcatccctgtttcctggttaattttaaaaagtttataggaatggtttcaacattctccagggaaaatgtccttagaccacgtggcccacacatctgtcctgcgtggactggcagagcccagctgctgtccccagcctaacttcagggggaaggcatgctgtgtgcttgctgggcatttctcaccttagccacaggggattggaagacacaagacgagccagctgctacaaataaacccagccttgggacccactgctggagcagtgctttccttgcttgcatcactggcaggtgcagttctagtggctctcttgtgtggctcttctccaagcaatgtttaagggtcccatgcagctccatatttcattttcccaaacccagaaaacttcatttctataaatgtgattgagagaaagagagggagagagagaagaaagcgtaactgttcttgacatccatgggcattttccactggtaagaatgagtgatatgactccacccagtgccagggctggaaaatggagaggagcactgggccattaggtgagaaccagtggtctcttttacattacctagtgctgcattttagaattgtgggcaaaggaggcaaaacatgaaagttcatttcttgtaggttatcttcaagttgaaaattattcctccaattcctatttaattttttaaatttatgtagatttttggagacaaggtcttgtctgtctcccaggctggagtgcagtggtataatcatggctcactgcagctcaacatctcaggttcaagccattctcccacctcaacctcccaagtagctgggagtaaaggcaggccaccactcctggctaatttttttcatttttttgtagagacaaggtctcactatattgcccagactggtttcaaactcctgggcttaagtaatcatcctgccctggggcctcccaaagtgttagtgttaccggcatgagccactttgactggcccacattcctattttaaattgctgagtggaaaacatcactctataggtgatacctcacaattaaaataagaatcataaagaactcctcactaattgatatcccaagtctagtacgtcacaaaagtgcccaaaatgtacattcaaaatcacatgctcttccacttactgttgaataaaaaaaaatctcttcaacacagtaatagaagggcattatatagaaaaaat

SEQ ID NO: 711992 - DNA, 604 bp, Homo sapiens
catttaattttagttataattgagctgtttagacaaacaaaaaaccctgttgtgtaaatgagcttgaatttagttatgttgaatagaaattaatgattcataatacttttttgttactcaaaataacctcaagaatttcagtataataatcacaagatccttgttatcgaaattacatatggaatcattagttatattgacaataaatggtaaataatttcaatcttcttmttattattttatgaccaatttttttctgataatataattacaactaacttttgaatttttcagtacacaataacatatttatcctttttaaaaatttatttattggccaggcacagtggctcccacctgtattccagcactttgggagacagagtggggcagattgctttgagctcaagagttcgagactagcctgggcaacgtggtgaaatgtcatctctactaaaaataccaaaatgagttgggcatggggtgtcacatgcctgtagtcctagttacttggaaggctgaagtgggagaattgcttgagcctgggaggtagaggttgcagtgacctgagattgggccactacactctatcctgggtaacaga

SEQ ID NO: 711993 - DNA, 604 bp, Homo sapiens
catttaattttagttataattgagctgtttagacaaacaaaaaaccctgttgtgtaaatgagcttgaatttagttatgttgaatagaaattaatgattcataatacttttttgttactcaaaataacctcaagaatttcagtataataatcacaagatccttgttatcgaaattacatatggaatcattagttatattgacaataaatggtaaataatttcaatcttcttcttattattttatgaccaatttttttctgataatataattacaactaacttttgaatttttcagtacacaataacatatttatcctttttaaaaatttatttattggccaggcacagtggctcmcacctgtattccagcactttgggagacagagtggggcagattgctttgagctcaagagttcgagactagcctgggcaacgtggtgaaatgtcatctctactaaaaataccaaaatgagttgggcatggggtgtcacatgcctgtagtcctagttacttggaaggctgaagtgggagaattgcttgagcctgggaggtagaggttgcagtgacctgagattgggccactacactctatcctgggtaacaga

SEQ ID NO: 711994 - DNA, 1334 bp, Homo sapiens
gaatttatgtagacctataggaagaactagaaatatttgtttgtattcagactcttaggggcgatgagaaagttcattagtgaaaaaagctagaacacaaaaatttcaccttgtaagtatctgcggaaatatttctctttaatggttttcttatgttgctaagaaggatcaacttttaacatttccctttgtgtagtttcttgtcagatctgtgtacacgcacctaccaaagatagggtgggaatttgcattttttatcaatcccggagagccgataagtttagaaaaagaaatwtaaacttacttttttttagaatcaagaactaacttactagtgtttcgctgtacaaaatttacagttaattgaaacttggttttgccttctgaactgtttgcaacccaaattgtctgctcttatttgttttacttaaattgtattgaatactaatatctaacaaagttgtagccctaagtggttccaaaatttcattaagttactgagaagtggatcttctctgcaaatgtattgtggtgtatatgatctcttttcttccccttctatggttccagggactcttcatagaaagtttggaactattttctgttacgtggtagtggtagaaatttggatggaggaagttcacagggttaaaaaaataaattgttgataataacaaaatagtttcaaggcttcttttaattctcatattttgtgattttccttcacatcagacattgcataaagtatgttaaaacaaggtcccaacttttgagtttcatttcaattagacagtaaactattgtctaatcactaggaaatattttgtgagtgtttcattgcatagggtgctggaatagatgctgattagagagaactgcacagactatgttcctgtcctcaggttatttataatagcatgtgagatgaaaacttaaaaaaggtcaaaacacagaattagaggaaaaggtgagtaaagtatttagcattttacttctatttcagtaaaatgtctcttgggagccttgggaggcaggatagaatgattaaaaatgttcaaagaacaaaccttcatgtcaaattatccacctgaaaagctggaattcataagcgtagacctcctgtaagatacagcaaagaatcagcctttctctacccctagactccctacgtcttgtttaagcctggatcatctcggtttggattgcagaaaaccaatggaaattgttagagctcctccttattgatcttccttgcacagccatatagataatatggttgagatttagaagaaaaaagaaggtccacgtgactgaaaaaaaaaaaaaactgtgtt

SEQ ID NO: 711995 - DNA, 667 bp, Homo sapiens
aaaatattgcggggaagtggttaaaagctgccagcttttcatttttccaagtaaggagatggagaaagatattaccgacaattgttatttcgtaaaagggcatttaaacacttcaattgtgtgaagggtgatcctagaattttaaaacattgggtacatattggttctatgaaaaagttactacattgttctaatttttttcccatttcactgaggattggggtaaacttcactgatccacagtgaagagacaggtccgggctcagatgggcatttgggagcctctggcctggaggaaccagtcactcaagttctttcctctctctttgtctctctttttagtcctcttccctttcttcttctctttcttcttcctttctcacctcttacatacagacacacttagacacactgaggcacatttcaaagctcccgagagaagcagaccatgyatcagagttagacctctggtggggaagaaagacaacctctcctgttctgagcactgctttcccaactctaaaaagaaaacgagaagggggtggaggtgaaggggaggagaatcttccctaccttcccatcagccttctttattatatctgttcaaagtgaaaaaaaatggttttaaactctcagtgttagtttatgacccctattaatcacatgt

SEQ ID NO: 711996 - DNA, 1521 bp, Homo sapiens
  misc_feature 831, 832, 833, 834, 835, 836, 837, 838, 839, 840, 841, 842,843, 844, 845, 846, 847, 848, 849, 850, 851, 852, 853, 854,855, 856, 857, 858, 859, 860, 861, 862, 863, 864, 865, 866,867, 868, 869, 870, 871, 872, 873, 874, 875, 876, 877: n = A,T,C or G
  misc_feature 878, 879, 880, 881, 882, 883, 884, 885, 886, 887, 888, 889,890, 891, 892, 893, 894, 895, 896, 897, 898, 899, 900, 901,902, 903, 904, 905, 906, 907, 908, 909, 910, 911, 912, 913,914, 915, 916, 917, 918, 919, 920, 921, 922, 923, 924: n = A,T,C or G
  misc_feature 925, 926, 927, 928, 929, 930: n = A,T,C or G
agcttcatgattccctgactcagagatgccagagattcctggccgagcagtctgcagccgggatacatgcacctctagaaggcatccaggcctcacctctttcatgtgcagctttttctggacaggatatgatttcccacctcccttgtggaacgtacattttggagtgactacctgccaatataaggagtagaaacttattttaataaaaagcaacataatctgtgaatagacatagacattcaatgttaagcaatgcaaggaaggagaaagtgtctgtactgggagtcaagagacctgggctctagcctgattctgccacaaccaactgtgggacatcttctctgggccttggttctttatttgcaaaataaaacttggcaggtcatctttgtggttccctccagctctgataattaatgagtataaatttgaggaaataaaaaggcaaagtagaatatactattatgttaagatgttattattctctcaagatgagaattttatattggaaaagaacctggtttttacgtaatatcagaaaggaggctgagtgcagaggacatttcccaggcctactagaagatgtattcttgactcttgcttctgctgctgacctgcctttctcactctggacctcaatttctccatccttaaaattgattcactcaacctctttctacagctaattccagagaaaatttgctagacagatgccaatgatatagcagtgaactggatagacagagtcctcatgagaaagacaaagaataaacatgttaatcaacatgtattagggttaaagcaaagtatagagcataatggtaggcnnnnnnnnnnnnnnnnnnnnnnnnnnnnnnnnnnnnnnnnnnnnnnnnnnnnnnnnnnnnnnnnnnnnnnnnnnnnnnnnnnnnnnnnnnnnnnnnnnnnctcccgggttcaagtgattctcctgcttcagcctcccgagcagctgggaatacaggcacgccctgctaatttttttattttttatttttagtaaagacagggtttcaccgtgttagccaggatggtctcaatctcctgactttgtgatctgcccacctcggcctcccaaagtgctggtattacaagcgtgagccaccacgcccaaccaggagcccattgctaggaagagcctccatggaatgccggcagtgaacagcatctcctctgaactgccygagcatcaccattgcactgtgtactccgggctgtattcaccatcacccaagggtggccagataatctgtctgccacagcatcttcaagatttgagccatttcctctgtgaaggtttcctcactacaacactgcccgcagctgaaactaaacattcctcccaccaagctcttacggcagcatggtttataaaagatacttgacttcttgtcccaactataagcacttcacatttgttattcacctgtatatccctaggacagaacccttatggtcactaaataagcattcgtggaatgagtctctttctcaaatcca

SEQ ID NO: 711997 - DNA, 594 bp, Homo sapiens
ctttattagttattcagtgacatttcttaagtttgcctgacaactagagaagcactatctagatgttccataaatcaactgaatcataatgttgtacgaataatactctttggcaagggcccgaaatagagtaagagtaggaactttgacgggagaaataaaaagtcccaaatttcacattaactgagaatccagttagcagttatccaaaaataagaaataaagtgcctyattatgattctacaaaattagaaaaagccaaatgtgagatgttaacagtttttagagtctgaatcccagagatgtcaaagtgatctcttggactcctggccgtgctgaccatgaccctgacagtgactatgaccatggccctccatttgcatgggatgtgcctgcccagggctgcccaagccccactgctaatagaagtgctaggttgttttgttccccaagatgccctttgtggaattagcaagaatccatttaactagttggctcatttgtttgttttcaagaatctgtaaccaactcttttctgaagagactgtgctccacttacacactccttgttgatagcacagacatttactaaga

SEQ ID NO: 711998 - DNA, 594 bp, Homo sapiens
ctttattagttattcagtgacatttcttaagtttgcctgacaactagagaagcactatctagatgttccataaatcaactgaatcataatgttgtacgaataatactctttggcaagggcccgaaatagagtaagagtaggaactttgacgggagaaataaaaagtcccaaatttcacattaactgagaatccagttagcagttatccaaaaataagaaataaagtgcctcattatgattctacaaaattagaaaaagccaaatgtgagatgttaacagtttttagagtctgaatcccagagatgtcaaagtgatctcttggactcctggccgtgctgaccatgaccctgacartgactatgaccatggccctccatttgcatgggatgtgcctgcccagggctgcccaagccccactgctaatagaagtgctaggttgttttgttccccaagatgccctttgtggaattagcaagaatccatttaactagttggctcatttgtttgttttcaagaatctgtaaccaactcttttctgaagagactgtgctccacttacacactccttgttgatagcacagacatttactaaga

SEQ ID NO: 711999 - DNA, 1274 bp, Homo sapiens
gcttgtacatttcctttaagtgcttctctgactcatctataaatcatcaggaattttttcatcagctagcatggaaagtcttccaacgtaaacaccatgccttccacaktttgtgtgcctcccatgatgtgtggcacgacactaagcacacagtgatgctcaataaatgtttatgaagtctaattgagaaaatcagaaagctgttttttgatttatttgtagtgtagctgaacttctttctggttttttttttttttttttttttttgagaccaagtctcactctgtcgcccaggctggagtgcagtggctcagtctctgctcactgcaacctccagctcccaggttcaagtgattctcgtgcctcagcctcctgagtagctgggattacaggcgcccaccaacacgcccagctaatttttgtatatttagtagagacggggtttcgccatattggccaggctggtctcaagctcctgacctcaagtgctctgcccgccttggcctcccaaactgctgggattataggcgtgagccaccacacctggcctctgtagctgaatttcaacagtgttttctcgctgctgtagctgtagaagcagcatgaccagcaagaacctgggatttggagtcacatcgatccatgtccaagccgtagttctgccagtttactctatcatgaaacatttatggagcaattgctgtgtgaagatgtggagctggctgatagacaaataaataagattattgctcttgcctttaagaagtttggggtctaggaaatatattacttaatttctctcaaactcaatttcttcaactgaaaatgagaataactatttcattggattgttgtaggtacttcaataattatttgtttttccccttttccgctcttcttatttcttaggttaataagttgaattcttttttttttttttttgagaccgaatctcgctctgtcacccaggctagagtgcagtggcacaatctcagctcactgcaagctccacctcccaggttcatgccattctcttgcctcagcctcccgagtagctgggactacaggaacccaccaccacgcctggctaattttttgtattttttattagaaacggtgtttcaccatgttagccaagatagtctcaatctcctgacgtcgtgatccacccgcctcggcctcccaaagtgctgggattacaggcgtgagccactgcgcccggccaataagttgaattcttaacagttctatatttttatgctttaaatgactct

SEQ ID NO: 712000 - DNA, 633 bp, Homo sapiens
ttcaacttcttttctttcaccaccttcccttttcccttagcttgtaattagccatttttcctcatagttttgaagtctccttatttgaaattcatcattgagttagtcctgtgggagttactctcaattacaaattgaagactaattgtgccgcaatgactgttgctctaagacgcctccactgtaatcgctccytaaattaactctcgcctcttatttaacactaagttaaggctttaaaatgagctgtgatttgtagtaggcagcacagcagttgctgaattgtggagtcacacctataaataaataaatataagtatatatacacacatacatataattttataaattcccttgtcatttaaattctggattatttttaaaatgtgaaagtaaaatttgcttaacagaaacagcataattggcttttttttttttttcttgagacacagtctcactctgttgcccaggctagagtgcagtggcacaatcttggctcactgcaatctccgcctccgaggttcaagcgattctcctgccctagcctccagagtacctgggattacaagtgtgcaccaccaacgcccgggtaatttttgtatttttagtggagatggggttttaccatgtttg

SEQ ID NO: 712001 - DNA, 633 bp, Homo sapiens
ttcaacttcttttctttcaccaccttcccttttcccttagcttgtaattagccatttttcctcatagttttgaagtctccttatttgaaattcatcattgagttagtcctgtgggagttactctcaattacaaattgaagactaattgtgccgcaatgactgttgctctaagacgcctccactgtaatcgctccctaaattaactctcgcctcttatttaacactaagttaaggctttaaaatragctgtgatttgtagtaggcagcacagcagttgctgaattgtggagtcacacctataaataaataaatataagtatatatacacacatacatataattttataaattcccttgtcatttaaattctggattatttttaaaatgtgaaagtaaaatttgcttaacagaaacagcataattggcttttttttttttttcttgagacacagtctcactctgttgcccaggctagagtgcagtggcacaatcttggctcactgcaatctccgcctccgaggttcaagcgattctcctgccctagcctccagagtacctgggattacaagtgtgcaccaccaacgcccgggtaatttttgtatttttagtggagatggggttttaccatgtttg

SEQ ID NO: 712002 - DNA, 633 bp, Homo sapiens
ttcaacttcttttctttcaccaccttcccttttcccttagcttgtaattagccatttttcctcatagttttgaagtctccttatttgaaattcatcattgagttagtcctgtgggagttactctcaattacaaattgaagactaattgtgccgcaatgactgttgctctaagacgcctccactgtaatcgctccctaaattaactctcgcctcttatttaacactaagttaaggctttaaaatgagctgtgatttgtagtaggcagcacagcagttgctgaattgtggagtcacacctataaataaataaatataagtatatatacacacatacatataattttataaattcccttgtcatttaaattctggattatttttaaaatgtgaaagtaaaatttgcttaacagaaacagcataattggcttttttktttttttcttgagacacagtctcactctgttgcccaggctagagtgcagtggcacaatcttggctcactgcaatctccgcctccgaggttcaagcgattctcctgccctagcctccagagtacctgggattacaagtgtgcaccaccaacgcccgggtaatttttgtatttttagtggagatggggttttaccatgtttg

SEQ ID NO: 712003 - DNA, 659 bp, Homo sapiens
attacaagtcaatgggcaacaaagaattttagccatgaccagacaggtgtgttttctaatgggaaatccctcaaaactaaggtagagaagtgccaaaaatcgtattccggagaggaaataaaatattagacattggaacacagttggaaactgaaattcaacagctttagttgcattgctcttaaagtcacttatatttacttcaaacacatcaagcatttttatttgtcatcaaatgtttcaggataatattaaagaatgtacagtttcctatctatacaactgcacttatagtaaattaactattcctctaaggttgaacattaggttatttcttctacctttgcatttataatgtgccaatgaactttttttgcatgaatctttgtcagcattttaaattatgactttaagaaggattccttcaagggaaattggtaggccaaaggctgtgaatatktatgactcctgttacaaatgacttcccagaaaggtatcagtttgtgttccatctggctcttggtatcatcctatttgttctttgcaggattctaagattgagtattgtcttaaaaaccaaatgaacataacccctccacgccctcccaccaacccacacccacaactttaaaaagaaattcaaattcacagacaagaga

SEQ ID NO: 712004 - DNA, 1961 bp, Homo sapiens
ttatttggacctttgtctttctggcactttctattaaatcacgctgagaagtttgggaattgttcacaaccccattgaagtgaaaactgattaatatcaattttgagagtgatgagttattaattacacatgtaagaaagctgaagataacgacgatgtcaggcagcaactcaccttccatctcatgtggttagacccttacttctaagttgctattttgcctttagactgtgaacctcatcatgtgtgttgacaatgtggccaatgaatgtggtgcaggctgggatctggcttccacggggctcttaccctcttctctgtgctcagagactttacaacaagagcttagaaataagttcgcctctgggctgagaatagggaaggagtctgagagcacagaatagctagcacattcctttagttggcactagtgcatttcccgctgtggtaaaaaatcacactccagccagccccaatggtcacaaagtctctgatgtgcccattcaactttttcttgttaccctagtccaggggttggcaaaccagtttttgtaggtcagacagtaattcgtttaggctttgtgggccatacatctgtcacaattactcwgctctgccactgaagtgaaaaagccataaacaatacataaacaaacatgactctgttccaataaaactatttggccgggtgcagtggctcacgtctgtaatcctagcacttggggaggccgaggcgggtggattgcctgagctcaggagttcgagaccagcctgggcaacatggcgaaaccccgtctgtactaaaaatacaaaaaattagccaggtgtggtggtgtgtgcctgtaatctcacctactcgggaggctgaggcacgagaatcgcttgaacccaggaggcagaggttgcagtgagccaagattgcaccactgcactccaaccggggtgacagaatgagactctgtttcaaagaaggggggaaaaggtttagccggtgggctgtgatttgccagtccctgccttagcccaataggtttatcaaagccccaaaccttccttttttaactcaagataatgcttcagaatacacattgtctcaggtttactggcctctgggcacaaagaatgtagacatggaaggccactaacatttccctgctactattagtgaacaaaagctgcattctaccaaatggccatgcgactgaacacagagccagcgtttttgcagaaaaagttgaatgggcacatcagagactttgtgattattggggatattggggattttctgtggttgctgttcacacctggtggtcacaggtgtcctgaagaatgctcttacctaagaaacgcccgtcacctgctccttctcctggcacagtggtctgaacttgggactggccaacctcactggagggaaacccatcagctccaatatcccattttgtttccccagttgtttctgatgagacagaacagtaatgcccagggtcacattctcctagagtgtctacttcctagaagagtagagaatacttatgactaagacacaggaaccttgggttttccccctgctgcgtctctattcagctcctttactttgagcagactgcttccctgttctgggctcagttttctctcaaaagtcatctttatcatatgcaaaagagtgaagttgtaccctcaccttataccatattcaaaaattaactcaaaatggatcaaagacctaaacacaagagctaaaactataaaactcttcgaagaaaacatagcagaaaatcttcatgacattggatgtgactccaaaagcatacataacaaaagaaaaaaatagatacattgaactatagaaaaataaaaaatttctgcgcatctaatgacacaatagaatgaaaacgcaacctgtggaatacgaaaaactatttgcaagccatatgtttagtaaaaagttaatatctaga

SEQ ID NO: 712005 - DNA, 1961 bp, Homo sapiens
ttatttggacctttgtctttctggcactttctattaaatcacgctgagaagtttgggaattgttcacaaccccattgaagtgaaaactgattaatatcaattttgagagtgatgagttattaattacacatgtaagaaagctgaagataacgacgatgtcaggcagcaactcaccttccatctcatgtggttagacccttacttctaagttgctattttgcctttagactgtgaacctcatcatgtgtgttgacaatgtggccaatgaatgtggtgcaggctgggatctggcttccacggggctcttaccctcttctctgtgctcagagactttacaacaagagcttagaaataagttcgcctctgggctgagaatagggaaggagtctgagagcacagaatagctagcacattcctttagttggcactagtgcatttcccgctgtggtaaaaaatcacactccagccagccccaatggtcacaaagtctctgatgtgcccattcaactttttcttgttaccctagtccaggggttggcaaaccagtttttgtaggtcagacagtaattcgtttaggctttgtgggccatacatctgtcacaattactcagctctgccactgaagtgaaaaagccataaacaatacataaacaaacatgactctgttccaataaaactatttggccgggtgcagtggctcacgtctgtaatcctagcacttggggaggccgaggcgggtggattgcctgagctcaggagttcgagaccagcctgggcaacatggmgaaaccccgtctgtactaaaaatacaaaaaattagccaggtgtggtggtgtgtgcctgtaatctcacctactcgggaggctgaggcacgagaatcgcttgaacccaggaggcagaggttgcagtgagccaagattgcaccactgcactccaaccggggtgacagaatgagactctgtttcaaagaaggggggaaaaggtttagccggtgggctgtgatttgccagtccctgccttagcccaataggtttatcaaagccccaaaccttccttttttaactcaagataatgcttcagaatacacattgtctcaggtttactggcctctgggcacaaagaatgtagacatggaaggccactaacatttccctgctactattagtgaacaaaagctgcattctaccaaatggccatgcgactgaacacagagccagcgtttttgcagaaaaagttgaatgggcacatcagagactttgtgattattggggatattggggattttctgtggttgctgttcacacctggtggtcacaggtgtcctgaagaatgctcttacctaagaaacgcccgtcacctgctccttctcctggcacagtggtctgaacttgggactggccaacctcactggagggaaacccatcagctccaatatcccattttgtttccccagttgtttctgatgagacagaacagtaatgcccagggtcacattctcctagagtgtctacttcctagaagagtagagaatacttatgactaagacacaggaaccttgggttttccccctgctgcgtctctattcagctcctttactttgagcagactgcttccctgttctgggctcagttttctctcaaaagtcatctttatcatatgcaaaagagtgaagttgtaccctcaccttataccatattcaaaaattaactcaaaatggatcaaagacctaaacacaagagctaaaactataaaactcttcgaagaaaacatagcagaaaatcttcatgacattggatgtgactccaaaagcatacataacaaaagaaaaaaatagatacattgaactatagaaaaataaaaaatttctgcgcatctaatgacacaatagaatgaaaacgcaacctgtggaatacgaaaaactatttgcaagccatatgtttagtaaaaagttaatatctaga

SEQ ID NO: 712006 - DNA, 1961 bp, Homo sapiens
ttatttggacctttgtctttctggcactttctattaaatcacgctgagaagtttgggaattgttcacaaccccattgaagtgaaaactgattaatatcaattttgagagtgatgagttattaattacacatgtaagaaagctgaagataacgacgatgtcaggcagcaactcaccttccatctcatgtggttagacccttacttctaagttgctattttgcctttagactgtgaacctcatcatgtgtgttgacaatgtggccaatgaatgtggtgcaggctgggatctggcttccacggggctcttaccctcttctctgtgctcagagactttacaacaagagcttagaaataagttcgcctctgggctgagaatagggaaggagtctgagagcacagaatagctagcacattcctttagttggcactagtgcatttcccgctgtggtaaaaaatcacactccagccagccccaatggtcacaaagtctctgatgtgcccattcaactttttcttgttaccctagtccaggggttggcaaaccagtttttgtaggtcagacagtaattcgtttaggctttgtgggccatacatctgtcacaattactcagctctgccactgaagtgaaaaagccataaacaatacataaacaaacatgactctgttccaataaaactatttggccgggtgcagtggctcacgtctgtaatcctagcacttggggaggccgaggcgggtggattgcctgagctcaggagttcgagaccagcctgggcaacatggcgaaaccccgtctstactaaaaatacaaaaaattagccaggtgtggtggtgtgtgcctgtaatctcacctactcgggaggctgaggcacgagaatcgcttgaacccaggaggcagaggttgcagtgagccaagattgcaccactgcactccaaccggggtgacagaatgagactctgtttcaaagaaggggggaaaaggtttagccggtgggctgtgatttgccagtccctgccttagcccaataggtttatcaaagccccaaaccttccttttttaactcaagataatgcttcagaatacacattgtctcaggtttactggcctctgggcacaaagaatgtagacatggaaggccactaacatttccctgctactattagtgaacaaaagctgcattctaccaaatggccatgcgactgaacacagagccagcgtttttgcagaaaaagttgaatgggcacatcagagactttgtgattattggggatattggggattttctgtggttgctgttcacacctggtggtcacaggtgtcctgaagaatgctcttacctaagaaacgcccgtcacctgctccttctcctggcacagtggtctgaacttgggactggccaacctcactggagggaaacccatcagctccaatatcccattttgtttccccagttgtttctgatgagacagaacagtaatgcccagggtcacattctcctagagtgtctacttcctagaagagtagagaatacttatgactaagacacaggaaccttgggttttccccctgctgcgtctctattcagctcctttactttgagcagactgcttccctgttctgggctcagttttctctcaaaagtcatctttatcatatgcaaaagagtgaagttgtaccctcaccttataccatattcaaaaattaactcaaaatggatcaaagacctaaacacaagagctaaaactataaaactcttcgaagaaaacatagcagaaaatcttcatgacattggatgtgactccaaaagcatacataacaaaagaaaaaaatagatacattgaactatagaaaaataaaaaatttctgcgcatctaatgacacaatagaatgaaaacgcaacctgtggaatacgaaaaactatttgcaagccatatgtttagtaaaaagttaatatctaga

SEQ ID NO: 712007 - DNA, 1961 bp, Homo sapiens
ttatttggacctttgtctttctggcactttctattaaatcacgctgagaagtttgggaattgttcacaaccccattgaagtgaaaactgattaatatcaattttgagagtgatgagttattaattacacatgtaagaaagctgaagataacgacgatgtcaggcagcaactcaccttccatctcatgtggttagacccttacttctaagttgctattttgcctttagactgtgaacctcatcatgtgtgttgacaatgtggccaatgaatgtggtgcaggctgggatctggcttccacggggctcttaccctcttctctgtgctcagagactttacaacaagagcttagaaataagttcgcctctgggctgagaatagggaaggagtctgagagcacagaatagctagcacattcctttagttggcactagtgcatttcccgctgtggtaaaaaatcacactccagccagccccaatggtcacaaagtctctgatgtgcccattcaactttttcttgttaccctagtccaggggttggcaaaccagtttttgtaggtcagacagtaattcgtttaggctttgtgggccatacatctgtcacaattactcagctctgccactgaagtgaaaaagccataaacaatacataaacaaacatgactctgttccaataaaactatttggccgggtgcagtggctcacgtctgtaatcctagcacttggggaggccgaggcgggtggattgcctgagctcaggagttcgagaccagcctgggcaacatggcgaaaccccgtctgtactaaaaatacaaaaaattagccaggtgtggtggtgtgtgcctgtaatctcacctactcgggaggctgaggcacgagaatcgcttgaacccaggaggcagaggttgcagtgagccaagattgcaccactgcactccarccggggtgacagaatgagactctgtttcaaagaaggggggaaaaggtttagccggtgggctgtgatttgccagtccctgccttagcccaataggtttatcaaagccccaaaccttccttttttaactcaagataatgcttcagaatacacattgtctcaggtttactggcctctgggcacaaagaatgtagacatggaaggccactaacatttccctgctactattagtgaacaaaagctgcattctaccaaatggccatgcgactgaacacagagccagcgtttttgcagaaaaagttgaatgggcacatcagagactttgtgattattggggatattggggattttctgtggttgctgttcacacctggtggtcacaggtgtcctgaagaatgctcttacctaagaaacgcccgtcacctgctccttctcctggcacagtggtctgaacttgggactggccaacctcactggagggaaacccatcagctccaatatcccattttgtttccccagttgtttctgatgagacagaacagtaatgcccagggtcacattctcctagagtgtctacttcctagaagagtagagaatacttatgactaagacacaggaaccttgggttttccccctgctgcgtctctattcagctcctttactttgagcagactgcttccctgttctgggctcagttttctctcaaaagtcatctttatcatatgcaaaagagtgaagttgtaccctcaccttataccatattcaaaaattaactcaaaatggatcaaagacctaaacacaagagctaaaactataaaactcttcgaagaaaacatagcagaaaatcttcatgacattggatgtgactccaaaagcatacataacaaaagaaaaaaatagatacattgaactatagaaaaataaaaaatttctgcgcatctaatgacacaatagaatgaaaacgcaacctgtggaatacgaaaaactatttgcaagccatatgtttagtaaaaagttaatatctaga

SEQ ID NO: 712008 - DNA, 607 bp, Homo sapiens
cttcctggaaaactgagacacatggtaaccccagttagtggtgacctctgagaaagtggtctcgttggagggatggccaaggtgcctaggttacatgggttgatggtacactgtgctttgtagaagtttggcccaaaagataaggaaagagttggtggtagatggaggggaatcaaggttgaaaggggtgggtrtatttacttgtctgttttctaggcttgagagatttgtccatctagggaagggtaaggacttagtaaaaagggagagatagaagatacaagatatagaagggataattaacaaagagagaagatacaggagggcaagggcaagatcagcagtgtataaaggacatggggttaacctggaagaggaggacagttcctgataagaaggaaataaaagaatgcatggcaaatggaggaaagttgaggtgcagaaaagggaatttgagagaactaataatttctcaggaatggctgctgagaaggaggtgggcaatctctttggagtaaagagcccccaaaggaaaggagtagaagcctttaacccctttctttcagtaattaacacggctagattccctctaatggattgagatggt

SEQ ID NO: 712009 - DNA, 907 bp, Homo sapiens
tctgcatttgggggagatgttaatttccctttcttcagaactatcccagcttctttgattcaagttgctttctcaaatacttgcttttcctgaactccactgaaccatgaaatataggatgtatttatgatgttttggaattgtaaataaatagtatgtgaaaccatatgatcatgtttgttgttgttgttgttttgagacatagtctagctctgtcaccaggctggagtgcagtggtgcaatctctgctcactgcaacctctgcctcccaggttcaagcaattgtcctgcctcagcctccagagtagctgggattacaggcgyaagccaccacacccaggtaatttttttttttttttgtatttttagtagagatagggtttcaccatgttgaccaggatggtctcgatctcctgacctcgtgatccacccacctgagcctcccaaagtgctgggattacaggcataagccgccatacccagctaattttttttttttttgtatttttagtagagatggggtttcaccatgttgaccaggatggtctcgatctcctcacctcgcgatccacccacctcagcctcccaaagtgctgggattacaggcataagccaccacacccagccatgactatgttttttattgaaatttttaattctgtctttaaaaccatgactgaattaatacccttgaacagttaaacatttgttttgcttcccctatcccacaatggggatacgttgtctgattatctggcaaagtagtgcaccagcacctcaaactccatgacaacacaacaaatgtcatcaactctttagccaaatagtatgagttccgtgattgcagattgcatcagatagtcagtgggcagccgataaatttgccaaaagcgtgatacagggactg

SEQ ID NO: 712010 - DNA, 599 bp, Homo sapiens
taaattgctttgagtagtacggtcatttaacaacattgattcttccagttcatgagcatgaaatgtttttccatttatttgcatcatctctgatttctttcagcagtgttttgtagttctccctgcagagatgtttcacctccttggttagctatattcctagatatttcattttcyttgtggctattgtaaataggattggattcttgatttgacgctcagcctggctgttatcggtgtatagaaatgctactgatttttatatattgattttgtatcccaaaaccttgctaaaatcatttatcagttctagtagcatttggcagagcctgtagggttttctaagaagacaatcatgtcatgaataaagggagatagtttgatttcttctcttcttatttggaggcctcttatttctttctcttgccaaactgctctggctagcacttcctgctctattttattccaagctccctctctgctgcatctagcacagagtagaggctcagtaaacatttgttaaatgcatgaattcatttgccccacttgtaatcaccatggcaacaccatcttaattccagctgctataacaaattacc

SEQ ID NO: 712011 - DNA, 599 bp, Homo sapiens
taaattgctttgagtagtacggtcatttaacaacattgattcttccagttcatgagcatgaaatgtttttccatttatttgcatcatctctgatttctttcagcagtgttttgtagttctccctgcagagatgtttcacctccttggttagctatattcctagatatttcattttctttgtggctattgtaaataggattggattcttgatttgacgctcagcctggctgttatcggtgtatagaaatgctactgatttttatatattgattttgtatcccaaaaccttgctaaaatcatttatcagttctagtagcatttggcagagcctgtagggttttctaagaagacaatcatgtcatgaataaagggagatagtttgatttcttctcttcttatttggaggcctcttatttctttctcttgccaaactgctctggctagcacttcctgctctattttattccaagctscctctctgctgcatctagcacagagtagaggctcagtaaacatttgttaaatgcatgaattcatttgccccacttgtaatcaccatggcaacaccatcttaattccagctgctataacaaattacc

SEQ ID NO: 712012 - DNA, 357 bp, Homo sapiens
acccataaagttttacaatggtcacacctttatatacatattggtctcataatacctttccttttttcaactctatttatttattaatataaatggtactcaaaatgctcataaatattattatgcagattttttctacaatcaccatttccaaagacatcaaggagaagggggtataatttaagcaatttaawctgtttgccacacactgccttatacatacattgcttttaaacaatccatataaacaaaaaattaaacttcaacaagtaaagcaaagaatgaaaggcattgaaaaaagtaatgtctcatacacaagattgcccactggaattttagccacttgaaaagtctttc

SEQ ID NO: 712013 - DNA, 504 bp, Homo sapiens
tggtaacattattcttgacatgcccagtcaccagttgggagcagcctgtgggaagtgtggcataattgcagtgttgattttcaaagcacagcagctgagaccatagtcaattttactccccatagtcagagatttgagagtagcatattcttgactgctagagtacagaatgcttttctaccctttggaatgaagataaacccayttacagccatgtgttaaaaaatcacagaacttctgttaacttaaggtcctgaataagtgcatggagggtggtatcacccattactattgacatgaaaaagaaacaaacttgtattatgtttgtgtaattatacattttagaatctttttataccagaaggtacttagtttagttgattcttctgctcaaccaacaattcctttttatattttcatttacctttcttctattaacttctgctgacatctaaatgagctctcatttttcagtaccccaagtgatgcccacttactaatctg

SEQ ID NO: 712014 - DNA, 504 bp, Homo sapiens
tggtaacattattcttgacatgcccagtcaccagttgggagcagcctgtgggaagtgtggcataattgcagtgttgattttcaaagcacagcagctgagaccatagtcaattttactccccatagtcagagatttgagagtagcatattcttgactgctagagtacagaatgcttttctaccctttggaatgaagataaacccacttacagccatgtgttaaaaaatcacagaacttctgttaacttaaggtcctgaataagtgcatggaggrtggtatcacccattactattgacatgaaaaagaaacaaacttgtattatgtttgtgtaattatacattttagaatctttttataccagaaggtacttagtttagttgattcttctgctcaaccaacaattcctttttatattttcatttacctttcttctattaacttctgctgacatctaaatgagctctcatttttcagtaccccaagtgatgcccacttactaatctg

SEQ ID NO: 712015 - DNA, 2238 bp, Homo sapiens
ttttgaaatgttttctgaaatttagaaagcaagtgataatggagtggttgaaacgcaatgaattggaatcacagtgactagctctgttttaacccttccatggccttggaaattgcctcccctctgacatgtagtttcttcataaaaacaggctatgttttatgctccatatttctcccttatgtttcataattaaataattttcactcagacacggtcttataaaaatggctccaaaggaatagtctgaggtgtgctaacgcaagcaatatcctagcttcagactgagctcagatattttttgaaagacaagagagagaaattcaggcattacctaagagtcatcaaaatctttaaaggggttcttaatgatgtcttatgataagattccttattttatcttctgtataaggaaaaagctcatgggaggctggacccagtggctgaagcctgtaatcccaaccctttcggaggctgaggtgagatggtcactttaggcaggagttatagaccagcctgaacatgtaacaagacccaatatctacaaaaataaaacaataattagctgggcatggtgacacatgcatgtagccccagctacccgggaggctgaggtgggaggattccttaagcctaggaattccagactgcagtgaactatgattacaccaccgcactccaatttggatgacagagaaagaccccacttctaaaacaacaacggcaacagaaaacaacctcatagaaatgtattactagttatagattttggtatatttatatctaaatatatgtttagatataaaaatgtttagatataaaaatattttttatatatgtacacatgcacaaccatctggcaatatctataacccattcacatttctccagaaaactatactctaatgcccagatcaaaggggtcagataatacaagggcttaaagaacagtttaagaatgttgaacttcatcttaatgacagtgaaaagccactaaaaggttaaaaagtagttgtgtaagatgactgaatatgagtttggggaatattattgtggctatatggagattgtatggaaggagcacatatatagttataaaagctgtaggaagcccagttaagaggcyatcacaagatgccaggaaagaaagatgtgtccctagcggaaggcagctcctgcagagttgaacagacttgaagagaattcagagcaattcagctgcaccccagcctctctgtgctctctgattgcatagagatcattgcttgtgcaattggttaaatcggagaccatcttctcaagctgctttcttccatattacagaaggactggccgagaaattattctccctcttcctctgagaccgttttcagtgaactatagggcagcaactaaagattaagtcagaaacgcatgtctcccattacaacttcatataccagataggatccagtgacataggtcataaatggtaaagaaaaaagcctttaagtctcataaaacactttatattcaaggagtaatatatgttaaatttccttaacttctgagacttcttgcctaaaaaatgaagatcccatacttcataagatactgtattaaatgaaaaaaaaataaatggaatatagcacctggcacaaagtaggtgctaaataagtactaattcccttctttccacttcaaccccttcttagttaacagacaggaagtaacagatgtcttaaaaatatatattgttaatccctaaatatattattaatggcccagaatagagattctaaaaactgcaatccatgcatcgattaacagtggggatacattctgagaaataaatcattagggaattttatcattgtgcaagcatcatagagtgtactcagacaaacctagatggtgaagcttgccacacaactaggctacatggtatagtctattgctcctaggctacaaacctggacaatatattactactgaatattgtagacaatggtcacacaatggtaagtgtgtgtatttaaatataaaaaagtacagtaaaaatatggtatcataattttatgagaccatcatcatattataatcttataggaccaccttcatatatgtgatctgtcactgaccaaaatgtcatatggtttatgactgtagatcttttcagcttgccttggaagtacctaatttatcatgctaaatagatttagattatttgttgtggccatatataaagttaatattctt

SEQ ID NO: 712016 - DNA, 739 bp, Homo sapiens
cccaggaataattttggttactgtagccttgcatttcaatttgtccattcacaattatttttctgacaatcctcccaatttatgttcatatcataataacaaagaagactataattgattacaaagaattgactagttttgttaggtttggcctggttgtttatataggtccagcaacagttttaattaaccctgtagttctccttacatgttcttttgcaaatcaagtatcacagaatattttaaaacccacaaagtcataaaattctttttttagttttcatttttattttagattcaggggatacatgtgcagatttgttacaagggtatatttcttggtactgaagtttgggcttctgttgatcctatcacccagatagtggacgtagttaccagtaggaagttttgcaacccttggcccctcccttacyccagccatttggagttcccagtgcctagtattcccatctttaaaatctatgtgaactcaagatatagctccaacttataagtgagaacatgagttatcttggttttctgcttctgcattactttactaaggataatgccctccaacaccatccatgttcctgcaaaacacatgatcccattcttctttgtggctgcatagtattctatgatatatatgtaccacattttctttatccagctcactgttgatgacctaggttgattccatgcctttgctattatgaatagcactgcaatgaacata

SEQ ID NO: 712017 - DNA, 629 bp, Homo sapiens
aggcaattttaatatactcaattttactatgtgtataattttgacaaaagaaagcaaaacttacaagagaaaaagaaaatttaatgaaaaatatattaataaccatagtaagaaataatatacaaggataaatctaacaaaggaaatctttatccatatttctggataaagtttataaaccttttgaaggaaataaaagtatgctaaataattaaagatatatactgtgcttgtgggtgacaaaacttagcattacaaagattttgtaawgcttagcattacaaagattttggccaagcaattttattcattcattgtatcatagaatctcatcaaactctttgttaaatatatactaaagtttaaaaaattgccaaaatattattaaagaagaaaaaaagagagcttgtcaatatttattgtaatgataacatttgtatgattacaataatgcattagtaatatacaaaagcaaacttatggatacatacatggtaaacttattcaagtgagggcaaggatatcatataaactgagaatgtttatttatgtgaagcaaagatgaggaatgtgattgtaaagatacacaaagagactgcaacttcatttgttaatgttttagttcttta

SEQ ID NO: 712018 - DNA, 629 bp, Homo sapiens
aggcaattttaatatactcaattttactatgtgtataattttgacaaaagaaagcaaaacttacaagagaaaaagaaaatttaatgaaaaatatattaataaccatagtaagaaataatatacaaggataaatctaacaaaggaaatctttatccatatttctggataaagtttataaaccttttgaaggaaataaaagtatgctaaataattaaagatatatactgtgcttgtgggtgacaaaacttagcattacaaagattttgtaatrcttagcattacaaagattttggccaagcaattttattcattcattgtatcatagaatctcatcaaactctttgttaaatatatactaaagtttaaaaaattgccaaaatattattaaagaagaaaaaaagagagcttgtcaatatttattgtaatgataacatttgtatgattacaataatgcattagtaatatacaaaagcaaacttatggatacatacatggtaaacttattcaagtgagggcaaggatatcatataaactgagaatgtttatttatgtgaagcaaagatgaggaatgtgattgtaaagatacacaaagagactgcaacttcatttgttaatgttttagttcttta

SEQ ID NO: 712019 - DNA, 929 bp, Homo sapiens
aaatctacatttatctagctaccactgcatctccaatgacaagcacagaatgtgtcagtcacatagtcagcactcaatagatatttattatatgaatgaatgaataaatcgctgtaaaatgatactacaaatttacctaaagatggaatcagtgctcttcactgcacaaaaccaacttaaaggcagagggcaagagatcccactgatagagtccacayaggtcagcccctaaaggcacagagcaagatggagaaggtggatctagaggggagaacagacaaagccaacaaatgcaccaagagtcactgaagtcatgaggaggcaagtgagtagttgcatctcttatcttattcagggccacataagaatgagtgttaagtaccataaacatatgccccatacttttactctctcacctgttgaactcacattgtggttatactttagggagttaaaatgtcatatcaaaaacaatgattttgattagtgtacagttacatttttggaaacagctgacatttaagacctacagagtgacaataatgttaaactttaagaaaagttgaaatttgccacactgtgtatgtcagatgccctagatcaaatggcaaagaagcaaagtgaaattaaaaacgttgccagtttaaggagctggggaaatatgctgtgctgaaagaacccaccacacatttgtaaacataagtcaactttaagacatagtttttcttggacataatggttgaagaatgaattttctttgttagcctgttttatgagcataatcagaatacattcatcacctaaagcaacacttcattatttggaggattataatgacttttctctgcttcagaattgcttgatgttgcacatgctgtaatttttaagcagggaataaatttaataataattttatttggctagcttga

SEQ ID NO: 712020 - DNA, 619 bp, Homo sapiens
tagattattttcattaataaaatgggagcctctagtttcactggcattgtgaaagaggaaaacataatgcagaatgacatatttgagcacacctctactatagctttgacaacactacattgtcatatgatatgcatgttttcaatacttgaaatacaatgagatccttcaagccatgttctttggcattatcttcatatctrccatccttagcacaggctacaacacaaaatgttcgttacatgttggttcaatggaagactaaataaacaaatcaatgagagaaggactgaatttcctttcaaaactccagatctagggttatggtcaaagtagaagacagtcacatttcacatttactgagataatcactctcatctttcaagaatccacgaataccattctttccctgtttgttgctagtatttaaccagatttcaagaccttctgaagacactaaaaaagtcctctttcttctttaacctttatatcactccagtccattgtcctcactgaagccagagttaattttctaaagcacactcacattgacttcctcacctgctttccatgggtcatggtactcaggataaaggtaaggctcttaacaaggccttca

SEQ ID NO: 712021 - DNA, 619 bp, Homo sapiens
tagattattttcattaataaaatgggagcctctagtttcactggcattgtgaaagaggaaaacataatgcagaatgacatatttgagcacacctctactatagctttgacaacactacattgtcatatgatatgcatgttttcaatacttgaaatacaatgagatccttcaagccatgttctttggcattatcttcatatctgccatccttagcacaggctacaacacaaaatgttcgttacatgttggttcaatggaagactaaataaacaaatcaatgagagaaggactgaatttcctttcaaaactccagatctagggttatggtcaaagtagaagacagtcacatttcacatttactgagataatcactctcatctttcaagaatccaygaataccattctttccctgtttgttgctagtatttaaccagatttcaagaccttctgaagacactaaaaaagtcctctttcttctttaacctttatatcactccagtccattgtcctcactgaagccagagttaattttctaaagcacactcacattgacttcctcacctgctttccatgggtcatggtactcaggataaaggtaaggctcttaacaaggccttca

SEQ ID NO: 712022 - DNA, 580 bp, Homo sapiens
gaaatgggcttgagagaggcacaaaatttttcacttctaataaaaataaatttgaactgccattgaggaaaatgaaaatggccttttgaaaagggaaacattttcaaattggaaatcatcattctcagtgaactatcacaaggacaaaaaaccaaacaccacatgttctcactcataggtgggaattgaacaatgagaacacatggacacaggaaggggaacatcacactctggggactgttgtggtgtgggaagagcarggaggcatagcattaggagatatacctaatgctaaatgacgagttaatgggtgcagcacaccagcatggcacatgtatacatatgtaactaacctgcacattgtgcacatgtaccctaaaacttaaagtataataataataaaataaataaataaaaataaaaactcttaaaaaattgtaaaaaaaataaaaataaataaataaattcacatacctaaaaaaaaaaaaaaagaaaagggaaacatttggtagctctgactaatggaacaaggtccaaatagctctcgtagaacatggtgcatagctacattctataaaaa

SEQ ID NO: 712023 - DNA, 580 bp, Homo sapiens
gaaatgggcttgagagaggcacaaaatttttcacttctaataaaaataaatttgaactgccattgaggaaaatgaaaatggccttttgaaaagggaaacattttcaaattggaaatcatcattctcagtgaactatcacaaggacaaaaaaccaaacaccacatgttctcactcataggtgggaattgaacaatgagaacacatggacacaggaaggggaacatcacactctggggactgttgtggtgtgggaagagcaaggaggcatagcattaggagatatacctaatgctaaatgacgagttaatgggtgcagcacaccagcatggcacatgtatacatatgtaactaacctgcacattgtgcacatgtaccctaaaacttaaagtataataataataaaataaataaataaaaataaaaactcttaaaaaattgtaaaaaaaataaaaataaataaataaattcacatacctaaaaaaaaaaaaaaagaaaagggaaacatttggtagctctgactaatggaacaaggtccaaatagctctcrtagaacatggtgcatagctacattctataaaaa

SEQ ID NO: 712024 - DNA, 857 bp, Homo sapiens
acacacacacacacacacacacacacacacacamacacacacacaaactgtttttttctcgggatacagaagccttatatagacagatttgattcactgatgtagaaataaatgactcaatcctgcttcttaacagagtactatgtgtgaaaatggcttcaggaggaacaaaaaagtagaataatttgttcttatcggttaatcttctggatctcatgaagcatttactctacctggactctaggaggcaaagccagcagatagtttacacaaaagcccccttttggaaatgactagaatatccaacagcaggctgggcagcgaatcacaagtccctggttgcaggatggttctcaattgaattcagcaagtatttatcgagctccttgctgtgccccaagcctgagctaggctaagccataaacagaataaaagatggagacgagctaccatctcccccaccctaggtcaaactgaactgctggctccagctagagagctatgagccaggcttccggcaaatgctccccaacttcattgcagggttgagcttcaagctgtgtcagccttcaggataagaactgtccagtattcacccagaatctgaggcaagttatgttagaagttcttcatgagaggcaataaggaacatggaaaaagaggacaatttaaaagccaagtccagaggcagaagcagcagcaagttgagacttggctggatttgatgtgaataggagtcagacttatagccttggaataagagagaggaagttaaaagtgcaatgggttaagaaatccattgcctgatgtactcatttttttggtagtgaaaacatttaaaatgtactcttttagcc

SEQ ID NO: 712025 - DNA, 2492 bp, Homo sapiens
  misc_feature 2, 3, 4, 5, 6, 7, 8, 9, 10, 11, 12, 13, 14, 15, 16, 17, 18,19, 20, 21, 22, 23, 24, 25, 26, 27, 28, 29, 30, 31, 32,33, 34, 35, 36, 37, 38, 39, 40, 41, 42, 43, 44, 45, 46,47, 48, 49, 50, 51, 52, 53, 54, 55, 56, 57, 58, 59, 60,61: n = A,T,C or G
  misc_feature 62, 63, 64, 65, 66, 67, 68, 69, 70, 71, 72, 73, 74, 75, 76,77, 78, 79, 80, 81, 82, 83, 84, 85, 86, 87, 88, 89, 90,91, 92, 93, 94, 95, 96, 97, 98, 99, 100, 101, 1309, 1310,1311, 1312, 1313, 1314, 1315, 1316, 1317, 1318, 1319, 1320: n = A,T,C or G
  misc_feature 1321, 1322, 1323, 1324, 1325, 1326, 1327, 1328, 1329, 1330,1331, 1332, 1333, 1334, 1335, 1336, 1337, 1338, 1339, 1340,1341, 1342, 1343, 1344, 1345, 1346, 1347, 1348, 1349, 1350,1351, 1352, 1353, 1354, 1355, 1356, 1357, 1358, 1359: n = A,T,C or G
  misc_feature 1360, 1361, 1362, 1363, 1364, 1365, 1366, 1367, 1368, 1369,1370, 1371, 1372, 1373, 1374, 1375, 1376, 1377, 1378, 1379,1380, 1381, 1382, 1383, 1384, 1385, 1386, 1387, 1388, 1389,1390, 1391, 1392, 1393, 1394, 1395, 1396, 1397, 1398: n = A,T,C or G
  misc_feature 1399, 1400, 1401, 1402, 1403, 1404, 1405, 1406, 1407, 1408: n = A,T,C or G
tnnnnnnnnnnnnnnnnnnnnnnnnnnnnnnnnnnnnnnnnnnnnnnnnnnnnnnnnnnnnnnnnnnnnnnnnnnnnnnnnnnnnnnnnnnnnnnnnnnnnggaagctatgtctgtttctcagaagtgatttaagagtaagatgtgaaatagcacttgtccccgaggatggagccaacagagcacagagcataggggagttatgtgatgctgtctctgagggactggagagaggaatataaagagcttatcccttaagaaagaataggggaggacttccttgcctgatatctcagatcatgaagctacagttctctccctgctttagagaaaaaaaaaaacagactttttgcaaaaatcaattattgaacatattcctatattctagatttataatgaagcatttttgtacatattcattaaaaagagcaattagaacatttttctctggtttatagtaactaggatggcaacacatatatatcttggaagtattttgtggtatgattcttcaacataaaattatttttcaaaacttcttagaagtctccaggtactcaggaataaggtcattttaaattattccttattgactataagaaaaataattaggcaagatcacaaaataaatgtttagactgtttctcctgtttcctgattttcaggttattttttatcccaattttattttgctgtatagtcataaatttcatctttgaaatraagcatataatcactttttttgtttgtttttttgagatggagtctcgctctgtagcccaggctggagtgcagtggcgcaatctcggctcactgcaagctctgcctcccgcgttcacgccattctcctgcctcagcctcctgagtagctgggactacaggtgcctgccaccacgatcggctaatttttttgtattttttgtagaaacgaggtttcaccatgttagccaggatggtctggatctcctgaccttgtgatctgcccacctcggcctcccaaagtgctgggattacaggcgtgagccacagcgcctggccatgctttctattttatatgctgtttttgtttctttttcatccctgatcttcagttagctgctggcattttacttgttcccaactaatttttcttctaatgacttgaaaagtatatgtttagttcctatatctttatatttttatacacatagctacacatatgattgacatccagagctaatcgtatagataaaatgagactcctagcatgcttttacttctctctccttcctcctttccagacttcataactttccatcccgagttatttnnnnnnnnnnnnnnnnnnnnnnnnnnnnnnnnnnnnnnnnnnnnnnnnnnnnnnnnnnnnnnnnnnnnnnnnnnnnnnnnnnnnnnnnnnnnnnnnnnnncacacctgtaatccaagcactgtggtaggctgaggagggcagatcacaaggtcaggagatcaagaccatcttggctaacacagtgaaagcccatctgtactaaaaatacaaaaaattagccgggtgtggtggtgggcacctgtagtcccagctacttgagaggctgaggcaggagaatggtgtgaacctgggaggcggaggttgcggtgagctgagatcgcaccactgcactccagcctgggcgacagagttagactccgtctcaaaaaaaaaaaaaaaaaaaattcattctgaaatgcgatagatgttgaagctcttctggcagatggttataaagaggaatatataatcattctattgagaaaatataatcaataatgtgaatacctaaggtagtttattttacatatatatctcggtatttatttatttttgagacagagcctcactcctgtcacccagggtggagtggagtggcacgatcatggctcattgcagcctcaacttcttgggcttaggtgcttatctcatctcatcgcagccacctgagtagctgcgactacaggtgtgcgccaccatgcatggctaattttttgtatttttagtagaggtttccccatgttgtccaggctggtctgaaactcctggactcaagtgatctgcccgcctcggcctcccaaagagctgggattacaggtgtgagccactgtgttggccttatgttttataatttttaaatgatactttttattctattacaaaacatatataattgtaaaaaacttgtaaaatataaaagaggacaaagacaatagaaaaattatttacaatataattcccaagtaaacactgattaccttttttttttttttagagcctgttgctcaggctggagtgcagtggcaccatcatagttcactgtaacctcatacatctcatacattttgatattactacttctggttttatacataatgtgttcactttgaagcaagagagtataattttataacgattattttcatttaatgatcatgatctcattgcaattattgatcatttagtttattcctgaacattttgt

SEQ ID NO: 712026 - DNA, 949 bp, Homo sapiens
gctaatttcagatttttattttttaggaaaaaaagccatgttcttgcaccacactagtaaagtagaaaccttacatgcattgctgattttcaggcaaactatgtwacatggctttcaatgggtgcttggcaaggaggaaacatgggctaataaacgaaaaatataaatgtatctgaggtggcatgtctgcctctcccaagaaataaattgttctatataaaaaacagcatgctttaaaacattttttaaaagtcaacaacctagtgttatttaactagcacaccaagagcctcctcatgcacaccttctttctgtctttcctttctggttctccctgtaaccacagtacctaagggaagggtgatcagcaactagcagacatggagagacttcctgcagactctcaaaatttcagaattgatcgcttgctctctttattttatttatttatttatttatttatttatttatttatttatttatttattttgagagggagtctcactgtgtcacccaggctggagtacaatgatgcaatctcagctgactgcaacctcaacctcctgggttcaagagattctcctgcctcagcctcccgagtagctgggactacaggtgctcaccaccacacccagctaattttttgtttatttagtagagatggggtttcaccgtgttagccaggatggtctcgatctcctgacctcatgatccactcgccttagcctcccaaagtgctgggattacaggcatgagccaccgcgcccggcccctctcctttaataagtgttttttcatgtgtattcttaatttatgaataaaaactgtacatatttatgatgtaccacatcaggccttgatgtgtctacacgttgtggaatggtataatcaagcgaatgaatatatccatcacctcacatccttagcattttttgtggtgagaatattt

SEQ ID NO: 712027 - DNA, 1250 bp, Homo sapiens
  misc_feature 322, 323, 334, 335, 336, 341, 346, 349, 350, 351, 352, 356: n = A,T,C or G
ctcacacatatgcagcacttataatagaagctaacagattacttttatcaagcaataatgaatataatttgggttcaacatttaaccttacaggtgtgatcttttcagccactgctgcgaagtcttattttcagcaacaccagtattaatgatgcaggctctctcactcgctctckctctctctctctctctctattaatattttcaacaaatcaatgactattttcatacaaagattataattgacattgatctcacagttctgttttaaaaatgagatcactttagtggaacacctgtgacctattaaataaaataatgnnggccctccccnnncggcngtatntcnnnnattnccttcttgaagaaaaccagcagacatatttacttactacaatgagcattttatctgaggttttcaaaagactgcttcccaccagggaggcagttacttttcattgtatacagttcttgccagaatcatatccttgttgaattcttgagttgaataaaacctttttgaggctttgccagctccatggacctcactttggagtccatacagaggaggttgcacctcagtggttctttctggtacccacatggaaagtagagtagacatacacccacacagatatgccagtgggggatgcaggccagcaggagacctatttttgctccctcctttgaaattcagctcaaccaggagattagagtttataagataatggccttccctccctgccatattcatattctcacactctgcatttttatttctgcatgtaatgttgcacacactgatactaactgcaaatggtttatgccaaaattcagtaaacaaacaaacatagcagacatgcacagcagagttgtgaacacgaaaaagcagatcctgcataccatttagcggtgtttttaaaaagataacaaaacaacctttacctcttcaacaaggtaaatgtggctaaaatgaagatttaatgatatctgggtactgatgtttatttcctggtaacaaagtcagtataaaatttgattagataagaccagcttctcacagataggtgaattgatgatagccagatggatggacagatggacgcgtggacagatggacagatggttggatggatggatgggcggatggatggatggacaggtggacggatgagtggaagggtgcatgggtggatggatggatagatgatggatagatggatggacagacagatggacagatggatgga

SEQ ID NO: 712028 - DNA, 1250 bp, Homo sapiens
  misc_feature 322, 323, 334, 335, 336, 341, 346, 349, 350, 351, 352, 356: n = A,T,C or G
ctcacacatatgcagcacttataatagaagctaacagattacttttatcaagcaataatgaatataatttgggttcaacatttaaccttacaggtgtgatcttttcagccactgctgcgaagtcttattttcagcaacaccagtattaatgatgcaggctctctcactcgctctcgctctctctctctctctctattaatattttcaacaaatcaatgactattttcatacaaagattataattgacattgatctcacagttctgttttaaaaatgagatcactttagtggaacacctgtgacctattaaataaaataatgnnggccctccccnnncggcngtatntcnnnnattnccttcttgaagaaaaccagcagacatatttacttactacaatgagcattttatctgaggttttcaaaagactgcttcccaccagggaggcagttacttttcattgtatacagttcttgccagaatcatatccttgttgaattcttgagttgaataaaacctttttgaggctttgccagctccatggacctcactttggagtccatacagaggaggttgcacctcagtggttctttctggtacccacatggaaagtagagtagacatacacccacacagatatgccagtgggggatgcaggccagcaggagacctatttttgctccctcctttgaaattcagctcaaccaggagattagagtttataagataatggccttccctccctgccatattcatattctcacactctgcatttttatttctgcatgtaatgttgcacacactgatactaactgcaaatggtttatgccaaaattcagtaaacaaacaaacatagcagacatgcacagcagagttgtgaacacgaaaaagcagatcctgcataccatttagcggtgtttttaaaaagataacaaaacaacctttacctcttcaacaaggtaaatgtggctaaaatgaagatttaatgatatctgggtactgatgtttatttcctggtaacaaagtcagtataaaatttgattagataagaccagcttctcacagataggtgaattgatgatagccagatggatggacagatggacgcgtggacagatggacagatggttggatggatggatgggcggatgratggatggacaggtggacggatgagtggaagggtgcatgggtggatggatggatagatgatggatagatggatggacagacagatggacagatggatgga

SEQ ID NO: 712029 - DNA, 1250 bp, Homo sapiens
  misc_feature 322, 323, 334, 335, 336, 341, 346, 349, 350, 351, 352, 356: n = A,T,C or G
ctcacacatatgcagcacttataatagaagctaacagattacttttatcaagcaataatgaatataatttgggttcaacatttaaccttacaggtgtgatcttttcagccactgctgcgaagtcttattttcagcaacaccagtattaatgatgcaggctctctcactcgctctcgctctctctctctctctctattaatattttcaacaaatcaatgactattttcatacaaagattataattgacattgatctcacagttctgttttaaaaatgagatcactttagtggaacacctgtgacctattaaataaaataatgnnggccctccccnnncggcngtatntcnnnnattnccttcttgaagaaaaccagcagacatatttacttactacaatgagcattttatctgaggttttcaaaagactgcttcccaccagggaggcagttacttttcattgtatacagttcttgccagaatcatatccttgttgaattcttgagttgaataaaacctttttgaggctttgccagctccatggacctcactttggagtccatacagaggaggttgcacctcagtggttctttctggtacccacatggaaagtagagtagacatacacccacacagatatgccagtgggggatgcaggccagcaggagacctatttttgctccctcctttgaaattcagctcaaccaggagattagagtttataagataatggccttccctccctgccatattcatattctcacactctgcatttttatttctgcatgtaatgttgcacacactgatactaactgcaaatggtttatgccaaaattcagtaaacaaacaaacatagcagacatgcacagcagagttgtgaacacgaaaaagcagatcctgcataccatttagcggtgtttttaaaaagataacaaaacaacctttacctcttcaacaaggtaaatgtggctaaaatgaagatttaatgatatctgggtactgatgtttatttcctggtaacaaagtcagtataaaatttgattagataagaccagcttctcacagataggtgaattgatgatagccagatggatggacagatggacgcgtggacagatggacagatggttggatggatggatgggcggatggatggatggacaggtggacggatgagtggaagggtgcatgggtggatggatggatagatgatggatagatggatggacrgacagatggacagatggatgga

SEQ ID NO: 712030 - DNA, 590 bp, Homo sapiens
tgagatacgaacaaaaatggaatatagagtttctccaaatactctagataatgataagatcttcccaataccactaatcaaaaaatccattacccccattggtttgatatgttatctttatcacatacacacacacatatgcatgtatgcacacatagacaaacacacctagaaagataggcagctgctgctttctccagttcttccatctgctgaagctagcaacagaaccacaatgtttagaaggaaatagcattgtctatctgctatggccaaactacccrcattcttattcttctttattctctgcattcattctaacttgtttctaaaagatcttttataacttgtattaagccctcacttggcaccctcaccaaaccttatttctttcattccatggcctataattttattaaaaccaaaaattaattggggaagaatgtgcacctgtaacatagtttattactccctcaaaagatcacagcacatttccttatttgttaaaattcacttttaagtttcctagtatgttttcttcatatatgcctaatgcaattttctctaggaagattcctagcagcagcgtt

SEQ ID NO: 712031 - DNA, 590 bp, Homo sapiens
tgagatacgaacaaaaatggaatatagagtttctccaaatactctagataatgataagatcttcccaataccactaatcaaaaaatccattacccccattggtttgatatgttatctttatcacatacacacacacatatgcatgtatgcacacatagacaaacacacctagaaagataggcagctgctgctttctccagttcttccatctgctgaagctagcaacagaaccacaatgtttagaaggaaatagcattgtctatctgctatggccaaactacccgcattcttattcttctttattctctgcattcattctaacttgtttctaaaagatcttttataacttgtattaagccctcacttggcaccctcaccaaaccttatttctttcattccatggcctataattttattaaaaccaaaaattaattggggaagaatgtgcacctgtaacatagtttattactccctcaaaagatcacagcacatttccttatttgttaaaattcacttttaagtttcctagtatgttttcttcatataygcctaatgcaattttctctaggaagattcctagcagcagcgtt

SEQ ID NO: 712032 - DNA, 584 bp, Homo sapiens
tgtatatgtttcacattccttgttttttcctctgagatagtacatacatactttttcctgtggcaaatgaagtcctcttattcaatcccatcttcaaatacacagacatacatacacacttgtaatgtgtatatataatttctgtatagaatgtttttccaaggtgccttattgaatttttagaatagtttatggtaatttttagttcacgttcttgaatgtttgcaatatatattgttcatacttaaataagaatagttaaaccacttgttccaactatttttcttatgtaattattttggtaaatatacccagaatagtattacayaatagtcagcatctttatcttgattttgactttaatgaaatgatcctacatttttatcattaaacataataaagacttttagactgagacagatttctatcatgttacagaaattacaattctttttttttttttttttttggtttttggtttttggttttttgagacagagtttcgctcttattacccaggctggagtgcaatggcacgatctcggctcactgcaacctccgcctcccgggttctcaccattctc

SEQ ID NO: 712033 - DNA, 1246 bp, Homo sapiens
tcaacaacctctatgaagtatttgcttttagtatccccattttacagatggcaaaactgagccccagggaggtgaagtgacttgccctgcttcacacggtgaatatggtgaggagccaggacatgactctgtgtagtctgatggtagcaatgacgtgacagtaagtggcttctctaataatggaaaccctacataacaactcgtatacttaacccttccatagcaaatcattttcaaagcatgtcaaagatattcccacagactctgttgtcctgaaggcttaactgccttttggctagttaggtcttgatggaatttcatgtagttgtctacattagagattcggttttaatagggcaggcttatctttctttgctgctgtgatagaaactgtcaaggtcccaatgggactacagcatccagggctcatatccagagagatttctcagcagcgaatggytctgcctgaatgctcggccacattcctaaagtagggagcggttacacagtggacgagctaactgagctgagattctgcaaagcacagcatagctacttcgggaaggaataccactgtgaagtctgaatgttgctaactgcctaggagcttaatgctccttaaaaacaaacacacaaaaggaaacccggccctcagacatgacctctgggaccttatcaacagtttttctagactagagtggacaggttttgtttttgcctgagaaccatgacataaattagagacatactaagcaatgattgcaaagagtgctgcttaccaaagctggggctgatttgatgggaatgtgcatcaatgtagatattttcacatccatgagaagcacaaatccactgcaaatgttattaaattttaaaagcacactagagttagctgcaatgagactttaacttgtttttttcagtttattttcaactccaatacctgtggattttatatgcgcacacatttgggtacaaaaatgtacctgtctttaagctggccttaggaactcctcctacgcacagaaggagtctgagaaagactgatttttaaaatggacctgcataaacaacttctattgagttaaaaaaaaacccagctatttcaacaggacatgctgctaataaaatgattctactattatctttaacatgatgaaagtttttggagtttttgtttgttttcttgagacagggtggctcactgcagcctctacctcccagcctcaagcaatcctcctgtctc

SEQ ID NO: 712034 - DNA, 1216 bp, Homo sapiens
cttcgtggggccgaggtgggcggatcacccgaagtcaggagttcaagaccagactggcctgtgtggcgaaaccccatctctactaaaaatacaaaaaattagccggtcttggtggggcgtgcttataaagtcccagctactcggtgggctgagacaggagaatcgcttgaacccaggaggcagaggctggtcaacagagcaagactctgtctcaaaaaaaaagaaaaaagattataagccactattcatcatacacatatatgagctttgaattgttttcacaagaatagatgctcaagagcttttggaggctgactttaaaataaacaatttcagacatttctctacttttccactaattctgggcatagctcatgttactctgkgcttactcactcctttgaaaagtaacatctttcagtagctttactcatcaactccttgagacatacagcacctatctctctcctggcctggtcattcctctgactttgcatcactttttaaaaggggaaagaaaaccaatatgaggacatcataaagggacacatttctactcaataacaaagagaaatgtttaacatttgaagtaatcaccaatggacaaaacccctctgttttctaatgtggagggcctggagttacattagcaagcctggccattttgcaggaccaaacagaaaaggaaagatgaaaaccagaggtatgcaaatactgaatagtaggcaaatgaaagcaagccacaggactgggaaacaaacagagaagcagagttagaagttgtcaactggaagtcaccaagaaaagacgaacaaagatatcataaaaagaggaagttaaatattgagcccctgaattcaaagccatcagatgtcagcaggtaagtccccatggatctgaaggaagtctaccagacaactcagaattgtttgcatggggtttcctgcaagtgcaacatgttttgccttaatttatgttaacagtatcacttggcatccaacaacagttctggggatatcacccttatatttaaaataataacaagcccctacaataaattgtcaatggtttcagaacaaagagtaggttccacagttagaaacacaaggcctaccacacttactttgagctctccttcctctgtgttttaattcttttattttattgctgaaaaatccactcacctatctgaaaattaaggtcccacccagccatc

SEQ ID NO: 712035 - DNA, 858 bp, Homo sapiens
aatttatggaaaataaatttaagacaaccatttcttttaagagcacagtattctcaaagccaggtatcyatgaataaacgcccacatgtttttaagtctcaaaatgttgcttacatagtgtcatcttccaggattcggagaaaatctctgaaaatcttgttaggctgcctatcaatgtcaggtacatggcaactacactttccatgtttcagaaaagccaccgtttccatctttcccgcaatggccattcaattaataagataatttaaatgttagagtcttgtaagccttttcatagaactcattaacataccaaaagattctttttcagattgagtgtctcaattttgggttcagaaaatatttgtcgctgatcaagagtgacacttggtggacacactcgtgtatgaaaaccatcctgaaatgtgatgctttctttctgcttttgcccctgcagctgagggagcctgcggaggaaccttacgcgggaccagcagctccatctccagcccgcacttcccttcagagtacgagaacaacgcggactgcacctggaccattctggctgagcccggggacaccattgcgctggtcttcactgactttcagctagaagaaggatatgatttcttagagatcagtggcacggaagctccatccatatggtaagtcccgggaagagatgccacaaaggatacaggtgtgttttccccgttttttcccccaacgagcttcaagaattgcttgtctctggacgttcatgggcaagcatgtgtgttccttttttcgccttgctcttttggctctggaaaagttacctttactgtgagtaatttcaaagtttctaagatgtctttg

SEQ ID NO: 712036 - DNA, 858 bp, Homo sapiens
aatttatggaaaataaatttaagacaaccatttcttttaagagcacagtattctcaaagccaggtatccatgaataaacgcccacatgtttttaagtctcaaaatgttgcttacatagtgtcatcttccaggattcggagaaaatctctgaaaatcttgttaggctgcctatcaatgtcaggtacatggcaactacactttccatgtttcagaaaagccaccgtttccatctttcccgcaatggccattcarttaataagataatttaaatgttagagtcttgtaagccttttcatagaactcattaacataccaaaagattctttttcagattgagtgtctcaattttgggttcagaaaatatttgtcgctgatcaagagtgacacttggtggacacactcgtgtatgaaaaccatcctgaaatgtgatgctttctttctgcttttgcccctgcagctgagggagcctgcggaggaaccttacgcgggaccagcagctccatctccagcccgcacttcccttcagagtacgagaacaacgcggactgcacctggaccattctggctgagcccggggacaccattgcgctggtcttcactgactttcagctagaagaaggatatgatttcttagagatcagtggcacggaagctccatccatatggtaagtcccgggaagagatgccacaaaggatacaggtgtgttttccccgttttttcccccaacgagcttcaagaattgcttgtctctggacgttcatgggcaagcatgtgtgttccttttttcgccttgctcttttggctctggaaaagttacctttactgtgagtaatttcaaagtttctaagatgtctttg

SEQ ID NO: 712037 - DNA, 858 bp, Homo sapiens
aatttatggaaaataaatttaagacaaccatttcttttaagagcacagtattctcaaagccaggtatccatgaataaacgcccacatgtttttaagtctcaaaatgttgcttacatagtgtcatcttccaggattcggagaaaatctctgaaaatcttgttaggctgcctatcaatgtcaggtacatggcaactacactttccatgtttcagaaaagccaccgtttccatctttcccgcaatggccattcaattaataagataatttaaatgttagagtcttgtaagccttttcatagaactcattaacataccaaaagattctttttcagattgagtgtctcaattttgggttcagaaaatatttgtcgctgatcaagagtgacacttggtggacacactcgtgtatgaaaaccatcctgaaatgtgatgctttctttctgcttttgcccctgcagctgagggagcctgcggaggaaccttacgcgggaccagcagctccatctccagcccgcacttcccttcagagtacgagaacaacgcggactgcacctggaccattctggctgagcccggggacaccattgcgctggtcttcactgactttcagctagaagaaggatatgatttcttagagatcagtggcacggaagctccatccatatggtaagtcccgggaagagatgccacaaaggatacaggtgtgttttccccgttttttcccccaacgagcttcaagaattgcttgtctctggacgttcatgggcaagcatgtgtgttccttttttygccttgctcttttggctctggaaaagttacctttactgtgagtaatttcaaagtttctaagatgtctttg

SEQ ID NO: 712038 - DNA, 603 bp, Homo sapiens
tacggtgaatatcatagatgctcatggaaaactcggaaaactcagaaaacagacgaaagcataaagtaaaaatcaccagtggttcaactacctgtagataagagttggaattttgttgactttcagtttttaaaaatggtcaaaaaataatgacctcctactagacaaagaattcacagtaatctttaccaaaatttttgattttctcatctgtatgacaattttacattcacgcctcaatcagagtatgtggttttatgcctacccatcatagtatatatttgcamccagtctcctatgaacaatattgtagtatttcccttcaggaaatcaaaatggagtccatgacaaagtctaataaaattgttttaagaaggagtaaatagtctatagaaggaaagaataaaacataagcaaagtaaaaatcaactactgggttatctttccaagccattcaacgtttgaacaaaggagaaaacttaaattgtaaattttgctaagaatttctccacaaaattataattattatttggttattataaccatatttttacatacataatgcagtgcctaactagatggtggagctgcattttgatacag

SEQ ID NO: 712039 - DNA, 624 bp, Homo sapiens
agacagggtttcatcatgttggccaggctggtctcgaactcctgacctgaggtgatctacctccttggcctgccaaagtgctgagattacaggcatcagccaccgcgcctggccaaatataccaattgtttaacccttagttagtgataaaggcagcasttgtttaggtctggcctcattacctttccttcaattattaaaaatacttcagaaaaaaagacattcatttactttgaaaattatgagaacaatttttaacaattactaccggtgttcattactgatttcaatgaatacaagatgaaaaaatcagtgcaagactaaatatgtatttttctcctctttttgtacgtgttaactatttttgaaattttcatttatacatagtaggcactttggttcagattaaattgatgaagaacagcggaatgattattctgagcaagttcatcagttttcatcattgattaggtaggagtgtaatgaaattaagatcatggtttagccgagattctattcagttatttctgtaaaatatgagctcatcttttttgtgaagtgggtaatcatttaattttagttttcaaaaacattccttagaaaagaaatagtggccatggtgtc

SEQ ID NO: 712040 - DNA, 624 bp, Homo sapiens
agacagggtttcatcatgttggccaggctggtctcgaactcctgacctgaggtgatctacctccttggcctgccaaagtgctgagattacaggcatcagccaccgcgcctggccaaatataccaattgtttaacccttagttagtgataaaggcagcacttgtttaggtctggcctcattacctttccttcarttattaaaaatacttcagaaaaaaagacattcatttactttgaaaattatgagaacaatttttaacaattactaccggtgttcattactgatttcaatgaatacaagatgaaaaaatcagtgcaagactaaatatgtatttttctcctctttttgtacgtgttaactatttttgaaattttcatttatacatagtaggcactttggttcagattaaattgatgaagaacagcggaatgattattctgagcaagttcatcagttttcatcattgattaggtaggagtgtaatgaaattaagatcatggtttagccgagattctattcagttatttctgtaaaatatgagctcatcttttttgtgaagtgggtaatcatttaattttagttttcaaaaacattccttagaaaagaaatagtggccatggtgtc

SEQ ID NO: 712041 - DNA, 607 bp, Homo sapiens
agaaatgctaaatgcttgaggtcatggatatcctaattatcctgacttgatcattatacattctacgcatgtatcaaaatatcacatataccccatcaatatgtataaatactatgtatcaattaaatatcttatacatttttggggtaaaataaaaatctgtctctgagtagacagagctaatgtaacaacaatttagctacatggttgaaaatttgcccaatgtatggtgaaaacgtaggagcataaggccaatgggaagagacaaagacataaaattgttggtgacaccctccggcatcacacctatatgtccttcagctactggccacgcctwctcttccacattgcttccattctcttcaagggccatgactactcaacgtcttaacttgcttgtttagtcatccttatcattcatctccctgtaacccaaatttgaatctccttgtgtgtttcctcctgaatggtatcctggtgcccacactagacacatgaaaacctcaatttctcaaattctctcactcactggtttatgctttgatcaaagttatttcctgagcacttatgttagatgggagacacacagataaaagagaatctaatc

SEQ ID NO: 712042 - DNA, 607 bp, Homo sapiens
agaaatgctaaatgcttgaggtcatggatatcctaattatcctgacttgatcattatacattctacgcatgtatcaaaatatcacatataccccatcaatatgtataaatactatgtatcaattaaatatcttatacatttttggggtaaaataaaaatctgtctctgagtagacagagctaatgtaacaacaatttagctacatggttgaaaatttgcccaatgtatggtgaaaacgtaggagcataaggccaatgggaagagacaaagacataaaattgttggtgacaccctccggcatcacacctatatgtccttcagctactggccacgcctactcttccacattgcttccattctcttcaagggccatgactactcaacgtsttaacttgcttgtttagtcatccttatcattcatctccctgtaacccaaatttgaatctccttgtgtgtttcctcctgaatggtatcctggtgcccacactagacacatgaaaacctcaatttctcaaattctctcactcactggtttatgctttgatcaaagttatttcctgagcacttatgttagatgggagacacacagataaaagagaatctaatc

SEQ ID NO: 712043 - DNA, 801 bp, Homo sapiens
tctactagaaataatatgtggcagtcagtgttcaggtactggaatggaaatttgtggctcagccttggaaaacccaacaatatttttttgtcctcaagacctagcagtgtgtccttggctctgactctctctagcaactacactctctctctctatagacagacagatagatagatagatagatagatagatagatagatagatrgatagatggatagatatagtgtgtgtatatatatgtgtgtgtgtgtatatgcgtgtgtatatatgtgtgtgtgtgtgtgtgtatgtgtatatacattgagcacgaaagtttttgaaagagtagcctacacccacatctgtacttctttaactagtaggtacttctaaattcaattgatcactacaatgtaactgttgttactaaagtgatcagtgaccaattctatgccaattacaatggtcatttttcagctactgcccacttggctcctccattccatttgacattattggttgatctttgtttcctaaaacctatctgggttcctctctcatctcctctcttatcaccaattattttttatttgcttttcctatcttccttttaattgctcatgtacctcaggcttttgttcttgtccttctttgacttacaaatctttcctagaagatctcaaacactttaaagtccataagaatgatgactagtatattgatatttataaatattgtatcaataatttaacaactaaatgatatagtgcatcaataattatcatttattgagtctgtactcaattctgggtaatttatata

SEQ ID NO: 712044 - DNA, 610 bp, Homo sapiens
cattcttaaatatctgctagacgtaataaagaaatcaatgaactttatgttcttagctcccacagtttagcctaaatatttgccctggcatgcttatactggtccaagcaagcattaggtcatagcctattcctcttccttatttgaaggtgtttttacctttctcagcattccacaagttacttcctccttcctttgttctcctctgcctttgcctcttttaaaaagttctaagttgctaaccaatcgggacaaatacagaatgtgaggtcccgttccagccaatggaaaccagacacagcagtagggtgggcacgtcaggttatcaatgaccctgtctcctttgttcagtgtactctygtggcaaaactgctggtgggtgtaccctttctgcagaaagtaacaatggccttgctgaggaaattaaatttatgttcaagtgctatttctttatggcaataaggaacaagcatttctaacataaataagacataatccctactttcagggaactcacataaaattattaggacatcatgtgtaatatttatttggctatgtttttcaatttactgttttattatttttatttaaatttcatttatttagt

SEQ ID NO: 712045 - DNA, 649 bp, Homo sapiens
tgagaagtaagtccttggactaaaaaccccagaaagagcacctttgtccctcagaagatggtgtggctccaagtcaactacatcttcaggacacttctaagttggcctattctgccttttatgaaacccctaagaggtcccaagagggagccctccagctaaggtggatctaggaagcttgcataaagacagacatctcttcccctctgctgggattgtggtgggacttctgcttccctcagccttttcagagtgggtggggaagaaccgggattcccattttagttgctggaaggctactgcrggaggtggtagactctgtgtcctggatttcagcaggcttctcccttgacagatcccccacgtgtggtgagcctggaggagcctgagctgcgcctggagcactgcatcgagtttgtggtgcgtggcaaccccccaccaacgctgcactggctgcacaatgggcagcctctgcgggagtccaagatcatccatgtggaatactaccaagagggagagatttccgagggctgcctgctcttcaacaagcccacccactacaacaatggcaactataccctcattgccaaaaacccactgggcacagccaaccagaccatcaatggccacttcctcaaggagcctttcc

SEQ ID NO: 712046 - DNA, 642 bp, Homo sapiens
ataatgggtgtgcctgtgtgcatgcatgctcacgtgtgtgtctgtatgtctgtgtgtgcatgttcactgtgtgtatgcatgctcatggcatgtgtatctgtgtatgcatgttcatggcacatgtgygcctgtgtgcatgttcatggtatgtgtctctgtgtgcatcctcatggtatgtgtgtctatgtggtgacgcatgctcatggtggttcgtggggccctggggctctctgtgtgtgcatgcttgtggcgtgtgtgtgcccatgtccgagtgggatgtgtgtagggcttgtgcctatgtgtgcatgaggatgcctgagagtgtgcacctctctccagttctctctctcttcttaatcttttttacccaaggatttatggaaaattccagggtggaggtggtggctggggagggagacccttagctatagtctcattggcctcagagctgctctggagccagaggggacaacatttcccaggctctaagagcttctcctgacagaaaagcatcaatctgcttgtcaaagggaaaatggccatttgtccttgtctggaaggacccgagggcagggctggacctgagtaatctctgtctcctgggcccagcaccaagtagggtaagtgacggatgagctcagg

SEQ ID NO: 712047 - DNA, 792 bp, Homo sapiens
cccttctcctggtcacctgcctcacataccaggtgccactctgggtccgtttgtggggaaggtggaagctccgccgcttacagcccccagagctgcagaactagggagaattccatttggttttgttcagttctcaaatgagaaaatcttcaccaaccctttctaataccattgcttaggggccagcatggctggttcttcatgtttgctgcaaacacctgcaatttttccatcctgctaacttaaaagcaagaagccctgtgtgcatagtttaatgacagcaacctagtggggctaaaaatcattcacgtggctctatcgaaggctcaagcctgcagttctcgcaggaggcttgacctgtgacctctcctgtattcacccagtggcctccacactcggcctcgagccctgcacacattctgagaaaactagcttgacatctgaaaaatgaatgtaacgatggtgcccaagccagaaggaaattaaatgaccaatagtaagtcagcattagatttcagtttccagagggcattttctacagtatttaacttccactcatttacacaggccagatctctgttctcctaatacggggagtccacagttccggtcaataagattagtcctaataagaaaaaaactgagttagtctcaatggaactgcctaaggctacagacattaaaacaaaggcctacaactcataatttgcaaaacaagtttcaccagatgatctataaagaagrtaccaatgatccagttaacttcactaaatctacctgtctacttttagg

SEQ ID NO: 712048 - DNA, 2894 bp, Homo sapiens
  misc_feature 713, 773: n = A,T,C or G
tgttccatacacaggatggtgtgtttaaaaggtgtgcatgttacccaggcttggccaatcagaatctttcctaagattgttaaattaagtttaayaattgttagattgttaaattaagttttaaattaattgttaaattaaatttcctaaaattgttaaattgtctctggtagacattctagaaacatatgtaacagagacagacacacacacacaaacacatacacacacacacacagagggagagagatgagaaaagatatgaggtgataaggaagagaaatgcagaaaaatagagatatgcataaagaaacacagagatagaaaaatgcagataaatagtgacaataaattagaaaaatagagagaaaggcactgcagtgaaagagacacaacagggggacagagacagaaaatgcagagagatatgcagaaagaactatacaggggcaaagatacacggagaaaaggagacagatgcccagatagaaatacaacagaaacagaagagagatgaagatcttattgaatatctggaactagttgcttctgtaatcaacttgaccttaggcttccttgtaccatgaacaaaatatatttggttttctatcatttagaaccaaaaatagtacttttattgctggttatgctttcttaacaataaaaattattctcaattttaaaaaaaggtcactcttgtgagggcctgttantctctgatcaagatgtttgctgcatgttttccccaaaaagatgcaataatactgctatangtatcatctgtactcactcatggattttgctcccccgacgtcttagcacatcctctacaattatgacatgggtttttatcccagtgctcaccagcttgctatcataacacataatttggaagaatttcttgacatcttttgcttaaagctaatttttttttaaactgatgcatgctttctgctaccagttgcttttagccatcaaaaggaggcttggcgaatttaaaacagagagagagagagatgaattattcttttttatttgctcatttcccgacaattcttgctaattttaatgggttttgatgtgcaaaaatgatctcctgagaacagttcaatcattgcagagcacattaaaataacaaggcattatgccgtcttgagtccctaagagaggcaggtttggcagggcaaaagtgcaagaaagacctgcacattacagtgagattttactggagatgtgtgcatgtgaacttcactcaggctcaggcagctgaagggaaggagatgaaatctcagtaccaaacctggcaggccagattgacatgagggccatctggttcctctcacgaatgtcaggtagcagaatgagcagacagcgaaagctcattgctgagatctagttcattgtgaactgatttagagctgcgggaaaattttgcttctctgaaccacacggcagaacataaccttcacacatctccctctgcctttagcaaactgggcaggggagtgggtgccttgaaaacaatgacaggacggaaagaggaagcggtgtggttgacgttttacttttaaacacatttttaaagagtatagctttacaaacccctccactgccaaccctcaagttccaccttccactcctctgtaaaactgagctggaaataattaaatctaaagctaaaaatgagaggtggggagacatgttgtgtgtaaaaatatggctaaagaagcttcgctatttctttgaatcccttgatacttcttttatgcatatacttacgagttgttggagaggaaaatataatataatattttatcttctaaattaaagagtgtattttgctgccattaagataccatgggctttgctttattggatcattaatttgactttgaatggtcaaaggcttattcagtaagcatgtatcttgcaacacacaagaggtatatattaatgaaagactaaaacacacccaggagtctcttactgccttattaaaacatttataaatgggactttaaagtgctgctaaaatgaaaatgaaatgtattgattctcatgccagatgctctttagaaaatgcagtgtgtgttattcccacctcaaattataacttcaaatctgacctagatatacttaaagataattctctgaagacaagatgtagcagataaggcaattaaaccaagtcattcagatttctaggatggcctttgtacactaggtggcagaggcttctaagaatatctctcttatataaagtaccagaggtttgtttagctttgcaagctcaagcaaaacattcatgaaaatgttcttcttcagcagtggactaagattctcctttttacaaataagtggaaaaatttaaacagcatgttttgttctgtgtgaaccttcaacaatgcaatactttttttttttaaattttttggagaccaagtcttgtctctgtcacccagactggagtgcagtggtgtgatctcagctcactgcaacctccacctcctggattcaagcaattcttgtgcctcagcttcccgagtggctgggactacaggcgcccgccaccacgcccggctaattttttgtgttttagtagagactgggtttcaccatgttgcccaggctggtctcgaactcctgagctcagacaatccacccgcttcggcctcccaaagtggtaggattacagtcatgagccaccacacctggccaaatgcagtatattttttgtttagtgaatttattttttcatagaatagcagaatagggttttgatagtgttaatttttaatttaattcaactttactttggtttaattcatttttaaaagcttttttactttaacacaataaaaaaattcttaaatggcatgattcaaatgaatgca

SEQ ID NO: 712049 - DNA, 2894 bp, Homo sapiens
  misc_feature 713, 773: n = A,T,C or G
tgttccatacacaggatggtgtgtttaaaaggtgtgcatgttacccaggcttggccaatcagaatctttcctaagattgttaaattaagtttaataattgttagattgttaaattaagttttaaattaattgttaaattaaatttcctaaaattgttaaattgtctctggtagacattctagaaacatatgtaacagagacagacacacacacacaaacacatacacacacacacacagagggagagagatgagaaaagatatgaggtgataaggaagagaaatgcagaaaaatagagatatgcataaagaaacacagagatagaaaaatgcagataaatagtgacaataaattagaaaaatagagagaaaggcactgcagtgaaagagacacaacagggggacagagacagaaaatgcagagagatatgcagaaagaactatacaggggcaaagatacacggagaaaaggagacagatgcccagatagaratacaacagaaacagaagagagatgaagatcttattgaatatctggaactagttgcttctgtaatcaacttgaccttaggcttccttgtaccatgaacaaaatatatttggttttctatcatttagaaccaaaaatagtacttttattgctggttatgctttcttaacaataaaaattattctcaattttaaaaaaaggtcactcttgtgagggcctgttantctctgatcaagatgtttgctgcatgttttccccaaaaagatgcaataatactgctatangtatcatctgtactcactcatggattttgctcccccgacgtcttagcacatcctctacaattatgacatgggtttttatcccagtgctcaccagcttgctatcataacacataatttggaagaatttcttgacatcttttgcttaaagctaatttttttttaaactgatgcatgctttctgctaccagttgcttttagccatcaaaaggaggcttggcgaatttaaaacagagagagagagagatgaattattcttttttatttgctcatttcccgacaattcttgctaattttaatgggttttgatgtgcaaaaatgatctcctgagaacagttcaatcattgcagagcacattaaaataacaaggcattatgccgtcttgagtccctaagagaggcaggtttggcagggcaaaagtgcaagaaagacctgcacattacagtgagattttactggagatgtgtgcatgtgaacttcactcaggctcaggcagctgaagggaaggagatgaaatctcagtaccaaacctggcaggccagattgacatgagggccatctggttcctctcacgaatgtcaggtagcagaatgagcagacagcgaaagctcattgctgagatctagttcattgtgaactgatttagagctgcgggaaaattttgcttctctgaaccacacggcagaacataaccttcacacatctccctctgcctttagcaaactgggcaggggagtgggtgccttgaaaacaatgacaggacggaaagaggaagcggtgtggttgacgttttacttttaaacacatttttaaagagtatagctttacaaacccctccactgccaaccctcaagttccaccttccactcctctgtaaaactgagctggaaataattaaatctaaagctaaaaatgagaggtggggagacatgttgtgtgtaaaaatatggctaaagaagcttcgctatttctttgaatcccttgatacttcttttatgcatatacttacgagttgttggagaggaaaatataatataatattttatcttctaaattaaagagtgtattttgctgccattaagataccatgggctttgctttattggatcattaatttgactttgaatggtcaaaggcttattcagtaagcatgtatcttgcaacacacaagaggtatatattaatgaaagactaaaacacacccaggagtctcttactgccttattaaaacatttataaatgggactttaaagtgctgctaaaatgaaaatgaaatgtattgattctcatgccagatgctctttagaaaatgcagtgtgtgttattcccacctcaaattataacttcaaatctgacctagatatacttaaagataattctctgaagacaagatgtagcagataaggcaattaaaccaagtcattcagatttctaggatggcctttgtacactaggtggcagaggcttctaagaatatctctcttatataaagtaccagaggtttgtttagctttgcaagctcaagcaaaacattcatgaaaatgttcttcttcagcagtggactaagattctcctttttacaaataagtggaaaaatttaaacagcatgttttgttctgtgtgaaccttcaacaatgcaatactttttttttttaaattttttggagaccaagtcttgtctctgtcacccagactggagtgcagtggtgtgatctcagctcactgcaacctccacctcctggattcaagcaattcttgtgcctcagcttcccgagtggctgggactacaggcgcccgccaccacgcccggctaattttttgtgttttagtagagactgggtttcaccatgttgcccaggctggtctcgaactcctgagctcagacaatccacccgcttcggcctcccaaagtggtaggattacagtcatgagccaccacacctggccaaatgcagtatattttttgtttagtgaatttattttttcatagaatagcagaatagggttttgatagtgttaatttttaatttaattcaactttactttggtttaattcatttttaaaagcttttttactttaacacaataaaaaaattcttaaatggcatgattcaaatgaatgca

SEQ ID NO: 712050 - DNA, 2894 bp, Homo sapiens
  misc_feature 713, 773: n = A,T,C or G
tgttccatacacaggatggtgtgtttaaaaggtgtgcatgttacccaggcttggccaatcagaatctttcctaagattgttaaattaagtttaataattgttagattgttaaattaagttttaaattaattgttaaattaaatttcctaaaattgttaaattgtctctggtagacattctagaaacatatgtaacagagacagacacacacacacaaacacatacacacacacacacagagggagagagatgagaaaagatatgaggtgataaggaagagaaatgcagaaaaatagagatatgcataaagaaacacagagatagaaaaatgcagataaatagtgacaataaattagaaaaatagagagaaaggcactgcagtgaaagagacacaacagggggacagagacagaaaatgcagagagatatgcagaaagaactatacaggggcaaagatacacggagaaaaggagacagatgcccagatagaaatacaacagaaacagaagagagatgaagatcttattgaatatctggaactagytgcttctgtaatcaacttgaccttaggcttccttgtaccatgaacaaaatatatttggttttctatcatttagaaccaaaaatagtacttttattgctggttatgctttcttaacaataaaaattattctcaattttaaaaaaaggtcactcttgtgagggcctgttantctctgatcaagatgtttgctgcatgttttccccaaaaagatgcaataatactgctatangtatcatctgtactcactcatggattttgctcccccgacgtcttagcacatcctctacaattatgacatgggtttttatcccagtgctcaccagcttgctatcataacacataatttggaagaatttcttgacatcttttgcttaaagctaatttttttttaaactgatgcatgctttctgctaccagttgcttttagccatcaaaaggaggcttggcgaatttaaaacagagagagagagagatgaattattcttttttatttgctcatttcccgacaattcttgctaattttaatgggttttgatgtgcaaaaatgatctcctgagaacagttcaatcattgcagagcacattaaaataacaaggcattatgccgtcttgagtccctaagagaggcaggtttggcagggcaaaagtgcaagaaagacctgcacattacagtgagattttactggagatgtgtgcatgtgaacttcactcaggctcaggcagctgaagggaaggagatgaaatctcagtaccaaacctggcaggccagattgacatgagggccatctggttcctctcacgaatgtcaggtagcagaatgagcagacagcgaaagctcattgctgagatctagttcattgtgaactgatttagagctgcgggaaaattttgcttctctgaaccacacggcagaacataaccttcacacatctccctctgcctttagcaaactgggcaggggagtgggtgccttgaaaacaatgacaggacggaaagaggaagcggtgtggttgacgttttacttttaaacacatttttaaagagtatagctttacaaacccctccactgccaaccctcaagttccaccttccactcctctgtaaaactgagctggaaataattaaatctaaagctaaaaatgagaggtggggagacatgttgtgtgtaaaaatatggctaaagaagcttcgctatttctttgaatcccttgatacttcttttatgcatatacttacgagttgttggagaggaaaatataatataatattttatcttctaaattaaagagtgtattttgctgccattaagataccatgggctttgctttattggatcattaatttgactttgaatggtcaaaggcttattcagtaagcatgtatcttgcaacacacaagaggtatatattaatgaaagactaaaacacacccaggagtctcttactgccttattaaaacatttataaatgggactttaaagtgctgctaaaatgaaaatgaaatgtattgattctcatgccagatgctctttagaaaatgcagtgtgtgttattcccacctcaaattataacttcaaatctgacctagatatacttaaagataattctctgaagacaagatgtagcagataaggcaattaaaccaagtcattcagatttctaggatggcctttgtacactaggtggcagaggcttctaagaatatctctcttatataaagtaccagaggtttgtttagctttgcaagctcaagcaaaacattcatgaaaatgttcttcttcagcagtggactaagattctcctttttacaaataagtggaaaaatttaaacagcatgttttgttctgtgtgaaccttcaacaatgcaatactttttttttttaaattttttggagaccaagtcttgtctctgtcacccagactggagtgcagtggtgtgatctcagctcactgcaacctccacctcctggattcaagcaattcttgtgcctcagcttcccgagtggctgggactacaggcgcccgccaccacgcccggctaattttttgtgttttagtagagactgggtttcaccatgttgcccaggctggtctcgaactcctgagctcagacaatccacccgcttcggcctcccaaagtggtaggattacagtcatgagccaccacacctggccaaatgcagtatattttttgtttagtgaatttattttttcatagaatagcagaatagggttttgatagtgttaatttttaatttaattcaactttactttggtttaattcatttttaaaagcttttttactttaacacaataaaaaaattcttaaatggcatgattcaaatgaatgca

SEQ ID NO: 712051 - DNA, 639 bp, Homo sapiens
caggctggagtgcaatggtgcgatctcagctcaccgcaacctccgcctcccaggttcaagcgattctcctgcctcagcctctcgagtagctgggattacaggcatgtgccaccacgcccgtctaattttgtatttttagtagagacagggtttctccatgttggtcaggctggtctcgaactcccaacctcaggtgatctgcccacctcggcctctcaaagtgctgggattacaggcgtgagccacagcgcccagccccctagcccatttctttagtctatgtcacagcccctcaactacgtatatcatccaaaaagctgccttcttggctgtccttgtgctgggcaccctgctagtcacatagagtgcctcacagtcctcacagcaattttatggagtaggtggtattaactccaccttacagatgagaaaaatgagacccagaaattctgagccacctatgccaggtcctctagctagtaagcagcagaactagattcaaacctactgctccagggtccaggccctcagccccatctcacagcattccctgagatcccacagcaagcctctgcttgaacaccttcagcgasaggggctcacaaacacttactgaggacagatgataaacacacacat

SEQ ID NO: 712052 - DNA, 639 bp, Homo sapiens
caggctggagtgcaatggtgcgatctcagctcaccgcaacctccgcctcccaggttcaagcgattctcctgcctcagcctctcgagtagctgggattacaggcatgtgccaccacgcccgtctaattttgtatttttagtagagacagggtttctccatgttggtcaggctggtctcgaactcccaacctcaggtgatctgcccacctcggcctctcaaagtgctgggattacaggcgtgagccacagcgcccagccccctagcccatttctttagtctatgtcacagcccctcaactacgtatatcatccaaaaagctgccttcttggctgtccttgtgctgggcaccctgctagtcacatagagtgcctcacagtcctcacagcaattttatggagtaggtggtattaactccaccttacagatgagaaaaatgagacccagaaattctgagccacctatgccaggtcctctagctagtaagcagcagaactagattcaaacctactgctccagggtccaggccctcagccccatctcacagcattccctgagatcccacagcaagcctctgcttgaacaccttcagcgagaggggctcacaaacacttactgaggacagatgayaaacacacacat

SEQ ID NO: 712053 - DNA, 612 bp, Homo sapiens
tattgagatttatctgacatgatttgctaagttaattaccatagatgaatgagaaaaggagaggtgtatataactcataaatgatgcactaaagccagctgaagagccagtgacttcacggcacactgcacaaagtttgttggaagttaaaatagtggaaactaatgggaaaattgactcatcacataagcacatagtaataaagcacagacatgccaaattcattgagtctgaattaatttgagattaaatttgattgtgtaagtgtataaaatttataagcataaagagtttattcctaggtttatatttgtacatacccatttaagtaactttatcctaaatgcaatttatggcaatactaggaatttaggagaattcttttcaatatttcagaaccactgccctaaagcagtttattctgcaaaagcatcactttcacaagaataaaaatgcttcatgctttggaaattcaagctatcttttttcatcaaaatgctatraagccaagcatattttcagcctggggcaggcagataagccactctggactgcctattaatggaagaacaattccttggaagtcctcttaaggcaacagagcttccacag

SEQ ID NO: 712054 - DNA, 608 bp, Homo sapiens
tgtcaatgtaygacttcaaactcgagtgagagcctgttttaggtacacagggatgggggtgcatgtgctcccctcattgtcaaatgctacttccccagactaatggctaaggggacagaggtaagatatttagcctcacttcattcttaaatcaggccaggtagggttgttctaagcactagaagtccatgccacatcatggtgctcattaggaggcatcatgatttaggattcaggagaactgtgtttcatgtgggctctgctgtgaaagccaagcaagctgcactgtctctttttttacatttccccgtttatagaatggagaagaaggaaaagttatatctggcccctccctctctcacaaggaggaagtctaaatgagaagatcttgaacagcgagatgctgtgcccttctccccagctcccttctccacccatgttcacgttcattgccttctgtgacctgctggtttacgtgatactgaattaactatggacattagggtgtgctgaatccaactgcaatgattctatcttttcttgctggtgaggattgtgttgctaaaagttatacatactctttttctcttagagtgaccaacttttta

SEQ ID NO: 712055 - DNA, 608 bp, Homo sapiens
tgtcaatgtatgacttcaaactcgagtgagagcctgttttaggtacacagggatgggggtgcatgtgctcccctcattgtcaaatgctacttccccagactaatggctaaggggacagaggtaagatatttagcctcacttcattcttaaatcaggccaggtagggttgttctaagcactagaagtccatgccacatcatggtgctcattaggaggcatcatgatttaggattcaggagaactgtgtttcatgtgggctctgctgtgaaagccaagcaagctgcactgtctctttttttacatttccccrtttatagaatggagaagaaggaaaagttatatctggcccctccctctctcacaaggaggaagtctaaatgagaagatcttgaacagcgagatgctgtgcccttctccccagctcccttctccacccatgttcacgttcattgccttctgtgacctgctggtttacgtgatactgaattaactatggacattagggtgtgctgaatccaactgcaatgattctatcttttcttgctggtgaggattgtgttgctaaaagttatacatactctttttctcttagagtgaccaacttttta

SEQ ID NO: 712056 - DNA, 608 bp, Homo sapiens
tgtcaatgtatgacttcaaactcgagtgagagcctgttttaggtacacagggatgggggtgcatgtgctcccctcattgtcaaatgctacttccccagactaatggctaaggggacagaggtaagatatttagcctcacttcattcttaaatcaggccaggtagggttgttctaagcactagaagtccatgccacatcatggtgctcattaggaggcatcatgatttaggattcaggagaactgtgtttcatgtgggctctgctgtgaaagccaagcaagctgcactgtctctttttttacatttccccgtttatagaatgsagaagaaggaaaagttatatctggcccctccctctctcacaaggaggaagtctaaatgagaagatcttgaacagcgagatgctgtgcccttctccccagctcccttctccacccatgttcacgttcattgccttctgtgacctgctggtttacgtgatactgaattaactatggacattagggtgtgctgaatccaactgcaatgattctatcttttcttgctggtgaggattgtgttgctaaaagttatacatactctttttctcttagagtgaccaacttttta

SEQ ID NO: 712057 - DNA, 974 bp, Homo sapiens
ttttaaaaaccgtagtttaattacgttatctacaagaaattcacattagatgcaaataaacaaataggttaaaagtgaaagggtagagaaaagatatttcatacaaatgttaactaaatgacagctgggatggctatgctaatacataatacagggtttgagtaaaatagctgctgaaagtgacagagaagaacactaatattggtaaagggtcctttcatcaagaagatataacaattgtaaacatatatgtcacacagaaaagagtctaaaaaagacactgctctttcccatcttgcaagatggcaggtgaaaaagttgagaagccagatactaaagagaagaaacccgaagccaagaaggttgatgctggtggcaaggtgaaaaagggtaacctcaaagctaaaaagcccaagaaggggaagccccattgcagccgcaaccctgtccttgtcagaggaattggcaggtattcccgatctgccatgtattccagaaaggccatgtagaagaggaagtactcagccgctaaatccaaggttgaaaagaaaaagaaggagaaggttcttgcagctgttacaaaaccagttggtggtgacaagaacggcggtacccgggtggttaaacttcgcaaaatgcctagatagtatcctactgaagatgtgcctcsaaagctgttgagccacggcaaaaaacccttcagtcagcacgtgagaaaactgcgagcccagcattacccccgggaccattctgatcatcctcactggacgccacaggggcaagagggtggttttcctgaagcagctggctagtggcttattacttgtgactggacctctggtcctcaatcgagttcctctacgaagaacacaccagaaatttgtcattgccacctcaaccaaaatcgatatcagcaatgtaaaaatcccaaaacatcttactgatgcttacttcaagaagaagaagctgcggaa

SEQ ID NO: 712058 - DNA, 664 bp, Homo sapiens
cttcttttcttttccctctacctcttgtcctcacgatccctcagctcccccaccccacccaggaggcagggctaagtaaggccccatcactgagtcctgggcccagagagaaggctctgggcactaagtatgttggttgcctgtgcagcagtgcaggtgagcacactttgcacactgcagggacgatatatgcatgacccatggagatgttcacatgaagctgtggggacaagactgtatgggatgttaaggctgcatttaagtacttgacaggaacctaagwcagaacaggaagacccacagagcagccagaaagagggaggccagactctaaggaggaaaacagccggtttgaattgtgctcctgtttatcagcttttccaatgacaacatgaattcctggctcccccatcctggcctggactgccagaagcccaggaaaagcagcatcctacaagccaggagggccaaggcgctgacgactgctgctgtgacccgggacaggtcccatcccatctcgtgcctcagtaaatgtgggaagaggggagatgggggccactgagcaatatttaaagctccctttttgctctcaaaccgtctatattcaaactctttaaagcattcagaggctccagcttgggatcaattcagagctgccttgtca

SEQ ID NO: 712059 - DNA, 664 bp, Homo sapiens
cttcttttcttttccctctacctcttgtcctcacgatccctcagctcccccaccccacccaggaggcagggctaagtaaggccccatcactgagtcctgggcccagagagaaggctctgggcactaagtatgttggttgcctgtgcagcagtgcaggtgagcacactttgcacactgcagggacgatatatgcatgacccatggagatgttcacatgaagctgtggggacaagactgtatgggatgttaaggctgcatttaagtacttgacaggaacctaagtcagaacaggaagacccacagagcagccagaaagagggaggccagactctaaggaggaaaacagccggtttgaattgtgctcctgtttatcagcttttccaatgacaacatgaattcctggctcccccatcctggcctggactgccagaagcccaggaaaagcagcatcctacaagccaggagggccaagkcgctgacgactgctgctgtgacccgggacaggtcccatcccatctcgtgcctcagtaaatgtgggaagaggggagatgggggccactgagcaatatttaaagctccctttttgctctcaaaccgtctatattcaaactctttaaagcattcagaggctccagcttgggatcaattcagagctgccttgtca

SEQ ID NO: 712060 - DNA, 730 bp, Homo sapiens
ttctaaaataaaagtaaataggctttcagtggctgggccacggggcagggccaagggctttcccataggtgacaggcagaagcttagtatgtgggtttcaggcatcattttgtttgccaggggctcttttctttattttggcttctctggagtcttgaggagtgcgtgacaacatctccttgtgcaggctgtagtagtcacatagccttaacatcatgtgacttgctttgctctaagcttcttgttccctgagtctctgtgctggcccctaaatggtggcattgcctcacattccatttgtgccctgcaagaggaatctggttcmctgaaccatatgcaggggcctcctgctgccattggagggcccctgtcatagagatgccctctggaaaccatgtagatgtgtctggatgttgaggtgtgtcaccttgtgcttctcagagaggtcagcaccctgatagtcacaaactgctatgtcacgaatctcaaatctccctgggatgtcttcctcttgaccagtaagcagaagccggtgttggtggctatgggctgctgcttggtgctgttagtgcggagacgatacatggagagttttctaatttcctagggactggaactttctacctacccacctgtgcccctcccttgatccctgcaaaaccctgcaaaaccctgcaacctcagtggacattctccctgtatttgtaagatcttgttgctctgcttttcc

SEQ ID NO: 712061 - DNA, 555 bp, Homo sapiens
ttttttctcaagggaatcctttcccctgcgggtagaagatggggaggggatggccagggaagcaggagagtttctgggggtgcgagggaggcagccccgccatggtgatgctgagactaactctagtgtttctctctcctcctcatttcccctttgattctctcccctactccttatctttcttcattgccccatcctctctccacctccctctgtatcttctctccctccgctctccccmacttccctctcttgcattctctcgcttctgttctgtctccccgcacccttgttctgctcatctctcccctctccctccttcctctgtcatttctctcttcctgcctcccaaccctctcggctgttcttttctcctctcttgccatctgggctcccacagagcccccgaagaaaaagcggtctgtggtgttggacgagatcctggagcagctggaaggcagtgacagcgacagcgaggagcagacccttcagctgtgagctggcaccgagagggtgtgtggctccggggccctggggaccgggacagccgctcca

SEQ ID NO: 712062 - DNA, 555 bp, Homo sapiens
ttttttctcaagggaatcctttcccctgcgggtagaagatggggaggggatggccagggaagcaggagagtttctgggggtgcgagggaggcagccccgccatggtgatgctgagactaactctagtgtttctctctcctcctcatttcccctttgattctctcccctactccttatctttcttcattgccccatcctctctccacctccctctgtatcttctctccctccgctctccccaacttccctctcttgcattctctcgcttctgttctgtctccccgcacccktgttctgctcatctctcccctctccctccttcctctgtcatttctctcttcctgcctcccaaccctctcggctgttcttttctcctctcttgccatctgggctcccacagagcccccgaagaaaaagcggtctgtggtgttggacgagatcctggagcagctggaaggcagtgacagcgacagcgaggagcagacccttcagctgtgagctggcaccgagagggtgtgtggctccggggccctggggaccgggacagccgctcca

SEQ ID NO: 712063 - DNA, 938 bp, Homo sapiens
tgtaatcccagcagtttgggaggttgaggcgggtggatcacttgaggtcaggagttcaagaccagtctagccaacatggcaaaaccccgtctctactaaaaatacaaaaaatgagctgggcattttttgtatgaggcgggcgcctgtagtcccagctactcaggaggcacgagaatcacttgagcccgggaggtggaggttgcaatgagctgagatggcaccactgcactccagcctgggcgacagagcgagactctgcctcaaaaacaaacaaacatacaacacagtaggctcactgctgctgtgaaagttcacagtstgttgggagatggctaagtaacaggtggtcatggtgccaaaggagaagtggggcaggtgtccaaaggaagggtggggagggcttcccaaaagacgtggcttctaaactgtgtcccaggaggtgagtaggggttaccctgagaggtggacttaccctgagggcagcagagagcccctgaaggtccaagagcaggagagcagccatgcccagctgcctgtgaagctgccacctcctctccctccacaccctgacactcagggacacgcccccgcagcccacactcccaggaaaagcattcctctagcggaccttctggttacttttatagataaccttgtggccggccctccaccacctctgcagaaacaacaccctcaccccacgaagcccgacctgttctctccctggctgactttgaagccgtggttgtagcagagtgggtaggttctgatgatgggtagagaaggcagaggccagagcgaggcagccaaggccaggaacgccaggagccaccagaagctggaagggccgaggaagtatcctctagagcctccaggggagcatagccgtgctcacacctggatttcagacttgtggactctggaactatgaaagcata

SEQ ID NO: 712064 - DNA, 804 bp, Homo sapiens
aaaaaaaaaaaacaaaaacagaaatctgctaggagctttccagaaaagtttttgttttcctaattaaaatgatagtgaaactgtaggccctctcccttcctgccttctttctgtctttctttaacagaggcagatgtgatgtctggagccatgacagctatttcccaaccttgaggcaaaggccaatagaatcataaagacagaagctgggctcggtggctcatgcctgcaatcccagcactttcggaggccaagatgggtggatcacttaaggtcaggagtttgagaccagcctgtccaccatggtgaagcctcatctctactaaaaatacaaaaattagcagggcgtggtggtacacatctgtaatcccagctactcgggaggctgaggcatgagaatcgcttgaacctgggaggcagaggttgcagtgagccaagatggcaccactacactccagcctgggcaacagagcgagactctgtctcaaaaaacaaacaaaaaaaagaatcacaaagacaaacaagctatttaatccacaccagtcacctccctccagactcttcattatataagaagaacggctcccatctgtttaagccatagttggcttttctgttgcttgctctcaaatgcattcttgagttgatctgtggagtaagggtttggggctgtggatgggggaataacaatatgggtgagtctgaattcaaaagcagcagccttaagactctaagatggayaccatgcttgaaagagccatctctgatggtaaaatgaatctattgcttacttaaatatctcca

SEQ ID NO: 712065 - DNA, 663 bp, Homo sapiens
atagtgttaatagagcttggaggaggaagctattaattcttcctcgtggggagggagtgtggaaggaggtgacatctcagaggaggttgaatttcacaaggatcttaaaagataaacaagagtttgtcaaagcaaaaaggaaatgaagagttgcagcagttactgtggagttactacccatatctgttggactcaccatccaggacatttcacagctgcctactgcatgcacgtatgactctcagcctgaggtttgctttctaaagtgagctgggcatgcagcaagggctgaagagataaagctctgggaggagccctcagccagtggtgggtaggagttggaggataaatgccctaatttctttgcccctcaagtggaacaacttagaggtgagttctgaggtctccaaggagattgggcctcgttctcccatagtgattgcrtgcttgataacacattctttactgacttcctccttttcccttcctttccccatcttacctccccacttccctagcagtgtttcctgagatcacctcccaaacaattgcatctggaatccttcactcatgtctacttctgggagaagcatctaagacagtcatggtccataaaacagcagcaacatgaacaaagacacagggctcaactgtaccaggcaa

SEQ ID NO: 712066 - DNA, 399 bp, Homo sapiens
  misc_feature 299, 300, 301, 302, 303, 304, 305, 306, 307, 308, 309, 310,311, 312, 313, 314, 315, 316, 317, 318, 319, 320, 321, 322,323, 324, 325, 326, 327, 328, 329, 330, 331, 332, 333, 334,335, 336, 337, 338, 339, 340, 341, 342, 343, 344, 345: n = A,T,C or G
  misc_feature 346, 347, 348, 349, 350, 351, 352, 353, 354, 355, 356, 357,358, 359, 360, 361, 362, 363, 364, 365, 366, 367, 368, 369,370, 371, 372, 373, 374, 375, 376, 377, 378, 379, 380, 381,382, 383, 384, 385, 386, 387, 388, 389, 390, 391, 392: n = A,T,C or G
  misc_feature 393, 394, 395, 396, 397, 398: n = A,T,C or G
tgctgattcaacattctccrcattttgctaaactatttcttactaaaaatctacatcttcaaaatatctagtgatatctgattcagacaagattaaatttttatttgttgactcttgaaaatattacataattatacttgattggcatatgtaattaatgtaaatgaactcattttgtttgaaaaaataggaatggccacaatgacataaaactttaaatatttagtttaatatagcactttgggagcctgaggcaggcggatcacgaagtcaggagtttgagaccagcctggctaacnnnnnnnnnnnnnnnnnnnnnnnnnnnnnnnnnnnnnnnnnnnnnnnnnnnnnnnnnnnnnnnnnnnnnnnnnnnnnnnnnnnnnnnnnnnnnnnnnnnnt

SEQ ID NO: 712067 - DNA, 769 bp, Homo sapiens
ttcgagttgtccccgcctttcttgacggaaccaatgtagttcttacatatattgattgatgtctcatgtctccctaaaatatataaaaccaagttgtcccccaactaccttgggtacatattgtcaggacttcctgaggctgtgtcacgggtatgtatcctcaaccttggcaaaataaattttctaaattaactgagacctgtctcaaattttctgggtttatagaagaaaacctaacctgaggaacagaaatgaattcctgataatatttcaatccagaaaacactttaatgagaatgaacacatatttttttaaaggcgtgctcaaaggccaaacaattaacaaaacagtatttaaggggcaataaagagctaagaaaacaaactgaaaccaaaattaaaaattgcaaagagcaaactaaacaatcctgaaaactgaatcaatgacatacagagaggcctattatgataatagtaaaagaaaaggacagaaatttaactaaccagaagaaaatgaaaagaactccaaaacaccaaaattgatctgatgttaggataattcaagtctatgaaacaaagaacaaaactaacagagaagaaaaaattttcaaagacaaaaagcaagaaaatttccttgagttgaattagaagaaccaaatctttctctaacaggaagattaatactgtaacataatgtagctaacttattgcaattcaagactgrcaaaacaaaaattgctaatcatggaacaaatcatctaaagagaaa

SEQ ID NO: 712068 - DNA, 643 bp, Homo sapiens
cccgtctctactaaaaatacaaaaaattatttgggcatagtggcgggcacctgtaatcccagcttattgggaggctgaggcaggagaatggcttgaacccaggaggcaggttccagccactgcactccagcccaggcgacagagtgacraaaacaaacaaaaaaaaaaaaagaaaagaaaagaaaagaaaatttattaaaaaagcaaaattcaggaaaatgaaatggaatttagctatgtacagaaagtattagcgatgtgaatatgtgagtcagtaatgacattaaattccatctatagaaaaggtagaatttaaagtacatcttaaaaaggacaaagcgattgccacttaaaaggtgtaacttaactgcatcccagaacaaagttcaaatatatttttataaacaacaacaccagccactcaacagcatacattcctcatgttcaacaacgaatcaaatattagaaagacaggactcatacatttgagaaaatcaatcagcagaaacagatctcaaagtgattcaaagaatacacttagcatgtcaggacattaaaacagatataaatgtgttccatatgatcaaaaaggttggaaaatatgagcaccatgagggaaggaatggtacatgtaaaataagcc

SEQ ID NO: 712069 - DNA, 1538 bp, Homo sapiens
ggggcggggcagggagaaaggccaggtcaattctctcacctctttctccttccgcttccctcctcccggggctggctctggacctccatttgccattctgcccaagtacagttgtcaaagttcccagggaccaccaggtacccccatggtgatcaccaagtctggagcagccttccccatacttccatcccccatgcacaccaggtcctgggtctgtgctgggtgcacagatcaggaagtggggtgtgtatggaaacttactcctggggtgaccggttacatactgggtggggagacctcacctgacctgagacgtaggttgtgctcttacctgtgtctaccagagccgctgaaagagaagaacccagcccagacccaggacatgtcactgcaggggaagcagagatgctttgggccccggagaaggggtggccacatctgagccctacctgtcttgggtgggtttctcttaaccttcatccagtcgaaggtccgggccgtgggggtgttaggttctgaagggcagggtgtttccttgtcctcggagaggagatcagcataggccggtgcaaagctcgcggtctgctcgttcccataagggggatgctgcggaggatatggccccggaccggctccacctgctccgtagccatcggacaagccccctagctgggccccgtagctcgagggatgaaaatagcctccgtctccttctgattgacccagagggtagtactgagaaggcccgtagctggggctgcaggcggcaggagcataccccgagggcgcggagctggggaagggcacccccagggtcgaaggcggctgctgggcgggatagccggagttctgctgaaacgcagggctggacagccccccaccgtagcggccctcgcttgcatagctgtcaaccgcctgagccgagcttgggggaaaggaggttggggcgctgtgggcgctgtaggcgctgggtccccggttacagagtgggtactctaagaaggagttcatcctattatagtccatgcgtcaaggccgcaggagggtcggcccgtttgggggagacaccctcttgccctacaacctttcggcagtatgtcacagcgctggggctcgaatccatggcctgacccgctcgcctgggcaagcgcttccctaggaagggggtagggagtgggggtgagggggcacatgtgatctctcccaggccaatgggctaagcgggccagagtttggcagccccagcgcccatccatcaccccccaagcrttagcatgacaaagacacttcaatcacccgcagcccatccatctgagagcgacatggaagcgtcaaaaacatctttcttcaaagacttttggaaagaagggaccagagggagagggggaaaaagttaggagaatattcaagactttccttccctcccaacccccaaggccttcaataggctcctgggttattagatttggacaaattcaagccagctgcccctcactcttcccacccctcagagaaaccttccccctaagtctgtggac

SEQ ID NO: 712070 - DNA, 1505 bp, Homo sapiens
caaactttccacccaacttagcgctttccctctgtccccatttcccatctgtttcccagctctcccagaatcacccttctcttttgcacccccacccccacccccaggcctttttaagggatgtgaaattttggctgttcgctctgctttcccaaagagccaaattctttgatgcaatcggagggagctgtcagggggctaagattgatcgcctcatctcctctccatccgtctgacccacttatttaaaaatcttcccccagatcgacttttcattttctgctttgaggcctagtttcccaccaattgcttggggctcagagtcttgtgccctctccccatagtaaattacaacactctaaacttcagactatcttggtctcctcaaaataaaataaattttaaaaacattttcccccagcagccagaaatggaatatcatctcagtggtcattatttccacccctaccatcttcagggaattcttccttgtcagggattcttttttttttttttttcttttttcttttttaactagcacaatggcaaaaatgggagggaaagtctctttgtcctaggggaaaatctccccaccacactcatgcacacacataacgctgatctgaactttgagagtgctctaagttaaaccaatggctacctcagttcttgttcatgtccctggatatggatacagatacaagcttgaggcttgagtgggtacatgcacatcttaractctgcctgtttttgggggatgtcacagagaagcatggaagcctgaaagtgaggaaagcaggggtacataaggggcagaggcagtgctgcaaacactgggcagagaagagaacccagaccatacagcgatggaggccagaggcccaaaaatgccccttatgctccatctcactcctatgtgtctgcctgggagttcctgtccatttcccaagatttaactgttgtttttggagggtaacagggatagtggtgtgatgattgtaaatctctttcttattttcaccttaatactgacctttttcaaagagtggaagcctctttcgactccctcttcctccaacgcggagatcctcactcatcttttcctggggaaggggagaagggaaggggatgctgctggccacgtaaagaaggccttaatttactctattaaaatacttggaaaagaggaaggtttctcccttagagtctcttcttttccaggcttctgaaaccttctaaccttcgaaggggatgaggaaaaggttcctctagcttttctggagaaacggaggcattggggagagagcatgtgaggcactggtgtaggaatgggggctcatggtgtcctggtcgtggtcctctggtgtttttgaatcaattaaaccaaataatgctctctgttttccaccaggcccagacgagcgattggcggaggccggtcccgtgaccacgaattccctgtaatttcgctggagtcctgggtttaatagagagagtccccatac

SEQ ID NO: 712071 - DNA, 397 bp, Homo sapiens
aacaggcaaaatttattacatgtaatatctgcacctttctatccatgttggtctaattaattagtggataaaagtaatgttcacctattatatattcactgtcttaaaatcccatgtgtaaattccaatatcggaagaaacatttggatattaatggtaaagtatcatgagaataagaaataagatacactatctcaccagagaagaggtctctgctaagaaaaagaatggttataagggcaatgacttttaaggagctcatgcttccaaaggctgtggcaattcattgttaatatgcctgttaycatagtagtgttgttttggcattgtctagtgcaaatagcttgagcctggtattaaactgacctgggtttgaaactcagttctacttgctagg

SEQ ID NO: 712072 - DNA, 397 bp, Homo sapiens
aacaggcaaaatttattacatgtaatatctgcacctttctatccatgttggtctaattaattagtggataaaagtaatgttcacctattatatattcactgtcttaaaatcccatgtgtaaattccaatatcggaagaaacatttggatattaatggtaaagtatcatgagaataagaaataagatacactatctcaccagagaagaggtctctgctaagaaaaagaatggttataagggcaatgacttttaaggagctcatgcttccaaaggctgtggcaattcattgttaatatgcctgttatcatagtagtgttgttttggcattgtctagtgcaaatagcttgagcctggtattaaactgacctggrtttgaaactcagttctacttgctagg

SEQ ID NO: 712073 - DNA, 930 bp, Homo sapiens
ttaatcttcttgtttgtggaatattagtgtctcttgagagtgtaacaaatattttcacctgccccaatcacctctccccattacatacatacactcttaaagagttttgtagtcatcaagtttgggaaactgcctgctctctccttctctttgtgattcataatgtatatatgcattttaaagcctctgtggagttctaagtgaagaggactctttgactttgtttaacagagcatcattctcctaggaatattgattatattttggtaatcacaatttcagaaatgctggactagagctataaataagaattaagggccaaacttgcagcaacttaaataccggctgagttggaaccttgtgtgggcaggacagtttctaattgttgcagaggtgttatagacctacatgatcagggacatgaggctggtcatcagaaatatggcttgaatccagcttggccacctaatattgtacattcaagggcagattacctcacttatcttcagctctgattcctcacttataaaaactgggcatgttaatagagacttcacagtgttattgggagaagctggcgtatttgaagactggaacaccttcaaatagaaattctctgggaatgttattggaaatttggaaatctcattaaataacagtctctttaaagacaatgaatggctgtagaaatgtcaaccaaatcaattttctccttattttttggtaattacaggstcacaagagtctcttttcttttagatcaaagcaggtagcctccctgagtaattgtggcatgatttcatggctcaatgcaaatgtaaagaaggaataagtctgtttttctcagtctgtgaggagagttagtgaaacaaatatagttctgagggaatcaggggaagaaggtgtatctttttatcatgtattaatctt

SEQ ID NO: 712074 - DNA, 656 bp, Homo sapiens
tactaagatagttctagttcttactcccgaagaagcctgcaatataggtgatgataagtacaaagataaaatttatggtacatcttttcccatcaaggtcaaagagtaattatatatatatacatatatatatgtgtgtgtgtgtgtgtgtgtgtgtgtatatatatatatatatatwttttttttttctgggacagagtcttactctgtcacccaggctggagtgcaatggcatgatcttgggtctctgcagcctcgacctccctggggtgaagtgatcctcccacctcagcctcccgagtaggcagggctacagacacgtgccaccacacctggctgatttgtaaaatttttgtagagatggggtctcgctatgttgtccaggctggtcttgaactgtaggcctcaagcaatcctgccaccttggcctcccaaagtgctgcaattatacgcatgagctgctgtgcctggccagtaattgtatcttatttactaaaaaaataatcatttgatcttacatgcttgactcactggtcattgggatgattttcagtattttcagctgcaatttttaaaaaagaaaatcataatgggagaggagttacggtgttaaataaaactagtgtaggtgtgtgtgatgggggaggatggcaaag

SEQ ID NO: 712075 - DNA, 645 bp, Homo sapiens
cagcatgagatttgggcagggacaaatatccaaactctatcagtggggtactactacactttgaacatctgcttatattgcctagaacctggaagaagatgctgtaatttttcaatcttctttcatttcagctgttcatgccaagagcctggtggccatcttacacctgctcgttgctctgtctcagtatttccgcgcaccaattcgactcccagaccatgtttccatccaagtggttgtggtccaggtaagacaggtaacactacaaacatctgtgtctttaaagagtcgtggaggtcgagttcctatggtgcgtcgagtaggtcattagaaggatggctgcatgaatgttgagtgagcctgggtgtgcagtatattgggaggcactgaatgagctttctgttgcatgttggcttcccctggtaagtgtacacaagatggaagagcgtgtgcttgtgtatagatagctttgtgtggggtatgtgcctatggtttatgtgtttttgtctgagttttctgtgtaatgtgtaratgagggtgtgcggtatgtatgtgagctgtgtgtcatggggtcaggaggaaaggtatgtgggtgtgtgtgtgtgtgtgtgagtttgtgtacaggagtgtacaggtgccctgcaa

SEQ ID NO: 712076 - DNA, 2580 bp, Homo sapiens
aattcattatcgttaagcaaatgtacaatatgctcaggcaccgcagagagctgggcacgggcccatgtgagcatcactttggaagtagggctcttcaacagggacccttgaactttaaagaaaggaacttctttttgccttctaattgatcatttagactattctggctaagtctgcccacatgtaattaccggctaattcaagcgaggaaaaatgtaagtcatttagaccaaagccaagcagtttctttgcgtgggttactcaagggcttgtggttacttgtatctcctctatgtgaacttgactttgaaagacagagctctagtgtgccagcctgctaagtcctgtaagaatagggaagggcggaggggggtgggcagtgactaggggacgagaagcatggggaaaatatttgcactctaaacatacagagatagaggtggggcttgtggtacttaacacttgtagccatcaactgactgagaccttgggctaaataatcaattgtgctgatattacatctcgttatggaatgttcctaaatatgccaggtagacaccagcccaagtaccctcctccagaagtctgtgactaccttgtcactactttaggcccattccacaaagcccatctctggtttgagaattcattttgatctgtatctacaccacccaaagttaggcctcctataatgtccaaaacattcctttcagcctttttatttcttactgtactgtctcttactgtactgtctatctgcagtaattgaggacccataaaatttagataactacatgtctttgctcttagaattgtcactcagcataatgagcatttaacatacaaaggcaatgtactgttttgtgttgatctatgtaaaagaatacaattcttttttacataattagtgaaattttattttttattaggaaacactaaatagtgtaatatttcttttgcttttaaaaaaattcctggtagcaaatcaagataaataattgcttcattttcttgagcaatactgaagcaggatgaagtaagaggaatgcattcatttaaacatgctttgctttatgaattttgtctcttttttggtctctttttcttatattcaagttacaaatgtacaagtatccttactaagagtgctccttttgtattttacatatatacagtatgaaaatacattggaacactaggaaagtttttaaataacagttctaatttatcagaaaattgtgttttgggattgagttctttgtctcagcccagaatcccaggtcctgggcctggttttctaatgctgtcatctcagttcgatattttactttagaayctggaatctcctacttaatatatgaccatgactttgaaaggcaaaagaggaatcaagaataaataaaacaaacttaatcttcatctttaaaaaaaagaaaaaagaaaccaaaatgagaatcaacacttcataggctcactgggttttcttttcttttctgttaatttaaactcagttatttttaatgcttaatacatacatggtgcaaaatttaaaaagcgcaaataggtatctagtggaaaacctaagcctccctctctcctccggcacccattacctctccctggaggcaactgttttgatccatttcttacacacactgccagagatactctaggcatgtaaagcacaaacatacatataaaatctgcgggcttcaaaaaatataagtaggatgtcatctatactgtcatacactttgttttttatcacttaatgttatatcttggatattgtattaccctgggtattaaaaagaactcctttcacattttaaaataacaatctgagcacttcataaatccaaatgcgtatctccagtctgctcgagctaggaaaggaaaaaagccctagccgaaggaggaaaggctgcctagacaatgatttcaaaagtagagtctaaaacctatggggtgcaggaccagaggctggggcacattatcagaggcatcctcatgtgcctcgaaccgaatgtttttaagtcctcttttggaaccttatggtgaattgtatgcagattgatgaaggtttcatttttatatattaccaggactacgaatttgtaatccactaagcatcacaaaggttactacatacgctataatactgtactataaagtctagctgccagcaatgcagtgctcgcctgctatattagaaggctccagtttcacatgtgcaggcacagagatgacatttcccgatctgggagaaggcttctttatcagcacatcatcagtgttgcctcgagttggttgcaattttcaattgctgctattggtgctttttaattatgaattactgttagcttgcattatcatcagtttgttttgttgtgggttgcttggttaaccctacagagtatacttgaagcttatttgcatcaacagtattctggagctgtaatttttcaataactagactctgagacatgtatacattgtggttcaaataggaatcatccatagtccagtgctagaacaaatgtatacataatccactccccacaaattatcactcattta

SEQ ID NO: 712077 - DNA, 2583 bp, Homo sapiens
gggaagcattttctgaagccttcgttgctggggaaggtgggactcggtgcagctgctcagtcccagagaccctttgtgagctgccagctgcacagccaggggaagaaaagaatctgaaatcccacacatgccatgcgtgggatcgcggrgatcagggaccgagcagaactgctgctgcaggaactgccctgtgcccaatttccaggttttcctgtccctgcacagggtgctgacctgccaaagagctgtgtccccgccagtcggggtgaaggtgcagcgcagacagttctgggctgagcaaaactgcttctctccttacagatgcggagctctgcctgctcagactctgtctgaggacaggccatgatttgtggggtttgggttgtaaatataagtctgaggggaaatgcagaagggacaagtgcttctgcagcccctgcatactcctgctaggagtgcacacgtgcattcgtgagcagaggaggcacgcttctcttagtagtcttggtacggatgattgctttctgccccttactgactgaagtattccatttcaccagagctggcaggtcaccactgtgttgcagataatctcctgcatatgtcccctgggaacactgagaatgccatctgtggcccttttgctcgcacttttctggtagtttataggcaagtggatgagtaggaatggtgggctctcatgcccccttcctgcctctgctctgagctcctctatccaaacccccacctagtgggggccatgccctggtctagtgggcttgagaccctgtagaccatgatataacaagaggggtaagaccttcctgaacctcaaggcacgtgtagccaaccagggaagagaaaagttggagccagttagcaaaatgaaatgacagtcatgggaactgttacgaaagaggtacaaggaagagtctgtgaggactgaggaggtgataccacttctgtcttgggggaggaacagtttgatggagacagtggggctcaaccataaggaccaggtagggctttggtgtatggagactgggagagaagtgtgtgcatgccagacagaatgacagcatgagcaaaagtccccccggggaagaatggggaccctgtctcatgactccttccagactcgttatctattgactctagccaacaaaggtcaactcctgttctcatttattaccaccttgtcctaagcccctggtcaactgagacctgggggaggacctctagcaaggctggtgtccccctggggctctctctttggcaaggccactccagccttcctaatgccattaggaatggactcttcttgttctgtgggcagatgatgagcaccctgcttctgggaggacagacacagtgagaaagttccgaccatcattttgcttccactttcttcaaccacttaatatgaaacttcctggttacagattggaagtacttctgctattttagaattgggatatttctttcccttgggacagataattttcccaatataaatcaatctatgggaatattttggaatataggtgatatttttatgcaattattaagttgctgaatgtgaaactaacagactgatgtggatggaaaaacacgtgttttatttgttatgacacagggcattatgcccatgctgcaaatttccagtacgtaaaggggaatggaaatagcattttatgaaattgtactttgaaagaagtgaatcccagcattccgtctggtttttatgcttctacctggaaagtgagatttggaagtaaatgatgcagacatttcaaaggtgccaatgtgggtaattctttgagggcatttcaaaatcaaactggttgtggtggaggcatttttcatggcaacatgtttttaaggtcaggaaaatgcattctctgctgtgctgtttaacactcaaagctctgttgtgccttgaaatcccctagaaactgggtttgtatctgagatgacttgctgcccaggcttcatgaccgtttagtgcctgagttagtgtaagccaagggttagcatcaagttcctaaccagtggagcagtcgaaataatggccaggcatggaagctcacacctgtaatcccaacactttgggaggccaaggtgggcagacggcttgagctcaggagtttgagaccagcctgggcaacatagtgagaccccacctgtacaaaaaatacaaaaaaattagccaggtgtagtggtgcatgcctgtggtcccagctcctcgggaggctgaggtggaagggatcgcttgagcctgggaggcggaagttgcaccactgcactccagcctgggcaacaaagtgagaccctgtctcaaagaaaggaaaaaaggaaagaaaaagaaatattgtcatgcagctggcagctttttatttagggcatcgtgccacatgtcttcaaatgcacatgtccaccctgttatcacctttcaagtagactcatcatcaattatggttaagactccagaataacaggcaggcagggactcagaagacatctagtaccaggcaggattgaagtctgtaggactaaatatctaaaatttaaggagtctcatac

SEQ ID NO: 712078 - DNA, 2583 bp, Homo sapiens
gggaagcattttctgaagccttcgttgctggggaaggtgggactcggtgcagctgctcagtcccagagaccctttgtgagctgccagctgcacagccaggggaagaaaagaatctgaaatcccacacatgccatgcgtgggatcgcggggatcagggaccgagcagaactgctgctgcaggaactgccctgtgcccaatttccaggttttcctgtccctgcacagggtgctgacctgccaaagagctgtgtcccygccagtcggggtgaaggtgcagcgcagacagttctgggctgagcaaaactgcttctctccttacagatgcggagctctgcctgctcagactctgtctgaggacaggccatgatttgtggggtttgggttgtaaatataagtctgaggggaaatgcagaagggacaagtgcttctgcagcccctgcatactcctgctaggagtgcacacgtgcattcgtgagcagaggaggcacgcttctcttagtagtcttggtacggatgattgctttctgccccttactgactgaagtattccatttcaccagagctggcaggtcaccactgtgttgcagataatctcctgcatatgtcccctgggaacactgagaatgccatctgtggcccttttgctcgcacttttctggtagtttataggcaagtggatgagtaggaatggtgggctctcatgcccccttcctgcctctgctctgagctcctctatccaaacccccacctagtgggggccatgccctggtctagtgggcttgagaccctgtagaccatgatataacaagaggggtaagaccttcctgaacctcaaggcacgtgtagccaaccagggaagagaaaagttggagccagttagcaaaatgaaatgacagtcatgggaactgttacgaaagaggtacaaggaagagtctgtgaggactgaggaggtgataccacttctgtcttgggggaggaacagtttgatggagacagtggggctcaaccataaggaccaggtagggctttggtgtatggagactgggagagaagtgtgtgcatgccagacagaatgacagcatgagcaaaagtccccccggggaagaatggggaccctgtctcatgactccttccagactcgttatctattgactctagccaacaaaggtcaactcctgttctcatttattaccaccttgtcctaagcccctggtcaactgagacctgggggaggacctctagcaaggctggtgtccccctggggctctctctttggcaaggccactccagccttcctaatgccattaggaatggactcttcttgttctgtgggcagatgatgagcaccctgcttctgggaggacagacacagtgagaaagttccgaccatcattttgcttccactttcttcaaccacttaatatgaaacttcctggttacagattggaagtacttctgctattttagaattgggatatttctttcccttgggacagataattttcccaatataaatcaatctatgggaatattttggaatataggtgatatttttatgcaattattaagttgctgaatgtgaaactaacagactgatgtggatggaaaaacacgtgttttatttgttatgacacagggcattatgcccatgctgcaaatttccagtacgtaaaggggaatggaaatagcattttatgaaattgtactttgaaagaagtgaatcccagcattccgtctggtttttatgcttctacctggaaagtgagatttggaagtaaatgatgcagacatttcaaaggtgccaatgtgggtaattctttgagggcatttcaaaatcaaactggttgtggtggaggcatttttcatggcaacatgtttttaaggtcaggaaaatgcattctctgctgtgctgtttaacactcaaagctctgttgtgccttgaaatcccctagaaactgggtttgtatctgagatgacttgctgcccaggcttcatgaccgtttagtgcctgagttagtgtaagccaagggttagcatcaagttcctaaccagtggagcagtcgaaataatggccaggcatggaagctcacacctgtaatcccaacactttgggaggccaaggtgggcagacggcttgagctcaggagtttgagaccagcctgggcaacatagtgagaccccacctgtacaaaaaatacaaaaaaattagccaggtgtagtggtgcatgcctgtggtcccagctcctcgggaggctgaggtggaagggatcgcttgagcctgggaggcggaagttgcaccactgcactccagcctgggcaacaaagtgagaccctgtctcaaagaaaggaaaaaaggaaagaaaaagaaatattgtcatgcagctggcagctttttatttagggcatcgtgccacatgtcttcaaatgcacatgtccaccctgttatcacctttcaagtagactcatcatcaattatggttaagactccagaataacaggcaggcagggactcagaagacatctagtaccaggcaggattgaagtctgtaggactaaatatctaaaatttaaggagtctcatac

SEQ ID NO: 712079 - DNA, 2583 bp, Homo sapiens
gggaagcattttctgaagccttcgttgctggggaaggtgggactcggtgcagctgctcagtcccagagaccctttgtgagctgccagctgcacagccaggggaagaaaagaatctgaaatcccacacatgccatgcgtgggatcgcggggatcagggaccgagcagaactgctgctgcaggaactgccctgtgcccaatttccaggttttcctgtccctgcacagggtgctgacctgccaaagagctgtgtccccgccagtcggggtgaaggtgcagcgcagacagttctgggctgagcaaaactgcttctctccttacagatgcggagctctgcctgctcagactctgtctgaggacaggccatgatttgtggggtttgggttgtaaatataagtctgaggggaaatgcagaagggacaagtgcttctgcagcccytgcatactcctgctaggagtgcacacgtgcattcgtgagcagaggaggcacgcttctcttagtagtcttggtacggatgattgctttctgccccttactgactgaagtattccatttcaccagagctggcaggtcaccactgtgttgcagataatctcctgcatatgtcccctgggaacactgagaatgccatctgtggcccttttgctcgcacttttctggtagtttataggcaagtggatgagtaggaatggtgggctctcatgcccccttcctgcctctgctctgagctcctctatccaaacccccacctagtgggggccatgccctggtctagtgggcttgagaccctgtagaccatgatataacaagaggggtaagaccttcctgaacctcaaggcacgtgtagccaaccagggaagagaaaagttggagccagttagcaaaatgaaatgacagtcatgggaactgttacgaaagaggtacaaggaagagtctgtgaggactgaggaggtgataccacttctgtcttgggggaggaacagtttgatggagacagtggggctcaaccataaggaccaggtagggctttggtgtatggagactgggagagaagtgtgtgcatgccagacagaatgacagcatgagcaaaagtccccccggggaagaatggggaccctgtctcatgactccttccagactcgttatctattgactctagccaacaaaggtcaactcctgttctcatttattaccaccttgtcctaagcccctggtcaactgagacctgggggaggacctctagcaaggctggtgtccccctggggctctctctttggcaaggccactccagccttcctaatgccattaggaatggactcttcttgttctgtgggcagatgatgagcaccctgcttctgggaggacagacacagtgagaaagttccgaccatcattttgcttccactttcttcaaccacttaatatgaaacttcctggttacagattggaagtacttctgctattttagaattgggatatttctttcccttgggacagataattttcccaatataaatcaatctatgggaatattttggaatataggtgatatttttatgcaattattaagttgctgaatgtgaaactaacagactgatgtggatggaaaaacacgtgttttatttgttatgacacagggcattatgcccatgctgcaaatttccagtacgtaaaggggaatggaaatagcattttatgaaattgtactttgaaagaagtgaatcccagcattccgtctggtttttatgcttctacctggaaagtgagatttggaagtaaatgatgcagacatttcaaaggtgccaatgtgggtaattctttgagggcatttcaaaatcaaactggttgtggtggaggcatttttcatggcaacatgtttttaaggtcaggaaaatgcattctctgctgtgctgtttaacactcaaagctctgttgtgccttgaaatcccctagaaactgggtttgtatctgagatgacttgctgcccaggcttcatgaccgtttagtgcctgagttagtgtaagccaagggttagcatcaagttcctaaccagtggagcagtcgaaataatggccaggcatggaagctcacacctgtaatcccaacactttgggaggccaaggtgggcagacggcttgagctcaggagtttgagaccagcctgggcaacatagtgagaccccacctgtacaaaaaatacaaaaaaattagccaggtgtagtggtgcatgcctgtggtcccagctcctcgggaggctgaggtggaagggatcgcttgagcctgggaggcggaagttgcaccactgcactccagcctgggcaacaaagtgagaccctgtctcaaagaaaggaaaaaaggaaagaaaaagaaatattgtcatgcagctggcagctttttatttagggcatcgtgccacatgtcttcaaatgcacatgtccaccctgttatcacctttcaagtagactcatcatcaattatggttaagactccagaataacaggcaggcagggactcagaagacatctagtaccaggcaggattgaagtctgtaggactaaatatctaaaatttaaggagtctcatac

SEQ ID NO: 712080 - DNA, 2583 bp, Homo sapiens
gggaagcattttctgaagccttcgttgctggggaaggtgggactcggtgcagctgctcagtcccagagaccctttgtgagctgccagctgcacagccaggggaagaaaagaatctgaaatcccacacatgccatgcgtgggatcgcggggatcagggaccgagcagaactgctgctgcaggaactgccctgtgcccaatttccaggttttcctgtccctgcacagggtgctgacctgccaaagagctgtgtccccgccagtcggggtgaaggtgcagcgcagacagttctgggctgagcaaaactgcttctctccttacagatgcggagctctgcctgctcagactctgtctgaggacaggccatgatttgtggggtttgggttgtaaatataagtctgaggggaaatgcagaagggacaagtgcttctgcagcccctgcatactcctgctaggagtgcacacgtgcattcgtgagcagaggaggcacgcttctcttagtagtcttggtacggatgwttgctttctgccccttactgactgaagtattccatttcaccagagctggcaggtcaccactgtgttgcagataatctcctgcatatgtcccctgggaacactgagaatgccatctgtggcccttttgctcgcacttttctggtagtttataggcaagtggatgagtaggaatggtgggctctcatgcccccttcctgcctctgctctgagctcctctatccaaacccccacctagtgggggccatgccctggtctagtgggcttgagaccctgtagaccatgatataacaagaggggtaagaccttcctgaacctcaaggcacgtgtagccaaccagggaagagaaaagttggagccagttagcaaaatgaaatgacagtcatgggaactgttacgaaagaggtacaaggaagagtctgtgaggactgaggaggtgataccacttctgtcttgggggaggaacagtttgatggagacagtggggctcaaccataaggaccaggtagggctttggtgtatggagactgggagagaagtgtgtgcatgccagacagaatgacagcatgagcaaaagtccccccggggaagaatggggaccctgtctcatgactccttccagactcgttatctattgactctagccaacaaaggtcaactcctgttctcatttattaccaccttgtcctaagcccctggtcaactgagacctgggggaggacctctagcaaggctggtgtccccctggggctctctctttggcaaggccactccagccttcctaatgccattaggaatggactcttcttgttctgtgggcagatgatgagcaccctgcttctgggaggacagacacagtgagaaagttccgaccatcattttgcttccactttcttcaaccacttaatatgaaacttcctggttacagattggaagtacttctgctattttagaattgggatatttctttcccttgggacagataattttcccaatataaatcaatctatgggaatattttggaatataggtgatatttttatgcaattattaagttgctgaatgtgaaactaacagactgatgtggatggaaaaacacgtgttttatttgttatgacacagggcattatgcccatgctgcaaatttccagtacgtaaaggggaatggaaatagcattttatgaaattgtactttgaaagaagtgaatcccagcattccgtctggtttttatgcttctacctggaaagtgagatttggaagtaaatgatgcagacatttcaaaggtgccaatgtgggtaattctttgagggcatttcaaaatcaaactggttgtggtggaggcatttttcatggcaacatgtttttaaggtcaggaaaatgcattctctgctgtgctgtttaacactcaaagctctgttgtgccttgaaatcccctagaaactgggtttgtatctgagatgacttgctgcccaggcttcatgaccgtttagtgcctgagttagtgtaagccaagggttagcatcaagttcctaaccagtggagcagtcgaaataatggccaggcatggaagctcacacctgtaatcccaacactttgggaggccaaggtgggcagacggcttgagctcaggagtttgagaccagcctgggcaacatagtgagaccccacctgtacaaaaaatacaaaaaaattagccaggtgtagtggtgcatgcctgtggtcccagctcctcgggaggctgaggtggaagggatcgcttgagcctgggaggcggaagttgcaccactgcactccagcctgggcaacaaagtgagaccctgtctcaaagaaaggaaaaaaggaaagaaaaagaaatattgtcatgcagctggcagctttttatttagggcatcgtgccacatgtcttcaaatgcacatgtccaccctgttatcacctttcaagtagactcatcatcaattatggttaagactccagaataacaggcaggcagggactcagaagacatctagtaccaggcaggattgaagtctgtaggactaaatatctaaaatttaaggagtctcatac

SEQ ID NO: 712081 - DNA, 1529 bp, Homo sapiens
tgcctcttcagagtgggcccaggggcctgggggtccctattttaaagctggctttgcggtcaggcagccgtaatctgtccctcgagccacaccagagtctcattaaaatgtaccccataaatgttaaaaaatttacacataaaaaaattccatgcatgaaactgaaaccgtacgttttacagccacggtttgaaatcttgcataatatataaaaccttggccctgcaccgggggcccgtaaatcagattttataaaacaaaaagcttttacctttcaaagggttttggggaacttgcaaattttacaaactttaccaactgccagtcagaggctggtgggcccaaggaggggatctgtgggcccagcttaggaatcgtcctggtgagcccctgcggctatgggaattggagyggagggagtgaaggatgaagccggcctttcccaggggagccagccaggggcattgcagcttgaccaccatgagggtggaaagccacccgcgtcccctggaaatggggaggtagagtgtgggtgtacggaaagagatatcgggggcacttttatttgcaagtgaaggaggagtggtggtgtgatgttgtgggcagagcggaggatcaggagtcagctgacctgggttctggtcctggcaagtcacttccttctgtgaacttatatcccaggctataaaaggagatagggcgtgcttctccctagggttttttgtttgtttgtttgtttgtttttgaaatggagtcttactttgctgcccaggctggagtgcagtggcatgatctcggctcactgcaacctctgcctactgggcttaagcaattctcatgcctcagcctcctgaggagttgtgattacagacatgtaccaccacacctggctaatttttgtatctttagtagagacgaggtttcgccatgttggccaggctggtctcgaactcctagcctcatgtgatctgcccgccttggactcccaaagtgctgggattacaggcatgagccacggttcccggccctccctagggcttttacctctaatggttgatgaatctgtttcttctctggtaggggtgctgtgggagcaggtggctaatggagggagggaggttcccactgaaatctacaatctgggaacctctctgatcttcggatcagccctgggtgattgtgggacacaggggagtgtggtacagggcaacttgcttgggggacaggggggcggccagctggggatggggaggatttgagttcaaatgcggggcttgttggggctggagaccacaggcttacagggcctgggagaaagcagggcccagctggggcttgaggaccctgggggagagaggaacttccaagggacaaagtttttggggacccaagtgccctcctgacaatccctatgaaagtcaatattcaagggcaaaggaaagctgccctgacacacatatatataagaaataaatctctcaattatctcagctcatttgcttggggtctctcattttatgtccctgctc

SEQ ID NO: 712082 - DNA, 628 bp, Homo sapiens
taattgtgtttgtggcccaggagcagcactgagagggggtccaaagaggggaggccggtggagtgagggaccacaggtttggacccagctcagttctctcctcccccagcccccacctcaaccctggggttttctcccaaagaagttcaagcttagcttgaaccacaagccccacccgcccatgctggtgaggagtccgatgttaggggctgcctaaatcaggggattaggttgccagcggcgcagaggcagggccaagagggtgaggttaatccagctttccctccccctcctcccctccagtctccttcgttcccctttgaagtgagtgggttcccatggaaaccatggtgtcctgaggagcggaagaggggcaggagctaggcctggccaggtgcgggtgggggaggaggttggctttgcgaagactgctctgctaaggtgttggctcacttccctaaggctgaaagattctctccgagaaccagggacgcggaggtgctaaagttgttgcccattacygataaggaaaagctgggctggaggcatgagcagtgagaagacagtgagggcagtggtgctttgcctttccattaagaacccagagagtggagctgcaggtcaggga

SEQ ID NO: 712083 - DNA, 638 bp, Homo sapiens
aataatgaacataaactgtgactaaaaatttgctagtaattcatgtgaaattctagcagtctgagaatgatgtacaaaatgaaggacattacaaatcattataattatctgatgagtttaatctctaactaacacatcttggccatttcttttaagcagttcaggtaggttgttgttgctttggagtttctcatgtgtttgtttgtttttaatataaggaatatccttcaaaagcagaaacagtagaaatgaaaataattttaaatagcttctaaaatattagtcatgaaattacaagttctccaatatgttgattctaaaaatcatactttgttgtgactaaactttaaagagtgtatgagattgccgtttgtttttttaatatatatatatatttttattatactttaagttctaggktacatgtgcacaacgtgcaggtttgttacatatgtatacttgtgccatgctggtgtgctccactcattaactcgtcatttacattaggtatatcttctaatgctatctctcccccctccccccaccccacaacaggccccggtgtgtgatattccccttcctgtgtccttgtgttctcattgttcaattctagatgcttcccttattttaatgctttg

SEQ ID NO: 712084 - DNA, 1118 bp, Homo sapiens
ttcagttctaattctaattcccacttttgatgaacgccttcttcattttttttcttttttttacagaggcgacattcatttattgagttttttcttttatttttgtctttacatttttattttgaaagatttgaatatacacaaaagcatagaaaataagataacaaaggtgcatgtatttatcactcaattcaagtaagagcaacacgtctcatcttgctaattttacagcccttacccacttcctccacccctccctgttactttgaagcaagtcctaggcattctaccattttacccataatatttcaaaatgtacctctaaatacttaatattatttagttgtagtattaaatatagccacaacccccttattacacctacaaatctaacaatccattaatattattaaatatctagtgttcaaatttccatgattttcttatacattttaatcagttwatttgttgaaattttcataaaaaatagttaatataacataattaatagttctatgatctcttttaactgtaggtttcatttcctctcatatagatgtcactgtgctagccatgaatatgctagtctgtgtgagagaaggaggctgccccagaataacacttacacacagctgaactaaagcgcttgcttagtgatgtagttgacttaccttctgacacaagctcactggtcaatagtggtttccaaaccttttgctccagggaccctactttgaaaagcactgtctgggtgctgcttaccgtgtccccagaatgttatttatcatagtccttgtgtcctatatttcttgtatactggtagtccatccaatgccttgatcagattcggaattaattttttggcaagatgactttctaggtgatgtatacttcaggtgtatacatctttggcaagatgacttctaggtgatgtatacttcagatatatacttcaggtgtatactaggtggcgttagctgccattcagttattatttcttagatgtattcatttatacgtgatggaaaataatgaaagtctaattttatcatttcttctttatccattaactgggaatgattccacaatgagcaacttcttttcgtcaactgttgtat

SEQ ID NO: 712085 - DNA, 2575 bp, Homo sapiens
tgcgcacgctaaaaaccacccccaccagcaccacgacagtttacaaatgccatggcaatatctagaagttaccccgtatggtctggactggggactcctggttccacagaatccctgcctcttttccagaaaactcacgaataatccaccccttgtttaacatatactcaagaaatggccataaaatagccagttagcaggcccgcctgcttcccaccctccccactccactctgcctatggggtagccacccttttattccctcatttttaataaacttgctttcactttactctgtggctcattcttgaattctttcctgcatgaagccaaaaaccaacttggcttccagggctgagcctcaattttggtattcacctgcaacagctgtagaagatccttgagtggtctgcctgtaaactccagacctatcaaattccatactccaatacacctaaatgcttcatacaatccatggatattatgaagtaataaacagacttatactgataatcatattattaacaggcttctccttggcatcaaatatggacatgagggaaactgaaggacttttccagttaccatcctaacatctgcatctaactgtgaaagggaatccactagcactggccataccctttcctttgggaatctatgttatttcttaggcccaaaatctttttggaagacttgtgtttttgggaagacagagttacccttttgaaaaattgtgcagactacactttagaattcacttcaaagggaaaaattagttttgcaaggatggtacctaacctgcaaaataaaatttaatagtcctggtgcaaaacacttctccacagggaaacattattaaactgaagctgattaacagtattattgcttctcaaaatttaaatgcatcttaacaagattctttgtatgcacaattctgatttagtagatttagggtgaggtctgagattttgcatttctaacaagctccagatgatgctattactgctagtctggggattaccctgaagtgcaaggtgatggacagtcattagagagaccaggtagaattcagaggttagatacgggacagcaaaccgggcactgagacttcagagtctccccagagttttgttctttaagatgcaatccagtcatcttttttttcaaattaaaacgtaggtttaatgcaattccaaccaatatgccaaaaggattattttggaaacagactaagttatttcaaggttattctagaataggcaacaagaaagatgaatgtgggaagggatgaaagagaatagcaaggggagtaaaattatgtgattaaggaggcatcaagcatcattaagaaaggaaataatggtggagaactagatatttggcaaaatgaacagacaaaaacacccaaaacaaaaaagaagctaggctgggtgcagtggctcatgcctgtaatcccagcactttgggaggccggggcaggtggatcatgaggtcaagagatcgagaccagcctggccaacatggtgaaaccccatttctactaaaaatacaaaaataaaattagccgggtgtggtggtgtgtgcctgtaatcccagctactcgggcagctgaggcagcagtatcgcttgaatccaggagccaagatcgcgccactgcactccaacctggcaacagagcaagactccgtgtcaaaaaaaraaaaaagaagctaatttagatccttatctaataatatgtctcttctctgaataaattctagatgaatgaatctaacacaccaagaaaaacacaaaatccccacaagagagaagtgaatatttaacaaacctatgccactcctcccaataaattgtagatgaatgaatctaaaacaccaagaaaaacacaaaaccctcagaagagagaagtgaatatttaacaaacccaggggtgaagattaaacttagaattggaagaaacgagggaaaaaaagtgatagctgacactctgtgtatgtgtatcctctgtatttaaaaataacactaaaggccaacgaggaaaatgtttatgttatgtcaaattaataggaaaataagtacatcaaacctagtgccttcaaaagacaacagaacagtgtgtttagaacttctggggtccagatcccaccccctttgcttttccaagtgaatacctctcccccgcagtggtttactctcatcaacgtacattctagtctttcacattaaaataaaaatagcaagaacctgagcccctcaccatgtccttcgtcagctaccaatccagttctctatgagattgctcatgatcacagtaaaacttctccgaagtctccatctccacctcctcacctccctttccttttccacagtacttcaatctggcatctccccaccactccattcaaatggctctcatcaaaactccagtcttcatctcatgccagttctcaatcagtgcccaacacagccgctcatccctacaaaacacttcctcctttggctttcctccctccagcctcactggctattttcttcttagttgcctttgttggtgtctcctgtatcaaaactccaa

SEQ ID NO: 712086 - DNA, 1498 bp, Homo sapiens
gaaagtccttcaacagtttgtgggtatctgtgtttattcaattatcttattttaatccaaaccaccattctttaataaatgcagcatcctcatctgtaggtttagcttgtgcacacttccactttgcctmgtaatccctaatcatttgtgaagctcaaaaatgcaacagttagaaactctgtatctctcccctcttctaattcagcaagtttcccccacctggggctctgcattgcacctggtcaacactccctcccacacttaccagtcaccacccagggcaccttcatgtcatgagaccaacaggaaccttgcatttattttaagacctcccacctgtattctctaaattggagcaggctcaaaagttaaagttatagaaaactgggaaaacaatgaatggaaaatagtataacaggaacatacccatagaaagatcatgtatcgacaagaattagacaaaatagataaaatgcttgtagtcaatagcacttctagaaattaccagatttgctctatactgattacagaattaattcaccagggactatgaaaatctacattagtacgcacttactgaaacctcaacatatacgagattaaaaaaaaagagagagagaaactgacaaagcaccattattgttggatatttcagcacatttcactggaaaattaattaattaaaccagtagatcaaaatcaataaggatgtacatgatttgaacagcagaaataacagctttgaacaaatgaacacataaataactgcacccaataattgaaaatatatataaaaattaggtacttactagcaaaagctaacttcaacaaatttaaacatattgggctcaaattgaccatattttttgctaaaatgctattagtttaaaaatacggtgaaaatagatgaagacaattatataattaaaaatctccaagaaagaaacaaacatcaaaaaagctgaattggtgtttatacaaggaataaaataatgatttttacattagaagttaaataatttctattcattatattaatttattgaaggatgaaaattatatgatcatctcaatagatgccccatcaataaatttgattaaaaattaactcatttataatttaaaaacaaaataaacaaggaacttataattccagacaaaataggtgctttttttattctaaaagagggaaacttaatgaataaatggtagaaacatactttttaatatgaagaggaaagtaagggtgtttacgacttctacttctatggaagtcaccatatattgtagtaactcaagaaaagaaataaaaagtataaaatgcagggaaaacagaagcatcatcacttctagatgatttaagagtgttaatagaaactggaaacttattacaatttagaagaaaatttggtagtatttctgaaaaaagtatataaatatctgtttattgctatgtacttgtaacaaccagctaggaaatatgtgctttaaaactcca

SEQ ID NO: 712087 - DNA, 584 bp, Homo sapiens
cctttaatgactgttctgtgcaagccacacaccatcactttcaaaatattgaccacacagtcaggtttgagacaatatgggaggtcattattgaaagtcatcaatacatagaaacagagatcatcagtggccagcttggaggctggctaccacagtaagaaatcaggaaaataaatacgtatttatgaaacaaaaacaacaattttttatgaaaaattttatgttcatataatttattttcattattacataatcacaatcacacaaaattacttgcagtgttattacatattaatcttctattgtttattcatttgtttgcatcctagggagagagattaataatgtgtagcaaatccttgtgaaggtttatcatttgcactgaaaaaaataatcttttatcacccatatttctttctcataaggaagatcaaaatgcatcttgccatatgatttagagctagatattagtgaggctaggaataaaatcacaattttatactgtggctgttaacctcctccctagtccaccttttctgcatagaagaaccaatrtatttaaataatctatttttaaaataagc

SEQ ID NO: 712088 - DNA, 643 bp, Homo sapiens
tagatccctcatgaaaggcttggtgtccatcccacagtaatttgtggtaatgagttcatgtgagatctagttgttcaaaagagtgtgttaacttccccttctctctcttgctccctatctcaccatgtgacacacctgctcccacctgcttcaccttccaccacgattataagttttctgaggcctcaccagaagaaggtgccaatgccgtgcttttttgtacagtgtgtacaaccatgagccaaataaatctctattctttataaattacccagcgtcaggtattcctttatagcaacataaaacaractaacacaatgtgagatttgaaacatgttttgattattattctacttttaaattgggcagaattaaagccttggttttctcctctgcaacaatggtcttattttatgtaccattcacattgtgaagatgaaattaagttatgtaaaaaattatctacaaagtagaccttaaaaattgattacatctgaaagttctattaatatttttttattcctaagtttatatgaaatattttccagactccagatgggttaagcaaaggaattcccaataatctatttatttgacctaatattcatagttattgtaccaagcactgacccagccataggga

SEQ ID NO: 712089 - DNA, 637 bp, Homo sapiens
attgaactcatagaagtagagagyagaacaatgtttatcagagagtgggttgggaagggggaagaagaggatgcgaagttcttgatcaaaaggtacaaagtttggatagataagaggaataagatttgtgacatattgtataatagagggactataatctataataatatactatatatttcaaaataactaagggtaaatttcaaatatctcatcatgaaaaataggtaagctaagtaatggatatgttaattcaattgatttaatcatttcacatgtataaatatattaaaaccacattgtacctcatgaatgcacacagttatttatcaattaaaatcaatattaataaaaaagattgctaggtatttaaaggatctcatgagtacagagacaattaggtgagaaaacaggaaattaactctagaaagaaaataaaacctatatgtaacagaaaatacaacatatctcttggttaaacaaataagaatgctaccatattcagaataatatgagcactatatatttatttgaataaagtataataattttgagagatgaagataaaatgtgcaagcattggttgtgaaaaataactgaaaacctcatttgctatcactgaaaacaatatcgaaaa

SEQ ID NO: 712090 - DNA, 637 bp, Homo sapiens
attgaactcatagaagtagagagtagaacaatgtttatcagagagtgggttgggaagggggaagaagaggatgcgaagttcttgatcaaaaggtacaaagtttggatagataagaggaataagatttgtgacatattgtataatagagggactataatctataataatatactatatatttcaaaataactaagggtaaatttcaaatatctcatcatgaaaaataggtaagctaagtaatggatatgttaattcaattgatttaatcatttcacatgtataaatatattaaaaccacattgtacctcatgaatgcacacagttatttatcaattaaaatcaatattaataaaaaagattgctaggtatttaaaggatctcatragtacagagacaattaggtgagaaaacaggaaattaactctagaaagaaaataaaacctatatgtaacagaaaatacaacatatctcttggttaaacaaataagaatgctaccatattcagaataatatgagcactatatatttatttgaataaagtataataattttgagagatgaagataaaatgtgcaagcattggttgtgaaaaataactgaaaacctcatttgctatcactgaaaacaatatcgaaaa

SEQ ID NO: 712091 - DNA, 1633 bp, Homo sapiens
tcctgttcacagctatctcttttcaaaacagctttttctgttttgaaaataacaagtaacacattatcactgggaaaaaaaaatcagaagaaccccagagaagaatctaaatgtaacacaaattctcatcttcccagaatagtgcatttccttcccgtcttttttccacacaattgcagacatttttttttccagaaaatttagatcatactatttattagacattttatttgtttactgtaacttaacaatgtatcatttcccaccactttaggaggccaaggtggtaggatcacttgaagttgggagttcaagaccagcctgaccaacatggtgaaacctcgcctccactgaaaatacaaaaattagctgggcatggtggcaggcacctgtaatcctagctactcgctaagactgaggcaggagaatygcttgaacccaggagacggaagttgcagtgagccgagatcatgccactgcactccagcctgggcaacagggcgagactccacctcaaaaaaaaaaaaatgtgtaattaactgttccccatgtcaataaatattctcttctaatattcttttaaatgattttctagtatgccatcctaacgatatgtcatcacgaatttatataattccttgtcattgaacaattaggtttttcaaagattttttctttgcttttgtaaataatgttgcaatgaacacagttgcagctaaatcttcgcacacataagtgattatccccttatcataaattattagaaggccaattgttgggtcaatgggcatgcacatctcttaaatctcttatacatattgttcaattacgctccaggaaagctgtaaaaaatttatattcctaccagtagcatatgaatgcatctgacccaaggagtttttttactgattctgccagacgttggagaccacatttctactgtctgctatatgtctggtatacagtaggcactcaatacccgtttgttgacccaaactgaagtggctaggtgtcctccttctatctcaaggagtgactagagagttttctttctcttgggctaagttgagggacctgtgctccttgcagccaccacagcacctaacacttttccctgcatgctcttctttgggaaaatcatttcttttttcttttttttttttttttttttgagatggagtctcactctgttgcccaggctggagtgcagtggcatgatctcagctcactgcaacctccgcctcctgggttcaagcgattctcctgcctcagcctcctgagtagctggtactacaggggcgtgccaccactcacggctaatttttgtattttcagtagagatgggttttcaccatgttggccaggctggtctcgaactcctgacctcaaatgatccatctgccttggcttcccaaaatgctggtattacaggcatgagccaccatgcccagcctggggaaatcatttctaatttcaccagggaatgcagaacccctgggcagcagatccaagccagagatcctcccctctttcaaactgtgacctcccaagagtggagtctgttcttttctctcactaaaaccagttactgagtagagaaagacagaagaaaatgagacagatggagagctca

SEQ ID NO: 712092 - DNA, 1229 bp, Homo sapiens
ctgtgtttaggattcaaaataaattggcccttggggaagtaaaagggaggataaagtgaggagaatgcagaggctgcaactgaggaccccagggattcattaaatgtggtttaatcagtyacacatggcatgttcaccctccgtatttaatgggcgttggaggaggagctcaataatcttcccagtagttttatttctctcaggttcgttgtgtcagttacttggatggtacttgatttttgcataaggcagtcaggaagggccaagggcacctttgtgaaaaacacatgaacagaacaaatgttaaatacacccagcccatatttaatatttctctcattcggcctgactggctaagacttggttggtacaaacttttgaggagacaatttgagaagacacatcaaaaaaattttatatgtttattttctttatcaattctaaaatactatacaaaaaagattgcagaagtacacaaagatgtacagagagataactgacattcatgctcacaaaaatgttaaaaatgactgaaatatcaaaaaagaagtatggttaaatacattactctgtgtctataagaccagttagtatgcagtaattgatcataatgattgagaaatgtatgataatatattgctgagggaaaaagcagatttcagacactatggtctggtgtaaagttatacatgtttacatagattgagagatataaagtttcaaacatagatatgaatgtttaacttctatggtgcaggattattgattatattttaatacttctttttctttgaatttttaaagttttcttcaatgtatattggtcacttttgtaagtttaaaaatgctaaaaagtaaaaatatgaaaaaatcttcccattaggcttgagtaacaataccaaatttgacatataaaactcaatacttagatatttataagaaattgcggcttgcaattcattagtcaaaggggcatttgcagaatacagtaactttttcaaggcatctggatgccaagtcctgaaaaaactccttattctgaaacaaagatttttaaagtaccattttgtattataatccttttggtttgtatgctcaaactaagtctacattatctaatttaagtcatgcgtagaataagcataaatatttgcctaaaaagtttggattgttactcttaatgctgacgatatttctgaatgaaaaattctatcatcccaacatcatac

SEQ ID NO: 712093 - DNA, 683 bp, Homo sapiens
ttcagtctcctgtccataaaatgaagaaactagagtagctctctcttaagactcacagattaaatgatttaaaccatgtgtgacaattaatattagagagcctaccaaagaggcaaggttcaataaattatccatcatcatcatctcttcccccttcctccttttcttccttctcccacactttgcctttcagaccaatatacacacactgaagccaagaattcaggaagaaaaaacaaaactgggttgaattctgacacttcctagccataaccacatgagctaagtaattatttaacttttttaaatctcaggaggtggttttttaatctgtaaaatggagacaacaatgcctaccttaaatgcatgcaaaatgcttacgagcacaaagagcggcataaaaggacaattcaacttaaactactattgagttacttccttctcctcttgaacacactcctcccaagagaggtgagaagaatgagtccaaaactatcttcacaagtagcaaagaaatttcagtgaagccaatgtctaagagataataaaacccactagcatgaaacttttattttattttattttattttattttatttwatttttttttttttgagacagagtctcgctctgtcacccagactgcagttcaatggcacaatctcggctcactgcaagctcca

SEQ ID NO: 712094 - DNA, 683 bp, Homo sapiens
ttcagtctcctgtccataaaatgaagaaactagagtagctctctcttaagactcacagattaaatgatttaaaccatgtgtgacaattaatattagagagcctaccaaagaggcaaggttcaataaattatccatcatcatcatctcttcccccttcctccttttcttccttctcccacactttgcctttcagaccaatatacacacactgaagccaagaattcaggaagaaaaaacaaaactgggttgaattctgacacttcctagccataaccacatgagctaagtaattatttaacttttttaaatctcaggaggtggttttttaatctgtaaaatggagacaacaatgcctaccttaaatgcatgcaaaatgcttacgagcacaaagagcggcataaaaggacaattcaacttaaactactattgagttacttccttctcctcttgaacacactcctcccaagagaggtgagaagaatgagtccaaaactatcttcacaagtagcaaagaaatttcagtgaagccaatgtctaagagataataaaacccactagcatgaaacttttattttattttattttattttattttattttwtttttttttttttgagacagagtctcgctctgtcacccagactgcagttcaatggcacaatctcggctcactgcaagctcca

SEQ ID NO: 712095 - DNA, 683 bp, Homo sapiens
ttcagtctcctgtccataaaatgaagaaactagagtagctctctcttaagactcacagattaaatgatttaaaccatgtgtgacaattaatattagagagcctaccaaagaggcaaggttcaataaattatccatcatcatcatctcttcccccttcctccttttcttccttctcccacactttgcctttcagaccaatatacacacactgaagccaagaattcaggaagaaaaaacaaaactgggttgaattctgacacttcctagccataaccacatgagctaagtaattatttaacttttttaaatctcaggaggtggttttttaatctgtaaaatggagacaacaatgcctaccttaaatgcatgcaaaatgcttacgagcacaaagagcggcataaaaggacaattcaacttaaactactattgagttacttccttctcctcttgaacacactcctcccaagagaggtgagaagaatgagtccaaaactatcttcacaagtagcaaagaaatttcagtgaagccaatgtctaagagataataaaacccactagcatgaaacttttattttattttattttattttattttattttatttwtttttttttgagacagagtctcgctctgtcacccagactgcagttcaatggcacaatctcggctcactgcaagctcca

SEQ ID NO: 712096 - DNA, 683 bp, Homo sapiens
ttcagtctcctgtccataaaatgaagaaactagagtagctctctcttaagactcacagattaaatgatttaaaccatgtgtgacaattaatattagagagcctaccaaagaggcaaggttcaataaattatccatcatcatcatctcttcccccttcctccttttcttccttctcccacactttgcctttcagaccaatatacacacactgaagccaagaattcaggaagaaaaaacaaaactgggttgaattctgacacttcctagccataaccacatgagctaagtaattatttaacttttttaaatctcaggaggtggttttttaatctgtaaaatggagacaacaatgcctaccttaaatgcatgcaaaatgcttacgagcacaaagagcggcataaaaggacaattcaacttaaactactattgagttacttccttctcctcttgaacacactcctcccaagagaggtgagaagaatgagtccaaaactatcttcacaagtagcaaagaaatttcagtgaagccaatgtctaagagataataaaacccactagcatgaaacttttattttattttattttattttattttattttatttttttttttttgagacagagtctcgctctgtcacccagactgcagttcaatggcacaatctcggctcacygcaagctcca

SEQ ID NO: 712097 - DNA, 683 bp, Homo sapiens
ttcagtctcctgtccataaaatgaagaaactagagtagctctctcttaagactcacagattaaatgatttaaaccatgtgtgacaattaatattagagagcctaccaaagaggcaaggttcaataaattatccatcatcatcatctcttcccccttcctccttttcttccttctcccacactttgcctttcagaccaatatacacacactgaagccaagaattcaggaagaaaaaacaaaactgggttgaattctgacacttcctagccataaccacatgagctaagtaattatttaacttttttaaatctcaggaggtggttttttaatctgtaaaatggagacaacaatgcctaccttaaatgcatgcaaaatgcttacgagcacaaagagcggcataaaaggacaattcaacttaaactactattgagttacttccttctcctcttgaacacactcctcccaagagaggtgagaagaatgagtccaaaactatcttcacaagtagcaaagaaatttcagtgaagccaatgtctaagagataataaaacccactagcatgaaacttttattttattttattttattttattttattttatttttttttttttgagacagagtctcgctctgtcacccagactgcagttcaatggcacaatctcggctcactrcaagctcca

SEQ ID NO: 712098 - DNA, 877 bp, Homo sapiens
gatgatgatgatgatgatgatagcagctgatatttactgagcactttctatgcttcaggcactattctaagcatttaaaataaatgaataaatatgtgtatgtatatctcatttaatccttacaacaattttgggatgggttctattattattctcatgtttcaggtaaggacattgaggaaaagtaacttgcacaggttcaggcaggtagtatgtggtggagccaaagttcaatattgcaggaaaacctatactttaaactactgcactagaatgtgccgtaatgttttggttcatatatttcaaaggaacctgccttgactactttctcctctgaattcattgcatatgttgactgcattactcttaagtttatatgttattacgtgttataatgtagggctctttgtgagttctacttactctattttaaaacttgggcgggcgcggttgctcatgcctgtaatcccaacatttaaggaggctgtggcggggtggattacctgaagtcaagagtttgaggccagcctggccaacatgctgaaaccccatctttactaaaaaatacaaaagttagccaggtgtgttaccacacacctgtaatcccagctacttggaaggctgaggcatgaaaattgcttgaacctgggagacgaaagttgcagtgagccaagattgcaccatgcactctagcctgggtgatagaatgaacaaacaaaaaaacactggtaagggcagagactacctctttatctgtttctaacagataaagccattgttgtcctgtgttgcccttatattatcaagaccatgaatgatgatgatttttacagtgaayggaaatcctttccatagtactgctttattttaaggtcag

SEQ ID NO: 712099 - DNA, 766 bp, Homo sapiens
aaacaaaagataatggctgggcatggtgctcacacctataatcccagcattttgggatgccgaggggcccaacccaggctgagggcagatcacgaggtcaggagatggagatcatcctggctaacacggtgaaamcccgtctctactaaaaatacaaaaacaaaattagctaggcgtggtggcgggcacctgtagtcccagctactcaggagaatggcgtgaacccgggaggcagagcttgcagtgagctgagatcgtgccactgcactccagcctggacgacagagcaagactctgtatcaaaaaaaatttaaaaaaaaagataaaacctctaatttaataagtttaattcaataccaattaaaagcctttcatattttcagtgatgatgagcctgataaatacagaaaataacatggcaagaatcattttatggctatcataatgtgaacattaatcaaaatgatatggcaggcctggcacagtggctcacgtctgtaatctcagcactttgggaggccaaggtgggtggatcacctgaggtcaggagtttgagaccagcctggccaacatggtgaaaccccatctctactaaaaatacaaaaattagccaggcattgtggcaggcaccaataatctcagttactctggaggctgagacaggagaatcacttgaacccgggaggcacaggttgcggtgagctgagatcgcgccattgcactccagccaggtgacaagagtgaaactccatctcaaaaaaaaaaa

SEQ ID NO: 712100 - DNA, 766 bp, Homo sapiens
aaacaaaagataatggctgggcatggtgctcacacctataatcccagcattttgggatgccgaggggcccaacccaggctgagggcagatcacgaggtcaggagatggagatcatcctggctaacacggtgaaaccccgtctctactaaaaatacaaaaacaaaattagcyaggcgtggtggcgggcacctgtagtcccagctactcaggagaatggcgtgaacccgggaggcagagcttgcagtgagctgagatcgtgccactgcactccagcctggacgacagagcaagactctgtatcaaaaaaaatttaaaaaaaaagataaaacctctaatttaataagtttaattcaataccaattaaaagcctttcatattttcagtgatgatgagcctgataaatacagaaaataacatggcaagaatcattttatggctatcataatgtgaacattaatcaaaatgatatggcaggcctggcacagtggctcacgtctgtaatctcagcactttgggaggccaaggtgggtggatcacctgaggtcaggagtttgagaccagcctggccaacatggtgaaaccccatctctactaaaaatacaaaaattagccaggcattgtggcaggcaccaataatctcagttactctggaggctgagacaggagaatcacttgaacccgggaggcacaggttgcggtgagctgagatcgcgccattgcactccagccaggtgacaagagtgaaactccatctcaaaaaaaaaaa

SEQ ID NO: 712101 - DNA, 766 bp, Homo sapiens
aaacaaaagataatggctgggcatggtgctcacacctataatcccagcattttgggatgccgaggggcccaacccaggctgagggcagatcacgaggtcaggagatggagatcatcctggctaacacggtgaaaccccgtctctactaaaaatacaaaaacaaaattagctaggcgtggtggcgggcacctgtagtcccagctactcaggagaatggcgtgaacccgggaggcagagcttgcagtgagctgagatcgtgccactgcactccagcctggacgacagagcaagactctgtatcaaaaaaaatttaaaaaaaaagataaaacctctaatttaataagtttaattcaataccaattaaaagcctttcatattttcagtgatgatgagcctgataaatacagaaaataacatggcaagaatcattttatggctatcataatgtgaacattaatcaaaatgatatggcaggcctggcacrgtggctcacgtctgtaatctcagcactttgggaggccaaggtgggtggatcacctgaggtcaggagtttgagaccagcctggccaacatggtgaaaccccatctctactaaaaatacaaaaattagccaggcattgtggcaggcaccaataatctcagttactctggaggctgagacaggagaatcacttgaacccgggaggcacaggttgcggtgagctgagatcgcgccattgcactccagccaggtgacaagagtgaaactccatctcaaaaaaaaaaa

SEQ ID NO: 712102 - DNA, 608 bp, Homo sapiens
cgcttagcctaacaaacaaaacttttgatagcacttaactatgtatcaggtattattccaagtgttttatatgtgttaactcatttaatcatcataataactctatgaaataggtaactaatattatcttcctgctttttacagagaaacagaggtacagacagtctaaaaacttgcctcagattayatttatgataaaaaaaacagctgagttgaagccaggaattctgactctaaatgtcaatgaacttaacccttacgcaatattgaccttcttctattttttccaagacattgttaactaaaaagagatgttactgaagaacacaaaaatcaggccaggcatggtggttcacacctgtaatcccagcactttgggaggccgaggctggcagttcacctgaggtcaggaattcgagactaacctggccagcatggtgaaaccctgtctctactaaaactataaaaagtagccgggcatggtggcgggcacctgtgatccaagctactagggaggctgaggcaggagaattgcttgaacctgggaggcagaggttgcagtgagctgagattgtgccacggcactccagtctgggcgacagagccag

SEQ ID NO: 712103 - DNA, 608 bp, Homo sapiens
cgcttagcctaacaaacaaaacttttgatagcacttaactatgtatcaggtattattccaagtgttttatatgtgttaactcatttaatcatcataataactctatgaaataggtaactaatattatcttcctgctttttacagagaaacagaggtacagacagtctaaaaacttgcctcagattacatttatgataaaaaaaacagctgagttgaagccaggaattctgactctaaatgtcaatgaacttaacccttacgcaatattgaccttcttctattttttccaagacattgttaactaaaaagagatgttactgaagaacacaaaaatcaggccaggcatggtggttcacacctgtaatcccagcactttgggaggccgaggctggcagttcacctgaggtcaggaattcgagactaacctggccagcatggtgaaaccctgtctctacwaaaactataaaaagtagccgggcatggtggcgggcacctgtgatccaagctactagggaggctgaggcaggagaattgcttgaacctgggaggcagaggttgcagtgagctgagattgtgccacggcactccagtctgggcgacagagccag

SEQ ID NO: 712104 - DNA, 1291 bp, Homo sapiens
aggagacttctttggggcagtgttttctaagctgggttccagggaccactggtcttgcgagatgctctatctagggttctatatcaaatcagcatgtagaaacatgcagcccataccccttgtgtacatcagcatctcaaagagtctgagaagtcctgcagttgaaaaaccaacactttaacccttttaactcagtatttcctgaacttattccataagtttgaatatacaaaaataaagttttttgcttaatactcagcaacamccccttccacaagatatactggaataaatagtgtttggtggtcatgagtattttaggaaaagggcaggagaagcttgaatttcccccagtgtgccttgggtgagcactgtggttatagccacttgatgagaacagtcagaggaaggctgctctgggccatcaagtgcagactgtataggacaggagaagggtgggaacagagacacccctgaaggggttgtagattcagggggaaaggtgatggatggcctggacaaagattgtggtggaaacaaaatcaatgggcacacgattttcccttcttggaagaacctctgaaaggagaagccctattcaccccgactgcctggcttaggccacacccctagaaatgcagctacaaccagggcaaaccatcaacagcatcttctcagcacccatgcgatcccaagtaggcatccgaggacatgcaaaagagaagcatgtgttcttttgtggtcaaagtctgttttctctcttggagcaggtatgcttctgatggtgctgcaagcagcagggggtaaggctgcaagctgggctaaaaacagccccaccccctctagccacaatcagctgtgggataaaagcccctaaagaccaagactgtactcatgtctgactcatctctgcttccagctctcagctaaacctgcccagaggagagcatggcagacaggagggcgcttgctcagaagcctctaggttagaggtaaacaggactaaggttaataaagaaattcataatgagggtatagcaactgtacccccaccccatcaccagatgatgacctggtctgagagaggaaacatgcaggtgggtcacataactcaatgtaaagcaggtagcgcaccatgcctgcatttaagggctcagcaggtgttacttattactattattttctcctatgcaagtaactgaaaaaaaattacttcatttaagatctttagcaaatacttttggtgttaactctttcagggacacttcttttttaaaaatttattttttaa

SEQ ID NO: 712105 - DNA, 1291 bp, Homo sapiens
aggagacttctttggggcagtgttttctaagctgggttccagggaccactggtcttgcgagatgctctatctagggttctatatcaaatcagcatgtagaaacatgcagcccataccccttgtgtacatcagcatctcaaagagtctgagaagtcctgcagttgaaaaaccaacactttaacccttttaactcagtatttcctgaacttattccataagtttgaatatacaaaaataaagttttttgcttaatactcagcaacaaccccttccacaagatatactggaataaatagtgtttggtggtcatgagtattttaggaaaagggcaggagaagcttgaatttcccccagtgtgccttgggtgagcactgtggttatagccacttgatgagaacagtcagaggaaggctgctctgggccatcaagtgcagactgtataggacaggagaagggtgggaacagagacacccctgaaggggttgtagattcagggggaaaggtgatggatggcctggacaaagattgtggtggaaacaaaatcaatgggcacacgattttcccttcttggaagaacctctgaaaggagaagccctattcaccccgactgcctggcttaggccacacccctagaaatgcagctacaaccagggcaaaccatcaacagcatcttctcagcacccatgcgatcccaagtaggcatccgaggacatgcaaaagagaagcatgtgttcttttgtggtcaaagtctgttttctctcttggagcaggtatgcttctgatggtgctgcaagcagcagggggtaaggctgcaagctgggctaaaaacagccccaccccctctagccacaatcagctgtgggataaaagcccctaaagaccaagactgtactcatgtctgactcatctctgcttccagctctcagctaaacctgcccagaggagagcatggcagacaggagggcgcttgctcagaagcctctaggttagaggtaaacaggactaaggttaataaagaaattcataatgagggtatagcaactgtacccccaccccatcaccagatgatgacctggtctgagagaggaaacatgcaggtgggtcacataactcaatgtaaagcaggtagcgcaccatgcctgcatttaagggctcagcaggtgttacttattactattatttwctcctatgcaagtaactgaaaaaaaattacttcatttaagatctttagcaaatacttttggtgttaactctttcagggacacttcttttttaaaaatttattttttaa

SEQ ID NO: 712106 - DNA, 1324 bp, Homo sapiens
cccaattttgttggcaacatctaaagcattgtaattaggagccagtcgaacatatgccttcttctctccatcaggccgaatcggggtgttgactttggccacatcaatgtcatagagcttcttcccagcctgtttgatctggttcttggtggtggctttaacatccacaatgaacacaagagtgttgttttcttctgtcttcttcatggtgaactcagtggtcagcggaaacttgatgatagcatagtggtcaagcttgtttctcctgggggcrctcttccgaggatatttgggctgcctccggagtcgcagtgtcttgggcctccggaaggtgggtgacatgtggatcttgttttttgtgtggctgtggacacctttcgacactgccttcttggcctttaaagcattcgctttggcttcagctttaggaggggcaggagcttccttcttcgcttttggtgccatcttgtgaaaaagctaaaggtatatttttaaaagatgtataaatatgtgtgtgtacattatgtgtgtgtgtgtgcatatatgtgtgtgtgtgtgtaaatgaatagaatagagatgagaagtctctacctagattctctggagtgcttacctccagaggcagcactaagagtgaaaggggtgctgaagggaatgttctccagttttgggggtggtatgcttccgatcacttagatatttacagtaagaatacattcacatattagataattaccttttctctccaaaataagagaaataaagaactattatgaatgttgaggaagtgaggaagataaagaggggcagtcaatgaaaggattctttcattttttcctccatatacttctatactattagaattcatgaacaagaatgcactcatgtatttcttgtatggtgatttttttttatcatgcaaaagttcatttatgcattccacagctaatattttttgactctttactcaatgcttaacaccaagctctgcacctgatctgtaattctcacaatattctgagccacatatcagcatcccattttacacaagaggaatctggggccaacagactgcttaggtaatctgcccagctacccatccagctagcaaatagtggcactaagattcaaccaggtccacctggctgcagagcctacactctcacctgtcacactccacattctaggccatggtggcagggaccaggaggaatgaggcttctctgccttcgcgtaagtggaacctagtcaagatggaaaatgtgacagaaaggctaaataaatggacagactgagcaaaataagcaggaacatttaatggaaa

SEQ ID NO: 712107 - DNA, 635 bp, Homo sapiens
actcatgaatccagtaatcattgtattccaacaacgtgatgtctttcagtgtttacccaccccagctttgcaaacactgccaccagcagggaggataagtgggaggaggggggtgcacagtggggacagagccagaagatccaacccattcatgtaaagtcagtcccttgtcccaaaaggcttaagaccgacctgagacaccaagacatcattgatagtaaaggccagttggcattgaggagcaacaacctctaagtccccccaggaagtagacaagaccacccctggggagggtctaacatgtggcctggggcctgtgggagggtggggtgaccaccttgtgtgccagtgatggtggggtgcacatargatacaggatgcccactgccaagcaaaccgtcatccccactgccccaccgtgctgtgtgctggaagtggcactgcagtaggaacacgcgtgggtgagcgtcagggcgtggctgacacatgcacagctccagcacaactctgccgtgggctgtgggtaccccaaaggcctgaacttgtccttgccataagtgagaattactccagatccgcatgttctcacctttcccatggcccaagctctcgtgatccctgagcacaatactgca

SEQ ID NO: 712108 - DNA, 635 bp, Homo sapiens
actcatgaatccagtaatcattgtattccaacaacgtgatgtctttcagtgtttacccaccccagctttgcaaacactgccaccagcagggaggataagtgggaggaggggggtgcacagtggggacagagccagaagatccaacccattcatgtaaagtcagtcccttgtcccaaaaggcttaagaccgacctgagacaccaagacatcattgatagtaaaggccagttggcattgaggagcaacaacctctaagtccccccaggaagtagacaagaccacccctggggagggtctaacatgtggcctggggcctgtgggagggtggggtgaccaccttgtgtgccagtgatggtggggtgcacataagatacaggatgcccactgccaagcaaaccgtcatccccactgccccaccgtgctgtgtgctggaagtggcactgcagtaggaacacscgtgggtgagcgtcagggcgtggctgacacatgcacagctccagcacaactctgccgtgggctgtgggtaccccaaaggcctgaacttgtccttgccataagtgagaattactccagatccgcatgttctcacctttcccatggcccaagctctcgtgatccctgagcacaatactgca

SEQ ID NO: 712109 - DNA, 631 bp, Homo sapiens
tccctctatctccttatttctcaattcccaaacacacataggccacagttcagatctgctggcatctttaggggtgtacagccaccatcccagagctccagggcagggctggtattttcttccccacttcatatgcctcagctcccagagtggcatttgtggaagttcatcaagtggacaggcagagccagcctgagctttcttcttccctgagctctggtccacagcaggagtggmctttaccctgaacttccctcgagagataagactgttgcccttatctttggtgattcctgggggttgagttcccagtgtggaaaggttggtttggaatgttttctcagatgtactctgacatgctaacacccacattcctgcctaaactaaatagtcctgccagccctgccagatgtcatggtcttttgttgccatagatgcccctggaggaaaggggtaaagggctgacctggaataaacatgagcccttgatagccatgtccttaaaagactgagaagccacaccaagcaaagtgtggctatcaagacctctagttccagatatagtcattgaacataattcctggcaagaaaggggtaatccaaagtcaggcaaaggttagtcttctgtggg

SEQ ID NO: 712110 - DNA, 1000 bp, Homo sapiens
tttagatcatcaagtcagtggaaactttacacgacctctgactgatgctctgctgttcctagtggaatcattgtcataactagcattttgtttgtggctttgtacctgagtgcccattttggaccactcatgatgttaggggcttatatcacatctttactttgcacatcaactctatgagacaatcattatcattttcattttagaggcgaggaaactgagtcttgaagaggttaagttgcttcaggtcatggctggtgagtaatagagctagattcaaagccaggactgcctgcttccagagctcatgcccttccttgtgccaccttagagttcttcctatacaacttctcacttgaacttggaggcttctatttcttgagccaccctgtgagagagtttgatgagttcattttaaatgttctcatttgtgattcgagagaactgaaaattctctgaatttagacttcaaattccatttatcttagcattcctgcctcctcagctcctggcctcgtcgttggtgggccagttcattggtggctggtggatgcttgtgcctcgactcctgtcttggctgtgcttctaacatagagggtaacctgaggaggtcactcaaccagttcatgtctctcgttctccaaatatagtattaagagggcttgcctggactagccaattaggcactgtactgcatgttggaactatgaagcctattaattcagtcaattaacatttactgagtgcctgcagtgtgcagaaccctggggcaagtggaggcatggtattcctgacctgtggatgtactattctatatatttygtttatttttgcacctctgtgtgactccacccaacccctaagaatactcttatccccacctacatgtttcttttcttttcttttttttttttttttttgagacagagtttcaccttgttgcccaggctggattgtaatggcacgatctcggctcactgcaacctccgcctccccggtt

SEQ ID NO: 712111 - DNA, 3412 bp, Homo sapiens
ttttcccactcataaagggggtaaaatattgaagtccaaaatcccagttttaataaaaaaaattaacttccccctttggtaggccgaggggggcagatcccgaggtcagtagatcgagatcatcctggctaacacagtgaaaccccgtctgtacaaaaatacaaaaaaattagccgggcgtggtggtgggtgcctgtagtcctagctactagggaggctgagacaggagaatggcgtgaaccccggaggcggagcttgcagtgagccgagcttgctccactgcattccagcctgggggacaaagtaaaactttgtttccaaaaaaaaaaaaaaaaaaaaaaaaaaaaaaaaaaaaaaaaattaacttcctggtactactactgtgcatattttaagatcagaaatgactgactttaaataaacagacttagttaattctgtaattttgtgtaatgtaatttattattaatagaaatgtactcaagataaagaagtaagatatcagtttatggttttctcctcttagttcagtgacaactaatttgggggtaactggtcagattcatgtttcacattttcctttgtgttttccaaagtttggggatgtacaattgaacacttaattattatcactcatggggaaaagttcaggtaaaaatagtggcaaacatatatcaagtaatttacatttgtagtctattttagatatatttatacaaataactgtatattctggtgacttatattacaaagtaaggctgaatcaaaacaacaaaattaagaggataggaaaacctccctagtctttgtttttgatctctagcaatcccggccatgatgcaaatcaaaaattctccctgttatttgtctgcagtacgagtatggtggcttcgtgtcatttcttcctgtgacagagaatggctaagaggtagtgagagactagtgctcccactatctgtgcctgcctcttctgtcttggcgctttgcccaatcatgtttcatacaggtgggaccaaatgacttcttcyggtcaatgggatgtaactgaaagtgataaatgccacttccggttctggttccaaaaaactccttcaagttctttaccctcttatttccttgtttttaggacttagtgaagggtggatccactagatagaagagaagcagacaccctcccaggccttaacctgctttcgctgttcgctataaagtaggcaattaaaaaatcaaaatcaaatccttagtagtcctaggttaatgaaaattaggatatatattatcacagttggcacaccctgactcatgaaaactaaatgcaaagtcttagtaacttggatttatggatcatcaacaaataaataaatagcactttttagatatgaatttccagttaaaaatgatatttattacaagtagatcagtgtttactatctggaaatggtaactatatgttttgctaattaaaaaattaaatataaatttaattttaataaaaaggaattggaccaagtaataatgaaagtactgtccaacttattatttccattgcatccatgtacaaaatattgctcaacatctactatgtgctgggtatgggtttaggctttgaaggtatgtcagggagccacacaggtgaccatccctaccctcacgaggtttacctcccagcagagagagacaggccataaacaactaacataaaaatgagtcagatacatattagaagtgataaagtgctatagggaaaaatggaacaaggtaaatgggattaggagtatgagggtgtggtgggggaaggggatgcatttttaatggacatggtggtgggagttgtattaagaaaggaggacatttgaaataagacatgaggacagaacatttaaggcagagaaaacaagcagtacaaacgcccaaaggtaggaacaggtctggtgtgttcaaggctagcaaaagggtggtagaggaaaaataacattagaggttgtactagggctgccataacaaaatcccacaaactaagtggcaaacaacagaaatttgttttctcttggttccaagggctagaagttcaagatcaagatgttggcaggcttggtttcttctgaggcttctgttcatggcttacagagggtgtcctcacatggtccccccaggtctgtgttgtatgggtcctaatctcctcttctcatagggacaccagtcagattagattagggtcctccaaatagagtaacattctgaagtactggggaagaggactttaatgtatcaattttatgaggacacaactcagtccttaataaaaagatgttgtgtaaagatatcgtgtcccagctcacaaaggtctttgagaaattgggttttcacccacgggagtaaagtggaagccactggaggctttgatcagagaatggcataacctgatatgtcttaatagcagtacatgtagggggcagggaaagaaacagtgacttatgtgaagaagctattcaggcagtccaggcaagagatgaggcagtttgggctcacatataaactgctcagtagttgttatatctgaactaagtaacgggaaagcaatttcatcaaatcaagagtcttaagatttgggggagcagaatgatgcatttattttacagataggaaaacagactcagaagaaaatgcttttctatggtttcacaacttaaaggcagagtgattcttaagtcagtgatcatttcattatcccttccatcagtctcaaattcaactttgttaaagcaaattttctgttcaagaatgtctgacttttctgccacatgttcctgacttattcattccctccaagtatcaattcaaaaacatctttagaagccttctctgaccacccaacatgaaacagcaaccaactctttcatctttccctgcataccacttccctgttgtatttttttccatcctgttgatatcatataattttaatttattggtttattttctgaatatattctctagaatataaactctacaagaccaagcacattttcagttctggttatttatatataaaataatataatgctaattataattatatatatgtatatccatatattatatatgtgtatattgtgtatatttgtatattatatatgtgtatatatgtgtgtatatatgtatattttatctatttatattagtttggtagtgtctcccatgtttaattgttttcttacgaaagacaaattttagaagaaggtatgcattatatttggatttttggaatagtgttttgacttcaaatgtttccagtaaaattttttttatttattttattttattttattttttttatacaaacatatgttttttattctcttgtacttatatacctagtaatggaattgctgatcatgtggtggctttaacc

SEQ ID NO: 712112 - DNA, 632 bp, Homo sapiens
caaaattaaatgtaagctatataccagaagctttgaaagcaaccaaattgaaaagatatgtgattaagaattcaccctgcatctaagacaggcttgctactctggactgccctgcttcctcctcacttcatccaatccacttcactgagaccacagtttctagactttgccctgctggctaaaaagtactttwtcagccctggcctgtaacagacagagattgctaagtactaatagtattcatttccttctgttttatttatttatttaatttatttatttttgcccttgtagaagaacctcagatttctctgaagagacagtgagccaatctaaattcttaaacaccttaaaacaggtttggccatgtgactggccaataagatctaaatgaaagcctcttagtcctttttgaaaggttatggaagctgagactgcctgtgtgggagatgtaatggctggaatccctgcagctattgcagactaagaggtacatggataatggaaaacatttgtgtagaagagaaaactgtaagaagcttaggccctggtggtactatgcagagccatcaaacagctttaaactgctgtttccagaatgctattatataggagaatgaaatcttagttgt

SEQ ID NO: 712113 - DNA, 581 bp, Homo sapiens
caatatagggttgttcacactctggattgtttaaagaggttgttcagtttgtctcaatcaattaaaatagaattggtaccttcatgaaggggccaaatcatgcaaatgtgtacattatactaagatactgctagtgaactgctgggccttctgttatttaaaaagtgtactttacaccagtaaaataaaactttaagaaaaacttcttgttaatttagagatttacatagagaacacaaaaactatggctacagaagctgtgtccttacaacagtaaggaggttaatggcaaagcctgtgcttttaaccctaatactggacagttctaagtaaagcaagaactaggccgattagtacagtatcttgaatttcaggaaatctggatggctgtattaagcacagggatccgatttctcagaagctcatacttttccaggttttagataatgactgtctatatgttcaataattggaaatagtttctaagtaatagaaaaacagttttggagaaagaactaaagaaagcactaagtrattcatcaataccaatttgggtgtatgatctgtcaaaacagtaaaag

SEQ ID NO: 712114 - DNA, 684 bp, Homo sapiens
ttcctctgaactgaaaggacatataactaaaatatttagcatagctgtttctgggagatgaatttttaaaattattttatcatatttttctttgttcctgatgtctgtactttttatctacatgtgtatttatttatatactgcagtaagtcctcactaaatgtcacaaataggtacttgaaaattgtaactttaagaaaaatgacatatagcaggtactcacataacattgttttactcaatgtcattttgttatcacgctgattagaaagaaaagattggttttgttatatgccatttcatttaaagtttcagtatctgataacctatcaatggtattaagtgaggacttattgtatacctgtatgtgttatagtaatacaaaattctataattttatatataggattcaggcagataattcagaattttttcattaaaacactaatagaccaaatttctacctatcttttaattttatatttatttggaaaaatacatgtttgttatcagcactgcctagtttaccacactgcccaataattccgagacatttttccagtattttatttgccttgaatatggtagatgtcagaggaacttaaactaattacttctgagctcasttaagcaccaaaatacattttttgagttagcttaagcctaaaacacaagtctagtttt

SEQ ID NO: 712115 - DNA, 2590 bp, Homo sapiens
tttccagttattattagttgagaaaataaatgattaaaaaactatgaaaaatcttctacttgcatgattttgggtgagatattaaatctatctgaatttcagatttatgaactctaaagggttgatgagagtaactaaaatgtttctcctaacattaacattctgattctaagtttacagactgattttttgtgggggcaagatggtactgaaagaaacgttttctatcactttaaacctaatgaaatttcccatttccgagatttaagagaatcattcaagaagaaatacaaagtcataaaattagggacattctacaatttattatggaataacttgacaacccagaattgacattttgtaactgttactctctccagatattattttttctcgtaaatatgcttaggaaatattttgtgaatatactttaaaaagacatatggagagaattactcatttgtgtgctattctacatgtggatattttgttggcaactcaggcttaatttaattctactaggtgtctactttacagaaatgtaaaataacatctttaccaggaagtttcaatcaaaagctctatttagtcttttgtaatataaaaatattacattcaatactgacagaaactgtacaatcatattatagtctactttcccatctgttactggatataaactgagttaaagtttctgttgtatgagaagagtaagctaagttttattaagcacctgcaattttccagggactatttccagggactattattttatttttcctctttgacatatctatgtggtgcaaattatgactattttaaagatgaggaaactgaggttctgagtgaagcatcaagtggagtttgaaatagatttgcaaggtgacttatacactgttatttaatcttaataacaatcctttttagttagagatcactcttttcctgttagatattgaaatactgatatttatagaggttaagtaatttgccttaccagacttgcaaatggcagaacagcagaaagctaattctgtttatagctaaagacttgcccatttttagtctactatgatttagaattattaacttatttccttccttcatgcgtatctattttttataagactggcgaataggagrggcgagcttgctccattacagacatgtgtgttcatatgtatgtgtacatgtgtttatttaagtgttaaaataattggaggaatttcactgtatgaggtataagtatcctgcaatgaaagaccataaactatatacagggaaagtattcatgctcgtacaaaacagagagtgtgacaatgtcacaaatgagaaacttagaaaatatatgatttaccataattctgcacaaactctatgactatcagaatctatagactgtcagaacctaagtatttagattgattcattctagatacacatctaaggtagcagagactaactagtcaatattcttcaccgaatcagagagtatttaaaactcttctctaaacagctaaaaaggatcaagaatgagaagcatgtttaacatcagcttagcagccgtatactatttgttacagaaacaacttgtgatagaggacagaagccatatcagaagtcacggaattaattatgtgagtctgggatcagtgagagatgaaaattgagaagaaagaaaactgtaagactctgtgacttgaaaaatccaggagagacaggtaaagaacagaagccaatatcacaccctaggagattcagaattaagcatgccgaattcacgcttcacagtgagaagggtggtagatcagaaattaagatcagattgttgattttcctaagtactggagaagttgagttatataaaaaagctaagagtcattaaggtgtgtcatctttaaagagaaattttcagaattttattgaagctagtttattttttaaattttatatatatatatttactagttttcattcagtaatttcaaaattgccagaggagaaaatcatggcagtgggcatatgatcatctcagagaaaaagaaacacattaatggtctcttctttcttctggagctatataataggaagcaagtattttccaggaaatggaggtgacatacgtgtagatagattcctttcctggtaccttacagatagagctaactagagtttaaaacccatatgcataggctgagtaatccagcctgcaagtgtgagtgggcatactcttgtaagaattattataaaaccatacaaattaaatcctttaagaaagcatattattttcaatttttttagccccttattatctatctttgtctctatatctatcagtctctctctatataaacagagattgaaaattgaatgactcagttttcctgtagagcaatataaatacagtcacacgtttcttaacaattgagatatattctgggaaatgcatcattaggcaattttatggttatgcaaatgtcattggttgtgcaaaccaacttagatggtagagcttactaaaaatgcaggttatacggtatagcctattactcttaggctacaaatctgtgcagcatattactgtacttac

SEQ ID NO: 712116 - DNA, 728 bp, Homo sapiens
taatttttatatcttgaagtgagcttaaatgtttgaaagttgtttaattaacagagtgtcttctctaaagtatctaaatatcttaattcaacattctataataattccrtaatttatatataagcactaaagaaaaaattatccttagaagaatatgtttcaggcaatgtaggagacaatacataatatgataatatcagtatgtattagataaaataatttttttcatttttccagttatatatgagaacttttcaacatgagaaattttaaagggaaatgagtcatctatggcaatatgtgttttattcttccatgtctttcctaaacattggtgctcgcctacaaaacaaagtatgagattactgatgattttcactaaaatgtctacaacctagcagaatgcagtttcagtgtagaatagatctggccagggctacagtgacatttagaatcctgtgtgattctcaactctgcaacttcaggaagactggcaagcactgttagtgctaatatattagaagcagatacttacagcctaataacacaggtatacaattatcaaaagacaaagctctcgatttagtcaacaaatatccatcaagtacaggttctatgacagggacaaagtaaatgaggttaaataaaaatatttataaatttgtaaataaaaatttatttcttcaggaaaattttaacctcaaaataaatgtttaaaatattcctca

SEQ ID NO: 712117 - DNA, 593 bp, Homo sapiens
gggaggcagaggttgcagtgagctgggaccataccattgcactccagcctgggtgacagagtgagactgtctcaaaaaaaaaaaaaaaaaattagtaaagttgtgcagaccagtgcgtccctcctagtaacaacaacttatttctcagcgacagagctctaccttatggcaatgctaaaarcggacattgagttagtcaaccctcaagatgaaaaccatttgttattttccagtcgtgatgtacaataccctatagactaaataccacatactgagccacatttcacttttgggaaatgtcatgtcattcatatgagttaaatgctaaggatatgtaattattttctctctaaaagacagtctaaagcatgcatggggaaagttattctaggaatgaacaagcaaagcagacacacaggaaggctcctgtgcacttgattttttcaagaatcaagtgttcttgtccgaggaggttcacagtaaaaggggacttcattctcaatagtccaatttgattctgttaatatgttaatatacatcatattggactttttctcaactatgttaaatcttttcatttttgtgccatttca

SEQ ID NO: 712118 - DNA, 1175 bp, Homo sapiens
acatccttgtagaaaataatatgttactcccttgggtcttttttctcggccagcaaaactgaaaaacacagacctacaggcttagggggccacagagggctctagaagaaaaaaaaagtaagtaaaaaagagatttggggtcttaaagtttcaccgaagaggcaaggatataacaccaaattttcctaagtttatctgaaaattgtaatccctgtgaaccattaagctgtactgacattaaaaaaaaaaccactattgacttgcaggttggcacaaatagtctagtctggtccatacttgcaaatgaactttgtttcatttcttgttgctttgcactagtatttattttgaagagaagattgaatgagaggggaagcaatatttaaggcaattctgagttatatgtaacttgacactgtgagccgagagtcataaaaatgtctacatcaggccaggtgtggtgactcatgcctgtaattccagcactttgggaggccaaggtgggaggatcatttgaggccaggagtttgagatcagcttgggcaacatagcgagaccccatctctacaaaaaaattttaaaaattagtcaggtgtgatggtgcttgcatatactcccagctgctggggaggctgaggcacaggagaatctyttgagcccatgagtttgaggttacagtgagctatgatcttgtactgcacttcattgtgggtgacagaatgagaccttatctcttaaaaaaagaaaaaggaaaaaaaatctatattgtaatgttaaaattgactttaggggaacctaacctaccaaattaatttagaatgtgaaagatgccatataaacattattcatctattcattgctaagttattggtaggaataaaaatttggaagcaatttgatgacctataataagaataaattattaaattcttatttaataaactattgcatacatttgcatatgattatgaagattatgcaacaacatagaaaatccttaaaatgtcatgtgttaagagattacaccacccaaatggaaaagatggaaaggaaatatgtcaaatgttaacagctgtgtttgggtaataggatgattagttgtttttttcttccttttctctcatgattattttaatcaggtcccaattttataaattggaaaatcaatttaaagc

SEQ ID NO: 712119 - DNA, 379 bp, Homo sapiens
tttttaaacaaaacaaaacaaaaaaaccaacttattcaccagaggattggtctctaatattttacccctgtggatttgtttttaccttttaaatacgttactagtatttttataaaataaaacgaatctgacctaaaacattaaaatgacatttttctttcctttcccttctcttttataaatgtkagaaaagtaatatatgcttgttgtagcaaatccaaacaatacagaagtttataaaataaaaaatgaggctgggagtggtggctcatgcctgtaatcccaggactttgggaggccaaggcgagaggatcactggagctcaggagtttgagaccagcctgggcaacatggcgacaccccgtgtctacaaaaaata

SEQ ID NO: 712120 - DNA, 379 bp, Homo sapiens
tttttaaacaaaacaaaacaaaaaaaccaacttattcaccagaggattggtctctaatattttacccctgtggatttgtttttaccttttaaatacgttactagtatttttataaaataaaacgaatctgacctaaaacattaaaatgacatttttctttcctttcccttctcttttataaatgttagaaaagtaatatatgcttgttgtarcaaatccaaacaatacagaagtttataaaataaaaaatgaggctgggagtggtggctcatgcctgtaatcccaggactttgggaggccaaggcgagaggatcactggagctcaggagtttgagaccagcctgggcaacatggcgacaccccgtgtctacaaaaaata

SEQ ID NO: 712121 - DNA, 657 bp, Homo sapiens
gactcccctggcacctgcatgaaactgaggaatgtccattttgaggttccattttcatgggtctctgggcatgttttctattgctggcatgtgtttgggagtgtagctagtggaagggaarcttgtgaggccaggggctcagctgtgtgcactgctctctgccctgcgcctaccagagggctttacatagtaagtagatgctcaacagttatctgctgaattagtgaagatggtggggagggggatactggagtctcaaagttcacatatacaagatagaactctgactctcccaccccaccgctcctaccattttctcatctcagaaatgacacccagtagctcaggcaaaacccaggagccacacttgattcccctttcccttgctctgcaagttcaactcatcagcaggagtgtcagtcctacttccaaaatgaagccccagtcagagcgcttctcacctcctgtggtaccacaaccggaatccaggacactgctatcactcgcctgtccagcttgagaagcttcctgaaaggtctgtttccacttttgctccattcttgccccccagaggtcattctccccacagcagccaaagtgatttttttccagtataaactgaatcctaccattcctgtgtttaatgctcgcagataa

SEQ ID NO: 712122 - DNA, 657 bp, Homo sapiens
gactcccctggcacctgcatgaaactgaggaatgtccattttgaggttccattttcatgggtctctgggcatgttttctattgctggcatgtgtttgggagtgtagctagtggaagggaaacttgtgaggccaggggctcagctgtgtgcactgctctctgccctgcgcctaccagagggctttacatagtaagtagatgctcaacagttatctgctgaattagtgaagatggtggggagggggatactggagtctcaaagttcacatatacaagatagaactctgactctcccaccccacygctcctaccattttctcatctcagaaatgacacccagtagctcaggcaaaacccaggagccacacttgattcccctttcccttgctctgcaagttcaactcatcagcaggagtgtcagtcctacttccaaaatgaagccccagtcagagcgcttctcacctcctgtggtaccacaaccggaatccaggacactgctatcactcgcctgtccagcttgagaagcttcctgaaaggtctgtttccacttttgctccattcttgccccccagaggtcattctccccacagcagccaaagtgatttttttccagtataaactgaatcctaccattcctgtgtttaatgctcgcagataa

SEQ ID NO: 712123 - DNA, 657 bp, Homo sapiens
gactcccctggcacctgcatgaaactgaggaatgtccattttgaggttccattttcatgggtctctgggcatgttttctattgctggcatgtgtttgggagtgtagctagtggaagggaaacttgtgaggccaggggctcagctgtgtgcactgctctctgccctgcgcctaccagagggctttacatagtaagtagatgctcaacagttatctgctgaattagtgaagatggtggggagggggatactggagtctcaaagttcacatatacaagatagaactctgactctcccaccccaccgctcctaccattttctcatctcagaaatgacacccagtagctcaggcaaaacccaggagccacacttgattcccctttcccttgctctgcaagttcaactcatcagcaggagtgtcagtcctacttccaaaatgaagccccagtcagagcgcttctcacctcctgtggtaccacaaccggaatccaggacactgctatcactcgcctgtccagcttgagaagcttcctraaaggtctgtttccacttttgctccattcttgccccccagaggtcattctccccacagcagccaaagtgatttttttccagtataaactgaatcctaccattcctgtgtttaatgctcgcagataa

SEQ ID NO: 712124 - DNA, 615 bp, Homo sapiens
tttaaaagtttatgtatattcctgcttgcacagtaaaattaataaacactatctagttttttgaagaaagaaagaaacgctaggtaaaaggaaaaacaagaaacaacctcggccaggtgcgggctcacacctgtaatcccagcactttgggaggccragttgggcggatcacgaggtcaggagatcgagaccatcctggctaacacggtgaaaccccatctctactaaaaatacaaaaaattagccgggcgtggtggcgggcacctgtagtcccagctactcaggaggctgaggcaggagaatggcatgaacccgggaggcggagcttgcagtgagccgagatcgcaccactgcactccagcctgggcgacagagcaagactctgcctcaaaaaaaaaaaaaaaaaaaaaaaccaaagaaaagaaaagaaacaacctcatttcccccaatatatctaattaccggcaaaccaacattccttattttcttttatttgcaattcgatgaattccctaaaggtctggaaaaacttcagcatttctaattagactgtaatttttctaccagacaatcagacatagtttcacctttatacaacttcccatgtcctaaatg

SEQ ID NO: 712125 - DNA, 615 bp, Homo sapiens
tttaaaagtttatgtatattcctgcttgcacagtaaaattaataaacactatctagttttttgaagaaagaaagaaacgctaggtaaaaggaaaaacaagaaacaacctcggccaggtgcgggctcacacctgtaatcccagcactttgggaggccaagttgggcrgatcacgaggtcaggagatcgagaccatcctggctaacacggtgaaaccccatctctactaaaaatacaaaaaattagccgggcgtggtggcgggcacctgtagtcccagctactcaggaggctgaggcaggagaatggcatgaacccgggaggcggagcttgcagtgagccgagatcgcaccactgcactccagcctgggcgacagagcaagactctgcctcaaaaaaaaaaaaaaaaaaaaaaaccaaagaaaagaaaagaaacaacctcatttcccccaatatatctaattaccggcaaaccaacattccttattttcttttatttgcaattcgatgaattccctaaaggtctggaaaaacttcagcatttctaattagactgtaatttttctaccagacaatcagacatagtttcacctttatacaacttcccatgtcctaaatg

SEQ ID NO: 712126 - DNA, 918 bp, Homo sapiens
agacacaagacaagagaaatggcaataaagaaaactattatttagatgtgatttagaaaagggtcctcaatatcagagtaataaagcagaaaccataaaataatagaaagctgtccaacaaaaaactgaataaaaacaaatcaagaaaagaaattaggaaatgcgtaaatgtactaagggtcacaatagatcaccagctgacagtaaactgctgcttagtgacattgttcacacaacagggctgttacagatgggaagtagtaagtcatttttacactttctatgtataaccaacagatcccaattagatcctaactgaaaagaataacgaagacaatttaaagagctgaaaatgaggcttctagaaggaggaaaacrgcaatttatttatttatttatttaattctgagggggtaatcatactcttaaagacaggctgggcacagtggctaatatcggtaatcccaggactttaagaggccaagggggcagatcacttgagcacaggagtttgagatcagcctgggcaacgtggtaaaactccatctctacaaaaaaatacaaaaactaggctgttgtggcactgagcacctgtattcccagctactcaggaggctgaggtgggaggatctacatgaacccagggaggtcgatgctgcagtgagccgtgagtaacagagtcactgccctccagcctgggtgacagagtgagaccctgtctccaaaaaaacaaacaaacaaaaagactactggtgaaagaaaaagtgcaactagacagtttactactctactgaaaaacagagacattcagtaacagagaaattttacctaaatctgaagaactcttaatagaatcattgttaataaagtgatggtggaaacaacactctttttttactttgacaacttcatacttac

SEQ ID NO: 712127 - DNA, 1245 bp, Homo sapiens
caataggtataataataataatgagaaagtttaaaatatcgcaagaattacaaaaaggtgacagagagacacaaagtgagcacagtgggaaaatgatgctgaaagacttgctccacacaaagttgccacaacccttcaattaaaataataataataataataataataatatctacaaagcacaataaaacaagctatgcctacatgtttacaatagagctgactctctagttgttaaaccacataactgaactacacaattctcaacagatccttacttaaagcccaggtattcatacattaaaatgatcctaacataatgtctttacattatggtacaaatttatagcccatgaagacaacatcactgcattaaaatatttgaaaacaatcaaccagaattattttaaaaagttaaacagtattaagtgcatacattaaaaataccaaaaaaatggggcagtaatacattttttaaagaatgctctcaaaaaatgttatcaaagaaactatttgagcatttgaaggaacaactttcagtttttaaaatgaggccacaatataattttgtgaattttgtagtcttaccaaattgtattataattccttaattgtagctacaaaaatgttgaggtttttaaattttttcacatttgaaattwtccaaataataaaagtaaatattcactattatcccataagacagacaaaaaagatcatacttctgccaacctgactgtggggtagtacggccaagctgcagtgcacaaggcaaagaccttggaggctgtgaaggcagccagtttcccctcatagatccaccaacttaaccagctcaatgtcaccaggaaatggtcctaaccctgacccatcacgcttcgcttttttgttttggcggtggggggacagagtctcactctgttgcccaggctggagtacggtagcgtcatcttggatcactacaacctctgccctccaggttcaagcgattctcgtgtctcagtctccggagtagctgggattgcaggtgcccgccaccacacccggctaatttttatatttttagtggagatggggtttcgccatgttggccaggttggtctcgaattcctgagctcaaatgatctgcccgccttgacctcccaaagtgctgggattacaggcgtgagtcaccgcgcccggtcatcctttgcttttatagagtggagggctgccctgtctttacctggttctggaactgaaaca

SEQ ID NO: 712128 - DNA, 1194 bp, Homo sapiens
agaaactttaagagaaaaaacaatttatctttattaaaattgtttttattttgtgtgtatgtgtttatatgggaacaaaacaaaactgatgagaaacagctgaatgaacatgtggcttttaaaacgttacataataaaagggaagggaaaggtctggagtcctacattgcacatatgatattttgtccctgtaggctcctttttgttttcttaaggatatcaaatgscagtgtgatttcacaggtgacccagcttctagaattacattctgcaaaattgtttcccttccagaggctcagtgaaatgtggggtgatggcttccacatgaggataagtccccaacatgttctccaagcaaactcaggcacacgtttcaaaccaaagtgacagatacactaaatctaggtccattatatagaaagtaaagaaaatgatatgtaacagaagaacgttagtgattgaaatatcaaaaaacttacattttccactagcaaagtagggtttttgtgttttgtttttcaataaagttgaccatgtctggataccagtgaaatttgtgcagttttctttctaaataaaatcctgggatataaacaaaaagcacctcacaaaaatgcttttgtcttggtcgctgaaatacaactgaattcaaaataactgaattcatgaagagcttgaaggcatatcacaaacccatacaatgctattgagcacagacttgggcatcttaatttcacttataatgtttgagtttgctgccaaaagttcaattctctcccttttttaattgaagtacttatgaaaaaactgtacttcctaaaaagaaagcacaaccttataagaagaaaattaattgctctcatctccagttaaacacaacttccatcgttataaaatcaaaaagattaattgtaccagtgagctggccaacaatacgaataggctggaggtactgacaaaaagaaatgttcctcaattcaacctacctcctctccccaataatctggttcttatccataaactactttgaccttacagaaagaagaggcttataaaaaatgggcagaacagaaaagagtagaattcctgtaaagacccaagacttgaagcctactaaccaagagatcaattccatgtttagcatcaggccatatcttgccaaatatgatagactggcaaataggatatttggcc

SEQ ID NO: 712129 - DNA, 1194 bp, Homo sapiens
agaaactttaagagaaaaaacaatttatctttattaaaattgtttttattttgtgtgtatgtgtttatatgggaacaaaacaaaactgatgagaaacagctgaatgaacatgtggcttttaaaacgttacataataaaagggaagggaaaggtctggagtcctacattgcacatatgatattttgtccctgtaggctcctttttgttttcttaaggatatcaaatgccagtgtgatttcacaggtgacccagcttctagaattacattctgcaaaattgtttcccttccagaggctcagtgaaatgtggggtgatggcttccacatgaggataagtccccaacatgttctccaagcaaacycaggcacacgtttcaaaccaaagtgacagatacactaaatctaggtccattatatagaaagtaaagaaaatgatatgtaacagaagaacgttagtgattgaaatatcaaaaaacttacattttccactagcaaagtagggtttttgtgttttgtttttcaataaagttgaccatgtctggataccagtgaaatttgtgcagttttctttctaaataaaatcctgggatataaacaaaaagcacctcacaaaaatgcttttgtcttggtcgctgaaatacaactgaattcaaaataactgaattcatgaagagcttgaaggcatatcacaaacccatacaatgctattgagcacagacttgggcatcttaatttcacttataatgtttgagtttgctgccaaaagttcaattctctcccttttttaattgaagtacttatgaaaaaactgtacttcctaaaaagaaagcacaaccttataagaagaaaattaattgctctcatctccagttaaacacaacttccatcgttataaaatcaaaaagattaattgtaccagtgagctggccaacaatacgaataggctggaggtactgacaaaaagaaatgttcctcaattcaacctacctcctctccccaataatctggttcttatccataaactactttgaccttacagaaagaagaggcttataaaaaatgggcagaacagaaaagagtagaattcctgtaaagacccaagacttgaagcctactaaccaagagatcaattccatgtttagcatcaggccatatcttgccaaatatgatagactggcaaataggatatttggcc

SEQ ID NO: 712130 - DNA, 1194 bp, Homo sapiens
agaaactttaagagaaaaaacaatttatctttattaaaattgtttttattttgtgtgtatgtgtttatatgggaacaaaacaaaactgatgagaaacagctgaatgaacatgtggcttttaaaacgttacataataaaagggaagggaaaggtctggagtcctacattgcacatatgatattttgtccctgtaggctcctttttgttttcttaaggatatcaaatgccagtgtgatttcacaggtgacccagcttctagaattacattctgcaaaattgtttcccttccagaggctcagtgaaatgtggggtgatggcttccacatgaggataagtccccaacatgttctccaagcaaactcaggcacacgtttcaaaccaaagtgacagatacactaaatctaggtccattatatagaaagtaaagaaaatgatatgtaacagaagaacgttagtgattgaaatatcaaaaaacttacattttccactagcaaagtagggtttttgtgttttgtttttcaataaagttgaccatgtctggataccartgaaatttgtgcagttttctttctaaataaaatcctgggatataaacaaaaagcacctcacaaaaatgcttttgtcttggtcgctgaaatacaactgaattcaaaataactgaattcatgaagagcttgaaggcatatcacaaacccatacaatgctattgagcacagacttgggcatcttaatttcacttataatgtttgagtttgctgccaaaagttcaattctctcccttttttaattgaagtacttatgaaaaaactgtacttcctaaaaagaaagcacaaccttataagaagaaaattaattgctctcatctccagttaaacacaacttccatcgttataaaatcaaaaagattaattgtaccagtgagctggccaacaatacgaataggctggaggtactgacaaaaagaaatgttcctcaattcaacctacctcctctccccaataatctggttcttatccataaactactttgaccttacagaaagaagaggcttataaaaaatgggcagaacagaaaagagtagaattcctgtaaagacccaagacttgaagcctactaaccaagagatcaattccatgtttagcatcaggccatatcttgccaaatatgatagactggcaaataggatatttggcc

SEQ ID NO: 712131 - DNA, 660 bp, Homo sapiens
ttggacagagttttgctctttttgcccaggctggagtgcaatggcagagtctcggctcactgcagtctcyacctcccaggttcaagtgattgtcctgcctcagcctcccacgtagctggggttacaggcgcccgccacgacgctcagctaattgtgtatttttagtagagatggcatttcaccaggttagccaggctggtctcgaactcctgacctcaggtgattcacccgcctcggcctcccaaagtgctgggattacaggcgtgagccaccgtgcccggccgatttgtagacttttttttcactggtctgcatcattaatccttgggagaaaggactaagctatggtttttaaggtcaagataccaagaataggcaaaaggtttagaaagggtaagtatagttggtgttcatgatacagactgttgacaaagcaaagttacacaattaagacaagtgcactgaaatgtcaaacctcactgaattcacacctcctgctgtgacctgtggcgacagagatttcatcttggcagtgattccttttcctgtattcagattacattaaacttgattggaaagctgttcaccaaaggtagacacagaaatcaatgcaattcaacactcagccttgctgatgcatatgtcaggagaacacactac

SEQ ID NO: 712132 - DNA, 660 bp, Homo sapiens
ttggacagagttttgctctttttgcccaggctggagtgcaatggcagagtctcggctcactgcagtctccacctcccaggttcaagtgattgtcctgcctcagcctcccacgtagctggggttacaggcgcccgccacgacgctcagctaattgtgtatttttagtagagatggcatttcaccaggttagccaggctggtctcgaactcctgacctcaggtgattcacccgcctcggcctcccaaagtgctgggattayaggcgtgagccaccgtgcccggccgatttgtagacttttttttcactggtctgcatcattaatccttgggagaaaggactaagctatggtttttaaggtcaagataccaagaataggcaaaaggtttagaaagggtaagtatagttggtgttcatgatacagactgttgacaaagcaaagttacacaattaagacaagtgcactgaaatgtcaaacctcactgaattcacacctcctgctgtgacctgtggcgacagagatttcatcttggcagtgattccttttcctgtattcagattacattaaacttgattggaaagctgttcaccaaaggtagacacagaaatcaatgcaattcaacactcagccttgctgatgcatatgtcaggagaacacactac

SEQ ID NO: 712133 - DNA, 654 bp, Homo sapiens
gtattaaaaataaacaagagctacaataacctccaaagtaaagactgcagtggctgaaaatcattgtggaaatgtttcctaataatatattttgttagtgaaaaacaagcaccaagggctgggcacagtggctcacatctgtaaactcagtgttttgtggggccgaggcaggaggatggcttgaggccaggagtttgagaccagcctaggtagcatagccagaccctgtctcttaaaaaaaaaaaaaaagaaaaaaagtatttttttaattagtcaggtgtggtggcatatgcctgtagtcccagctagttgggaggctgaggcagaaggatcatttgagcctggaggtcaaggctgcagtaagctaggatgatrccactgcatgccagcttggatgacagagcaagactttgtctcaaaaaaaaaaacaaccaccaaaaatacattagtcaatatatataacaatggtaactatggaaaactcttatgaaaactggttaattcttggaatttcaaatatcagaagctgagaattcttcaaaccaagaacatgacttgaaattaccaagaataggccacaagaattacatgaaatatttgcggattctacatcttgggaagattgttttgatgaataattagggaaagcaggtt

SEQ ID NO: 712134 - DNA, 654 bp, Homo sapiens
gtattaaaaataaacaagagctacaataacctccaaagtaaagactgcagtggctgaaaatcattgtggaaatgtttcctaataatatattttgttagtgaaaaacaagcaccaagggctgggcacagtggctcacatctgtaaactcagtgttttgtggggccgaggcaggaggatggcttgaggccaggagtttgagaccagcctaggtagcatagccagaccctgtctcttaaaaaaaaaaaaaaagaaaaaaagtatttttttaattagtcaggtgtggtggcatatgcctgtagtcccagctagttgggaggctgaggcagaaggatcatttgagcctggaggtcaaggctgcagtaagctaggatgatgccactgcatgccagcttggatgacagagcaagactttgtctcaaaaaaaaaaamaaccaccaaaaatacattagtcaatatatataacaatggtaactatggaaaactcttatgaaaactggttaattcttggaatttcaaatatcagaagctgagaattcttcaaaccaagaacatgacttgaaattaccaagaataggccacaagaattacatgaaatatttgcggattctacatcttgggaagattgttttgatgaataattagggaaagcaggtt

SEQ ID NO: 712135 - DNA, 2710 bp, Homo sapiens
  misc_feature 423, 424, 425, 426, 427, 428, 429, 430, 431, 432, 433, 434,435, 436, 437, 438, 439, 440, 441, 442, 443, 444, 445, 446,447, 448, 449, 450, 451, 452, 453, 454, 455, 456, 457, 458,459, 460, 461, 462, 463, 464, 465, 466, 467, 468, 469: n = A,T,C or G
  misc_feature 470, 471, 472, 473, 474, 475, 476, 477, 478, 479, 480, 481,482, 483, 484, 485, 486, 487, 488, 489, 490, 491, 492, 493,494, 495, 496, 497, 498, 499, 500, 501, 502, 503, 504, 505,506, 507, 508, 509, 510, 511, 512, 513, 514, 515, 516: n = A,T,C or G
  misc_feature 517, 518, 519, 520, 521, 522: n = A,T,C or G
atatatatatatatatttatagttttcttctcttccaaggagttaaaccagtgatcaaacaaattaaatcaatgttattttctacttacacagtattaatcatttacccaacctacatgcatgcagaaaaaaaataatctcctaggcaaatataaacattctgaaactcatgaaatccatgttgtgatttacactaaaataacacacgaaatatttaaaataatataatcattgcattaatttctgtaagaaatacatgtcccacttaaatttcattaaaggtaaatatctccaagcaaatgatcatgagcttcatatcacaaagaaaatctgaagtcaggtcactcagtggaaagcttttggttctgtgtataggacataaatcgtgaccagatcataccaagcattttaatccctggctgnnnnnnnnnnnnnnnnnnnnnnnnnnnnnnnnnnnnnnnnnnnnnnnnnnnnnnnnnnnnnnnnnnnnnnnnnnnnnnnnnnnnnnnnnnnnnnnnnnnngggggaaaaggacaaaagttgcgccaaattgaaaattaaaattaacccacatacaaaatctggccccatggtaaaagaaaaaggttttttaattgagagatgcccggaaacactccaagggtgtaaggcttttctcaaaaccctggaccttgcttcaccagagctcatttaaaagatgggtcctgggccgggtgcggtggctcacgcctgtaatcccagcactttgggaggccgaggcgggtggatcacaaggtcgggagattgagaccatcctggctaacacggtgaaaccccgtctctactaaaaatacgaaaaattagctgggtgtggtggcatgcacctgtagtcccagctactcaggaggctgaggcagaagaatcgcttgaacgcgggaggcggaggttgcagtgagccaagatcttgccactgcactccagcccgagcaacagagcgagattccatctccacaaaaacaaaaaacaaaaaaatgggtcccaaaaggtccaccctttctgcaagcaggtgaatgtagccaggctaatataatggactttgatttctttagatgaaagagaaattatgatgcaaagtacaaagcactttatagttatgatacataaattccaggtgtaacccattttcagtgaacttctggactcaagtacaagacagaaaaaaacgtttttgttatactttagtaactcactcactctgtagatggacatggtgggtcccatttttataaaccacatttcttaaaaacctaaaattatcttccaggtgaaaggaaagcaaaataatctcagcaaacattttagatgtagaaataaattattcaggagggaagcagctttgtacacaacataagtgatgtgaggcagacaaatgccaaaagtgattttagaacaaaatggaaagaatgtcctaatgtctctaccttataatawcccttttcattccttagaccataacaggtttgcttttgtttctgaagttatgtatacagcagaaattcttaaccaccctccaattaaccaactccaggatgtctcacaaggtgacacaagttacccgggaagacatgctggctgatgcccattcatacctgctgctcacagctggtgacagataaagaaacagaatgaaaaaatcagtacctggcgctcaggctgtggtcttaagactacagcaagctcatgaaattctgcccacatgactgaggtggcgattaccaagaatcagttgtgtttgcacctgaatggatttgtcctggttgtacttgctaccaaaattatgtaacttaaatattatgtaaaacaaacataagcataatgagagagagaggtgtattgctaaatggaatgctttagaaagaagccattaaatggccacaagagaattctactgacaaattttttattttaaaattattttttactaaacagaggcaaaataaaactttacaaaatatttataaaatacaaaatattcatgaaggaaatacctctgtatactaactacaccacccaagttttttaaaaaatggaattaccattatctttctaactcccctctgaatcttactgaacttccctctgaatcattacttaatgattttataaatgataatattttctcactgactaatcacagatacatttgttttagtaacgcttctaaaatttcggctttaattcctctaggcctgtcaagttcttttaaatctataaactatattatctttacataagctccagttttagaatatgatattgtattttattagactttctttcccaagcaggacacagcaatatgagaggccaacaactgatatacaagccacaccgagaaggtaggaagaattgcacccaaaatgaaaaaatatgacttggcacagtgactcacacctgtaatcccagcactttgggaggccaaggtgagaggatcacttcaagccagtggtttgagaccagcctgggcaagatggtgggaccccatccctacaaaaagttaaaatacaaaaattagccaggcatgttagtgtgtgcctgtggtcccagctacttgggaggctgaggtgggaggataacttgagcccaggagttcgaggctgcagtgagctagaatcatgcccctgcattccggccttgctgacagagcaaggctctgtctgaaaaaaaaaaa

SEQ ID NO: 712136 - DNA, 2710 bp, Homo sapiens
  misc_feature 423, 424, 425, 426, 427, 428, 429, 430, 431, 432, 433, 434,435, 436, 437, 438, 439, 440, 441, 442, 443, 444, 445, 446,447, 448, 449, 450, 451, 452, 453, 454, 455, 456, 457, 458,459, 460, 461, 462, 463, 464, 465, 466, 467, 468, 469: n = A,T,C or G
  misc_feature 470, 471, 472, 473, 474, 475, 476, 477, 478, 479, 480, 481,482, 483, 484, 485, 486, 487, 488, 489, 490, 491, 492, 493,494, 495, 496, 497, 498, 499, 500, 501, 502, 503, 504, 505,506, 507, 508, 509, 510, 511, 512, 513, 514, 515, 516: n = A,T,C or G
  misc_feature 517, 518, 519, 520, 521, 522: n = A,T,C or G
atatatatatatatatttatagttttcttctcttccaaggagttaaaccagtgatcaaacaaattaaatcaatgttattttctacttacacagtattaatcatttacccaacctacatgcatgcagaaaaaaaataatctcctaggcaaatataaacattctgaaactcatgaaatccatgttgtgatttacactaaaataacacacgaaatatttaaaataatataatcattgcattaatttctgtaagaaatacatgtcccacttaaatttcattaaaggtaaatatctccaagcaaatgatcatgagcttcatatcacaaagaaaatctgaagtcaggtcactcagtggaaagcttttggttctgtgtataggacataaatcgtgaccagatcataccaagcattttaatccctggctgnnnnnnnnnnnnnnnnnnnnnnnnnnnnnnnnnnnnnnnnnnnnnnnnnnnnnnnnnnnnnnnnnnnnnnnnnnnnnnnnnnnnnnnnnnnnnnnnnnnngggggaaaaggacaaaagttgcgccaaattgaaaattaaaattaacccacatacaaaatctggccccatggtaaaagaaaaaggttttttaattgagagatgcccggaaacactccaagggtgtaaggcttttctcaaaaccctggaccttgcttcaccagagctcatttaaaagatgggtcctgggccgggtgcggtggctcacgcctgtaatcccagcactttgggaggccgaggcgggtggatcacaaggtcgggagattgagaccatcctggctaacacggtgaaaccccgtctctactaaaaatacgaaaaattagctgggtgtggtggcatgcacctgtagtcccagctactcaggaggctgaggcagaagaatcgcttgaacgcgggaggcggaggttgcagtgagccaagatcttgccactgcactccagcccgagcaacagagcgagattccatctccacaaaaacaaaaaacaaaaaaatgggtcccaaaaggtccaccctttctgcaagcaggtgaatgtagccaggctaatataatggactttgatttctttagatgaaagagaaattatgatgcaaagtacaaagcactttatagttatgatacataaattccaggtgtaacccattttcagtgaacttctggactcaagtacaagacagaaaaaaacgtttttgttatactttagtaactcactcactctgtagatggacatggtgggtcccatttttataaaccacatttcttaaaaacctaaaattatcttccaggtgaaaggaaagcaaaataatctcagcaaacattttagatgtagaaataaattattcaggagggaagcagctttgtacacaacataagtgatgtgaggcagacaaatgccaaaagtgattttagaacaaaatggaaagaatgtcctaatgtctctaccttataataacccttttcattycttagaccataacaggtttgcttttgtttctgaagttatgtatacagcagaaattcttaaccaccctccaattaaccaactccaggatgtctcacaaggtgacacaagttacccgggaagacatgctggctgatgcccattcatacctgctgctcacagctggtgacagataaagaaacagaatgaaaaaatcagtacctggcgctcaggctgtggtcttaagactacagcaagctcatgaaattctgcccacatgactgaggtggcgattaccaagaatcagttgtgtttgcacctgaatggatttgtcctggttgtacttgctaccaaaattatgtaacttaaatattatgtaaaacaaacataagcataatgagagagagaggtgtattgctaaatggaatgctttagaaagaagccattaaatggccacaagagaattctactgacaaattttttattttaaaattattttttactaaacagaggcaaaataaaactttacaaaatatttataaaatacaaaatattcatgaaggaaatacctctgtatactaactacaccacccaagttttttaaaaaatggaattaccattatctttctaactcccctctgaatcttactgaacttccctctgaatcattacttaatgattttataaatgataatattttctcactgactaatcacagatacatttgttttagtaacgcttctaaaatttcggctttaattcctctaggcctgtcaagttcttttaaatctataaactatattatctttacataagctccagttttagaatatgatattgtattttattagactttctttcccaagcaggacacagcaatatgagaggccaacaactgatatacaagccacaccgagaaggtaggaagaattgcacccaaaatgaaaaaatatgacttggcacagtgactcacacctgtaatcccagcactttgggaggccaaggtgagaggatcacttcaagccagtggtttgagaccagcctgggcaagatggtgggaccccatccctacaaaaagttaaaatacaaaaattagccaggcatgttagtgtgtgcctgtggtcccagctacttgggaggctgaggtgggaggataacttgagcccaggagttcgaggctgcagtgagctagaatcatgcccctgcattccggccttgctgacagagcaaggctctgtctgaaaaaaaaaaa

SEQ ID NO: 712137 - DNA, 2710 bp, Homo sapiens
  misc_feature 423, 424, 425, 426, 427, 428, 429, 430, 431, 432, 433, 434,435, 436, 437, 438, 439, 440, 441, 442, 443, 444, 445, 446,447, 448, 449, 450, 451, 452, 453, 454, 455, 456, 457, 458,459, 460, 461, 462, 463, 464, 465, 466, 467, 468, 469: n = A,T,C or G
  misc_feature 470, 471, 472, 473, 474, 475, 476, 477, 478, 479, 480, 481,482, 483, 484, 485, 486, 487, 488, 489, 490, 491, 492, 493,494, 495, 496, 497, 498, 499, 500, 501, 502, 503, 504, 505,506, 507, 508, 509, 510, 511, 512, 513, 514, 515, 516: n = A,T,C or G
  misc_feature 517, 518, 519, 520, 521, 522: n = A,T,C or G
atatatatatatatatttatagttttcttctcttccaaggagttaaaccagtgatcaaacaaattaaatcaatgttattttctacttacacagtattaatcatttacccaacctacatgcatgcagaaaaaaaataatctcctaggcaaatataaacattctgaaactcatgaaatccatgttgtgatttacactaaaataacacacgaaatatttaaaataatataatcattgcattaatttctgtaagaaatacatgtcccacttaaatttcattaaaggtaaatatctccaagcaaatgatcatgagcttcatatcacaaagaaaatctgaagtcaggtcactcagtggaaagcttttggttctgtgtataggacataaatcgtgaccagatcataccaagcattttaatccctggctgnnnnnnnnnnnnnnnnnnnnnnnnnnnnnnnnnnnnnnnnnnnnnnnnnnnnnnnnnnnnnnnnnnnnnnnnnnnnnnnnnnnnnnnnnnnnnnnnnnnngggggaaaaggacaaaagttgcgccaaattgaaaattaaaattaacccacatacaaaatctggccccatggtaaaagaaaaaggttttttaattgagagatgcccggaaacactccaagggtgtaaggcttttctcaaaaccctggaccttgcttcaccagagctcatttaaaagatgggtcctgggccgggtgcggtggctcacgcctgtaatcccagcactttgggaggccgaggcgggtggatcacaaggtcgggagattgagaccatcctggctaacacggtgaaaccccgtctctactaaaaatacgaaaaattagctgggtgtggtggcatgcacctgtagtcccagctactcaggaggctgaggcagaagaatcgcttgaacgcgggaggcggaggttgcagtgagccaagatcttgccactgcactccagcccgagcaacagagcgagattccatctccacaaaaacaaaaaacaaaaaaatgggtcccaaaaggtccaccctttctgcaagcaggtgaatgtagccaggctaatataatggactttgatttctttagatgaaagagaaattatgatgcaaagtacaaagcactttatagttatgatacataaattccaggtgtaacccattttcagtgaacttctggactcaagtacaagacagaaaaaaacgtttttgttatactttagtaactcactcactctgtagatggacatggtgggtcccatttttataaaccacatttcttaaaaacctaaaattatcttccaggtgaaaggaaagcaaaataatctcagcaaacattttagatgtagaaataaattattcaggagggaagcagctttgtacacaacataagtgatgtgaggcagacaaatgccaaaagtgattttagaacaaaatggaaagaatgtcctaatgtctctaccttataataacccttttcattccttagaccataacaggtttgcttttgtttctgaagttaygtatacagcagaaattcttaaccaccctccaattaaccaactccaggatgtctcacaaggtgacacaagttacccgggaagacatgctggctgatgcccattcatacctgctgctcacagctggtgacagataaagaaacagaatgaaaaaatcagtacctggcgctcaggctgtggtcttaagactacagcaagctcatgaaattctgcccacatgactgaggtggcgattaccaagaatcagttgtgtttgcacctgaatggatttgtcctggttgtacttgctaccaaaattatgtaacttaaatattatgtaaaacaaacataagcataatgagagagagaggtgtattgctaaatggaatgctttagaaagaagccattaaatggccacaagagaattctactgacaaattttttattttaaaattattttttactaaacagaggcaaaataaaactttacaaaatatttataaaatacaaaatattcatgaaggaaatacctctgtatactaactacaccacccaagttttttaaaaaatggaattaccattatctttctaactcccctctgaatcttactgaacttccctctgaatcattacttaatgattttataaatgataatattttctcactgactaatcacagatacatttgttttagtaacgcttctaaaatttcggctttaattcctctaggcctgtcaagttcttttaaatctataaactatattatctttacataagctccagttttagaatatgatattgtattttattagactttctttcccaagcaggacacagcaatatgagaggccaacaactgatatacaagccacaccgagaaggtaggaagaattgcacccaaaatgaaaaaatatgacttggcacagtgactcacacctgtaatcccagcactttgggaggccaaggtgagaggatcacttcaagccagtggtttgagaccagcctgggcaagatggtgggaccccatccctacaaaaagttaaaatacaaaaattagccaggcatgttagtgtgtgcctgtggtcccagctacttgggaggctgaggtgggaggataacttgagcccaggagttcgaggctgcagtgagctagaatcatgcccctgcattccggccttgctgacagagcaaggctctgtctgaaaaaaaaaaa

SEQ ID NO: 712138 - DNA, 2710 bp, Homo sapiens
  misc_feature 423, 424, 425, 426, 427, 428, 429, 430, 431, 432, 433, 434,435, 436, 437, 438, 439, 440, 441, 442, 443, 444, 445, 446,447, 448, 449, 450, 451, 452, 453, 454, 455, 456, 457, 458,459, 460, 461, 462, 463, 464, 465, 466, 467, 468, 469: n = A,T,C or G
  misc_feature 470, 471, 472, 473, 474, 475, 476, 477, 478, 479, 480, 481,482, 483, 484, 485, 486, 487, 488, 489, 490, 491, 492, 493,494, 495, 496, 497, 498, 499, 500, 501, 502, 503, 504, 505,506, 507, 508, 509, 510, 511, 512, 513, 514, 515, 516: n = A,T,C or G
  misc_feature 517, 518, 519, 520, 521, 522: n = A,T,C or G
atatatatatatatatttatagttttcttctcttccaaggagttaaaccagtgatcaaacaaattaaatcaatgttattttctacttacacagtattaatcatttacccaacctacatgcatgcagaaaaaaaataatctcctaggcaaatataaacattctgaaactcatgaaatccatgttgtgatttacactaaaataacacacgaaatatttaaaataatataatcattgcattaatttctgtaagaaatacatgtcccacttaaatttcattaaaggtaaatatctccaagcaaatgatcatgagcttcatatcacaaagaaaatctgaagtcaggtcactcagtggaaagcttttggttctgtgtataggacataaatcgtgaccagatcataccaagcattttaatccctggctgnnnnnnnnnnnnnnnnnnnnnnnnnnnnnnnnnnnnnnnnnnnnnnnnnnnnnnnnnnnnnnnnnnnnnnnnnnnnnnnnnnnnnnnnnnnnnnnnnnnngggggaaaaggacaaaagttgcgccaaattgaaaattaaaattaacccacatacaaaatctggccccatggtaaaagaaaaaggttttttaattgagagatgcccggaaacactccaagggtgtaaggcttttctcaaaaccctggaccttgcttcaccagagctcatttaaaagatgggtcctgggccgggtgcggtggctcacgcctgtaatcccagcactttgggaggccgaggcgggtggatcacaaggtcgggagattgagaccatcctggctaacacggtgaaaccccgtctctactaaaaatacgaaaaattagctgggtgtggtggcatgcacctgtagtcccagctactcaggaggctgaggcagaagaatcgcttgaacgcgggaggcggaggttgcagtgagccaagatcttgccactgcactccagcccgagcaacagagcgagattccatctccacaaaaacaaaaaacaaaaaaatgggtcccaaaaggtccaccctttctgcaagcaggtgaatgtagccaggctaatataatggactttgatttctttagatgaaagagaaattatgatgcaaagtacaaagcactttatagttatgatacataaattccaggtgtaacccattttcagtgaacttctggactcaagtacaagacagaaaaaaacgtttttgttatactttagtaactcactcactctgtagatggacatggtgggtcccatttttataaaccacatttcttaaaaacctaaaattatcttccaggtgaaaggaaagcaaaataatctcagcaaacattttagatgtagaaataaattattcaggagggaagcagctttgtacacaacataagtgatgtgaggcagacaaatgccaaaagtgattttagaacaaaatggaaagaatgtcctaatgtctctaccttataataacccttttcattccttagaccataacaggtttgcttttgtttctgaagttatgtatacagcagaaattcttaaccaccctccaattaaccaactccaggatgtctcacaaggtgacacaagttacccgggaagacatgctggctgatgcccattcatacctgctgctcacagctggtgacagataaagaaacagaatgaaaaaatcagtacctggygctcaggctgtggtcttaagactacagcaagctcatgaaattctgcccacatgactgaggtggcgattaccaagaatcagttgtgtttgcacctgaatggatttgtcctggttgtacttgctaccaaaattatgtaacttaaatattatgtaaaacaaacataagcataatgagagagagaggtgtattgctaaatggaatgctttagaaagaagccattaaatggccacaagagaattctactgacaaattttttattttaaaattattttttactaaacagaggcaaaataaaactttacaaaatatttataaaatacaaaatattcatgaaggaaatacctctgtatactaactacaccacccaagttttttaaaaaatggaattaccattatctttctaactcccctctgaatcttactgaacttccctctgaatcattacttaatgattttataaatgataatattttctcactgactaatcacagatacatttgttttagtaacgcttctaaaatttcggctttaattcctctaggcctgtcaagttcttttaaatctataaactatattatctttacataagctccagttttagaatatgatattgtattttattagactttctttcccaagcaggacacagcaatatgagaggccaacaactgatatacaagccacaccgagaaggtaggaagaattgcacccaaaatgaaaaaatatgacttggcacagtgactcacacctgtaatcccagcactttgggaggccaaggtgagaggatcacttcaagccagtggtttgagaccagcctgggcaagatggtgggaccccatccctacaaaaagttaaaatacaaaaattagccaggcatgttagtgtgtgcctgtggtcccagctacttgggaggctgaggtgggaggataacttgagcccaggagttcgaggctgcagtgagctagaatcatgcccctgcattccggccttgctgacagagcaaggctctgtctgaaaaaaaaaaa

SEQ ID NO: 712139 - DNA, 2710 bp, Homo sapiens
  misc_feature 423, 424, 425, 426, 427, 428, 429, 430, 431, 432, 433, 434,435, 436, 437, 438, 439, 440, 441, 442, 443, 444, 445, 446,447, 448, 449, 450, 451, 452, 453, 454, 455, 456, 457, 458,459, 460, 461, 462, 463, 464, 465, 466, 467, 468, 469: n = A,T,C or G
  misc_feature 470, 471, 472, 473, 474, 475, 476, 477, 478, 479, 480, 481,482, 483, 484, 485, 486, 487, 488, 489, 490, 491, 492, 493,494, 495, 496, 497, 498, 499, 500, 501, 502, 503, 504, 505,506, 507, 508, 509, 510, 511, 512, 513, 514, 515, 516: n = A,T,C or G
  misc_feature 517, 518, 519, 520, 521, 522: n = A,T,C or G
atatatatatatatatttatagttttcttctcttccaaggagttaaaccagtgatcaaacaaattaaatcaatgttattttctacttacacagtattaatcatttacccaacctacatgcatgcagaaaaaaaataatctcctaggcaaatataaacattctgaaactcatgaaatccatgttgtgatttacactaaaataacacacgaaatatttaaaataatataatcattgcattaatttctgtaagaaatacatgtcccacttaaatttcattaaaggtaaatatctccaagcaaatgatcatgagcttcatatcacaaagaaaatctgaagtcaggtcactcagtggaaagcttttggttctgtgtataggacataaatcgtgaccagatcataccaagcattttaatccctggctgnnnnnnnnnnnnnnnnnnnnnnnnnnnnnnnnnnnnnnnnnnnnnnnnnnnnnnnnnnnnnnnnnnnnnnnnnnnnnnnnnnnnnnnnnnnnnnnnnnnngggggaaaaggacaaaagttgcgccaaattgaaaattaaaattaacccacatacaaaatctggccccatggtaaaagaaaaaggttttttaattgagagatgcccggaaacactccaagggtgtaaggcttttctcaaaaccctggaccttgcttcaccagagctcatttaaaagatgggtcctgggccgggtgcggtggctcacgcctgtaatcccagcactttgggaggccgaggcgggtggatcacaaggtcgggagattgagaccatcctggctaacacggtgaaaccccgtctctactaaaaatacgaaaaattagctgggtgtggtggcatgcacctgtagtcccagctactcaggaggctgaggcagaagaatcgcttgaacgcgggaggcggaggttgcagtgagccaagatcttgccactgcactccagcccgagcaacagagcgagattccatctccacaaaaacaaaaaacaaaaaaatgggtcccaaaaggtccaccctttctgcaagcaggtgaatgtagccaggctaatataatggactttgatttctttagatgaaagagaaattatgatgcaaagtacaaagcactttatagttatgatacataaattccaggtgtaacccattttcagtgaacttctggactcaagtacaagacagaaaaaaacgtttttgttatactttagtaactcactcactctgtagatggacatggtgggtcccatttttataaaccacatttcttaaaaacctaaaattatcttccaggtgaaaggaaagcaaaataatctcagcaaacattttagatgtagaaataaattattcaggagggaagcagctttgtacacaacataagtgatgtgaggcagacaaatgccaaaagtgattttagaacaaaatggaaagaatgtcctaatgtctctaccttataataacccttttcattccttagaccataacaggtttgcttttgtttctgaagttatgtatacagcagaaattcttaaccaccctccaattaaccaactccaggatgtctcacaaggtgacacaagttacccgggaagacatgctggctgatgcccattcatacctgctgctcacagctggtgacagataaagaaacagaatgaaaaaatcagtacctggcgctcaggctgtggtcttaagactacagcaagctcatgaaattctgcccacatgactgaggtggcgattaccaagaatcagttgtgtttgcacctgaatggatttgtsctggttgtacttgctaccaaaattatgtaacttaaatattatgtaaaacaaacataagcataatgagagagagaggtgtattgctaaatggaatgctttagaaagaagccattaaatggccacaagagaattctactgacaaattttttattttaaaattattttttactaaacagaggcaaaataaaactttacaaaatatttataaaatacaaaatattcatgaaggaaatacctctgtatactaactacaccacccaagttttttaaaaaatggaattaccattatctttctaactcccctctgaatcttactgaacttccctctgaatcattacttaatgattttataaatgataatattttctcactgactaatcacagatacatttgttttagtaacgcttctaaaatttcggctttaattcctctaggcctgtcaagttcttttaaatctataaactatattatctttacataagctccagttttagaatatgatattgtattttattagactttctttcccaagcaggacacagcaatatgagaggccaacaactgatatacaagccacaccgagaaggtaggaagaattgcacccaaaatgaaaaaatatgacttggcacagtgactcacacctgtaatcccagcactttgggaggccaaggtgagaggatcacttcaagccagtggtttgagaccagcctgggcaagatggtgggaccccatccctacaaaaagttaaaatacaaaaattagccaggcatgttagtgtgtgcctgtggtcccagctacttgggaggctgaggtgggaggataacttgagcccaggagttcgaggctgcagtgagctagaatcatgcccctgcattccggccttgctgacagagcaaggctctgtctgaaaaaaaaaaa

SEQ ID NO: 712140 - DNA, 2710 bp, Homo sapiens
  misc_feature 423, 424, 425, 426, 427, 428, 429, 430, 431, 432, 433, 434,435, 436, 437, 438, 439, 440, 441, 442, 443, 444, 445, 446,447, 448, 449, 450, 451, 452, 453, 454, 455, 456, 457, 458,459, 460, 461, 462, 463, 464, 465, 466, 467, 468, 469: n = A,T,C or G
  misc_feature 470, 471, 472, 473, 474, 475, 476, 477, 478, 479, 480, 481,482, 483, 484, 485, 486, 487, 488, 489, 490, 491, 492, 493,494, 495, 496, 497, 498, 499, 500, 501, 502, 503, 504, 505,506, 507, 508, 509, 510, 511, 512, 513, 514, 515, 516: n = A,T,C or G
  misc_feature 517, 518, 519, 520, 521, 522: n = A,T,C or G
atatatatatatatatttatagttttcttctcttccaaggagttaaaccagtgatcaaacaaattaaatcaatgttattttctacttacacagtattaatcatttacccaacctacatgcatgcagaaaaaaaataatctcctaggcaaatataaacattctgaaactcatgaaatccatgttgtgatttacactaaaataacacacgaaatatttaaaataatataatcattgcattaatttctgtaagaaatacatgtcccacttaaatttcattaaaggtaaatatctccaagcaaatgatcatgagcttcatatcacaaagaaaatctgaagtcaggtcactcagtggaaagcttttggttctgtgtataggacataaatcgtgaccagatcataccaagcattttaatccctggctgnnnnnnnnnnnnnnnnnnnnnnnnnnnnnnnnnnnnnnnnnnnnnnnnnnnnnnnnnnnnnnnnnnnnnnnnnnnnnnnnnnnnnnnnnnnnnnnnnnnngggggaaaaggacaaaagttgcgccaaattgaaaattaaaattaacccacatacaaaatctggccccatggtaaaagaaaaaggttttttaattgagagatgcccggaaacactccaagggtgtaaggcttttctcaaaaccctggaccttgcttcaccagagctcatttaaaagatgggtcctgggccgggtgcggtggctcacgcctgtaatcccagcactttgggaggccgaggcgggtggatcacaaggtcgggagattgagaccatcctggctaacacggtgaaaccccgtctctactaaaaatacgaaaaattagctgggtgtggtggcatgcacctgtagtcccagctactcaggaggctgaggcagaagaatcgcttgaacgcgggaggcggaggttgcagtgagccaagatcttgccactgcactccagcccgagcaacagagcgagattccatctccacaaaaacaaaaaacaaaaaaatgggtcccaaaaggtccaccctttctgcaagcaggtgaatgtagccaggctaatataatggactttgatttctttagatgaaagagaaattatgatgcaaagtacaaagcactttatagttatgatacataaattccaggtgtaacccattttcagtgaacttctggactcaagtacaagacagaaaaaaacgtttttgttatactttagtaactcactcactctgtagatggacatggtgggtcccatttttataaaccacatttcttaaaaacctaaaattatcttccaggtgaaaggaaagcaaaataatctcagcaaacattttagatgtagaaataaattattcaggagggaagcagctttgtacacaacataagtgatgtgaggcagacaaatgccaaaagtgattttagaacaaaatggaaagaatgtcctaatgtctctaccttataataacccttttcattccttagaccataacaggtttgcttttgtttctgaagttatgtatacagcagaaattcttaaccaccctccaattaaccaactccaggatgtctcacaaggtgacacaagttacccgggaagacatgctggctgatgcccattcatacctgctgctcacagctggtgacagataaagaaacagaatgaaaaaatcagtacctggcgctcaggctgtggtcttaagactacagcaagctcatgaaattctgcccacatgactgaggtggcgattaccaagaatcagttgtgtttgcacctgaatggatttgtcctggttgtacttgctaccaaaattatgtaacttaaatattatgtaaaacaaacataagcataatgagagagagaggtgtattgctaaatggaatgctttagaaagaagccattaaatggccacaagagaattctactgacaaattttttattttaaaattattttttactaaacagaggcaaaataaaactttacaaaatatttataaaatacaaaatattcatgaaggaaatacctctgtatactaactacaccacccaagttttttaaaaaatggaattaccattatctttctaactcccctctgaatcttactgaacttccctctgaatcattacttaatgattttataaatgataatattttctcactgactaatcacagatacatttgttttagtaacgcttctaaaatttcggctttaattcctctaggcctgtcaagttcttttaaatctataaactatattatctttacataagctccagttttagaatatgatattgyattttattagactttctttcccaagcaggacacagcaatatgagaggccaacaactgatatacaagccacaccgagaaggtaggaagaattgcacccaaaatgaaaaaatatgacttggcacagtgactcacacctgtaatcccagcactttgggaggccaaggtgagaggatcacttcaagccagtggtttgagaccagcctgggcaagatggtgggaccccatccctacaaaaagttaaaatacaaaaattagccaggcatgttagtgtgtgcctgtggtcccagctacttgggaggctgaggtgggaggataacttgagcccaggagttcgaggctgcagtgagctagaatcatgcccctgcattccggccttgctgacagagcaaggctctgtctgaaaaaaaaaaa

SEQ ID NO: 712141 - DNA, 2710 bp, Homo sapiens
  misc_feature 423, 424, 425, 426, 427, 428, 429, 430, 431, 432, 433, 434,435, 436, 437, 438, 439, 440, 441, 442, 443, 444, 445, 446,447, 448, 449, 450, 451, 452, 453, 454, 455, 456, 457, 458,459, 460, 461, 462, 463, 464, 465, 466, 467, 468, 469: n = A,T,C or G
  misc_feature 470, 471, 472, 473, 474, 475, 476, 477, 478, 479, 480, 481,482, 483, 484, 485, 486, 487, 488, 489, 490, 491, 492, 493,494, 495, 496, 497, 498, 499, 500, 501, 502, 503, 504, 505,506, 507, 508, 509, 510, 511, 512, 513, 514, 515, 516: n = A,T,C or G
  misc_feature 517, 518, 519, 520, 521, 522: n = A,T,C or G
atatatatatatatatttatagttttcttctcttccaaggagttaaaccagtgatcaaacaaattaaatcaatgttattttctacttacacagtattaatcatttacccaacctacatgcatgcagaaaaaaaataatctcctaggcaaatataaacattctgaaactcatgaaatccatgttgtgatttacactaaaataacacacgaaatatttaaaataatataatcattgcattaatttctgtaagaaatacatgtcccacttaaatttcattaaaggtaaatatctccaagcaaatgatcatgagcttcatatcacaaagaaaatctgaagtcaggtcactcagtggaaagcttttggttctgtgtataggacataaatcgtgaccagatcataccaagcattttaatccctggctgnnnnnnnnnnnnnnnnnnnnnnnnnnnnnnnnnnnnnnnnnnnnnnnnnnnnnnnnnnnnnnnnnnnnnnnnnnnnnnnnnnnnnnnnnnnnnnnnnnnngggggaaaaggacaaaagttgcgccaaattgaaaattaaaattaacccacatacaaaatctggccccatggtaaaagaaaaaggttttttaattgagagatgcccggaaacactccaagggtgtaaggcttttctcaaaaccctggaccttgcttcaccagagctcatttaaaagatgggtcctgggccgggtgcggtggctcacgcctgtaatcccagcactttgggaggccgaggcgggtggatcacaaggtcgggagattgagaccatcctggctaacacggtgaaaccccgtctctactaaaaatacgaaaaattagctgggtgtggtggcatgcacctgtagtcccagctactcaggaggctgaggcagaagaatcgcttgaacgcgggaggcggaggttgcagtgagccaagatcttgccactgcactccagcccgagcaacagagcgagattccatctccacaaaaacaaaaaacaaaaaaatgggtcccaaaaggtccaccctttctgcaagcaggtgaatgtagccaggctaatataatggactttgatttctttagatgaaagagaaattatgatgcaaagtacaaagcactttatagttatgatacataaattccaggtgtaacccattttcagtgaacttctggactcaagtacaagacagaaaaaaacgtttttgttatactttagtaactcactcactctgtagatggacatggtgggtcccatttttataaaccacatttcttaaaaacctaaaattatcttccaggtgaaaggaaagcaaaataatctcagcaaacattttagatgtagaaataaattattcaggagggaagcagctttgtacacaacataagtgatgtgaggcagacaaatgccaaaagtgattttagaacaaaatggaaagaatgtcctaatgtctctaccttataataacccttttcattccttagaccataacaggtttgcttttgtttctgaagttatgtatacagcagaaattcttaaccaccctccaattaaccaactccaggatgtctcacaaggtgacacaagttacccgggaagacatgctggctgatgcccattcatacctgctgctcacagctggtgacagataaagaaacagaatgaaaaaatcagtacctggcgctcaggctgtggtcttaagactacagcaagctcatgaaattctgcccacatgactgaggtggcgattaccaagaatcagttgtgtttgcacctgaatggatttgtcctggttgtacttgctaccaaaattatgtaacttaaatattatgtaaaacaaacataagcataatgagagagagaggtgtattgctaaatggaatgctttagaaagaagccattaaatggccacaagagaattctactgacaaattttttattttaaaattattttttactaaacagaggcaaaataaaactttacaaaatatttataaaatacaaaatattcatgaaggaaatacctctgtatactaactacaccacccaagttttttaaaaaatggaattaccattatctttctaactcccctctgaatcttactgaacttccctctgaatcattacttaatgattttataaatgataatattttctcactgactaatcacagatacatttgttttagtaacgcttctaaaatttcggctttaattcctctaggcctgtcaagttcttttaaatctataaactatattatctttacataagctccagttttagaatatgatattgtattttattagactttctttcccaagcaggacacagcaatatgagaggccaacaactgatatacaagccacaccgagaaggtaggaagaattgcacccaaaatgaaaaaatatgacttggcacagtgactcacacctgtaatcccagcactttgggaggccaaggtgagaggatcacttcaagccagtggtttsagaccagcctgggcaagatggtgggaccccatccctacaaaaagttaaaatacaaaaattagccaggcatgttagtgtgtgcctgtggtcccagctacttgggaggctgaggtgggaggataacttgagcccaggagttcgaggctgcagtgagctagaatcatgcccctgcattccggccttgctgacagagcaaggctctgtctgaaaaaaaaaaa

SEQ ID NO: 712142 - DNA, 2710 bp, Homo sapiens
  misc_feature 423, 424, 425, 426, 427, 428, 429, 430, 431, 432, 433, 434,435, 436, 437, 438, 439, 440, 441, 442, 443, 444, 445, 446,447, 448, 449, 450, 451, 452, 453, 454, 455, 456, 457, 458,459, 460, 461, 462, 463, 464, 465, 466, 467, 468, 469: n = A,T,C or G
  misc_feature 470, 471, 472, 473, 474, 475, 476, 477, 478, 479, 480, 481,482, 483, 484, 485, 486, 487, 488, 489, 490, 491, 492, 493,494, 495, 496, 497, 498, 499, 500, 501, 502, 503, 504, 505,506, 507, 508, 509, 510, 511, 512, 513, 514, 515, 516: n = A,T,C or G
  misc_feature 517, 518, 519, 520, 521, 522: n = A,T,C or G
atatatatatatatatttatagttttcttctcttccaaggagttaaaccagtgatcaaacaaattaaatcaatgttattttctacttacacagtattaatcatttacccaacctacatgcatgcagaaaaaaaataatctcctaggcaaatataaacattctgaaactcatgaaatccatgttgtgatttacactaaaataacacacgaaatatttaaaataatataatcattgcattaatttctgtaagaaatacatgtcccacttaaatttcattaaaggtaaatatctccaagcaaatgatcatgagcttcatatcacaaagaaaatctgaagtcaggtcactcagtggaaagcttttggttctgtgtataggacataaatcgtgaccagatcataccaagcattttaatccctggctgnnnnnnnnnnnnnnnnnnnnnnnnnnnnnnnnnnnnnnnnnnnnnnnnnnnnnnnnnnnnnnnnnnnnnnnnnnnnnnnnnnnnnnnnnnnnnnnnnnnngggggaaaaggacaaaagttgcgccaaattgaaaattaaaattaacccacatacaaaatctggccccatggtaaaagaaaaaggttttttaattgagagatgcccggaaacactccaagggtgtaaggcttttctcaaaaccctggaccttgcttcaccagagctcatttaaaagatgggtcctgggccgggtgcggtggctcacgcctgtaatcccagcactttgggaggccgaggcgggtggatcacaaggtcgggagattgagaccatcctggctaacacggtgaaaccccgtctctactaaaaatacgaaaaattagctgggtgtggtggcatgcacctgtagtcccagctactcaggaggctgaggcagaagaatcgcttgaacgcgggaggcggaggttgcagtgagccaagatcttgccactgcactccagcccgagcaacagagcgagattccatctccacaaaaacaaaaaacaaaaaaatgggtcccaaaaggtccaccctttctgcaagcaggtgaatgtagccaggctaatataatggactttgatttctttagatgaaagagaaattatgatgcaaagtacaaagcactttatagttatgatacataaattccaggtgtaacccattttcagtgaacttctggactcaagtacaagacagaaaaaaacgtttttgttatactttagtaactcactcactctgtagatggacatggtgggtcccatttttataaaccacatttcttaaaaacctaaaattatcttccaggtgaaaggaaagcaaaataatctcagcaaacattttagatgtagaaataaattattcaggagggaagcagctttgtacacaacataagtgatgtgaggcagacaaatgccaaaagtgattttagaacaaaatggaaagaatgtcctaatgtctctaccttataataacccttttcattccttagaccataacaggtttgcttttgtttctgaagttatgtatacagcagaaattcttaaccaccctccaattaaccaactccaggatgtctcacaaggtgacacaagttacccgggaagacatgctggctgatgcccattcatacctgctgctcacagctggtgacagataaagaaacagaatgaaaaaatcagtacctggcgctcaggctgtggtcttaagactacagcaagctcatgaaattctgcccacatgactgaggtggcgattaccaagaatcagttgtgtttgcacctgaatggatttgtcctggttgtacttgctaccaaaattatgtaacttaaatattatgtaaaacaaacataagcataatgagagagagaggtgtattgctaaatggaatgctttagaaagaagccattaaatggccacaagagaattctactgacaaattttttattttaaaattattttttactaaacagaggcaaaataaaactttacaaaatatttataaaatacaaaatattcatgaaggaaatacctctgtatactaactacaccacccaagttttttaaaaaatggaattaccattatctttctaactcccctctgaatcttactgaacttccctctgaatcattacttaatgattttataaatgataatattttctcactgactaatcacagatacatttgttttagtaacgcttctaaaatttcggctttaattcctctaggcctgtcaagttcttttaaatctataaactatattatctttacataagctccagttttagaatatgatattgtattttattagactttctttcccaagcaggacacagcaatatgagaggccaacaactgatatacaagccacaccgagaaggtaggaagaattgcacccaaaatgaaaaaatatgacttggcacagtgactcacacctgtaatcccagcactttgggaggccaaggtgagaggatcacttcaagccagtggtttgagaccagcctgggcaagatggtgggaccccatccctacaaaaagttaaaatacaaaaattagccrggcatgttagtgtgtgcctgtggtcccagctacttgggaggctgaggtgggaggataacttgagcccaggagttcgaggctgcagtgagctagaatcatgcccctgcattccggccttgctgacagagcaaggctctgtctgaaaaaaaaaaa

SEQ ID NO: 712143 - DNA, 2710 bp, Homo sapiens
  misc_feature 423, 424, 425, 426, 427, 428, 429, 430, 431, 432, 433, 434,435, 436, 437, 438, 439, 440, 441, 442, 443, 444, 445, 446,447, 448, 449, 450, 451, 452, 453, 454, 455, 456, 457, 458,459, 460, 461, 462, 463, 464, 465, 466, 467, 468, 469: n = A,T,C or G
  misc_feature 470, 471, 472, 473, 474, 475, 476, 477, 478, 479, 480, 481,482, 483, 484, 485, 486, 487, 488, 489, 490, 491, 492, 493,494, 495, 496, 497, 498, 499, 500, 501, 502, 503, 504, 505,506, 507, 508, 509, 510, 511, 512, 513, 514, 515, 516: n = A,T,C or G
  misc_feature 517, 518, 519, 520, 521, 522: n = A,T,C or G
atatatatatatatatttatagttttcttctcttccaaggagttaaaccagtgatcaaacaaattaaatcaatgttattttctacttacacagtattaatcatttacccaacctacatgcatgcagaaaaaaaataatctcctaggcaaatataaacattctgaaactcatgaaatccatgttgtgatttacactaaaataacacacgaaatatttaaaataatataatcattgcattaatttctgtaagaaatacatgtcccacttaaatttcattaaaggtaaatatctccaagcaaatgatcatgagcttcatatcacaaagaaaatctgaagtcaggtcactcagtggaaagcttttggttctgtgtataggacataaatcgtgaccagatcataccaagcattttaatccctggctgnnnnnnnnnnnnnnnnnnnnnnnnnnnnnnnnnnnnnnnnnnnnnnnnnnnnnnnnnnnnnnnnnnnnnnnnnnnnnnnnnnnnnnnnnnnnnnnnnnnngggggaaaaggacaaaagttgcgccaaattgaaaattaaaattaacccacatacaaaatctggccccatggtaaaagaaaaaggttttttaattgagagatgcccggaaacactccaagggtgtaaggcttttctcaaaaccctggaccttgcttcaccagagctcatttaaaagatgggtcctgggccgggtgcggtggctcacgcctgtaatcccagcactttgggaggccgaggcgggtggatcacaaggtcgggagattgagaccatcctggctaacacggtgaaaccccgtctctactaaaaatacgaaaaattagctgggtgtggtggcatgcacctgtagtcccagctactcaggaggctgaggcagaagaatcgcttgaacgcgggaggcggaggttgcagtgagccaagatcttgccactgcactccagcccgagcaacagagcgagattccatctccacaaaaacaaaaaacaaaaaaatgggtcccaaaaggtccaccctttctgcaagcaggtgaatgtagccaggctaatataatggactttgatttctttagatgaaagagaaattatgatgcaaagtacaaagcactttatagttatgatacataaattccaggtgtaacccattttcagtgaacttctggactcaagtacaagacagaaaaaaacgtttttgttatactttagtaactcactcactctgtagatggacatggtgggtcccatttttataaaccacatttcttaaaaacctaaaattatcttccaggtgaaaggaaagcaaaataatctcagcaaacattttagatgtagaaataaattattcaggagggaagcagctttgtacacaacataagtgatgtgaggcagacaaatgccaaaagtgattttagaacaaaatggaaagaatgtcctaatgtctctaccttataataacccttttcattccttagaccataacaggtttgcttttgtttctgaagttatgtatacagcagaaattcttaaccaccctccaattaaccaactccaggatgtctcacaaggtgacacaagttacccgggaagacatgctggctgatgcccattcatacctgctgctcacagctggtgacagataaagaaacagaatgaaaaaatcagtacctggcgctcaggctgtggtcttaagactacagcaagctcatgaaattctgcccacatgactgaggtggcgattaccaagaatcagttgtgtttgcacctgaatggatttgtcctggttgtacttgctaccaaaattatgtaacttaaatattatgtaaaacaaacataagcataatgagagagagaggtgtattgctaaatggaatgctttagaaagaagccattaaatggccacaagagaattctactgacaaattttttattttaaaattattttttactaaacagaggcaaaataaaactttacaaaatatttataaaatacaaaatattcatgaaggaaatacctctgtatactaactacaccacccaagttttttaaaaaatggaattaccattatctttctaactcccctctgaatcttactgaacttccctctgaatcattacttaatgattttataaatgataatattttctcactgactaatcacagatacatttgttttagtaacgcttctaaaatttcggctttaattcctctaggcctgtcaagttcttttaaatctataaactatattatctttacataagctccagttttagaatatgatattgtattttattagactttctttcccaagcaggacacagcaatatgagaggccaacaactgatatacaagccacaccgagaaggtaggaagaattgcacccaaaatgaaaaaatatgacttggcacagtgactcacacctgtaatcccagcactttgggaggccaaggtgagaggatcacttcaagccagtggtttgagaccagcctgggcaagatggtgggaccccatccctacaaaaagttaaaatacaaaaattagccaggcatgttagtgtgtgcctgtggtcccagctacttgggaggctgaggtgggaggataacttgagcccaggagttcraggctgcagtgagctagaatcatgcccctgcattccggccttgctgacagagcaaggctctgtctgaaaaaaaaaaa

SEQ ID NO: 712144 - DNA, 1203 bp, Homo sapiens
atcctcatgagagtcagaagataagtttcttttctgttttgagacagagtcttgctctgtcgcccagtctggagtgcagtggctcaatctcagctcactgcagcctccgcctcccgkgttcaagcagttcttctgcctcagcctcctgagtagctgggactacaggcgcacacagccacaccaggctaattttgatattttcagtagagatggtgtttcaccatgttggacaggatagtcttgatctcctgaccttatgatctgcccacctcggtctcccaaaaggctgggattacaagcgtgagccactgcgcccagccagaagataagtttcttattcctggtgaaagcttaggtaatttacttagctctggaaataaatgccaagcaaaaaaaacagagatggaaggaatcatgaaaacagatgagttccccaggcttcaggttaatgctttaaacttaaaactcatcaactcatttttttttatctctattatgagttttgccatttcacagatgtgagtcattgcacgtcaaaaaagaaaaaaactaagtatttttccattgtgatctatggctcactcctctttattatcaattctcaagcaatccaagagtcttaaaatatgcatttaaaggaaagggtttttattttaaatacataagcaactctaacctctacagtattttcaataagcgggctgcctacaactgcttaagtgcacagataggatgccttatagatcatataataactgcatacaaaccactgatatattagaatacagaacataagtgccagtcttatttatttgttattgtattcctagcttccagaactgtgcctggtctgtagtcgaggctcaacaaaaaaatttttcaattaaaatttgccactacccaatgcagaaatagtcaacatacctaaaatcatgatatgcttggatttcaaaagctcaagatgaagctgagagaatacgtctgacacaaaattcaccacggtacttgcctggtgggactcgactgaatgctgagtgtatgctgggtgggtgagagggatgggagacaagaaggaaagagcagaaatgtggttcatgtccttaggggtcggaagagaatggagaaaagaggaaaactgaggagggagtatagtaagtgcacaagaaatgttagaccagagggtggtccggggcatagggtaga

SEQ ID NO: 712145 - DNA, 998 bp, Homo sapiens
atctcaaacaaatctaaaaaccaacaacaataaatatcctaacaaatggcactttttattcctttaagctgcctctcaagagccaccctgcaagtggggtttggatcaacttcccacctgacatatgcccaaccaagtggctattctaatgcctcagcactgtgctagaatcaatggtgaagaaagatgaaatgctgccttatctttgatctaagaagcttatagtctaggtggaaggatgtaacacaaagcaatatccaacaagagtgctacatctcaataaatggcaactccaagaatccccattaattgaggcagaaatctatgtcattcttcctttccttacaccccatcaatcatcaggttctgttgatctacacaaaatgtggctcatttatctttccacttgtctgtatcacagctgccaccatccctgtccaagaaatcttcatctctcacctacaaaagctcmctgattaatccctctgcttcctttcttgccctcttcaatccgttcttcacagggcatccagagtgatttttttaaaaggctaaactgcttaaacctcttcagtgaccttccatgttcacaggataaaatccaggtaccctcctttagccgtaaggccctgcatggtctggccctagcttatctttgcaatcccatgccttcattcctaccgctccacccactcttcctcacttggctccgccgcctggccttctctcagttcttcatatgcgacgctcttttctgcccatggccattgtgcttgatattcctctgtacggcatatgcttcctctggccagcgccatttcatctgccagggacatctgctgttcctgcctggccagcaatccttctcctggtaacagaacaccttttttcttcttgaagtcacctttccctcattctcactccatgtggtttggcttaaactggcaacttctcctcatccccacccgggcaatctacaattaccaggatatttctgg

SEQ ID NO: 712146 - DNA, 998 bp, Homo sapiens
atctcaaacaaatctaaaaaccaacaacaataaatatcctaacaaatggcactttttattcctttaagctgcctctcaagagccaccctgcaagtggggtttggatcaacttcccacctgacatatgcccaaccaagtggctattctaatgcctcagcactgtgctagaatcaatggtgaagaaagatgaaatgctgccttatctttgatctaagaagcttatagtctaggtggaaggatgtaacacaaagcaatatccaacaagagtgctacatctcaataaatggcaactccaagaatccccattaattgaggcagaaatctatgtcattcttcctttccttacaccccatcaatcatcaggttctgttgatctacacaaaatgtggctcatttatctttccacttgtctgtatcacagctgccaccatccctgtccaagaaatcttcatctctcacctacaaaagctcactgattaatccctctgcttcctttcttgccctcttcaatccgttcttcacagggcatccagagtgatttttttaaaaggctaaactgcttaaacctcttcagtgaccttccatkttcacaggataaaatccaggtaccctcctttagccgtaaggccctgcatggtctggccctagcttatctttgcaatcccatgccttcattcctaccgctccacccactcttcctcacttggctccgccgcctggccttctctcagttcttcatatgcgacgctcttttctgcccatggccattgtgcttgatattcctctgtacggcatatgcttcctctggccagcgccatttcatctgccagggacatctgctgttcctgcctggccagcaatccttctcctggtaacagaacaccttttttcttcttgaagtcacctttccctcattctcactccatgtggtttggcttaaactggcaacttctcctcatccccacccgggcaatctacaattaccaggatatttctgg

SEQ ID NO: 712147 - DNA, 998 bp, Homo sapiens
atctcaaacaaatctaaaaaccaacaacaataaatatcctaacaaatggcactttttattcctttaagctgcctctcaagagccaccctgcaagtggggtttggatcaacttcccacctgacatatgcccaaccaagtggctattctaatgcctcagcactgtgctagaatcaatggtgaagaaagatgaaatgctgccttatctttgatctaagaagcttatagtctaggtggaaggatgtaacacaaagcaatatccaacaagagtgctacatctcaataaatggcaactccaagaatccccattaattgaggcagaaatctatgtcattcttcctttccttacaccccatcaatcatcaggttctgttgatctacacaaaatgtggctcatttatctttccacttgtctgtatcacagctgccaccatccctgtccaagaaatcttcatctctcacctacaaaagctcactgattaatccctctgcttcctttcttgccctcttcaatccgttcttcacagggcatccagagtgatttttttaaaaggctaaactgcttaaacctcttcagtgaccttccatgttcacaggataaaatccaggtaccctcctttagccgtaaggccctgcatggtctggccctagcttatctttgcaatcccatgccttcattcctaccgctccacccactcttcctcacttggctccgccgcctggccttctctcagttcttcatatgcgacgctcttttctgcccatggccrttgtgcttgatattcctctgtacggcatatgcttcctctggccagcgccatttcatctgccagggacatctgctgttcctgcctggccagcaatccttctcctggtaacagaacaccttttttcttcttgaagtcacctttccctcattctcactccatgtggtttggcttaaactggcaacttctcctcatccccacccgggcaatctacaattaccaggatatttctgg

SEQ ID NO: 712148 - DNA, 998 bp, Homo sapiens
atctcaaacaaatctaaaaaccaacaacaataaatatcctaacaaatggcactttttattcctttaagctgcctctcaagagccaccctgcaagtggggtttggatcaacttcccacctgacatatgcccaaccaagtggctattctaatgcctcagcactgtgctagaatcaatggtgaagaaagatgaaatgctgccttatctttgatctaagaagcttatagtctaggtggaaggatgtaacacaaagcaatatccaacaagagtgctacatctcaataaatggcaactccaagaatccccattaattgaggcagaaatctatgtcattcttcctttccttacaccccatcaatcatcaggttctgttgatctacacaaaatgtggctcatttatctttccacttgtctgtatcacagctgccaccatccctgtccaagaaatcttcatctctcacctacaaaagctcactgattaatccctctgcttcctttcttgccctcttcaatccgttcttcacagggcatccagagtgatttttttaaaaggctaaactgcttaaacctcttcagtgaccttccatgttcacaggataaaatccaggtaccctcctttagccgtaaggccctgcatggtctggccctagcttatctttgcaatcccatgccttcattcctaccgctccacccactcttcctcacttggctccgccgcctggccttctctcagttcttcatatgcgacgctcttttctgcccatggccattgtgcttgatattcctctgtacggcatatgcttcctctggccagcgccatttcatctgccagggacatctgctgttcctgcctggccagcaatccttctcctggtaacagaacaccttttttcttcttgaagtcacctttccctcattmtcactccatgtggtttggcttaaactggcaacttctcctcatccccacccgggcaatctacaattaccaggatatttctgg

SEQ ID NO: 712149 - DNA, 955 bp, Homo sapiens
ttcagacagggtcttgcttagtcacccaagctggagtgcagtggtgcaatctcggctcactgcaacctccacctattgggttcaagcaatcctcccacttcggcatcccgaatagcaccacaggcatgcgtcaccacacccrgctaatttttttattttttgtagagacagggtttcacatgttgcccagggctggtctcgaactcctaagctcaagcaatctgcctgtctcagcctcccaaggtgctgttattacagggataatcttttttctttaggaagaagggaatacttactgaacagctagtccatgttaagcaccattttaggtactttatagctattatctcctgtaagtaatcattactactaacctaaacaggtatgaactggcccagtttttttttcttttttctttttttgagacagagtcttactttgttgcccagcctagagtgcagtggtgcgatctcagctcactgcaacctctgcctcccaggttcaagcaattttcctgcctcagcctcctgagtagctgggatcacaggcgcgcaccaccacacagggctaatttttgtatttttagcagagatgaggtttcaccaagttgatcgggctggtcttaaactcctgatctcatgtgacccagcctcagccttccaaagtgctgggattataggcgtgagccaccacgcctggcctgaactggccctttttttttttttttttttttttttgaggtggagtctcgctctgtcgcaggctggagtgcagtggcatgatcttggctaactacaacctccacctccccgtttcaagcaattcccctgcctcagcctcctgagcagctgggactacaggcgtgcgccaccacacccagctaatttttttttttgtagttgttattttagtagtatttgtgtggcccagcacaaatttgtaaactttcttaaaa

SEQ ID NO: 712150 - DNA, 955 bp, Homo sapiens
ttcagacagggtcttgcttagtcacccaagctggagtgcagtggtgcaatctcggctcactgcaacctccacctattgggttcaagcaatcctcccacttcggcatcccgaatagcaccacaggcatgcgtcaccacacccggctaatttttttattttttgtagagacagggtttcacatgttgcccagggctggtctcgaactcctaagctcaagcaatctgcctgtctcagcctcccaaggtgctgttattacagggataatcttttttctttaggaagaagggaatacttactgaacagctagtccatgttaagcaccattttaggtactttatagctattatctcctgtaagtaatcattactactaacctaaacaggtatgaactggcccagtttttttttcttttttctttttttgagacagagtcttactttgttgcccagcctagagtgcagtggygcgatctcagctcactgcaacctctgcctcccaggttcaagcaattttcctgcctcagcctcctgagtagctgggatcacaggcgcgcaccaccacacagggctaatttttgtatttttagcagagatgaggtttcaccaagttgatcgggctggtcttaaactcctgatctcatgtgacccagcctcagccttccaaagtgctgggattataggcgtgagccaccacgcctggcctgaactggccctttttttttttttttttttttttttgaggtggagtctcgctctgtcgcaggctggagtgcagtggcatgatcttggctaactacaacctccacctccccgtttcaagcaattcccctgcctcagcctcctgagcagctgggactacaggcgtgcgccaccacacccagctaatttttttttttgtagttgttattttagtagtatttgtgtggcccagcacaaatttgtaaactttcttaaaa

SEQ ID NO: 712151 - DNA, 955 bp, Homo sapiens
ttcagacagggtcttgcttagtcacccaagctggagtgcagtggtgcaatctcggctcactgcaacctccacctattgggttcaagcaatcctcccacttcggcatcccgaatagcaccacaggcatgcgtcaccacacccggctaatttttttattttttgtagagacagggtttcacatgttgcccagggctggtctcgaactcctaagctcaagcaatctgcctgtctcagcctcccaaggtgctgttattacagggataatcttttttctttaggaagaagggaatacttactgaacagctagtccatgttaagcaccattttaggtactttatagctattatctcctgtaagtaatcattactactaacctaaacaggtatgaactggcccagtttttttttcttttttctttttttgagacagagtcttactttgttgcccagcctagagtgcagtggtgcgatctcagctcactgcaacctctgcctcccaggttcaagcaattttcctgcctcagcctcctgagtagctgggatcacaggcgcrcaccaccacacagggctaatttttgtatttttagcagagatgaggtttcaccaagttgatcgggctggtcttaaactcctgatctcatgtgacccagcctcagccttccaaagtgctgggattataggcgtgagccaccacgcctggcctgaactggccctttttttttttttttttttttttttgaggtggagtctcgctctgtcgcaggctggagtgcagtggcatgatcttggctaactacaacctccacctccccgtttcaagcaattcccctgcctcagcctcctgagcagctgggactacaggcgtgcgccaccacacccagctaatttttttttttgtagttgttattttagtagtatttgtgtggcccagcacaaatttgtaaactttcttaaaa

SEQ ID NO: 712152 - DNA, 2745 bp, Homo sapiens
tgttttttttgtttttgtttttgagacagagtctcactctgtcggccaggctgggttgcagtggcataatctcagctcactgcaatctccaccctcccaggttcaagcaattctcctgcctcagcctcctgagtagctggggctacaggggcccgccaccacgcccagctaatttttgtacttttagtagagatagtgtttcaccatattggccaggctggtctcgaactcctgaccttgtgatccgcccgcctcggcctcccaaagtgctgggactacaggcgtgagccaccatgcccagcggtttttataggagttttaactacattaggtgtcttcaggaaatagcctataattgctagataatttttttgtgttataatttataaattgaaatgaaaatgtgtcagagtccaatatacttaaccaacttttgagcaatgagttgttccacataacagttttccagattattttacctattaacacttacaggattagtgtcaggtttctctaaaggaaaaatattccttaaattattttcttccttttattgtttgagggttaacgcttgtttcatataataatgttaattttcacccaggctgaagtgcagtggtgtgatcttggctcactgcaacctcctcctcctgagttcaagcgattcttctgcctcagcctcccaaggagttgggattacaggcacccaccaccatgcccagctaatttttgtatttttagtagagacgggcttttgccatgttrgtcaggctggtcttgaaatcctgacctcaggtgatccgcccgccttggtctcccaaagtgctgggattacaggcataagccaccgcgtctggccttactgtttttaaatgtacttcacattgctctttttgttattttgaaaagatacaaaattattttgcttcatatttatatagtaaaaaactcaaatggtacaaaagcatatatagggcaaggtcatccctgtctcccagccaccagttctcctcacccaagataactagttttttatgagtattttgtataatccttctggagattgcatttacaggtgattatttatatattctcttttttctttttttttatacaaatggtaatgtatcatacacagttgtgtactttgctttttttcacataacactatgttttgggcattattccttaccagaataagctcttttcttctttatacatgcatagtattccaccttacaaggtccctactaatcacttttttggttgtttccaataatttgctattatatacaacgtttaattaatagccttcatgaaggcatgaatatttgcatgccttaagaaaatttttttagtctaaaggtaatatgcatttatggtaaaaacttaaaacactttaaatattaccaaaaataatgcagtgaaaaataaatcccctaaacttctagtaccacttcccaaatgtaatactttcttgtgattatcaatttgtttgattttttttcttcttttccttttttaaaaaataaatggttgtgtggtatccccactatatatgtataaatcataacttatgaagttcctctttggtggacatttaggatgtctccagagtttttttttttttttttttggatgctacagacaatgctacagtgaaagccttgtagatatctttgcacacatgcaggtgtttctatcaagtagagtcctaaaagtacaattgttagatcaagtaatgtacacattttaagttttgattagttttaccaattggctctctaaaaaggtaatactatttgatacttccaccggtagatccttgctaactctggctattatcaaacttttgatttttaaaaaaagtttgccaatttaataggaggaaataaatcttattcctatctgaatttcatttattatgactgattttgagaatttggccatttctgtttattatgaattttcttattgatttttttttttttgagacagctctggagaccaggctggagtccagtagcatacggttcactgcagcctcgacctcctgggtttaaacaattctcccacctcagcctcctgagtagctgggaccataggtgctcaccaccatgtccagctaatttttaatgtgttttttagagatagagtcttgatcctcttgtagttcatgagcttgataattaggtgttcacatacatgtgtgagacgtgccaccctggaaccttgttacaacgttggcacattacccatttgacatgaagggaagggaaaaaccaagagagacggagtctcactatgttgcctaggctgatctcaaactcatgggctcaagtgatccttccgtctcagcctcccaaagtgttggaggattacaggcatgagccaccacaccttacctgttactgacttttgagtgtacttttttctatcaagaaattagtctgtgatcacatacgtgacaaatattttttctcattttgtcattttctaccttgtgcatggtctgtaaatatacataatttgaccctggagagagaggagtggagggtagggagaggtaagggtaaattagtggaggatccatatcagtcaagctgctaaccactttttttttctgtaagtgctaaacacattttaaataagaaaaatgattagccaggtgtggtggcatgtgcctatagtaccagctacttggaggctgagatgggaggatcacttgagcctgggagatcaagg

SEQ ID NO: 712153 - DNA, 753 bp, Homo sapiens
tctcattgttgtgtgtgtagacagatcatactttgagaacaacgttttgaaaaagcttaacctgtttacctgtatgttccttcactcttgaaagtcaatatatttagaattgtaatttattttatttcacctaaacttagagttttatatctcataatcatcgtttagtcttcctttcccattcayttgttctttccaagttattacagtcttgttattatctttctttttactttgttgtttggtttttatttttattttctaggattcataatttttatttgactgtccataacagaagagttaatgagtattactactgatttaaaaatgtaaataaacataaattaacatctgtttaaaaatctacttcatttctgtgaggttaaaggatccttctgataccagattatattcagatatatccattgcccttttaacttcattaattttattttattttggtaagaatatttaatgtgagatttattctcttaatgaaattttaagtatatagttgggtattttgatagatacaatatagcatatcttgagaacttacctttctcaattaaaactttgtgtttgttgattagcaattccccacttccctctttccctagacccaggcaaacacaattttactctttgattctgtgaacttgcctatattcgataccacatgttagtggagtcatccagtatttatctttctataactggctcatcccactgagaataatgtcctcaagg

SEQ ID NO: 712154 - DNA, 753 bp, Homo sapiens
tctcattgttgtgtgtgtagacagatcatactttgagaacaacgttttgaaaaagcttaacctgtttacctgtatgttccttcactcttgaaagtcaatatatttagaattgtaatttattttatttcacctaaacttagagttttatatctcataatcatcgtttagtcttcctttcccattcacttgttctttccaagttattacagtcttgttattatctttctttttactttgttgtttggtttttatttttattttctaggattcataatttttatttgactgtccataacagaagagttaatgagtattactactgatttaaaaatgtaaataaacataaattaacatctgtttaaaaatctacttcatttctgtgaggttaaaggatccttctgataccagattatattcagatatatccattgcccttttaacttcattaattttattttattttggtaagaatayttaatgtgagatttattctcttaatgaaattttaagtatatagttgggtattttgatagatacaatatagcatatcttgagaacttacctttctcaattaaaactttgtgtttgttgattagcaattccccacttccctctttccctagacccaggcaaacacaattttactctttgattctgtgaacttgcctatattcgataccacatgttagtggagtcatccagtatttatctttctataactggctcatcccactgagaataatgtcctcaagg

SEQ ID NO: 712155 - DNA, 659 bp, Homo sapiens
gccaagacacagatgtgtggaagagaaggcagtgtctgaaagcatgagatagagatagagaaatgtgctcagtatgtccaagcaactgatttccatgcagtgcaagaatgcaaatggtatgctatacaagagtggcagtaaaatgtcaggaagacgagatcagttgcgttgatgtcaacatctgccctcattaatgagatctagatatctatgattagaaaaattgttaagaaaatattttgtactagatatggtttaaatatgcacacacagacacacacacacaccacatgcaacaagcacrcacctcatacaccacacatacacagaagactcacattgcatagaagctacatggcatttaaagaagagtccttcacttctatatagagataatagaataagacaaattaaatgcatgttgcattatcacagcctgatgaaatgtttcatttttgtagattctgactgtaagatatttatttttatagatacatggtagttgtacatatttatggagtacatgtgacgttttgacgcatgcatgcaatatgcaatactaaattcaacataattagtataagaatcacctcaaaggtttaccattttgtaatatttgtaacatttcaagtattttctacctattttaaatatacaat

SEQ ID NO: 712156 - DNA, 310 bp, Homo sapiens
gccgttgaacctgactgtatctagaagacacacacacacacacacaygcacacaaacaaccctatgcacaactagtaaatagcaagctcggctttcatgtggttttacactttcatgcagatacggaggtgtttgtggaggggtctctgtgggtttcccgtgagtacagagaaggaacagctgtgtgtgtgtaatgggcactgtaatttctaaaaatataactcactgtaagcaaggtatttgaggacacactgccattacaaaatgttcccaaatctggtggctcacgcctgtgatcccagcactttgg

SEQ ID NO: 712157 - DNA, 2393 bp, Homo sapiens
tagcattgcagtaattaaaaccacttggtaccggtgaaggactagatggatcagtggaacactgcatttctctacaaactggcaaatagttgctggttagtaaaaaaatggtttggtgaagaagaaagggcatggatttgagaaccagacaggcctgagctgtcctcccagcccatgtgaccttagatgtctctggcatttgctctgagcctgtttttgtttcatgtaaatactgcgggaattaagtaaggtaatgtatgtaaastgctcagactaggaactccaatacaatggctattcattaaagggtcactattattatcagtaattttcttattattggtaattacactttcttttaaaattatttctattattaaatattatcaatctgccagccaatcagaggctcactgaccttttgctctgtgggaccagccacatctcagttccctgtcaggtcctgcctcccaaatatagctacctgcagatcccagagaccattcctcctcactgaacaggagggaggccagtctctctcctctgtgagagacaagcagaaagtcaaagtgaagaggtattaggagatagttctcagagaggatcaagaatatgggaaatgtgtggctaagcacggtggctcatgcctgtaatcccagcacttcaggaggctgaggcgggtggatcacctgaggtcaggagttcaagaccagcttggccaacttgggtaaaccctgtctcaaaaaaaaccaaaaaacaaacaaacaaacaaaaacagaatatgggaaatgtgtgaatctggagaaaaacatgggcagtctcagaaacagtttctgtagtttgaaagccttggttgaaataccatccctgggtctagtgaagctcttcccattctcagtctaggtaagagcaggaacaatgggggaaatgaaggaatcaacatggcgggtccaagggccaacaaaggccctggccagactacagcaatggcctatgtaagggcagagggacattgggtcacatggcggctgggagctgctgatggagagtccccatgcaggctgagtggcatggcctgattctagtcaccatcacagactgtcaagaaagggtgaaaatggaaagaacgggtatttcagggtgatgaatttagaagccatgcacaaagacaatagattgaggacaaggaaatcagagacaggaagtttggctgggatgctcattcagctgaccaggatgccagggagaaggcaatgggcccatttcaaccatggggcactcattccaggcacagggctctggactatgtgtttttcaagggccttaaaaaatgtttgagacatatggtgaatttattggttcaaaaactactgaaagaaaatcataaagttaaaattaatatgttttaattaaacatctaccaaaaaaaagcattatgtcaagaagtcacgtgcaacttggatcacagttacatgtccattatgtttaatgtaggatgctatatactgtaatatgtttactatgatgttaccaaatgcgtgagcagcacatgctggaaaaagagagacagcacaaagagtatggaattagaaacccaaatggtctccatactctaggaaatctggcatagtgcagttagatggaacccattagggattcctgtaaagtcctgtttttaggccttggaaatcaatccagctggcaggacagggagagctgtcctggcaatatgttccatgaaagaaagtcacaagttctctgagactggtcaatatgagctggctgttcaattagctaagactaacagaggctgcatcaaaagaagtataaggtccagatgatgggaggtgagggtcctactacaacctgtgttttaggaggtcccaagtgtctaacaagtcatgtacctcctttggtcactaaactcatgtgccatcttattcaactatttagctgtttccccctggggccgtgggtggttgtcgcattctaggtttggctcctcttctacaaggaagcatataaaaggcttctgactgaggcagaaggtacctctggttcttctgtctcaggcgttattcctacctctgctcttccccactcacccaactggtcccttcctggcttccctgagagttttctgggacttggtgttgtcaaaagtcatataaaccctaatatcatctggctctgttgtcccccatggccccagacatcaggcagaagaagggagtttttacttttctctgtgagaaggatggatgaggagggcctgtgcccacccaaacttcctgggaagctgccaggacctggaccccttgtgtcctgtcccctcggaacattctggaaaatctatcccagtgctttctgcttatgaagctgggcctgaggct

SEQ ID NO: 712158 - DNA, 976 bp, Homo sapiens
gttctctgaagaactctgactcatataggaatccaatctctgttatatttgctcttgatgacttttgaattttattaaacaatttgaatttttttttctgatgatgtactagtccgttttcatactgctgataaagacatacctacttggcaacttacaaaagagaggtttaatggacttacagttccacgtaaagagagagagcttgtgcagggaaattcccatttttaaaaccatcagatctcgtgaaactttttcagtaccacaagaatarcatgggaaagacccaccccatgattcaattatcttccactgggtccctcccacagcatgtggaagttatgggagctagaagatgagatatgggtggggacacagagccaaaccatatcagatgataaaatacagactgtaaaaaacatagaaaattcaaatagcacaaaaatggcactgtcaacatcttgctgagtgctcttctgttttttctgtgagtttatagacatgtatactcaacaacaaatttggattatgaaattctttttcaataacattaactgtaagcatttaaaaatgttattaaaattgtatagaaaaaaattatatagaaaaaagatttttaaagtttctgtctttaattctaatacatttcattttaccatgcatagcatacatttttataatcagtgtcttcatttaaaatatacaatactcatatagaaaataaaattacactcttttgctgtgctgaattttattattttaattttatcctaaaatttgtgtttaacttctgtaaaacactgtttttaataggaacgcttttaatatatgttaaatttattgtcataatttcttaaatagtagtaaatgactaattttctgagtgaatattagtaaaatagtgtcataaagatcattaatatgactgccaaagtgaggcagaaataccacagtaataaaatactaatttagaaaa

SEQ ID NO: 712159 - DNA, 976 bp, Homo sapiens
gttctctgaagaactctgactcatataggaatccaatctctgttatatttgctcttgatgacttttgaattttattaaacaatttgaatttttttttctgatgatgtactagtccgttttcatactgctgataaagacatacctacttggcaacttacaaaagagaggtttaatggacttacagttccacgtaaagagagagagcttgtgcagggaaattcccatttttaaaaccatcagatctcgtgaaactttttcagtaccacaagaatagcatgggaaagacccaccccatgattcaattatcttccactgggtccctcccacagcatgtggaarttatgggagctagaagatgagatatgggtggggacacagagccaaaccatatcagatgataaaatacagactgtaaaaaacatagaaaattcaaatagcacaaaaatggcactgtcaacatcttgctgagtgctcttctgttttttctgtgagtttatagacatgtatactcaacaacaaatttggattatgaaattctttttcaataacattaactgtaagcatttaaaaatgttattaaaattgtatagaaaaaaattatatagaaaaaagatttttaaagtttctgtctttaattctaatacatttcattttaccatgcatagcatacatttttataatcagtgtcttcatttaaaatatacaatactcatatagaaaataaaattacactcttttgctgtgctgaattttattattttaattttatcctaaaatttgtgtttaacttctgtaaaacactgtttttaataggaacgcttttaatatatgttaaatttattgtcataatttcttaaatagtagtaaatgactaattttctgagtgaatattagtaaaatagtgtcataaagatcattaatatgactgccaaagtgaggcagaaataccacagtaataaaatactaatttagaaaa

SEQ ID NO: 712160 - DNA, 652 bp, Homo sapiens
aaaggatcctacctaatactatacatcaaactccagaaaagtttttacaaatctccctcacgctttaacaattacttctttaaatttttttgaacaaccaacaatttcataatacaagtttatgatataaaacataaaaagcagaagtcaaaaaaaagattatttcatagcaccacagaccatgaatccctacccaaacctaacccatatctccagaaacatattmatgaaagtcaagcccagataaactaatgtggatagagaaaaagcagacagtacatagagagtgctagaaaaagctcataagtattgagcactgtgtacaccattggaagtattctacaggagagaaagtgcagctaagaaccacggaattaaaatccaggtctggttggcacaaatcatttagaaacacctcaaaacctcagaagagacagaacagtcacagtctgcctttccctttccaaccacaatctctctagcaaaacaaacagaagagctagacagtaactcatcaggaataatcaaactaagtaagtgcttcaatcattaaaacttcagcattatataattttaataaaaccaaactcatagacagtaaaaaatcgttataagataaaagaagattgtagaccaaaggaaaattctgaga

SEQ ID NO: 712161 - DNA, 575 bp, Homo sapiens
tacataatttataatgtctaattatttttggaagttagttgcaagcatgaagaaggcaagggcatgttcttgaatagtttctacaaactgacctatttctcatttatttctattgtgctgcgtgtaatcctcacacttgaaggtcatgcaagcttgtctaaaataccttaagatatacaaactgcagtttaatgtgggttttscctgcttgcaggtaaactaatcacaagaccattacattaatccagtaaaatttgtatattattttgtgctcttctgaatatacttcataagagctcagtatcacaatatatagataaattttcaatataattttacttaatatagtatcagtatttttttggagaagtacaaatcttctgttatatttcttcatatcttgtctattaacctaatgaagaactttggctcttccagaatgtcatgtgaatttctacagttagtccagagttgtgacctatcttttgcagtatgattttgactttgttccatgaatcctccagtaggtcagagtattcccgagaggatcagggaagtacagggcatgtgtttgc

SEQ ID NO: 712162 - DNA, 575 bp, Homo sapiens
tacataatttataatgtctaattatttttggaagttagttgcaagcatgaagaaggcaagggcatgttcttgaatagtttctacaaactgacctatttctcatttatttctattgtgctgcgtgtaatcctcacacttgaaggtcatgcaagcttgtctaaaataccttaagatatacaaactgcagtttaatgtgggttttgcctgcttgcaggtaaactaatcacaagaccattacattaatccagtaaaatttgtatattattttgtgctcttctgaatatacttcataagagctcagtatcacaatatatagataaattttcaatataattttacttaatatartatcagtatttttttggagaagtacaaatcttctgttatatttcttcatatcttgtctattaacctaatgaagaactttggctcttccagaatgtcatgtgaatttctacagttagtccagagttgtgacctatcttttgcagtatgattttgactttgttccatgaatcctccagtaggtcagagtattcccgagaggatcagggaagtacagggcatgtgtttgc

SEQ ID NO: 712163 - DNA, 635 bp, Homo sapiens
ttttacattctaaatgcattctcttttaaagctacttattcctaagaatcataaatttattcaatggagtatatgtagtttgtactagttttacgttacttgcattcatctctttcctcttatcaatgtgataatgtgattttaaccaatgaagatgatagataatttctatttttattgtggtttaagaaggttactcatagcagaggtgacctatttaatgttgtacccccaaaagttatgggctattctaaatgatctgctgtttatgtgtgagaatataaaaaagaaaagctgggttttgaaggtaagctgattagttttgttaaacttaaaaaaactctcagcaaatatgaaatattagtgttgaaaatacacttaggtaccactatcttttaatactaaaaattgaggctgagataaatgaccacttagtgtttttaaaatacccagtaaaagattaatgttgaattagaaatcaacatgatagtcaggtgtaatcatagccaaaaataataatactaattggttcaytgggttttatgctagaagaaaaagacagaaaaagtcagagggatagatttgggtgttatccacatatatgtgatatgctaaaggagcatgtataataaaag

SEQ ID NO: 712164 - DNA, 635 bp, Homo sapiens
ttttacattctaaatgcattctcttttaaagctacttattcctaagaatcataaatttattcaatggagtatatgtagtttgtactagttttacgttacttgcattcatctctttcctcttatcaatgtgataatgtgattttaaccaatgaagatgatagataatttctatttttattgtggtttaagaaggttactcatagcagaggtgacctatttaatgttgtacccccaaaagttatgggctattctaaatgatctgctgtttatgtgtgagaatataaaaaagaaaagctgggttttgaaggtaagctgattagttttgttaaacttaaaaaaactctcagcaaatatgaaatattagtgttgaaaatacacttaggtaccactatcttttaatactaaaaattgaggctgagataaatgaccacttagtgtttttaaaatacccagtaaaagattaatgttgaattagaaatcaacatgatagtcaggtgtaatcatagccaaaaataataatactaattggttcattgggttttatgctagaagaaaaagasagaaaaagtcagagggatagatttgggtgttatccacatatatgtgatatgctaaaggagcatgtataataaaag

SEQ ID NO: 712165 - DNA, 653 bp, Homo sapiens
aacctagctttagaataaaacttactkcattgatctgccttttgtcaatgtagggtattaaaaaaaattatccaagtatgaatagttttctcatttttttttcccttgtgaaacccaatatgaaatagacaagagttggtacattcgttatctatggctgctgcaacaaattaccacaaacttagtgtcttacaccaccacaaaattattatgcaattctgagagtcagaatctaaatgggtctcactgggctaaaatcaagatgtcagcaggactgtgttccactctaagaattgtggaggacaaacttttttgccctttccagtttatagaggttatctttaccccttggcccgtgactgtctttcatcttcaaagtcagcaatggctggatgagtcgttttgcatttcatcactctaacactgactcttctttagcctccctcttcaaatcctaaggactctgtaatgacattgggattatccagcatattctccctattttaaggtcaggcggtgagcaaccttaattctatctgcaaccattgtagcagaacataatcccaaatgctgaagattaggaggtggggcgttctgaggggtttcattattctgcatattatggtttggttcattaaaatttaagtcttaca

SEQ ID NO: 712166 - DNA, 1399 bp, Homo sapiens
aaacacttttaggatctctacgcagcaatggaaagtatatagaattttacaaaatttatttactggactcatttttactgtgttacgtaaatatataaaacttagtagagtcatgttccaaactaatagtaatcatccaaatcctttttaatactaagaggaatgcattttccttagagacaacattgtaaattgtgggtagatttcagactagctcactaatctcaaatctattatttaacrttcgtatgttgtcagtaataggaaacacatcctaaccaatatgcatagtaatgtccatatggaaaaattaattcgcattaccaaaatcggttgcctggaactatctttgcagggagaaggtactccttcaattccctttttctcccaactcctcacctataaactatgtgataaaatgagaaacttctttaactcagtgaagaagacatgggtagttccccacaaaaatgttgtgctccccttttatagtatatatttgtggattggtaaaaactacctagacagggtctagattctctgcaggctttcccctatgtcaacatgggattttctaactaattcttgccatggaattttcgtaagcaataaggcatgtgtcaatttaggatttttaagaagcatatgtgtcatctttacctattctcccatctccaacattgggggtaaaagactctgagatcctagtggaggacagattaacaaggaggaaaacccctgctcttctgtttatcatatgcaggaaagccacttaccaaataaaaacaagcccacaggactcttaaatgactgagaaataaactgctgtgttaaatctttgaaattgtaagacttaattctcagagtagcttatagtaccttaatatatttactatgtctcaaagtgtatcttctggaataacagtccaagtagacatgccataaaaaagttctatgaccaaataagttagaaatcatatatcccttttacagacacataatagatacaggataatcaaaagctcaggaaagtcgtgtagctttaaaaaatgtttaactgtgtttaatctagcaatttccaaatttactggcaaattaaatcctttatggcataagaactattaatgttgtatataaatgctattaatcagaaaactctttggaaactatttccttggctaaatgattgataaaatcccctcgtgacttggaaaatgtctttggaaggtgaacgatagagaaagggcttagagcttaaaaaacaaatgaacaaacaaacaaatactgaagatctggagacattaatctgtttatgatgggaacagtttatattcaataatcttaaggagcaaaactttttttttttttacctaagtatgctttttcaagtcctgaagat

SEQ ID NO: 712167 - DNA, 586 bp, Homo sapiens
tttagcaatgctttcctgctggggtctgtggaacatcctgacacagtccagggcttgaacaagggccaaggatttatccagaaacagcaagccttgtacaaaagatgatcctggatttagaacagatgaaaggtactttgagggagttcaaagaacgggcacatgctccccgatggctgcttgctggatattttgagaggcgacttgggcacactttacctccctacctctcccaggggtcttttccaacacggtttctctccattagtatattccagagctctcgagcttgaagagcttgaaagtcttaatatgtagatttctgtagctgtgggaacaggcctttcccagttggggtttgtgaaggccattctgatgatgttcgtggtgatgattaattggcagtaatcrtggagatagtgaaagtaatgaggcccacctgtttaggtgttgggaaagatgaagtaggtgggcacatggtcagggtggggatagtgatggtgatgggagtagcaggtagctcaatcttagaaatttgttgagaaacccagggaactaatcttaacataaacttcacttttttgtc

SEQ ID NO: 712168 - DNA, 1022 bp, Homo sapiens
gatacaattcaattcaaatttttaagtaacacagactaattctcagcacctactgttcatcataagttaaaacttgtcttctgttaataaactcttaggaacmaaattacgttacatttttaggctcaaataatcatatcaaaaaactgtaatggaatgaaaaccaaaatgagtagtaacttattggaataactaccaatggaggaaactgctccattaggtagttcttggaggctgaataatctctattcctgagttgatggccatttagagtataggacagtgaatcagaaaacacaggggagaatcatctgagattttaactttaaaaacaaggcttagatgagtgacatctagtatgtaatttcccaacagggtgactacagccaataataatttacctgcacattttaatataactaaaagagaataattaaattgtttgtaacacaaaggataaatgcttgaatgtaaattgggctaacccttgacattgtctatagtgattcttggtaaattgtgactacactggcaaactgtcttctgaacatgctcactgcttttttccctgtctccattccaccttctctgtccttatttccctgcccctcctaactgttcagttttataactcaaacccattgttctgctcagtaattctcatgtctttatcctattttccatctgactcacaatagtcatgaaataaaaaagaccaagaaacaacagggctttttagcatagtggatcacaaatgcccaaatcagtgggttttgttatttcatacagaaatggaaagataaaaaggctaggaaaatcagccattttctatagtatcatagaatttaagttactgtatatggtatgctaagatgttttattttctttcctaaaactgaagctaaacataaaacaatactatgaaacaatcataaaaggaaaaggaaaaaggaggaacttaatgttaaaataaatttaactttgtttaccaaatccacagaaacttttcctataagtattat

SEQ ID NO: 712169 - DNA, 1022 bp, Homo sapiens
gatacaattcaattcaaatttttaagtaacacagactaattctcagcacctactgttcatcataagttaaaacttgtcttctgttaataaactcttaggaaccaaattacgttacatttttagkctcaaataatcatatcaaaaaactgtaatggaatgaaaaccaaaatgagtagtaacttattggaataactaccaatggaggaaactgctccattaggtagttcttggaggctgaataatctctattcctgagttgatggccatttagagtataggacagtgaatcagaaaacacaggggagaatcatctgagattttaactttaaaaacaaggcttagatgagtgacatctagtatgtaatttcccaacagggtgactacagccaataataatttacctgcacattttaatataactaaaagagaataattaaattgtttgtaacacaaaggataaatgcttgaatgtaaattgggctaacccttgacattgtctatagtgattcttggtaaattgtgactacactggcaaactgtcttctgaacatgctcactgcttttttccctgtctccattccaccttctctgtccttatttccctgcccctcctaactgttcagttttataactcaaacccattgttctgctcagtaattctcatgtctttatcctattttccatctgactcacaatagtcatgaaataaaaaagaccaagaaacaacagggctttttagcatagtggatcacaaatgcccaaatcagtgggttttgttatttcatacagaaatggaaagataaaaaggctaggaaaatcagccattttctatagtatcatagaatttaagttactgtatatggtatgctaagatgttttattttctttcctaaaactgaagctaaacataaaacaatactatgaaacaatcataaaaggaaaaggaaaaaggaggaacttaatgttaaaataaatttaactttgtttaccaaatccacagaaacttttcctataagtattat

SEQ ID NO: 712170 - DNA, 1022 bp, Homo sapiens
gatacaattcaattcaaatttttaagtaacacagactaattctcagcacctactgttcatcataagttaaaacttgtcttctgttaataaactcttaggaaccaaattacgttacatttttaggctcaaataatcatatcaaaaaactgtaatggaatgaaaaccaaaatgagtagtaacttattggaataactaccaatggaggaaactgctccattaggtagttcttggaggctgaataatctctattcctgagttgatggccatttagagtataggacagtgaatcagaaaacacaggggagaatcatctgagattttaactttaaaaacaaggcttagatgagtgacatctagtatgtaatttcccaacagggtgactacagccaataataatttacctgcacattttaatataactaaaagagaataattaaattgtttgtaacacaaaggataaatgcttgaatgtaaattgggctaacccttgacattgtctatagtgattcttggtaaattgtgactacactggcaaactgtcttctgaacatgctcactgcttttttccctgtctccattccaccttctctgtccttatttccctgcccctcctaactgttcagttttataactcaaacccattgttctgctcagtaattctcatgtctttatcctattttccatctgactcacaatagtcatgaaataaaaaagaccaagaaacaacagggctttttagcatagtggatcacaaatgcccawatcagtgggttttgttatttcatacagaaatggaaagataaaaaggctaggaaaatcagccattttctatagtatcatagaatttaagttactgtatatggtatgctaagatgttttattttctttcctaaaactgaagctaaacataaaacaatactatgaaacaatcataaaaggaaaaggaaaaaggaggaacttaatgttaaaataaatttaactttgtttaccaaatccacagaaacttttcctataagtattat

SEQ ID NO: 712171 - DNA, 628 bp, Homo sapiens
cattagaaattattgtatacaataaaaagagataaaactatatagagatctcttccatatgagtttaaacttttgtgactctgtttagagatacaaaattgaatttattcttgaccagaagtaacatctatctatttcttcttgtttttacatacattttatacatctgattattattctytcttatagatgaataaattgaaactgagagaagttaaaagcaagctgtcttaacacaactggtaaaccttagagctaggtttggagtccaagcctgctaactcccaagcccaagcctttaattctgcactgcttcctggaccagaaacttgaattcttttagtgaaatgggaatgtgagtgaatatcagccagtgatgaaaggctacttgctttgtttattcaatgaatatatttaacattaggaaaaaacaaacaaacaaacaaaaaacaacaacccagatagcaaaattattcctgaagtgatcaaagtttttctgtaacccagattaagagccatttttacatctttacaatatgatacgatatcgctcatagcctttattctccactagcaacacaggtgtgggagtcaacatgggttcaaatcagagctgtggaatattgga

SEQ ID NO: 712172 - DNA, 1011 bp, Homo sapiens
aagaccagcctggccaatatggtgaaaccccatctctactaaaaatgtgaaaattagctgggcgtggtggcgtgggcctgtagtcccagctactcgggaggctgaggcagaaaaatcgcttgaacctgggaggcggaggttgcagtgagccgagatcgtgccactgcactctatactgggtgccagagtgggactccatctcaaaaaaagaaaaaaaaggtattttgatgtcagttgaatcaggaaattaactaaatggttagaattttactttccatttttatcgtttagaaacaayacttaaccaaatacattttagaaaatttgattctgtcacacaggacaaaatcttgatagtatgcacaggcagatactctacccagttatgtcacaaaacattcttgatacaatttgaaaattctttttgagtcagcatgctcatcaaggtattatataacttaaaaactcactaggattatgtgataaaagccttagacattgactgtttttgttacttcactttggttgagctacacagataatttattttcttctcactcaaaacttgacctaaatgtctttacacatgttcattgcaatgaagagatgtgaagaacttactatatttaattaagtctactgctatactgaaataacgtaaattaaataatattataggtatttattgaagttggacgtattagtttttctaagaataatttttaatgcttcctttgatgtgaagtaacatgtttttacattttggtaggaaacagaacagatggttattctttctctggttgattttccctttggtaccttgactctgtccttgaaaagagcttgcatttttcccccttgccacctcataataacaattgcaagtccacaaaatctggagagaatatattgatagaaaacacgagaaaagggataaactgagtaaaatacataagactttaaaaatgacattcagattattttctggtcaacatgacacctgtatttccc

SEQ ID NO: 712173 - DNA, 1320 bp, Homo sapiens
  misc_feature 1211, 1220, 1221, 1222, 1223, 1224, 1225, 1226, 1227, 1228,1229, 1230, 1231, 1232, 1233, 1234, 1235, 1236, 1237, 1238,1239, 1240, 1241, 1242, 1243, 1244, 1245, 1246, 1247, 1248,1249, 1250, 1251, 1252, 1253, 1254, 1255, 1256, 1257: n = A,T,C or G
  misc_feature 1258, 1259, 1260, 1261, 1262, 1263, 1264, 1265, 1266, 1267,1268, 1269, 1270, 1271, 1272, 1273, 1274, 1275, 1276, 1277,1278, 1279, 1280, 1281, 1282, 1283, 1284, 1285, 1286, 1287,1288, 1289, 1290, 1291, 1292, 1293, 1294, 1295, 1296: n = A,T,C or G
  misc_feature 1297, 1298, 1299, 1300, 1301, 1302, 1303, 1304, 1305, 1306,1307, 1308, 1309, 1310, 1311, 1312, 1313, 1314, 1315, 1316,1317, 1318, 1319: n = A,T,C or G
tgttttttttwaaaaaatgatctattactagggttactaggtgttcattgaaataataagttcaaaccagaagaatggttaccagtgagtgctatgtctgtagttaaccaagcgatgttatttttgcttgaacaaatctgttaacagtaaaatatcacagtgtgattaaacttatagaaatggaaacaggttcattgaaactagagagctggagtcacataaattcaagggcttattcttcaactgtattcttgaaagttggtgtaaagtgctcttccaatggattgctcccttgcttcacatcataaaaccaatctatcctcagatttacatgctactatttgtaccctgaggatggagctgttaatattctccctgctcagctccttaactacttcagggcaaactcctgaacaacagattttatttagtaattggccccttggggatataaataaaaattaagatgataaactacaaaagaatctaaaactctattctcatattttttctaaaatataggacttcctgagagatacagccttgttgagtgctctctcttgtatccttgactcaaaaatcatgacttcatgatttaaagaatgacactattttacattggctctacagtggtttcccttgtgaggtagttagctggtttaaaatgaagtccttctccttatcatcctgagaaactgccttatatgttaaatataacctagaatatggaatgctcatcatcaagagtaagcatataaacagtaagttgctcattccggattgcattttctgttgctcagctaggtgaacctattcatgttcctgttattttaatagtttatttaaaacttgtatttaaataatttcttcatcagaatatgtttctgaattaagaaaacattcacatcttcctcttgtcacattagttgatgcacagagcaattgtattcacaatgtcaaaatgtagctgataaattattagtactaggtttgcataaatcgttttggccactcttgtttcttatcacaagtagttgactaatctttaggtattttcattttgaagtaaacaatctcagatttgtgactgctcttttattctgaaatagtgcttgtttacattggaagaattagtgttttttcagtttaaatacagtgaaagtataatttatccctaaaaagtatggtttatcactgggaaatattgtatnttacataannnnnnnnnnnnnnnnnnnnnnnnnnnnnnnnnnnnnnnnnnnnnnnnnnnnnnnnnnnnnnnnnnnnnnnnnnnnnnnnnnnnnnnnnnnnnnnnnnnna

SEQ ID NO: 712174 - DNA, 2444 bp, Homo sapiens
ttgccttcattaatacctgctattccaacaatgttccagacacaaagcccctctgtgaggcctaaaccccagaaagtggggcaacagtagcttttattttgagattttcctcaacttaaggaagtttccatcaccactgagactcattctaaaagaaaaatgagagcagcaactacagcaacagccatgttttagctcttcctctctcttcaaatcacttccaccagggtagaaagagttttctatctcctgtctgtgtacttctgttcaaactactcctgcctctcagccctttggtgaaaacaaagaactttttctgccaccaggaaacctggcttttaagatggaaaccctgaatttcaggaccatgatctctgctatggatttacaaattcagtttaaagcctcaaaagctgcctctgtataaacatcaacttgaggataaatgtttgtagaaaacaattggttatgtgtgaattgtgggttatgaataatggctacacagaagcccaggcggaaatccctaaatttcctcttgctaccatttattaaatacttattaatttgtttttcagacattatgataaatggtttaccttttgtttatttagttctagcaacatccctgtaatttagacttattatatcatttcacaaatgaggggactaagacacagaaatattaaataaattgtcaaaacttgcttggttaattcgtaatagagacacgttaataagtgagagaggtaagccttcattggaaggccgagatgggaggatatcttgagcccaggattggtgaccagcttgggcaacatagtgagaaccctgtctctacaatttttttcttttttttaaagtagttgggtgttgtggtgtgtgcctgtagtcccagttactggagaatggcttgaatccaggaacttgaggctgtagtgagctgtgactgcaccactgcactccagcctggacaacaaaaagggaccctgtctcaaccttccctctctaaaaaaaacaattgaacctttgtccatacaactccaattcactgtgctatgtgtgtgtgtgtgtgtatatgaaaggcagaaatagtcaggaaasctaactttaaaatcagaaaaaaacaaatagttatattaatcctggagaagagttttgcccagtttgttatgctaagatgcattaagtatacaaaacaaaagtatgtatccagcacttcacagcactttacagcgtagttttcaatacctccatagttataatagtgaaatgtttgaggatagtttgataaaagccataattattctgaagttgttaccaatatgtgtaatactgaattgaaagactgaatgctccaatttagtatattctgtaaagcaaacttctcatgacaatgtgctggtggtcatagtgtgggcagaatggccaaagggaagtgtggtgaaatatttatcaagggagaatttctgataacttctctttactgaaaatacatttccatttcaatgttaatatatgtgagaatttcctttcatgttgatggcctttgaaaggtattttcttttcatacttgaagctgatttttaataatattttactattcaagagctttcagtgatggagcattttagaaatgttttgatgttgaatgatatcaacagctttctaggctgaatccagtataaaataaactatttccacagcatgatttacttgaaattatacttcacagtatacatggtttcagaaaagatatgattaaaccatttttaaacttttaactaaaaaaaaaatctgtctgtctttaatatccttatctataaatctggatgaaaatatgaactgctaataatggttgatacaaattaccattttatacatagtgggcccagcaataaataaataaataaataaataaatatacacacacacacacacacgtaagaataggaaaaacaaaagtaaatatactgattaaaagaagaaacaaagaaaaagcaatatttctttcaccatctctaccaaatagtgtttggcattgctaagaatgattttctggattgtaatagaggaacaacgaagcgttcatacttttgtttcatgtttaaatgtttatttttatgagatattttgaaacatgttttacagatacttcagaagaatcaataataatttgatacgtatcaaaattaaataaaatgttaattaaacatttaattgcagatagatgaggtgactattttggccaaaatatattagaacaatagccatttatagaaataagatatattttaatattttagctgaataagatgattttttatattctgaattttttttcaactttcattttagattcaggtggtacatgctgacatttgagatatgaattactccattacccaggtactgagcatgttacccaacaggttttcaccccttgt

SEQ ID NO: 712175 - DNA, 2444 bp, Homo sapiens
ttgccttcattaatacctgctattccaacaatgttccagacacaaagcccctctgtgaggcctaaaccccagaaagtggggcaacagtagcttttattttgagattttcctcaacttaaggaagtttccatcaccactgagactcattctaaaagaaaaatgagagcagcaactacagcaacagccatgttttagctcttcctctctcttcaaatcacttccaccagggtagaaagagttttctatctcctgtctgtgtacttctgttcaaactactcctgcctctcagccctttggtgaaaacaaagaactttttctgccaccaggaaacctggcttttaagatggaaaccctgaatttcaggaccatgatctctgctatggatttacaaattcagtttaaagcctcaaaagctgcctctgtataaacatcaacttgaggataaatgtttgtagaaaacaattggttatgtgtgaattgtgggttatgaataatggctacacagaagcccaggcggaaatccctaaatttcctcttgctaccatttattaaatacttattaatttgtttttcagacattatgataaatggtttaccttttgtttatttagttctagcaacatccctgtaatttagacttattatatcatttcacaaatgaggggactaagacacagaaatattaaataaattgtcaaaacttgcttggttaattcgtaatagagacacgttaataagtgagagaggtaagccttcattggaaggccgagatgggaggatatcttgagcccaggattggtgaccagcttgggcaacatagtgagaaccctgtctctacaatttttttcttttttttaaagtagttgggtgttgtggtgtgtgcctgtagtcccagttactggagaatggcttgaatccaggaacttgaggctgtagtgagctgtgactgcaccactgcactccagcctggacaacaaaaagggaccctgtctcaaccttccctctctaaaaaaaacaattgaacctttgtccatacaactccaattcactgtgctatgtgtgtgtgtgtgtgtatatgaaaggcagaaatagtcaggaaagctaactttaaaatcagaaaaaaacaaatagttatattaatcctggagaagagttttgcccagtttgttatgctaagatgcattaagtatacaaaacaaaagtatgtatccagcacttcacagcactttacagcgtagttttcaatacctccatagttataatagtgaaatgtttgaggatagtttgataaaagccataattattctgaagttgttaccaatatgtgtaatactgaattgaaagactgaatgctccaatttagtatattctgtaaagcaaacttctcatgacaatgtgctggtggtcatagtgtgggcagaatggccaaagggaagtgtggtgaaatatttatcaagggagaatttctgataacttctctttactgaaaatacatttccatttcaatgttaatatatgtgagaatttcctttcatgttgatggcctttgaaaggtattttcttttcatacttgaagctgatttttaataatattttactattcaagagctttcagtgatggagcattttagaaatgttttgatgttgaatgatatcaacagctttctaggctgaatccagtataaaataaactatttccacagcatgatttacttgaaattatacttcacagtatacatggtttcagaaaagatatgattaaaccatttttaaacttttaactaaaaaaaaaatctgtctgtctttaatatccttatctataaatctggatgaaaatatgaactgctaataatggttgatacaaattaccattttatacatagtgggcccagcaataaataaataaataaataaataaatatacacacacacacacacacgtaagaataggaaaaacaaaagtaaatatactgattaaaagaagaaacaaagaaaaagcaatatttctttcaccatctctaccaaatagtgtttggcattgctaagaatgattttctggattgtaatagaggaacaacgaagcgttcatacttttgtttcatgtttaaatgtttatttttatgagatattttgaaacatgttttacagatacttcagaagaatcaataataatttgatacgtatcaaaattaaataaaatgttaattaarcatttaattgcagatagatgaggtgactattttggccaaaatatattagaacaatagccatttatagaaataagatatattttaatattttagctgaataagatgattttttatattctgaattttttttcaactttcattttagattcaggtggtacatgctgacatttgagatatgaattactccattacccaggtactgagcatgttacccaacaggttttcaccccttgt

SEQ ID NO: 712176 - DNA, 647 bp, Homo sapiens
ttcctgtcaattctagagctatgcaatgcatagagccttaagggtattttaactttatacaattttatttcattattttataacctagcactactaagtaagagcagtactgtggcctccctgttctgcctagctattaccatggtcatattacaaggatgattttcaaaatgtttaaaaacttacagcactgacaccaaccaattgcaacagatatcagacttttcaccacatgatgcagatgctttaccaagagaatattagaagaatatcatagtgatacaggttgctctttatgcaagaaactgggaattgtaggtgagaaaacacgtaaaggaaacatagatctctcaattatctgtcaaaatcaaaagtmcaaaataaagttgtttccttttttgagacagagttacactcttgttgcccaggctgaagtgcaatggcgtgatctctgctcaccgcaacctccacctcccgggttcaagcaattctcctgcctcagcctccctagtagctgggattacaggcatgtgccaccatgcctggctaattttgtgtttttagtagagatggggtttctccattttggtcaggctggtctcgaactctcgacttcaggtgatccgcccaccttgacctcccaaagt

SEQ ID NO: 712177 - DNA, 3487 bp, Homo sapiens
tgatgaattaggtgaagcctaattcattaggtggtcattaggtgaagccagatttcctgcccccaatgccagtgtgttcccactcatctggtccatttcaattactgatggggaaaccgaggccacagacagcaatgacttacttggccagggtcactctgcaggctaatggcagagtcaggagtaaatcggcattcaggcctgtcaccatacttgggcaccatcaagcccaacctgtcattcagctgttgagaagccaggcccggaaaggggagcaagagattgcatttctaccagggtatcgttttgctgcccctggtgttctgggttgggtgggtggagggtcagataaaggtgcaattctctgagcctggagaaggcttagagggaaaggatgatttggtctgaatgggctgagtaggaggttcttgagggacatcagcccttgggtgaatggggctctatggggagggggattggtgcatggggcaggggttaaggcaggaagtggggttctttagaaatcctggggtagcaggcaggtgattccagaagagcctccagatgctgactcaacaaagtccaggatttctattcaatttgaatggaaacttgtggattagtgagttcaattcaaaataagaggacggagaagaggaagaaagagaactaagccccagcatagagtctcagaacttgaaaggacatccgactttttacagatcgggaaactgagactgggagggtgcgaggacttggccaaggccacaagtcacagtcaggaccagaaccagcccctcctgtccagctgtcttcccacccatccaatttcggcacattgagattttgcaacactgacagctgggcttgctgtgatttttagaatctgtcaacagagggagcagctggctctttcccggaatctgagccttttcatgggtctgcctgaatccctgaggtcactcttggagtccaggctgtcaccagccctctccatccacagaccctcccagctcttagctctttgtcttggttcccagacaagatttcctcctcccgctggcatgcagcttccccaagttccaagttccagggctgccctcccagaacagcagccgcagaatagccctggctgacacacttgggcaaaaaatgtattccaaggaaggcaaagccttgaggtttctaatccatttcttacccacagactgtcatttccttttttagagcataaactcagaggacgcagctacttctctccatgaataggctgtctcccaggcacagaattccaggaaccagcagggcctttcaaggttggtttcaagggaagagtgtgtcccttgcagggtggctggagccagctccaagagcctgaaaaatcatcttggcaccaagtctgatgcaactctggacccaacaggaatcttggaggatttgccacaaccttagtcattcaccttcaaatcatccacactgattcagcctctccttcactgaacaagtatttattgagcacctactatgtgtaaccttctaggcaatataactttttggatacagcagattaaacaaagatcactgcaatcactaaatgaatatcttgagaggtggattgtaaaagagacttctgtactattttatgtgtacatagaatcaagtgggtatagaactttggtgttggatggacctgagtttaaacacactctgttctgtgatcttggttatttgaatttctctgagcctcagtttcctcaatccttaggtggaaataaaaattcctaccttatccagaatcagttaaatatagagttagccatatgaccagcaagttcatgcctaaattacataactgagggaaataaaaacatattttttatctttcacacaaaaactagtatctgaatgttcacagctgcagtatccataatagccaaaaagtagaaacaactaaaatgtctgtcaaccaaacagtaagtaaacaaaatgttttatatcatacaatggaatattactcagcaataaaaaggaatgaactgatacatgcttcaacatggaggaaccttgaaaacattatgccacatgaaagaagccagatctcatattgtatgtttccatttatgtgaaacgtttagaataggcaaatccatagagacagaaagtagatgagtcgttgcctcaggctgggggaaatgaggaattagggtgtgatagttaagaggtgtgagatttcttttcagggtgatggaaatgttttaaaattgatgatgatggatgcacaactctgtgaatatactgaaagctaccgaattgtacactttaaatgagtgagttttacagtatataaattatatatcataaagttgtaaaaagaaaaaaatcttaccacgtagggctctttcaggattaaatgagctaagaatacaatgcacctagcctggtgtctggtattggcacttggtacacattcaatagatgctttttttttttttttttttttgagacagagttgtgctcttgttgcccaggctggaatgcaatggcaygatctcagctcaccgcaacctccgccacctgggttcaagcgattctcctgcctcagcctcccgagcagctgagattacaggcatgtgccaccacgctcggctactttggtatttttagtagagacagagtttctccatgttggtcaggctggtctctaactcccaacctcaggtgatccgcccgcctcggcctcccaaagtgcttggattacaggcgtgagccactgcaccaggcccaatagatgcttttattctgctaataatcctttacagtctggcttatacaaaaggttaaaattatgtccgttgtcaacataaggatgatagaaactttggtaatcagtgttttgccttgaacagatgttctttccttactcccagtccctgccctttctctgcctgttgacatcctagatgtatcacaacccggctcagaagtcatctctttgaagcctcctttttggtctaactaaaaaccctggggcatttttagtgacccccaaaaggggcattcagagacacactcttgtcaccatctggctttcttccaaattctttgtgaacacaccatctttccatgtgtcctgctttctgcatccagcgccatggcacctggcacagcagggatgatcctctaatgagtgttcacaacacacatgctctgtcttccttgccacagcacctgcagaaggcagaattctgagatggctctcatagcctttgccctccgatgttaatgttttgattatgtgacatggcaagaggaattctgtagatgaaattaagattactaatcagcagaccttaaggtaggagatgggtgggtctaacctaatcatgggagccctttaaaagcagagagttttctttggctagtggtagaaaaggcagtcagacaggtttaaggcacgaggcagacttggcttgagggaggttttccc

SEQ ID NO: 712178 - DNA, 1605 bp, Homo sapiens
tgacttagctgaggtgacaacgaaatgggaagagtatgtggctggtgacatgtgataagtgggtacaaatggtagctcccttccctacccgcttgaggcagaagctgatggccagttttcttctgagtcgcccagccgagccagggaaattctgagtgtgcttgtttagagagggtcaccaccatgcctgggcagcatcgcagatctgacgctgggaccagtttctgaaaggtggggaagaagacagagccagaaaacctgggttagattcctggatttcaattagcacccaggcccagccccttctggtcccagctgtactgcatccggctgggtcctgagccaagtgacacctggtccctgcactcaggaggtccccataaactaggggagattcacaaatagagccattgtgtcatgtgaggacataccctggccagctcctcaggctaaggtcttactaaaccccaatagctattctaggaaggaggtgccattgtctctattttacagataaagatgtggccagtcttctggtctgaaagtggctaaggcaggaaggaaccgtgacttgtccagttccagggcctgagcttccagcctggcccagggattcaggttgaagcagggcccgaggggtgtgctagcaacatcagcctgtccaggcctggaccccaacatcagcaacctgtgactcacttctgggactacacaggcagggctgggagggtccattttgaccagtgaggggcccacaacacacacagatgcctgccctgtggaaatgagtggagccaaaagctctgtggcctccagcttcccattcatatctcccctgtgcctacaagggtgcaaagagggctgccagyggccttggtcccacctacagactgaaagtcaaaggaagtctgcctggtccttgtctcggctctgtagccttgcacacacaggcctgtgcccttctctgagccttagtttcctggtgggatatttcttcagagacagagtttgggggcccagggccctgccgctgacctgctctgtgacttggagccagtggcttcctctctctgggcttcagatccctgccggccaggctgctccaccttctatccttgggctgggaagagagttagtcacccccagctcactggggaatctaggccatgccagtggcaagctggccccagtcccccggcttgctggagtagcaggaaagggcaagaacaaaacccagaccccagctggttctggaaatggcttcccttggcccacatgaacttgtcaggatctcaccagcctgtgacttcacctacatgctgctccttctgcctggatgctgttgtccactcctactctcctaaggcacctcagatgtcctctcacggaaagattcttacacacacgcacacacacacgcacacacgcgcgcgcacgtaacccttcctccaggctcccaaatcacctgtccacaaaaactgccttcagtagccacttaacctgcatgcttaaggcattcaatcctcacagaactgtgagttagggattatcagttctccttgagggaggaaggttcagagaagttaggtgacacatcttcagtcc

SEQ ID NO: 712179 - DNA, 1605 bp, Homo sapiens
tgacttagctgaggtgacaacgaaatgggaagagtatgtggctggtgacatgtgataagtgggtacaaatggtagctcccttccctacccgcttgaggcagaagctgatggccagttttcttctgagtcgcccagccgagccagggaaattctgagtgtgcttgtttagagagggtcaccaccatgcctgggcagcatcgcagatctgacgctgggaccagtttctgaaaggtggggaagaagacagagccagaaaacctgggttagattcctggatttcaattagcacccaggcccagccccttctggtcccagctgtactgcatccggctgggtcctgagccaagtgacacctggtccctgcactcaggaggtccccataaactaggggagattcacaaatagagccattgtgtcatgtgaggacataccctggccagctcctcaggctaaggtcttactaaaccccaatagctattctaggaaggaggtgccattgtctctattttacagataaagatgtggccagtcttctggtctgaaagtggctaaggcaggaaggaaccgtgacttgtccagttccagggcctgagcttccagcctggcccagggattcaggttgaagcagggcccgaggggtgtgctagcaacatcagcctgtccaggcctggaccccaacatcagcaacctgtgactcacttctgggactacacaggcagggctgggagggtccattttgaccagtgaggggcccacaacacacacagatgcctgccctgtggaaatgagtggagccaaaagctctgtggcctccagcttcccattcatatctcccctgtgcctacaagggtgcaaagagggctgccagcggccttggtcccacctacagactgaaagtcaaaggaagtctgcctggtccttgtctcrgctctgtagccttgcacacacaggcctgtgcccttctctgagccttagtttcctggtgggatatttcttcagagacagagtttgggggcccagggccctgccgctgacctgctctgtgacttggagccagtggcttcctctctctgggcttcagatccctgccggccaggctgctccaccttctatccttgggctgggaagagagttagtcacccccagctcactggggaatctaggccatgccagtggcaagctggccccagtcccccggcttgctggagtagcaggaaagggcaagaacaaaacccagaccccagctggttctggaaatggcttcccttggcccacatgaacttgtcaggatctcaccagcctgtgacttcacctacatgctgctccttctgcctggatgctgttgtccactcctactctcctaaggcacctcagatgtcctctcacggaaagattcttacacacacgcacacacacacgcacacacgcgcgcgcacgtaacccttcctccaggctcccaaatcacctgtccacaaaaactgccttcagtagccacttaacctgcatgcttaaggcattcaatcctcacagaactgtgagttagggattatcagttctccttgagggaggaaggttcagagaagttaggtgacacatcttcagtcc

SEQ ID NO: 712180 - DNA, 1605 bp, Homo sapiens
tgacttagctgaggtgacaacgaaatgggaagagtatgtggctggtgacatgtgataagtgggtacaaatggtagctcccttccctacccgcttgaggcagaagctgatggccagttttcttctgagtcgcccagccgagccagggaaattctgagtgtgcttgtttagagagggtcaccaccatgcctgggcagcatcgcagatctgacgctgggaccagtttctgaaaggtggggaagaagacagagccagaaaacctgggttagattcctggatttcaattagcacccaggcccagccccttctggtcccagctgtactgcatccggctgggtcctgagccaagtgacacctggtccctgcactcaggaggtccccataaactaggggagattcacaaatagagccattgtgtcatgtgaggacataccctggccagctcctcaggctaaggtcttactaaaccccaatagctattctaggaaggaggtgccattgtctctattttacagataaagatgtggccagtcttctggtctgaaagtggctaaggcaggaaggaaccgtgacttgtccagttccagggcctgagcttccagcctggcccagggattcaggttgaagcagggcccgaggggtgtgctagcaacatcagcctgtccaggcctggaccccaacatcagcaacctgtgactcacttctgggactacacaggcagggctgggagggtccattttgaccagtgaggggcccacaacacacacagatgcctgccctgtggaaatgagtggagccaaaagctctgtggcctccagcttcccattcatatctcccctgtgcctacaagggtgcaaagagggctgccagcggccttggtcccacctacagactgaaagtcaaaggaagtctgcctggtccttgtctcggctctgtagccttgcacacacaggcctgtgcccttctctgagccttagtttcctggtgggatatttcttcagagacagagtttgggggcccagggccctgccgctgacctgctctgtgacttggagccagtggcttcctctctctgggcttcagatccctgcyggccaggctgctccaccttctatccttgggctgggaagagagttagtcacccccagctcactggggaatctaggccatgccagtggcaagctggccccagtcccccggcttgctggagtagcaggaaagggcaagaacaaaacccagaccccagctggttctggaaatggcttcccttggcccacatgaacttgtcaggatctcaccagcctgtgacttcacctacatgctgctccttctgcctggatgctgttgtccactcctactctcctaaggcacctcagatgtcctctcacggaaagattcttacacacacgcacacacacacgcacacacgcgcgcgcacgtaacccttcctccaggctcccaaatcacctgtccacaaaaactgccttcagtagccacttaacctgcatgcttaaggcattcaatcctcacagaactgtgagttagggattatcagttctccttgagggaggaaggttcagagaagttaggtgacacatcttcagtcc

SEQ ID NO: 712181 - DNA, 2355 bp, Homo sapiens
agagagagcaggagctcaaagaggttaagtggtgtgtgcccagggccaaacagtgagtccccgacagtctagagaactcagcgaccccgcctagcctggtgcaagtgtttaacagagttaaacatttaactgccctgatgcagtgccccatgcaggggaattccctccctccctcccttcccaccttccccaaggccagggaagcacgaactctgggaatgggtcagcccctcagtgcaacccagggctcatggcaccaactggtcatggcactttccctgctgtccctggaccaagctccacagtcctccgggtacagcactccccaggcagccaccatcgtctggaggatgctcacatgaataaggctcatacctccctggccctgggggctcccacacccaaatcttctattgagctgatgtctcctgcagccctaaatggtcatgactcaatgtgctgtgtgccttgggatggctgagcttctcctggcctcagcttcctcatccataaatgaattctggcagatgctctcggggagaggcaggggggatcctggaaaagcacaagctttagggtgggcagctggggacacacccaggcaggtcatctctgagcctgtttcttcacatgtaacatgacaataaaaatacatactttgtgggagttatttgtctattagaaattacatacatatgcccactgtttttaaaaaataggaccatcttttttttttttttgagacagagtctcgctctgtcgcccaggctggagttcagtggcacgatcttggctcactgcaagctccacctccctggttcacgccattctcctgcctcagcctcctgaaaaatgggaccatcttacacgtactgtttgccaatttgctttttccatttacaacacacttagcagagcctaggcaggttacttagcatttctggaagactaaaagagatgatgtagaaagtgccaagcacggtgcctggtccacaggtggctgaagtatcagtccccacccattcccttgttgacctgctctaccctacagccaggcaaccctttgccgtggatctctggcctccagcacttgcagcttatctgtgtgccacccgcttgtgcaggcccaccctgctggtaaggccaccctgctggtgaggccactctgcagggaggaaactggggctaaagagcctctttgcccaaattagttttggtgtggatggtatggggcagggcaaaaaacactcacgctggcctctgcctgctaatgtgaacaggggaacccagcaggaaacagagcaacctgatctaaccccaggtgaggtgtgtcacatacctggcagtggcagcagctgcataatgaaagtgagacttagggccacctggatacaggcgctcctggtgctcactgatgcatcaggagccatgcagagaagcccaggacatgggaaagaacccagatagtctgtctcttccaggcacacaccagctgaggagcccaggtggctgcatgagctccagtccaccccagcccttgactgcaagccacttcctatctctgggcctcctctgtgaaatgggggtaggctgcttctcacaggattgcagcaatgtttacacggggcagtgcctgcagagggcccatcacagggcctggcacacagggacaaattcctgaatgcttagaaacagaaatgtttggaagcaatgcttctaaaatgaaatgcccagatgtctaatggcatccaccactctgccccagccctgttccctcaggtatcagggtcttgctcactggggcacttggcaaatatccctctgctgctgattctkggagggcctttgggtaaggctctctgtgcctcacagtcttctccttgggaaataagggaatcagatcaggtctccaaatatttcaaaagctgggcaaacccctctgccaaatcataatcttagggagcatctaatacatcaaatggatggcagcagagccactttgggtacagtgggggtggtgactccccttggtcccatccctcctcagctttcctacccctgagagcctcaagggaacacctcagagcagctggaaagctctggtctagatgtccttgctaggtgacttggtgctaggtgacacacactgtctgggctttggcctcaggcagatccaggggcccaggagggccagagcacttcagctcaatgtccggtattgccactgctgttccaggacctccagcacttaccgcagtgtcccacagggagcaatgtttgcatagtgctaaagtctgcaggctgatatgtcagggaaccgacactgaaccaggagtcagaagctggaatttaaat

SEQ ID NO: 712182 - DNA, 1157 bp, Homo sapiens
atttttttcctttttctttctgcttttcctctttcctttatcctcccctatatccttcccttttcatctctgtccttagaatgccttatatttccatattagtttatggttctcaaattgctttcatatgccattaataaaaacaactactttctgaagtaagtagggttactactcttaatattgttttattaatgagcacgacagaggggaggcaatttccaaaagattttagagatggcatgatatggaattaagtaatttrttagatttaccaaataaaaatttacattatagaaactttaaaatactgtttttaaataaagaacactatttacatggttaaaaatatacatgcactaagaacaaatatataatgaagagtacagtctcttttccttaccacccattccctgaagacctctgttctatttcttagacatactgttaaacatttttcagtatcttcccataaatgttctatgcatatgcaagcacacacaatcttttaaagcaaatgataacttactcctctacatcttgttcatttttcttttatcagtgcacatatatgcactgtatttaccttacggatctccaactgtgagctttaggttgtttctagtttcttgcttttactagcaataaacactcttttgcacttgaatgagtttctctgtagaattatttctagaagtggaactgctaagtcaaagaacatgtacacttttaattttgataaatacttccaaactgatttctgaaccaatttatactcctaccaactgtcttggagggggcttgttttctcataccctcactaataccagctattatcaaattttgtagtttttgccaatctaaaaggtgaaaatattttatcttgcatgaataaagttgaatattttttctttttttcccttaatcgtttgcatttcttctactgggttgtctttttaactgatgcataagagctttttaaattttctcttttttaagagttaggatcttgctgtgtggcttaactctcaaactcttgggctctagcagtcctcccaccttagcctcccgagtagctgggactacaggcatgtgctgctgtgtgcagcagatgtgtacaaaagagctttaaaggtagtactgaaaacagttccttt

SEQ ID NO: 712183 - DNA, 851 bp, Homo sapiens
ggcctaattcatgctcttgctttccagatgagaaaactgagacaaagaaagtcaaatgatcagcctaagcccacacaaagaaaaagaaagtcttaggacacagatctctaaccacaactctttttcacccttagtgtgcaacctgtggctttctgagtagtcagaggaaggtcagttaaatcacttatgggttataccctttatacggcaatgaactatctccagccttgaaatttatcatttcagtgaaagtagcactttagtggcccctgggcccctgggatctggttgtagatccatcaccaacttacttccttctttccttgacacattttggaaaatgactaaataggatacatttctcactagttagtacagcttcataaaacaattaaggaaatgggtttattactgaaagtacagtgtaccgcacaggaaattagatgtttagttattgaaagttcattcctgttttcttttttacctcttgatcggactcttttctgtgcagctctgtcactctgagtgaagcgggttccaggtttgcctctctttctccctgagaaagtagaataatataatcacagtcatttatgagcagctgtattacacatattacagcttttcaaaaattccatttaaatgtaactttccaaaagcctgtttaatgtataaataaaaaratttaaaccctagcctttaaggtatgaagaattagatagctaatgttaggttcactttatatttcattttcctattcttatgttaggaaaaaaactaattgaaatcagtatttcacgtatatctcaagcaaaagtataaatgcttcattccatattttgaaggttcat

SEQ ID NO: 712184 - DNA, 645 bp, Homo sapiens
aaaagcgtgcacatgtctgagacaaaatgagaaaaatgagtatgagggagtctttcacaaagccaaatatattcattttataaaggctatctttcaatgctacccattaccttttctgcttgtgggtgtgtgacagtgttagctctttcatgatgttatgaagagggtagaaagtagtggttttgtttgtttgcatttctacccaacaaaatttaaacttggyaattccagtttggaatgtaagatttttctttggaattttgttgccctgtgaaatctgtgagatcccaatgtctgacagtcactgttcggagccactccttctaaggtctctaatacctagattctgctaacgcagcaaattaggaaagatgttcacagatccctaagaggggctccacagtggctacggacatcgttttgttttctatcctcatcaagacaccagcccaagagcagtgaatttcaaagatgatccctgttcccaatgctaatcattagggacgtactgtgaatactcttagtttggagtcagtttaaacagaaaacccagctccaactggattagatcaaaaagtgtatttaagccaggcgcggtggctcacgcctgtaatcccagcactttgggaggctgaggtgggcgga

SEQ ID NO: 712185 - DNA, 597 bp, Homo sapiens
agggacgggcgcggtggctcacacctgtaatcccagcactttgggaggccaaggcgggcagatcacttgaggtcaggagttcaagaccagcctggctaacatggtgaaaccccgtctctactaaaaatccaaaattagccgggtgtggtggtgcacgcctgtaatcccagatactcaggaggctgaggcaggagaattgcttgaacccgggaggcagaggttgaagtgagcagtgatcatgccattgcactccagcctgggcaacagagtgagactctgtgtccaaaaaaaaaaaaaaaaagaaattttttttaaagttcatcaattattgttagtgtattttatgtgtggcccaagacaattcttcttcttccaatgtggcccagggaagccaaaagactggacaccttggtgtagggaaaacatggtatatagagagtttggtactatctgtggtttcaggcaccaattggtggtggaggaggtcttagaaagtaaccctctgagggtaaggtgggactactatttctaagcatttgggatgggagggagaggctctgacaggtattcagcttgcagtcttggactggawccatc

SEQ ID NO: 712186 - DNA, 1821 bp, Homo sapiens
gtttacttggctgttattttatcaagacacaagaccacctgagattctgataaaaactacagatcttctcctctgaagaaggcctgaatatatatatatataatgttgtaaataatttcacagagttcccatgaatcctaagaactctcgctaactataacagggattctcatatttaaaaacttaaatacatattcctcacacacacatacacagacacacatgcacacgtgaaattttatttatgtctatagtgatatgtaaagacatacttttttcattgtttttattattctttttgtgtatgtccccaaggggtcctggtgatcaatcaagtttgagagtcaatgctccatagatttagagcaccggtctacaaagaaaggtgtctactcaaggcaattatttggagtgcgtggaaaatattaaaattctggttttttttaaaaaaaaaagttatagaaatggggtcttacgatgttgcccaggcttgtctccaacttctgacctcaagcaatcttctcccctcagcctcccaaagtgcatgggatacaggcatgagccaccacacccagcctaaaactcagtattwtttttatttttatttttgtagagacagggtcttgctatgttgccaaggctggtctggaactcaagtgatcctcccacctcaggctcccaaagtgctaggattacaggcatgagccaccataccaggcctctatatttgagattttgtcagtgtcctcttacacgtcagacctaatctaacctaatcctttttttgtttctaatacttctatttgtttcagaattgacatattattacaatcatacatgtacattgtttataggtaaataaaaatatatattgtatgtgctttaaaaaaatttactcatcaaaaatttagatacttcttcagggaaacgacaatgataaacagtgctctggatacaccatcaagaactggttaagtggtagggattaactgcaatggtctacactcgcatggcctaatacctcccatcaaaaccatgcctgtaacagtgtacctcagtatcatacttcacacccctaaactcttaatagttcatacacttacagaactttcataaaatacagcaagtcattatatcaatacttataatttggggagtggcactgatttacaatcatattgttattttttaaagtgtaagcagtaaggtattatcaagatgtggcacacagtgaacattttataaacatgcatattgtatatttcagtacttctcaaatcagaaaagttctagtatgaagtaaggcagacaataggtgcccactagccacatgtagcttgagtatatgaaatgtggctagtaccacatgtttaaatgatattctggatataatgggttaaattaatcatattaaaatttatttcatatatttatttttactttttttaatgtggctactagaaaatttaaaattatacacatggcttgcattatatttctattaggcagtactagtctacagaacagtaaaataaattagacgctatactttatgaaaactttaccttaatcccaactccacccccaccataaatgtgttcaaagtaatataaattatttacatttacaaaatttttgcatgggtctaggttttaagatatcaattcaacaagaatatatacttttcttctgattggcaaaaatgagcaaacctgatagcctgacaggaatgctgtatccacataccctaatgcaaaactgtgaagttaaaaaagagttacaagacattcttaaaaataaaatttatatactataagctaa

SEQ ID NO: 712187 - DNA, 601 bp, Homo sapiens
caagagattctcatgcctcagcctccggagcagctgggattacaggcacccaccaccattccaggctaatttttgtatttttagtagagacagggtttcaccatgttggccagggtggtgtcgaactcctgatctgaagcgatccacctgccttagcctyccaaagtgctgggattataggcgtgagccactgcacctggcagttatttgctcttatatgataatgtaaaattattttggaaaataattttttgagtatatagttatgtttgtggcagcctatttgaatttatcatttgataatttctactaaaatgtctttgttataaaagtcatatgactttaattgtcctcttctgaaaagaatatggttttttatcctctcaggctccttttaggatattcagttaatctcattttcatacaatatattaattttagtttattatttctgataaatttattaagtaattttcactataacaaaattaaaaatcccataaattgctatgtcaataacctgtctctgggtgtaaacacactccacaataaagaacaccaaggtcttagaaacactgggaaaataagactgatagtgtcc

SEQ ID NO: 712188 - DNA, 601 bp, Homo sapiens
caagagattctcatgcctcagcctccggagcagctgggattacaggcacccaccaccattccaggctaatttttgtatttttagtagagacagggtttcaccatgttggccagggtggtgtcgaactcctgatctgaagcgatccacctgccttagccttccaaagtgctgggattataggcgtgagccactgcacctggcagttatttgctcttatatgataatgtaaaattattttggaaaataattttttgagtatatagttatgtttgtggcagcctatttgaatttatcatttgataatttctactaaaatgtctttgttataaaagtcatatgactttaattgtcctcttctgaaaagaatatggttttttatcctctcaggctccttttaggayattcagttaatctcattttcatacaatatattaattttagtttattatttctgataaatttattaagtaattttcactataacaaaattaaaaatcccataaattgctatgtcaataacctgtctctgggtgtaaacacactccacaataaagaacaccaaggtcttagaaacactgggaaaataagactgatagtgtcc

SEQ ID NO: 712189 - DNA, 617 bp, Homo sapiens
gagattgagaagccctgggtcagagtaatacacttggcctctcatttccacaactgtataatagggtcttttagtttgtacatgttgagtgctgtaagtgcaataacgtccctgtccccatgaaggctacactctttaatgggagtaataatatcatctatttcagagggttatggagcttataggagttaataaatgttaggcatttatgctgtgtactttcaaacagtatatagcatacagtaaggcacaatataatttaagttgttcttctgaagcaattatgacagcacctatcacatagtatatgctcattaaaatgcaattgatatgactattaaacatagatgagtcaatattagtcaaaagtttgctccctgagtaccattcatctcctgtgcctgctgtttgttctcaacttccactgagggcctagaggtgttccatggcttctgtcagttcacrgggatgagaaatcagatcgaaaaatcaactcaagatggattaaagacttaactgtaagacctgaaactataaaaatactagaagaaaacctagggaaaattcttccagacattggtctaggcaaagaattcatgactaaagcctcaaaagca

SEQ ID NO: 712190 - DNA, 801 bp, Homo sapiens
tttttgaataacactgtaaataccatcttcatatggcataaactgtggcagtgtagtattatrttcttctttgtagtcaactataataattaaaagcactggtgattaaaatttaaattatttcaaatacatcttttggatgagacaacatgcaatcatttcaaaagttaaataaaactgggtttcttattaataagggaggtcaaatgtatattttatttttcttactggtatgacacatatcttaggctcttaaagttctctgattgatattttaaaaggcataaacattttctttgatttaagaagctcatatattagttggagacagaaacaacaatggctgaaatgatggcaaaactgttaaccagtagggtatgtgaaattggtagagattcatttgaatgagaagagtcaggaagactacttgataaaccaggtctcaagggttaggtgaaattaagactaaaaagaaataagggaaccagaaagtaaggaagtgcttaaaacaagcacaaacagcaaagccacaatgacgaggttatttcaagggacatgggagccaagtgaaagagctcccaagggccaaagctggaaagacttaagcaaaatattacagaatgcagtatgttagattataatccaaagtataaaataaataacaatgaacctatactaggtctagaggattgggggaaatcaagaataaaaagaaggtaaggagaaagtatggaagtgctacaaacaaacaaataacaaaaaaactacaatgatgagggtataaataaatgactgaataaa

SEQ ID NO: 712191 - DNA, 585 bp, Homo sapiens
tggtatctaataggtatgtagtggtatttcatttttgttttcatatacaattcagcaatgacatatgatgttgagcatcttttcatctatttgccattatataacttctttgatgacgtgtgtattcagatcatctgaccattttttttaactgggtcatttgttttcacgttgttgagtttagacttgattttatagaactcttttgccaatgacatgaggcttaaacaagcacccttgcttgaccctggctagtgttgtccagaggccctcatgggtgaagtataattgcacagyttatgcatacattgtagcaaacatagcttaaagactcttcatccaggagctggtaacagagaaaagttgtctaagagacatagtccactgaaaggggtctttgaaaaggaggattctggccagtagatccaaagaagaaggctggcaaacgccaccttaaccaactgatccaagttaacatcagtgatgagacatcgacatcttgtccttctcgagcacgtacatcacttctggggaactctttcccaaaaaagcgcaacctgaatccaattagaaggaaatgtcaga

SEQ ID NO: 712192 - DNA, 1074 bp, Homo sapiens
attggggaggctgaggcaggagaatcacttgaacccaggaggcagaggttgcattgagctgagatcgcgccactgccctccagcctgggcgacagagtgagactctgtctcaaaaaaaaaaaaaaaaaaagaaaaagacaacatgcttcaagaaggaaaggttgaacccacagggaaagggagtgtttgaagatgctgaagagatgataaattaagctacttaaggacaaataagaggattcattcattcagctgaatattttaagtccctattataatccaagagctatctgaggtgttaggaatccaaaaattaataaggcttagtccctatttttagagtggtcactgtccaggagcaaaagatgccaatgatgatgtctgtaaaaactacatatttttaatactttccttgtacgagacactgtgctgtgcaggtttgcagtatcttacctgatatttacaacaatccaatgaggtagatgttatctcccttttcctgatgaaacacaggaaataatataagttttccaaggtctcaccaccaagataaaaacrtaagtctgtctgacgttaaagccgtgttcctgctggtactttacactgccattggatggtgtgtggttacatgcaacagtcacaatcaattctagtggggatgtcttggagaaggtggtatagatggcctgagcctcaaaggatgagcagacagagaataatgtttgatggcctggaagtggatttgaaggaagaagagtcttttctctgaataaaggccagattttcaaagaaggtggcagaaatgtataatgaacctgagacgactgagtgctgtttctcagggaaaggatctacctgctccatatacagactttcaaccaagtgtcttgttttcagaccttcctcctacaaagctgtctggcgtctccaattcctgactctgttctggacttctttgctttgtaaatgttggtatcatgtaattttatagccagattgttttaatgtttcataatgaacattttcccaaagcaaactgcttgttgcaaaacaaccgtatctttaagccagcat

SEQ ID NO: 712193 - DNA, 1987 bp, Homo sapiens
tgatggagtctcactgtgctgcccaggctacagtgcagtggctcgatcttggctctctccaatctccgccttgcaggttttcaagcaattctcctgcctcagcctccttagtagctgggaccacagacatctgtcaccacacccagctaactttttgtatttttggtagagacggggtttcgccatattgactgggctggtctcaaactcctgacctcaagtgatccacccaccttggtctcccaaagtgctgggattacatgcgtgagccaccacacttggcctacattttttctttatataccagaacatctataacaggcaccttatctactcattagtgaagagataattggattacacaggcaggcttgtttactacatccagaatgtagaaactgctttcttcaacatcttggttctagctastaataacaatataattctttggcagatattcagaataacattttaaactacattttcttagaaaattgcattcttgtagtgagcagtgtatggtctcttttgttcagaatttaaaactgataaccaatgaaagccttttctcttattcctctaccgtcatttacatgataatctgaagctaatatgacaatatttaaatactaagtggtactagggaactacaagaatactgtaaagcttaagccattgttatcactgtcatttagcatttaataacaaaactatacagaattatgtgcataccaatgaatgttttgtaccatctagttaaattttttaaataaagttttatgggttaagcagaagacaactgtcatactgaattttattaaaagtatatatacttcaaattcaaagcatcccttaggacccacagaatatattaaaactaccacccttaaattttatatttttgctttaagacagacaatgcaaaggtaactggcaagaggtgagcaaatgttttagaacatttatattattgcttaaaatgagatttgaaattgtaataaaattcttggttatgaagtctgatgtcttctttgagcaccagtttaaaaggaaacatttcaaacagtaaaataaatcagtgtgtactttattttgagccaatgttttacataagaccaacaaactaagtgtgggcaaactgttcaatcacttttgagaaattacatggttcctatttaggtttgaaaaagtagtttgttgccataacatcagaccttaaggtgttttaaagtgtatcctaagggtactgacagaagaaaaatacagtgttatggaagtatacacaactcatgaccacacagtatagatccattcatggtgaataatgttcatctgttctccaaaggtagtgaaaaatattaagtcatcaaataaatgctcagaattaccaaggaacagttaaaaaggaccaggatccaaacaggttatttatatatttatctataaacaagtgacaacactaaaaaacacattgaaaaccagtgttttaaactctgaatgtgggatttaaaaatattccattaacttgagattgcaataatttttttaaaccaaatagcatttgactggcaagtctcatataatttacagctgtaatattcctaaaaggaatatctacatactatagctctatcaaatataatctgcattttgctaatctatacaaatatcttttcttcatttatacattttatatttatatactttttaaaaattagattttattgctaggtgaatttggaattcaaattaaatttggaaacttaataatgctcttctcataaccttctccccattctttttttaatttttaaacactggaagcaaatgattatcaaaatgagactgcaacttaaggcattttaaaagaaaaaataattaggtgccatatagcattttatttcaaaagtatattttgtcccacttttctcactagcaagagtaaaacacaaaccttttttcataaatatgactacagtaatcataa

SEQ ID NO: 712194 - DNA, 588 bp, Homo sapiens
gaattaagtgccttcacttataatcccagccagaaatcctgatgctggaatgtgatcttaagagatttgagctgttggcagagctggctacctattaaaggtccatgaggamctacaaaaagccaaaaaaaaacccactaccaccaccaccaacaacaaaaaacccacaaaacaaagcccttcatggcttctgatatggattcagaattaggactccttgtcccatattttcctggaatcataggtaagcccaggaataatctcttatgatctaacaaacctgagtaacaggtaaaatttcttaccagaaacgaaacaaaacaaaatcctaacagattaagaaatgttggtttgattagtagttaagatttatgccttttttattataaatcctgaaatcaaggtgatcaacaataaatttctctttgaaaaaaaaaagtaaaatgcagttaaaattacatgcttccataccttaaaatatgcttaaaaaaaaaaacaactaatgtcagtttcccaacccatatttcccaaatcaatcattttggtattactaagcctataaatgagctctaatttggcagaacagag

SEQ ID NO: 712195 - DNA, 969 bp, Homo sapiens
cagttatgtccaattcaaaaggctatctgtgatatggtgaattgtatggtatatgaattataactcaataaaatgagggaagaggtggagggctatctagcccaaccaaagtagctgaaatactatatagtgtatctgagaaatcatcaataagacagcttggagacttaatagctatagatactctatgcacaatgaawagaaaataactttccaagactttatataactagcaggcatccaattttcattttatttctttttaccttcataatagttattcataccacctttccaacaagaggtttactggaagtatagtcaatgaaatcatttactattactattgtataagtcaatatttgctttcagaaaattatttctaaggttttaaaatattttcccaacacaaatgcccttaaaacaatgcaattaaaaaaataaaaaaacttaaggagaaaatatttgcaaatcatgtatccaataaggagcttgtatctagaatatataaagaacacttacaactgagtaacaagacaagtgtactttaaaatgagcaaaggaactattataaataggcatttctgaaaaatgtacagtaaacggccaattagcacatgaaaagatgtataacatcattagtcatcaaggaaatccaaatcaaaaccacaatgagatacataccacttcatacccattgggatggctagaatcagaaagtaagataagtgctgatgagaatgtggagagactggaatcttcatacacacaaaagggaatgtaaaatgatctagccagtttgaaaacagtatggcagttccccaaacgattgaacacagaggttatgcatgactcggcaattccattcccttattttaagagacagggtctcactctatggcccaagcagtagtgaagtggtgccatcatagctcactgaagcctcaaccttatgagcttaagggatcc

SEQ ID NO: 712196 - DNA, 585 bp, Homo sapiens
ggatcaaattataattattcattttcaacagaaataaattagcttacttattttccatcacctgaaaattttcttggatttgggctaaatgatgaatagcctattagtttacgttctttttatatgtttctctaattagaaaagagtctgaaaaagtcaaggactatttcaccctggtattcttagatcactygctacagtctattattagacatattatgtttccactgtttaaactccttttgtccacccattattgtttatacctgcaaaaaaatccaacaccaagttctgcctggttgcaaattaatgtcatgacctttcctatcctacttgtatatccagaagcagcacttaaatgtgagactaaaaatcaccccgcttcaataagtaaataatgtttgtggattacagatcatagtcttttatccggaataataatgcggttttcatttttacaggaaatggaaaataaaacctcaacaaatggattcagccattcagaatggctctcaaataggcagtgctgaaaattgatctggttacttgtcaattgcattattcagagatgacgtcatcagcaaa

SEQ ID NO: 712197 - DNA, 585 bp, Homo sapiens
ggatcaaattataattattcattttcaacagaaataaattagcttacttattttccatcacctgaaaattttcttggatttgggctaaatgatgaatagcctattagtttacgttctttttatatgtttctctaattagaaaagagtctgaaaaagtcaaggactatttcaccctggtattcttagatcactcgctacagtctattattagacatattatgtttccactgtttaaactccttttgtccacccattattgtttatacctgcaaaaaaatccaacaccaagttctgcctggttgcaaattaatgtcatgacctttcctatcctacttgtatatccagaagcagcacttaaatgtgagactaaaaatcaccccgcttcaataagtaaataatgtttgtggattacagatcatagtcttttatccggaataataatgcrgttttcatttttacaggaaatggaaaataaaacctcaacaaatggattcagccattcagaatggctctcaaataggcagtgctgaaaattgatctggttacttgtcaattgcattattcagagatgacgtcatcagcaaa

SEQ ID NO: 712198 - DNA, 1119 bp, Homo sapiens
tcaaaagctcctggccctgttcttatctatctgtatatcacttttaataatgcagatttaatggaccaagataagtgtttaatatatttggcatttaattctaatattgtaggtaattwgatttcttgataattgtatcatagtagttatagtcctactaacaattgtgctctacgtttattgtttttacctgtagccaaccacctccatgaaagtgatgctcaaattgaaaactggtatgtagctgttttgttctatttcttttaaaaaatgaagacctttaatgaaaataaagttataaagttttatataatctgattttgttcgtagcaataatatcttggccaaagagagaagattacagtttcatcagaaagggagaagtatgaattccactggatctgggaaaagtagtgggacagtttcaaggtaacttattctgaaattgtgttggaattacattgtgctatagatgacctactcttatcattttttcaatcttggatttgaccttgatcatatgaaatcagaaagaacacaaaaagagcgtttcctgtaccagcacaactgataggagctttttgttttgttttgttttgttttgttttactttgagattaaataaaatgcaataaataggcttatactgctgctggaacccataaatgagtattttgagccctctcaacagcctgaaagaggaactccatagcggagtaacttgtagttgtagagaaccaaaattcattgttaaggacttgagttaactctgacacaaaaatcagaataaatttttctaagttacagcttgatatttaagcatactttttttcaacacattaaaccaaagatctttcaaatatatagtatagccaggcccagtggctgacaccggtaatcccagtgctttggagtgtcaaagtgggtggattacttgagcttaggaattcaagaccagcctgagcaatatggggaaacggcgaaaccctgtctttacaaaaaatgcaaaaattagctgggtatggtgggatccacctgtagtcacaaccacttggaaggctgaagtggtacccaggaggttgaggctgcagtgagctataattgtgccactccatttca

SEQ ID NO: 712199 - DNA, 1024 bp, Homo sapiens
ttttattacttctatagcagatattagatacaatcatacagtagttcttaatcaattcttatcgaccagaacacagttgacctagagacccacacccttgaatctgacatcaaatatgtatatttatatactcttgggtcataatgttatcaattttaaaaatcaatattctcaaattatgatacctagtcatctatttattgccataaaatttcatcttactccacttattagtatttaaatttaaatattagtctggaacatgtgcagactaaaattctgtctgttgatggcatagcattgtcattacccattatggtctttgctttgagacgtgagtgctgcaaagccagcaagccttgctgaaagtgcacattttctattttcatgtttgccttccttttctgttggcagaggaggaaaccagagctccagaaattaggaagcttggctgaagcgagtccagctttccaattctcaaagcccttgtctggacagctgcccttctgaggatgtagtcagtttttactcttgcttttaagagcagtcttgttctactcagatgttctttcacaaactkttttaactcactaaaattaaaacatttgttcctgacttcccaaacattatttataagctctcaactgctggacagagtacacaattattccttggaataaaagcactccaagtcatatttatttcagtttctgctactatccatgaaagctgttttaattttctgtatagtggtaagattcatgctgcaggcaattatcatcagccatgtatattttgaaaacaatccctagtttggcaatagttattcctaaagtgatatttctttgctagacagcatcatacaataaaacagatttttgccaagtattctaatcatccgaatctaagacaacatattatttatttcaaatggtcagtcgtgttccaatcaccattgcacattagattagaaattatccagttggtgtgtaaacattccgctaatttacctcgtgtctggttc

SEQ ID NO: 712200 - DNA, 634 bp, Homo sapiens
gtgcctggctaacacatacacacatcttagcatacttacctgattatttcctctggatctagaagttctctcctctttctaaacctgccattttagtagtaactgaatccaagtcagcagatcttccgccagccatcagctggccaccctgcagacctctacatgcagcattcagtataactaaggaagccctagacacagtttctcagttcccacgagctcacccatccctcccccaagtcctcccacccactgcccttgtccctacccctagaggccagctgtttaccaaacccgaaagaaatcctatctgcctgagtcctgtcccttttctgcgctcattgracccagcctgcgatttcaaagttccagggtctgagtagatatcccaagacaggcggggccaggaagagcctaatcgtttatgtcataaagtcactgctcaaagccgcctccccaaacaaggtccctttctgccttctgtgtgctccttttcttataaaagtactctggttgtcatgggcaatcagtattctgcaagagtagggagcatctcttttggtcagagagtgaatgcaaactgccatgtctttactcagtatcaaagacatctgcctcaaacactggttcagaa

SEQ ID NO: 712201 - DNA, 608 bp, Homo sapiens
caaaaacaaaataaaaaaataaaaataaataaaaattaagtatgaaagtgaatattaatgtgaaaataaatcataaattgctggagtcttggagcttcagttcttccttctaggatttatttaggcaatttactagaaatgcttatgtaaaaatgtgtagttgttgcaacctggcttccacttgccacctagaacattctatggccctcagcaattaccagccctccctggggtatcacagtaaatctgactctgcatattaaatatcaatttgcttgtttgtttattgtcagtctgtatcaatggaatgtcttaagcttcttgagagcaaagatttaaccttctatgttgctttatgcccagtgcccacaacaggagtaggcayggggggcatatcatacatgcttctttaataaattgtatctgtccccgaaaatcaactgggaaaaaataatccttcctcctctcccattttagccactctgtattgtcatagctctgtgttattgtcttttagtactatcacttaaaaaattagcttactgcttacttttttttctttttaagatagggtctcctctgtcacccaggctggagttgtagtggca

SEQ ID NO: 712202 - DNA, 608 bp, Homo sapiens
caaaaacaaaataaaaaaataaaaataaataaaaattaagtatgaaagtgaatattaatgtgaaaataaatcataaattgctggagtcttggagcttcagttcttccttctaggatttatttaggcaatttactagaaatgcttatgtaaaaatgtgtagttgttgcaacctggcttccacttgccacctagaacattctatggccctcagcaattaccagccctccctggggtatcacagtaaatctgactctgcatattaaatatcaatttgcttgtttgtttattgtcagtctgtatcaatggaatgtcttaagcttcttgagagcaaagatttaaccttctatgttgctttatgcccagtgcccacaacaggagtaggcacggggggcatatyatacatgcttctttaataaattgtatctgtccccgaaaatcaactgggaaaaaataatccttcctcctctcccattttagccactctgtattgtcatagctctgtgttattgtcttttagtactatcacttaaaaaattagcttactgcttacttttttttctttttaagatagggtctcctctgtcacccaggctggagttgtagtggca

SEQ ID NO: 712203 - DNA, 1142 bp, Homo sapiens
tgccctctctctctctagctccctctcctcccctacagctgcaaagaagagatcttcttaatccatttcttaaacttcttttgatcaattataaagaatttttttttttagatggagtctcactctgtcacccargatggagtgcaatggcacaatctcagctcactgcaacctctgcctcccgggttcaagtgattctcctgcctcagcctcccaagtagctgggactacaggcatgtgccactacgcccggctacttttttttttttttgtatttttagtagagacggggtttcaccatgttagccaggatggtctcgatctcctgacctcatgatccgcccacctcagccttccaaagtgctgggactacaggcgtgtgccactacacccggctacttttgtgtgtgtgtgtgtgtgtgtttagtagagacggagtttcaccatgttagccaagatggtctcgatctccggaccttgtgatccacccgcctcagcctcccaaagtgctgggattacaggtgtaagccactgtgcccggccaattataaatattttttaaggctaaactctggaattttgctagttagccttaaaagcacaaagcaggcctataaagttcaattttactggtagaaagcaagaaatggatgaataggatgttcgctgacaaccatgcaattgaaacctcctttgcaaaaattacgagagtgagcaaacgatggcagtgaaggagatcggatctggccagcccctaccttgcctttggccctcaaactgcttgtagttattcctgggtttaggctaatctgacttgtctctttgggagacatttattttattttcttttatatttccttgagacggagtctcgctctgtagcccgggctggagtgcagtggtgagatctcggttcaccgcaacctctgcatcctagttcaagggattctcctgcctcagcctccagagtagctggaattacaggtgcctgccaccatgcccgattaatttttgtatttttagtagagacgaggtttcaccatgttggccaggctggtctgaaactcctgacctcaagagatccgcccgccttggcctcccaaagtgctgggattagaggaaagaaggaaaggaaggaaaag

SEQ ID NO: 712204 - DNA, 1288 bp, Homo sapiens
agatgagttcatgtcctttgcagggacatggatgaagctggaaaccatcattctcagcaaactaacacaggaacagaaatccaaacrctgcatgttctcactcataagtgggagttgagcaatgagaaaacatggacacagggaggggaacatcacacactggggccttttggggagttgggggctaggggagggataacattaggagaaatacctaatgttatttctcctaatattatttcagcctaatgatgggttgatgggtgcagcaaaccagcatggcccatgtatacctatgtaacaaacctgcatgttctacacatgtatcacagaacttaaagtatgtatatataaaaaaaatcaaagccaacagggaatacagctgaagaatgtgctgtaagaagacagagaaaacaaatagaacttggaactctgggagctttgttcatctgtatgtattgggagccaattaaatagtgagaacaaaagcaccagagagcacaaaagttgaaagattcaactataaagtgttgttttaggtgagcagggaaataatctgtttatttttaaattagtattttttctcttattgtcatactttggagaaatgtttttgtagtggctcctagaagcaaggtccttttatagacattggaatgtatctgtgatctagcaggggtgtggtgtggcctgagatcaagctaggagactgcttgtttcttctagattttcagtcattgttaggactgtgatgagaagctgttagggaaaacagtgtttaaacaaaaggcaggagacacaggctaggctgtgaactacaggtggtgggctcttttccctgtgtcccttcttctggctatgagcaccctggtctctggttttgtctctctagttaaaaacacaagtgtagtccaggtttttatggggctgacaagttgtaaacaaaaattacaaaatgttaagtgtcagtaaagaaatgaaagagagatgtttgataggacataagtttgggagagtacagtcttaggtaagacggccaagaaagatcgacctggagtgggtgacatttggtctgagacttgaatggcaagacaaagaatatctgcaaaggctctcaggtgggaatgaacttgaaattttctataagtaggaaaaaagtacaagtaagagcaaatggaaaggtgaggaagagattaaagtcattcaaaccgcagcatagctaactgactaactcccaactccttgcctttctccaatatccttggggttagagaaacaacagcctgca

SEQ ID NO: 712205 - DNA, 1288 bp, Homo sapiens
agatgagttcatgtcctttgcagggacatggatgaagctggaaaccatcattctcagcaaactaacacaggaacagaaatccaaacgctgcatgttctcactcataagtgggagttgagcaatgagaaaacatggacacagggaggggaacatcacacactggggccttttggggagttgggggctaggggagggataacattaggagaaatacctaatgttatttctcctaatattatttcagcctaatgatgggttgatgggtgcagcaaaccagcatggcccatgtatacctatgtaacaaacctgcatgttctacayatgtatcacagaacttaaagtatgtatatataaaaaaaatcaaagccaacagggaatacagctgaagaatgtgctgtaagaagacagagaaaacaaatagaacttggaactctgggagctttgttcatctgtatgtattgggagccaattaaatagtgagaacaaaagcaccagagagcacaaaagttgaaagattcaactataaagtgttgttttaggtgagcagggaaataatctgtttatttttaaattagtattttttctcttattgtcatactttggagaaatgtttttgtagtggctcctagaagcaaggtccttttatagacattggaatgtatctgtgatctagcaggggtgtggtgtggcctgagatcaagctaggagactgcttgtttcttctagattttcagtcattgttaggactgtgatgagaagctgttagggaaaacagtgtttaaacaaaaggcaggagacacaggctaggctgtgaactacaggtggtgggctcttttccctgtgtcccttcttctggctatgagcaccctggtctctggttttgtctctctagttaaaaacacaagtgtagtccaggtttttatggggctgacaagttgtaaacaaaaattacaaaatgttaagtgtcagtaaagaaatgaaagagagatgtttgataggacataagtttgggagagtacagtcttaggtaagacggccaagaaagatcgacctggagtgggtgacatttggtctgagacttgaatggcaagacaaagaatatctgcaaaggctctcaggtgggaatgaacttgaaattttctataagtaggaaaaaagtacaagtaagagcaaatggaaaggtgaggaagagattaaagtcattcaaaccgcagcatagctaactgactaactcccaactccttgcctttctccaatatccttggggttagagaaacaacagcctgca

SEQ ID NO: 712206 - DNA, 1258 bp, Homo sapiens
gtatcgaaaagaaacatccatggtttagctgtacttgaaagctaaattgctaaaaaagaatgtattgtataatcccagcttcgtcaaagacagaataaagacaaattcttacatgttatacacatgggtctgatacaatactcttttaatgggctaaacaggtgatatatgactaaatctctgatttaaaaattgagaaaataccaaagtgtccaactacttttaagatgttaatgtttaaaagcatagcatacttcagatgttttttacctctattactgcgagacgtcagtaatttattaagagtaataaagtatctgagatgggcagggtggctcctacctgtaattttggcactttgggaggtcaaggttggaggattgcttgagcctaggagtttgagaccagccagggcaaaaaagtgagaacctgtctctataaaaagaattattaaataaaaaatttaaaaagaataataaagtatctgttaagacaatacgggttcagatgaaagaaatgtgctcgggatactttattatatagatgctgtgtaatctctcagaaacaaaggttgaaatgcaaagcctttttgtatacccaaagtcttggatcatgctgtaccactttgacaaggtaagttcataccaaggatgtgatttatggtgaatatctgcgtttgttctggggtgagaagggctggagcctatgtgaatgattcccaataaaaaccctggatctcaaggctcaggtaagtttccctgtttggcaacacttcacacattgtcacacatcattgctggaagaattaagcatgtccccatgggactctgctgtgaggggacacctggaagcttgcacctggattcttctggmcttcacctcttgccctgaagtatttaatattatgagctaggagcagctcaggaagagtgtagcctcagcatgaacactgattgatccccaagttagtggtgggaatgagttaacttactacaaatctcacaacaggttctatcttgaagaaaaaactgaatggcacacctctaggactactacaattccaagatctaaaattccaggattatgatgattcctccttttcattccatagagagagaggaagagaagagagagaaagtgaatgagagagagaaaaagagagagagagaaaatcagtgtctcaatttgagcaccataggccaggtttgctaggaagctgtgttgtgagtgtccctgcttgcttcaacctgctccctcc

SEQ ID NO: 712207 - DNA, 804 bp, Homo sapiens
agggtggttggagtgagtgcccagcctcacaagtcctgtactgggctgctctgaaaaggtaccctaaagccaatcctggctccctgatgtctaaagaaggcatggataaaaccctacagtggcaaaaacatggcaaatacactgcactcctaattcatgataggcttctacttccatcactgcttttaatctttataagaaccccaagtgtgcaaggacggggccrctatccccattttagagatgaaggcactgagacgcaggcaggttaagtgacttgcccactgtctcacagcgaggcagaagccgggctattagaacccaggtctcctggcttttagttaaaaagcttttttccattacagcacaaccttgtggccttcagctttcagactccgattgaacagcagcatacgaattaactgaggttactatattatctcctaaaatgacggcttcccatttaaaaaaaaaaaaaaagaacagcaaaaattcaccaatggaacatgtgcaaaatgcattttcacaaggtcattgttactcagagctgttttaaaaaattattattctccagttgggcttttggtccatgatcccatggcatgtgcagctaaattgcaatttaaaaatttaaacaaacaatgtttcagaattgatttctggttaataggcctggtttgggaagatggtgggtttggaagatgtgtacgaaaaggaacagagaaactgactgaccaacacagttaaggaatttaaagatgttgatctggataagaataattcaaggaaatacagcagcagttg

SEQ ID NO: 712208 - DNA, 804 bp, Homo sapiens
agggtggttggagtgagtgcccagcctcacaagtcctgtactgggctgctctgaaaaggtaccctaaagccaatcctggctccctgatgtctaaagaaggcatggataaaaccctacagtggcaaaaacatggcaaatacactgcactcctaattcatgataggcttctacttccatcactgcttttaatctttataagaaccccaagtgtgcaaggacggggccgctatccccattttagagatgaaggcactgagacgcaggcaggttaagtgacttgcccactgtctcacagcgaggcagaagccgggctattagaacccaggtctcctggcttttagttaaaaagcttttttccattacagcacaaccttgtggccttcagctttcagactccgattgaacagcagcatacgaattaactgaggttactatattatctcctaaaatgacggcttcccatttaaaaaaaaaaaaaaagaacagcaaaaattcaccaatggaacatgtgcaaaatgcattttcacaaggtcattgttactcagagctgttttaaaaaattattattctccakttgggcttttggtccatgatcccatggcatgtgcagctaaattgcaatttaaaaatttaaacaaacaatgtttcagaattgatttctggttaataggcctggtttgggaagatggtgggtttggaagatgtgtacgaaaaggaacagagaaactgactgaccaacacagttaaggaatttaaagatgttgatctggataagaataattcaaggaaatacagcagcagttg

SEQ ID NO: 712209 - DNA, 804 bp, Homo sapiens
agggtggttggagtgagtgcccagcctcacaagtcctgtactgggctgctctgaaaaggtaccctaaagccaatcctggctccctgatgtctaaagaaggcatggataaaaccctacagtggcaaaaacatggcaaatacactgcactcctaattcatgataggcttctacttccatcactgcttttaatctttataagaaccccaagtgtgcaaggacggggccgctatccccattttagagatgaaggcactgagacgcaggcaggttaagtgacttgcccactgtctcacagcgaggcagaagccgggctattagaacccaggtctcctggcttttagttaaaaagcttttttccattacagcacaaccttgtggccttcagctttcagactccgattgaacagcagcatacgaattaactgaggttactatattatctcctaaaatgacggcttcccatttaaaaaaaaaaaaaaagaacagcaaaaattcaccaatggaacatgtgcaaaatgcattttcacaaggtcattgttactcagagctgttttaaaaaattattattctccagttgggcttttggtccatgatcccatggcatgtgcagctaaattgcaatttaaaaatttaaacaaacaatgtttcagaattgatttctkgttaataggcctggtttgggaagatggtgggtttggaagatgtgtacgaaaaggaacagagaaactgactgaccaacacagttaaggaatttaaagatgttgatctggataagaataattcaaggaaatacagcagcagttg

SEQ ID NO: 712210 - DNA, 1603 bp, Homo sapiens
ggacaaattcttaccttttgagactcataggacagtggatttctccatattggaggatgactatatatcctaacacagtaaagatatattagcatcatttgatgaacaagggaaaatgtttaacctgaaaagtagacaaaatactgttaaaaataggcattctatgtattcttcttcctctcttctgatttcaagcaagataatgacaaatccttaaattatttatcattgagggctgggttctctttttcttctgtatttagctctgttctgctcttagaaaagagtgagagagagagagagtgtgtgtgtgtgtggtgtatatgtgtgaaagagaaggagagaatttgatttggcattattgccaatcagttaaagaacacggacattcattattgaagctgagtgagaagcattctttcttgctttttttttttaaaaaaatctctgattcctcctagttcttcctgtgcctaatctcttgccttcctttgtcagttttacaaagcttatttattcaaagcagggaaaagggttgacctttctctcaatcctcccaattcctacttaagtcaaaccaatgcaagaaacacatggatgagctggcaagtgtggaaggaatgatgtgagcctaccaaatgaaaaaggcagagaccattttggagatcacagaactgttcccatgaaacaaggatcagataaactctactgattccctggatgatatttttcttactcaaaatgatgagcgtactttatcttgggatcctcaggcacacaagtgctcttattctttctaggctttctaaaacttttgcatccataagtacttatgttcatacattcccattttccattcaatcctgctaataaaacacatctttactggtatggctttagtggttcctattttttctttctctcattagaatgaaaggcttttagagatatgtctgatatttcaggggtctggctttggtaagcatcttctttatagtgtcttgggttgattggaagctgcatattaagcttatttgtgacctcaaaaagaaaaagaaaaataaggctcaggattgccttaaaatatccatttagaacaatagtcctggcaattgtggctctacacctgttcaggaagtgctgaaawctagagagatcatcccacacttgaaagtgcctttgcaaaattataactgaggaaattatgacagtgaaagaaatcagatctaaccaactctatcttgcttctaacccttaagctgtctttgtccattcctgggcataggctgaactaactctgggaaggaacgcagctcatgttttgactctgaaacaaaactgataatagacctttcccgaaaagacccccttcttgcctggggtccagtttgcgtttgtcagactaacaaattagctaccaaattagaaattacaatttcagggtcatgcagcctctggctccaagagtctggacctccccaaattgttcctggggataacatcactatcgtaaaacttattatcagtgcttgagacattttgcaaaccctgcagctgacaccagtaatctggctcaactaattcttccatcctacccaggaaa

SEQ ID NO: 712211 - DNA, 1507 bp, Homo sapiens
gttagctaaattccatagccctatttacatgtggaacacactacaggagagttgaggtaagagacatgtttaataattcaagtacatcagttactaaatgacatgctcttaactgctgtataccatagttatgcaaaatatctcaaaatgtgtgcctttgaagagtgaaccccattcacttctcaaaataattttgtctgatgcagaagagctggttcagatatgcattagagacgtgatattaagaattcctctaatatgactgtttatgataatagaagataactacaatgcattttaaagcagtaaagaaaccagtaatatatttcttcaggtattaataaggatgacccactttgctaaaattgaaatgcagaagtgcattttagatataaaataatgtgaatgttttaaagagaatggtatcacattttggaaatttagaattcagaagaaaaaaaaaatattcctagcatcaaaattctaccttttgaaacagaccagcagagtggcattaagtatctctacagggtattacagtgatctaaaacattcaattggcagttaatttgtatatgaggaatttctttaaagtggcaataatttttggaaattttgcttttaagctaatatattctattcacatgacagtgatcacagacttgcttttaccagaacaagktgtaccaagagttgtggccatcggactttggagagtgctttagacatgagagacagtgatgtgttggagacttcacttccagtcaagagcatgggttgttactcccactgttacttgcttgtttcaggaaagtagcataagcactttttgtatcagtttccctgtttgattcaacagagaataatatgtgtcctgttgatatcaagattgttataagtaataaatgaggcaatgtatgtaaaatccatgggatatttcactttgatcggtaaacatagtttatcaagacaaaatctagctctcatctgcatatactccatgccaacccaatttctctgattgttgttataaaaagcaaatgaagaaaagtttttaaaattattatatgaagctacaattagaagctattattttatgaagactcactggcagtagtgggggatagtttaatggagggactgtttgctttcttggatgaaccattttctcactcctggagccattatgtgtgttgagcagttggttcatgtgatgttttatgctgaaatagcaaattagtatttgtattggtctctacagataaaacgtattctaaccccattaatgggattattcccactgatggatttgtgttctaaatattatgaatttatcttctgtgtctggacactagtgatttggaacaaataacaatattatgagtgcaagagtctatgcttactctgaagatggctggcagagagggacagaaaaaaatcctcttaatttgtacagtggattggaaatgaaacttgacctctattatgtctcactttcttcactttt

SEQ ID NO: 712212 - DNA, 1917 bp, Homo sapiens
actcattcttgccaccgggtcatgtttacccttccattgtcaaggaaaatgacctgtttgcttaacctgaggtccctgggttaagcctgttagtaaaagatgcctacttgaagatcagaaatatgtgagaattgttagtcttgggtgtcttaaaagattcctgccttcaagtctctataagttttcaatggcattgagaaatttaaacttaggaaagtgtaactatttattcaagctgacaaacatgtattctttataatagggctgcaaacaaacctttatttcatggttttatttcattggctttaagacagaattggttacatacttgtactcttaaaaccacagtcctattgttgttttcagccaacacagatgtcacctgtgcaaattgcccaactttttccttaccttttcattaacttgtttttttacctgctattaaggagaaggcaacagagccgagtggttgagaattcaagttctggagacagactgactgaaatcacagcccgacagggcggtgttaggcaagctctttaatctctctgtactgcggttgcttcatttgtaatgatagtaatattttatcttacagggtcttcagaagaacaaatgacattataaacataaatgacttaaaacagtgcttgggctgggcacggtggctcatgcccataatcccagcattttgggaggtggtattgggaggatcatttgaggcctggagttcaagaccggcctgagcaatagtgagatctcacctttacaaaaaatttttaaaaattttaaaaattaggccaggtgcagtggcttacacctgtaaccttagcattttgggaggctgaggtgggagaataacttgaagcaagagttccaaaccaggctgggcaaccaagtgagagcccatctctacagctttttggttttttttttttgttttcttgagacagagtcttactctgtcacccaggctgtagtgcagtggcacaatctaggctcactgcaacctccacctcctgggttcaagcaattcttctgtctcagcctctccggtagctgggactgcaggtgcatgccaccatgcccagccaatttttgtatttttttaaagtagagatggcattttactatattggtcagagtggtctcgaactcctgacctcaggtgatccaccttactcagcctcccaaagtgctgggattacaggcgtaagccaccgtgcccgccctacaatttttttttttttaattagctagacatgtggtgtgtggctgtaatcccagctactcaggaggctgaggagggaggattccttgagtccaggagttcaaggctgcagtgagckatgatcatgctactgcactctagcctgggagacagagtgagaccctgtctcaaaaacaaacaaacaaacaaacaaacaaacagcaaacggtgcttggcacatactgaagaaacaagcactaacttcaactatatgtgtatatgtctttataccagagagagtggggattttgaaagtctctgtaacagtggtaggctaatgtgtagccatctcatgttaatttctgcccttctcccttactctctttttctgataaccaacttcattttttgtaagaactgtctctggtaagcctgccaaccccagcatcctgggaacaggggagttcaccagccaatgaagtcattcccctggattttactgacatatgataatgataatgacaatgagggtaataactaaaatagtaaacctggcccagttctaagcagttttcatatattaactcatttaaccatcatgacaacaccagggggtagatgctatgattatctccattttatagatgaggttcaaagagattcagcagcttgctcaaaatcacgcatctggtcaagtagaaatgtta

SEQ ID NO: 712213 - DNA, 1767 bp, Homo sapiens
gtgtgcctataatcccagctacacggaaggctgagacaggagaactgcttggacccaggaggtggaggatgcagtgagccaagatcacaccactgcactccagcctgggcgacagagcaagactccgtctaaaataaaataaaataataaaataaaataaaataaataaaataacaaaaatatacgtactatatatgctctcacaaaatcatgcattaactttttctatttttatttgtattttctaaatttgtcttcaatgaacatatgcaaattttaaaaaggttttaattttgtatgagagaaaaattttaaaatagtgtatgcataatgaatactacactaaatatctaatctagtcatcattcagaactaacaatgtcaacactttgtcatatttgctttggattatttgatgaaaataaataatgtatgtattacttctccattattcaaatattacatgttcattgcagaaaaaatgaatatatagaaaattaagaaaaaaattaaaagaaaaaatctactttaaccaaacctctcatgggcaactactgttttcatcttgacaagtaactcaacttttatctatatataatccacatattaaaaaataaaagcaaaaatttagtactgtttcataacttagttttaaattttattttattttgracatttttctgctttgatactaagtaaaaaataaaatccttaaaataaaaaaaatgtgatttttagcatctagatccatacagtccaatatgatagtcacttgccacatgtagctactaagcacttgaaatgtggcttgtctgaattgagatgtgctgtgtcatatgctctggatttcaaagacttgataccaaaaaaaatgcacaaatctcattaataatttttgtattgattacatgatgaaagatcattttaatatattttgtattataatatattggtattatattaatgcatattaatattatgatacattaatatatagtattattaaaattattgaaattaatttcattctgtctgtttctctgtttctcgttactttgtttaatgtagctgctataacactgaaaattatatatggccccccttctatttctcttggacagtgtcccgctcatatacattcatggcaccttcagttctgcttcttctcttcagttcctcttcagcagtaaaaaataatgtggaaagaataaccccatttcctgattccaggtctgcctaggtcacctccaccctgaggtgcagtatgtgcatgtgtggctgacctagaaaactctgggtctgaaaccttccaaagggtctagcaaacgtacagaaagctttccggtgtcctgagctcctcacttgttttctccttagaggctttaagctccctgaggataagaccttgtccagcttccttccaggacccataaaaacatgtcatacttttaaggcccccaatagagattgggtcagttcatcttcagagtaagtaaagagttaaaaacacagactgaaaactcctcaaggggttttgttatttcattaggcctcacttgaggccatagcacaccagaatcaatccttcctgctccatgtctccaccagggcagacaatattagtgtgagacatggaatatcagcttacaattgtgtaacatatggggtcttactgcctatttctggctactccctctgcccaggaatgaaattgaagtgaaggctgtgtcaaaacctggggaagcccagagctcatgatcccaccct

SEQ ID NO: 712214 - DNA, 949 bp, Homo sapiens
tggcaagtaagtattaaaataatttaataatctgtattattttagctattatttaacaatagttaacatattartggctctttttttatttactttagcatttatttttataacatttttatatgtaatattattatatactacatataagtatatatcgtaagtataatatatatgtgagtaggtatatacatagtgttttcaaattgccatatttatgttcttattgattgaagctgaatcaactattgcgcatgtccataagctttcagaatctgtttgttgataaaatactacacatgaagctttaatcatcttgcactgatgttaccaataagttacagttacatatttatgaagttatgttgacatacgtaattgtggttgtgtctgcatcctcacgataaaacctacgttctgtcattgaaaattaggccatgagtgaagtctgggagctcagggagagccaaggcagctagagctctgcagagcacgtgccttcttgctctcagctgcctgctggttacctttacctgtacctgccctagcaaactctcctaagtggagaatgaggcctgggtctcttgacaattaaagctttgctctgttcttggactaaatccagacataaccacgtcaggctcctcatctgctgggaagcagattgcactggatttcacagtcacggaaaacttttgactgtgtgtacctccagcaatgagaagcagagagggctaggttgacggtctcaaactggcaccggggagccccgtgactgggttttaagggtgtgtgaatgaagattaaaatcttgtttgatattaacatgggttcagtttttttttttaatgtcactaagccatgctgtagagcccttctggaaggacttaggtgggacaaagagccagagtccacaacttctgtattgttcacagggccctagtgcatc

SEQ ID NO: 712215 - DNA, 1535 bp, Homo sapiens
tgagataccgccactccctatcttaataaaaaaatttaaaaaaatcaactgtgtgtggtgatgcatgcctgtggtcccagctatttgggaggctgaagggggaggatcatttgagtccaggagtctgaggctgcagtgagccatgtttgtgccactgcattccagtttgggtgacagagcaagaccctcaaaacaaaacaaaacctctctgcwaattccttccctctagctactctgaaaacacacttgatgagaatgtcaggattccattcagaattatcccagacaaatgactcctttttttttttttgagacagagtctcactctgtcacccaggctggagtgcgatggcgcgatctcggctcactgcaacctccgcctcccgaggtcaagcgattctcctgcctcaggctcccaagtagctgggattacaggcaccctcctccgcgcatggctaatttttgtatttttagtagagagcgtttcaccatgctggccaggctggtcttgaactcctgacctcgtgatccacctgccttggcctcccaaagtgctgggattacagatgtagccaccgtgcccagccctttttttttttttttttttttttgtgagacagggtctcactctgtcacccaggctggagagcagtggtgctatcttggtttgctgcaacttccaccttccatgctcaagcgtttttcatacctcagcttcccaggtagctgggaccacaggcatgcgccaccatacctggctgatttttgtattttttgtagagacggggttttgcgatgttgcccagtatggtctcaaactcctgagctcaagtgatctgcctgcctcagcctcctaaagtgctgggattacaggtgtgagccattgcacctggccacgaatgactttttacagtttttgttatttcccccagatgctgccatgaaagcaggcccacctttccttactggagaatattttgtgaatttgatttagaaagtaagtgaccatgctgaacagtttgagacccagaaggctggcttacaggttttgtattaaaggaaacactgattgagaagatgcaaaagagacaggctcttcctccctgagatcagcccaaacttaagcctgggctttggagtaaagaaagcttctgtcctcttcttactccctgaactctcctgtcccagtatggctgctggaaataaagtcactttaagtaaaaataatgctggtgtttagttcaatttcctttcttctttttcccaccaacacacaggatggaatttaaatctgtatagttagcagagatgaaattgctgtctcagctccagaataaactccgggatcagcaagggaattctcttctcctgtctgaacttgtcctatttaaccatgaaaagcagactaaatcagaggcagctgagttgatttagggagcagtagatgtaaaatgagtttttcagatcgtcttttttttttttttttctgagatggggtctcactctgttgcccatgctggagtacagtgacacca

SEQ ID NO: 712216 - DNA, 1535 bp, Homo sapiens
tgagataccgccactccctatcttaataaaaaaatttaaaaaaatcaactgtgtgtggtgatgcatgcctgtggtcccagctatttgggaggctgaagggggaggatcatttgagtccaggagtctgaggctgcagtgagccatgtttgtgccactgcattccagtttgggtgacagagcaagaccctcaaaacaaaacaaaacctctctgcaaattccttccctctagctactctgaaaacacacttgatgagaatgtcaggattccattcagaattatcccagacaaatgactcctttttttttttttgagacagagtctcactctgtcacccaggctggagtgcgatggcgcgatctcggctcactgcaacctccgcctcccgaggtcaagcgattctcctgcctcaggctcccaagtagctgggattacaggcaccctcctccgcgcatggctaatttttgtatttttagtagagagcgtttcaccatgctggccaggctggtcttgaactcctgacctcgtgatccacctgccttggcctcccaaagtgctgggattacagatgtagccaccgtgcccagccctttttttttttttttttttttttgtgagacagggtctcactctgtcacccaggctggagagcagtggtgctatcttggtttgctgcaacttccaccttccatgctcaagcgtttttcatacctcagcttcccaggtagctgggaccacaggcatgcgccaccatacctggctgatttttgtattttttgtagagacggggttttgcgatgttgcccagtatggtctcaaactcctgagctcaagtgatctgcctgcctcagcctcctaaagtgctgggattacaggtgtgagccattgcacctggccacgaatgactttttacagtttttgttatttcccccagatgctgccatgaaagcaggcccacctttccttactggagaatattttgtgaatttgatttagaaagtaagtgaccatgctgaacagtttgagacccagaaggctggcttacagsttttgtattaaaggaaacactgattgagaagatgcaaaagagacaggctcttcctccctgagatcagcccaaacttaagcctgggctttggagtaaagaaagcttctgtcctcttcttactccctgaactctcctgtcccagtatggctgctggaaataaagtcactttaagtaaaaataatgctggtgtttagttcaatttcctttcttctttttcccaccaacacacaggatggaatttaaatctgtatagttagcagagatgaaattgctgtctcagctccagaataaactccgggatcagcaagggaattctcttctcctgtctgaacttgtcctatttaaccatgaaaagcagactaaatcagaggcagctgagttgatttagggagcagtagatgtaaaatgagtttttcagatcgtcttttttttttttttttctgagatggggtctcactctgttgcccatgctggagtacagtgacacca

SEQ ID NO: 712217 - DNA, 624 bp, Homo sapiens
tttgatagccacatatgtgtgatgttatagaagatctttgtattaaaagagaaaagttaaawtgcattatttctatgggatattttcctactttaatattttatatttttattcttttgaagaaaatgatgacaaaaaaagcctatcttttaccattaaagttagtcctttctggacaatgactattgtattattattattccccaatgttaatgaattgctatatatgctataagaagaagtactcaatgagttctggattctggccctagcaaacccaatgaaaaagccaccatggtaatgagttttctgtccctgtaggcagacaagtatgtcctttccaattgttccagtcaatgaaggtatttttaatataacctcttttttcaaacacattaacttttaccctaaactttgtccatctacacattcaataacatgccttctgtatcctcaccaaatcacttacagaaatgttaaacaggaacagacacaacacattcctgccggctttccatccaaccactaatcagtgttattgtggaaccaggaatgaaacttgccaactatagtgttatacatacaattttaaaaatcttatttatatagatattgtgaaaaatt

SEQ ID NO: 712218 - DNA, 2127 bp, Homo sapiens
tatgcatcaaaatctactttggagaacgaattaaaaatggttcacaagttatgtttaatcactattataatttgaagcgcaaagacgaattattaagagtagaagaagaaaaacatttatgtatgctcaaggaaaatcttcattattgtctttaaagatttaaaagaaaaaagttcaattagataagaaatttaccctcattatcataagaaatttcagcatgacacattgctgaaagaaaaggaagaactgctaaatttgaagaatgaccaaactcttgaataacaatttaaagaaacagaaatatctaaattctggttaaagctgagaaaggtatttctttcaattggagaaaaagcagtgaacactcttctgcagcttactaccacctgctggtgcaacaaaatttcttattaacaagaaagcaacaatatttgtgccgtctgcttttcagacgtgagctttttccaaatctctagagaagactaagatgggtgaccttgagagaaagtctctggaatcttagagcaagctctgggtctgatatcacaattcttagaatagcttatttagctgctcccaacaaatcagtatttaaaggcataaatattgttgcttctgtcttaatgaaccttataaagaagaaatacagccaccagagcaaataacaaatcctcatcaattcactcccactgaggatctatccatctgaaacaaatgcccatatgcaaacttgaatactccaactagagagagtaaaactgaattcaacctttgtaataagaggattggcaatgagcctttacaaactcaagtccacctcttttgttatttgacctaaagagccatcagattgtcttcattataatgatgcacatttgtatgtatgagagctgtaatttattgattctcaaacctcttttcctctgagccagtttaaaacaattaggatttgcaagctgttccataaaagataagcacccagcatcaggggtgatatttcacaaagactgactagtgcatgttaagtaggtgattgcttctgtggcctccaagtgcctcagctgtccctgcccaaggtaatcatcctcaaagaagatgctcaaggtaattgtgttgatacttaggggggtaagggaaaattgggagtgtactttacacttaatcattaacaaaattcaaattttatgtatttctcactgtttctgatatggttaggctttgcgtccccacacaaatctcatcttaaattgtaatccccataatccccatgcatttagtgagagacctgatgggaggtgacaggatcatggaggcagtttcctccatgctgttctcatgatagtgagttctcacaagatctgatggttttataaggggctcttccctcttcgctcctcactcttctctctcctgccaccatatgagaaggtccaagcttgcttccccttcaccttccaccatgattgtaagtttcctgaggtctccccagtcatgcggaactgtgagtcaattaaacctctttgtttataaattacccaatctcatgtcatatctttatagcagtatgaaaatgaactaagagtttcaatagctgtaggacttgagagctttgccttatccttctagtgaaaaagttaataagccaggagacattaccatgcagaaacaattaacaattgtacctgtcttctttacatcagtgctcttctgtaacttcatctcctcaaagtcttttggtaaatttataaaagatcaaaatcaactgtccagtccaccagtcagttctgttatgttagtgaacataatacattaggaaacagaatcagatacttaaattgatttttcatcatttaatgagttgtcactacattagaaatgaaagatsaaagtaaataaataagtcatagtcttgatgggagagaaggacatttaagtgtattataaacggtgagctaagtaatacaacaaaatccttggggagtcaggttaggatttttccactcatcttgaaggatgcacataagtttgacaggtggatgagacaaggaaataggatccacttaaaacctgtctagagaaaagtagacaggatccaaataagctgagctcttgcatccttctacc

SEQ ID NO: 712219 - DNA, 959 bp, Homo sapiens
taaaaatacaaaaaattagccgggcgtggtggtgggcacctgtggtcccagctactcggaaggctgaggcaggagaatggcgtgaacccaggaggtggagcttgcagtgagccaagactgtgccactgtactccagcctgtgcgacagagcaagattccgtctcaaaaaaaaaaaaaatccaattccccgaccaaatctcaggatgaggtttgcctaagaagtcgyataccctcactcagttgccatacaacctgggaggctctgaggttggacaatttcctgagggcagagccacggtgacaacattcctttttcaccaaattactaaaatacaggttatggtccaacatcttccatgaatatgggcccagctttacttaactaacaaaagaggccgatttttttctatacacttttgggaactgcaaagctagaggaggagaataaaatttatttatctccaaggaatgttctgagttagaaacactgtgaaatgatgtgacttgaaacaaatctaaaatggtgttctccatgtccaccctctcgccccaatccatagaggctactaagtccttttattttgctaaacagaaaagatgcagcaatcagaatacctaaaatttttaaatttttctccccactatagttgatcagttgatattttagcattccctagtggttaaaaaaaaaaagtctcttctgcaatatgactgtcagaaaatatgaaacctcctactgtgcaaattttaaaacattctaagcttgctaaacatttaccacatttactcatacatctcattcacctaaaccttgatttttcttagatataaaatgaagggataataaaaaataaagctaaaaaggacctcaaaatactttccagttctaaaatttaagaattctataattatcttctttcctacctactacagttgtatagatttaaatcaattatcaa

SEQ ID NO: 712220 - DNA, 1026 bp, Homo sapiens
ttaagatttccaagcagaatttaataccaatctggcagttggataaagaatgcgctgtggggagataggagtgaacagaaaacaaagaaaatccaattggtgatcaaaatagctctgacccaagacaacagaaatggaaacataaatattgccaagaatgaaaaaaaaaaaagctaagaacaaccaagaaaaagytaagctgtgctactattaggtgggtatataaactgaatttctaaaaatgcttaaaattcaaaactggacaaaaccaatttgttaaaacataccactaaccttatttataaatgattcctagcattaaggaatagtctcttttctggttttgtaacagtatcctcagcactgcagcctgcatcaacactgctcagcttcttcttgcctccaccaagccatcgccacccaccacctccctctaatgtcacaatatgtcaactataggtagaaaccaagaactaaaggaaatggctgctcttccaaaggagacaatgtcagtaataaggatgaaatatcagaagatgaagatggccaatagagagaaggttactatccttcagaaaaaagacaagatgtctgccaaaatttcaagaaaggaggtttagcaggttttccctcctaaaaagactgcagtgtccaagaaagcaaaatgaaagcccacacttccaagcaaccagtcatagatagccacagcaggcaagcagggagccatgacaactaaggggcataaccaggaaagccatcgcaatcagaagtcataagctgccaatgaagatggcgaggaagatcaagatgggatggatctgaaccaggagtggtgaaagcagcagctgatgcagcttcagatggcctggaatatgagaacagaaatgccaactagaatataaacagagacaatgaagaaggctctaaagaaaggaaagttctctaaaacttctcagcaaaaagtaaagacaggtattaagacgtgggtaaggctgaaaaagacaatgataagagactaaagaaaac

SEQ ID NO: 712221 - DNA, 962 bp, Homo sapiens
ttgttgagtaccaattgtgtgcaaccaccatgtgtaatccttggagaaggaatatcaaaatgaactattcacagattcccactgcatagaacttaacaacacaacaaaagagataagccatgtaattggataactgtgacataggataaacagtgtcaagtgctgtagtagagatccagataagacactatagaagttctgaggaggaggaagttaattccaactgggaatatcagacagaggcttcctgcaggtgatggcattcatatgaaagtttgttgtgtttgttcctttcgatttatatcttgtccagttctttatgtgttttatttaagaaatgcagacaagacaagagaagcagtggtctacagtttctccargtttctttggttggcaaggagccctgacaggcaggcacccgtctgtgtgtccatggaagcccagtgtggcccccgtcttgctttaaaagcccttgcaggaccctcaaaggctgtagttataacttttgaagtaacatactttccataagtactaaaaatattttacttgcctttgaatcctggagtgtgtcaataagttcttcattgtccagaatatttccttcagaggtaaagagcattctcaggattttctcttcgatagttttcaactggtttttatcagtgttgatcctcacgatgagcttaattctttgttcttccaacctgggtttttcaagtcgcaccacatcactaaaaccaaagttcagatatctaaattatgtctctgccagtgcctcaaagttgcttctatttttctttctctgtttgtaatcgttcttattctgaatactattcagctgagcattaatgctgatggccatatctgaatgcacaccatgtctcttttgctgggtttacacaatagcttctgactcaactacatgtcaattctgatcttttatcttgtattttagagatgca

SEQ ID NO: 712222 - DNA, 962 bp, Homo sapiens
ttgttgagtaccaattgtgtgcaaccaccatgtgtaatccttggagaaggaatatcaaaatgaactattcacagattcccactgcatagaacttaacaacacaacaaaagagataagccatgtaattggataactgtgacataggataaacagtgtcaagtgctgtagtagagatccagataagacactatagaagttctgaggaggaggaagttaattccaactgggaatatcagacagaggcttcctgcaggtgatggcattcatatgaaagtttgttgtgtttgttcctttcgatttatatcttgtccagttctttatgtgttttatttaagaaatgcagacaagacaagagaagcagtggtctacagtttctccaggtttctttggttggcaaggagccctgacaggcaggcacccgtctgtgtgtccatggaagcccagtgtggcccccgtcttgctttaaaagcccttgcaggaccctcaaaggctgtagttataacttttgaagtaacatactttccataagtactaaaaatattttacttgcctttgaatcctggagtgtgtcaataagttcttcattgtcyagaatatttccttcagaggtaaagagcattctcaggattttctcttcgatagttttcaactggtttttatcagtgttgatcctcacgatgagcttaattctttgttcttccaacctgggtttttcaagtcgcaccacatcactaaaaccaaagttcagatatctaaattatgtctctgccagtgcctcaaagttgcttctatttttctttctctgtttgtaatcgttcttattctgaatactattcagctgagcattaatgctgatggccatatctgaatgcacaccatgtctcttttgctgggtttacacaatagcttctgactcaactacatgtcaattctgatcttttatcttgtattttagagatgca

SEQ ID NO: 712223 - DNA, 1508 bp, Homo sapiens
tatgttaacttagaatcctgaaaagttattttcacagtgtggcaaatgtttctgcaatacttcatgaatattactcagtttactttctgaatgtcttcatgatttctaatgcttgctttaagtgatatttatccagagatgagctaaggttaattgcctgatcttcagttgtagtgtcaatggcttgtctgaaaattcatctaaagttataggctctaaaagttgaaataattccttggtctgtccactgactgacttaataaagttgcatttggtgataaaatacaatttttacatcataaccttaagaaattcagggtgacctggagcattatccagccataatagttcgttaaaagttaaattattttggcaacagtatctctctactgcttagaaaaagaagggtgtatatgattcaaggagtcacagtgctagaaaaatatacttaatcatactcacccttcaactgtggcatcacaaactaccaaagagtgatagcttttatactttgataaaaataaattccacacagtcttattaaacatataataaaataaaataatcttccatatggcagtggaatagaacttagcttagattacccaggtcaagttctcagaaatgtttgcatttcaagaattccatgggatttccagtgtgtaaagtagaaatggtgggataagctctccttcctggacaaagatcaggtagacttaatgtcccttataaaacattggcgttccctaagcccaaaattcctcttctctagcccaacccatggcatgtgcaagcatcacttggccctctgccttactttttaggatttgggactgaaggaaccagtgtgaatgctggcactctggcttctgcaatttctgtgaataataataataatgtcctgtgtatctgaccccaaagtcttatgtcttgtaccagtatacatgaacctgtgggaaatcaacctctcagcttccaagtaaggcaaaatttcagacccttcacatttcttgccacaagaaactcattatttttctagtcaccaaaacatattttgtgaatgcataaaccagccccaggtcaaaacctgtagaagagaaatcatttcagatgtgtgctatgccttgatggcagaatgctacaaactccaaagtcttacacattttcagggaagtggtaaagcatcacacttgcaatcaaaggtaccagatttttttwaaaaaaagctattttatctatgcacatagtttaacttcccctggaaatctttcttcttcatttataatatgtggaaagttataataactacctcagagctgttatgaatatatgaggtaatgcataaaaggaactagcccaatacaggatatatgagaaacactcaacaaatattttatattactttagagttacttaggatacctcattaaataactcaaagtctagaatggaattttgtagaccctcatattgaacacccccatgggattgtgatttgaatattttcg

SEQ ID NO: 712224 - DNA, 2567 bp, Homo sapiens
caagacccacctggggaaaaatataaatagtgttctctggttctgagtgaagtctgtaaatgtagtcagggtgcaagacagctctgttcttccccacacccgccttttttttttttttttttttttggagatggagtttcactcttgttgcccagattggagtgcagtggcgtgatctcggctcactgcaacgtctgcctcccgggttcaagagattctcctgtctcagcctcccgagttgctgggattaaaggcacatgccaccacgcccggctaatttttgtatttttagtagagacggggtttcatcatattggtcaggctcgtcttgaactcctgacctcaggtgatccgcccacctcggcctcccaaagtgctgggattacaggcgtgagccaccgcgtccggccgacagctctgttctttaaggatcaaatgatatatgtgtgtgtatgtatgtatgtatatatattttttcttttttttttttgagacagggtctcactctgtcacccaggctggagttcagtggtgcaagcacagctcactgcagcctcaacttcctgggctcaagcaatcctcccagctcagccttctaagtactacaggctcaaaccgccacatccagctgattttgttcattttttgtagagacggagatctcactatgttgctcaggctggtctccaacccctgggctcaagtgattctcccaaaatgctgtgattacaggcataagccaccacacccagcctaaatttgtatcttttaaacaacttcgtgggttttttaaaacaactttgtggttttggatggcaaattcaagaatacaaagcctcggacctgggtgtcagaggcagagtagcccttgcctttcggtcacactgacccatgcacagcatacctccagagatagcccatgccccccagggggcggtgggaaatggtttgaaacctcttcccctccccaccctgctccattctgtaacttcctcccaggaaggcaggcccctccccactcaaatccctgtccagggtccagggtccagagaagggagtggcccaggcagagaaccccagtgagtgcccaccacatgccaggcactgactgccaccccttcgactctaacctagcacccagcacatggagctacactcatcgcctgtgccttygtgcggcatatggtgagtgcctgctgggagctaggtgctggagaggactttaagtcagactttgtccacgacaccaaggcttgaagacaggtataacccctgaggccacctcccctcctcacaggtcgcattgtagcactttctcaccctagttgtccactttgcctctgctgctctgccagtctgcaggggcagaaggatgcccgtgcccaggaagaatgctgaagccaggtgcatggcccctgcagtggtggaagctcccccagtagcgagcggccatttgactaggctgaatcgagttgacttcacaaccgaggtctgatcactgactacaccatctccttgttgggaaaaacaaacaaacaaaaaaacccccacaaaccactgctattttaaattgtgatcaaaatgaagatactaaaagccctgggggctgggttctgagaatcccccacgagtcccccgaggaccttgcacccaggtcctccatgcagccctgcagttgcagcctggtctgtttctgctccaccggccccgccccacacctgcccgggtctcaggcttgctgaaagaatccctggatccgatttccacctgggtactaggtatagacccagctctaccaccccctagccgtatgcttgttggagagacatttaacctttctggatttcactgttttcatctataaaatgaaggaattgagagggaggatctccacaatgctgtccctgatccataggcaacagtgtttttcaaagccaccagggttgagaagtgctggtccatggttgcttttccgagctcaggattgaaagagtcctttggctaaagagctgaagaagaaagaggatgctctcaccctattcagcttttggttcttcccagtctgctacaagaccagggaaaatgtgagttactcctccagccacaactacagcaggcaggtggagggtgggggatgacatgtggcacagcactttgctggactttagtgtttggggataatggactcctgagatttctcccacgccatccggctgggatgactatggctcctttctcagggatgccccgcctttccctcctgctcacagggaaactgccggcagctccacactggcctggcttttgaatctatgtgccatatgattttttttttctttcacgaaaggcccctgcttgccaaaaaggaggtttttcagaccactgacctatgtaaggggcaagctccctgggtacttcactgccaagaacaaaaaacatccatcccccttataaactccccagggcagtgcagtctaagcccctgagcatggcattcaaggccttcggcgatctggccccgctcccccttctgtggcaactgctaccactccatacttgacttttca

SEQ ID NO: 712225 - DNA, 2567 bp, Homo sapiens
caagacccacctggggaaaaatataaatagtgttctctggttctgagtgaagtctgtaaatgtagtcagggtgcaagacagctctgttcttccccacacccgccttttttttttttttttttttttggagatggagtttcactcttgttgcccagattggagtgcagtggcgtgatctcggctcactgcaacgtctgcctcccgggttcaagagattctcctgtctcagcctcccgagttgctgggattaaaggcacatgccaccacgcccggctaatttttgtatttttagtagagacggggtttcatcatattggtcaggctcgtcttgaactcctgacctcaggtgatccgcccacctcggcctcccaaagtgctgggattacaggcgtgagccaccgcgtccggccgacagctctgttctttaaggatcaaatgatatatgtgtgtgtatgtatgtatgtatatatattttttcttttttttttttgagacagggtctcactctgtcacccaggctggagttcagtggtgcaagcacagctcactgcagcctcaacttcctgggctcaagcaatcctcccagctcagccttctaagtactacaggctcaaaccgccacatccagctgattttgttcattttttgtagagacggagatctcactatgttgctcaggctggtctccaacccctgggctcaagtgattctcccaaaatgctgtgattacaggcataagccaccacacccagcctaaatttgtatcttttaaacaacttcgtgggttttttaaaacaactttgtggttttggatggcaaattcaagaatacaaagcctcggacctgggtgtcagaggcagagtagcccttgcctttcggtcacactgacccatgcacagcatacctccagagatagcccatgccccccagggggcggtgggaaatggtttgaaacctcttcccctccccaccctgctccattctgtaacttcctcccaggaaggcaggcccctccccactcaaatccctgtccagggtccagggtccagagaagggagtggcccaggcagagaaccccagtgagtgcccaccacatgccaggcactgactgccaccccttcgactctaacctagcacccagcacatggagctacactcatcgcctgtgcctttgtgcggcatatggtgagtgcctgctgggagctaggtgctggagaggactttaagtcagactttgtccacgacaccaaggcttgaagacaggtataacccctgaggccacctcccctcctcacaggtcgcattgtagcactttctcaccctagttgtccactttgcctctgctgctctgccagtctgcaggggcagaaggatgcccgtgcccaggaagaatgctgaagccaggtgcatggcccctgcagtggtggaagctcccccagtagcgagcggccatttgactaggctgaatcgagttgacttcacaaccgaggtctgatcactgactacaccatctccttgttgggaaaaacaaacaaacaaaaaaacccccacaaaccactgctattttaaattgtgatcaaaatgaagatactaaaagccctgggggctgggttctgagaatcccccacgagtcccccgaggaccttgcacccaggtcctccatgcagccctgcagttgcagcctggtctgtttctgctccaccggccccgccccacacctgcccgggtctcaggcttgctgaaagaatccctggatccgatttccacctgggtactaggtatagacccagctctaccaccccctagccgtatgcttgttggagagacatttaacctttctggatttcactgttttcatctataaaatgaaggaattgagagggaggatctccacaatgctgtccctgatccataggcaacagtgtttttcaaagccaccagggttgagaagtgctggtccatggttgcttttccgagctcaggattgaaagagtcctttggctaaagagctgaagaagaaagaggatgctctcaccctattcagcttttggttcttcccagtctgctacaagaccagggaaaatgtgagttactcctccagccacaactacagcaggcaggtggagggtgggggatgacatgtggcacagcactttgctggactttagtgtttggggataatggactcctgagatttctcccacgccatccggctgggatgactatggctcctttctcagggatgccccgcctttccctcctgctcacagggaaactgccggcagctccacactggcctggcttttgaatctatgtgccatakgattttttttttctttcacgaaaggcccctgcttgccaaaaaggaggtttttcagaccactgacctatgtaaggggcaagctccctgggtacttcactgccaagaacaaaaaacatccatcccccttataaactccccagggcagtgcagtctaagcccctgagcatggcattcaaggccttcggcgatctggccccgctcccccttctgtggcaactgctaccactccatacttgacttttca

SEQ ID NO: 712226 - DNA, 1081 bp, Homo sapiens
cagtgtattagtattgcaaagctgactttttttttgaaagtgtacattttggaaccacatttttctgctaagtcctgccttttattagctgttaagcaagttacttaacttttctgtgcatcagtaccttcatttataaaacagacatagttataggacctacctgatagggtgggttgaaaactaaatgagttaatacaggtaagagcataaaacgcacaagttgaacatcctaatgttggaaatctgaaatgtaaacttctctaaaatctgaaaatttttgagcactgacatgacattcaaaggtcttgcacaaaggaaatgctcattggagcatttcagattttggattttcagattagggatgctcagtcggcaatattctaaaaaaaaawacaactcccaaatcggaaacacttctggttccaggtatttcaataagggatactcagcctatatatggcaagtacggtaaattttaagtagtaatagtagtagtattacctatgagtgattttttttttaattttaaaaaatctttttaaaattggtggttaatttattttacaaaagtccgaagacagtaaaatttaatgatgaaggccagtttataattatgtttaatcatatgtcaatactgtaaaagcttgattataactcccaatataaaagtctgttttttccagagaagtgattcttgctgagtacataaaggattttatgaagctcttggcaatgcagtaattattaggtctttgtgagagtgctataattggtcattgctcctgaatattgagctataaaagttttgtgagcgccaaagccttaagatgggtggtagtcatgcagatagactggtagagaatgaaaagaaatattgaatgaaatttgaaattagcagtggagtaactgagaaataaatagctaggaatagaataagagagtagaacttcagtgtagaaggaatttttatgtgtgtgttttaatatgtctgttttttgcccccacctctaaggttcaaagatcacccaacattaaatgaaagatatttattacttcatctgcttggtagaggtggctt

SEQ ID NO: 712227 - DNA, 600 bp, Homo sapiens
gagcaaatattagcacttaacatgtgaactgtctatcaacggtgtttttaaaagatttacaggccgggytcggtggcttatgcctgtaatcccagcactttgagaggccaagtcgggtggatcgcgaggtcagaagatcgagaccatcctggctaacatggtgaaaccccgtctctattaaaaaatacaaaaaattagccaggcatggtggtgtgtgcctgtaatcccagatacgtgacaggctgaagcaggagaatcacttgaacccaggaggcacaggttgcagtgagctgagattgcgccactgcactccagcctggtgacagagcgagactccgtctcaaataaaaataaaaagatttatattaggcagggcatggtggctcactgcctgtaatcccagcacttggagaggctgaggcgcgaagatcacctgaggtcaggagttcgagatcagcctgaccaacatggagaaaccccgtctctactaaaaatacaaaattagacgggcgtggtggcgcatgcctgtaatcccagctactcgggaggctgaagcaggacaatcgcttgaacccgggaaggcagaggttgcagtgagcc

SEQ ID NO: 712228 - DNA, 1519 bp, Homo sapiens
tgagggagaggaataagctccactttgcagatttgcttaaggacaattattagcttcaggaagtagtttgacacctgaattaacttaattggaaattgcaaagtccctataaaaacacactaaagtacatttataaggcttatggattcgaagcaaaaactcatctttgaaaaatgaagttaataatatggttcattaatatttaagtaatactttgaatgctaattgtttgaatactaataacwaagaattactaagaccagtagagcaacatatgaaaaaattatcattttggagttatatattcaattggatttaaaatccaattatattcccataagaaatttcggcattacatctaccaatgaaaaaagaaaaaagaatcctgttaaatttaaataaaggatcatgtatttgatgttgtaatttaaactttaaagagactaaatcacctatagtctggctaagggaaagaaaaggtttctattcactagaagacaataaattaatatgaaaactcttctacctttttccataccactgagcaagcattatttctttgagaatttgtgtaaacatcatttatcttaaatgatgacttaagaatttgaaggcatcatcattaaaaagtatcgatgaggacttgtgtgcagccatttcaagaataaaaactatgtttaaaaagttatcaccaaagaagtaagttttaaaatactagaatttgttatattttctctaataatgtatatattatttttgtcataattataaaatatgtgataaatgttctctccaagccccacatagatgcctcctaatcctgtccaagttagtctgtacacatatttttattatctgagtgttccatattttgaaagtgtatgtgaagcattgatttattctaaaattcttgttttacaggggaaaaaagaaacatccagagaggtttcgtgtcaccaactaattagggataaaagccaagatcagaatctagaatgccctacttttacccagccagtattgctctgattgggaatgttgggtactaaagtgtactttatgctaaacaaactatgagccctcctgtccatcctcccagaatcagccttgcatcttccacctccatgtctctggtcatgccaagctccctagctggaatcccctctctctctcctgtccattgctagagtgtttctcatccctaaatgccacttgcctgaccatgctgaaccacacagctctgtccgtctgaacattgctggtgtccactatcccagtcacccacacagcatttcctcagaacacaacggctggttccatttacccaccgattccatccctgtaactaggttgagtcagggattgcttctaaactttctgcaaatccttagtgcctctagaaaatgccttataggtgcttgagatggttaatattgagtgtcaacttgattgcattgaaagatgcaaagtaaagttcctgcgtgtgtctgtgagggtgttgccaaaggagattaacatt

SEQ ID NO: 712229 - DNA, 595 bp, Homo sapiens
attattctctaaacaatacaatgtaacaactatttacatagcatttaaattgtattaggtattctaagtaatttagagatgtcttaaagtgtacgggaggatgggtaggttacatgcaagtataggacttgagcatctgtgcatttggtatacaccacgggggccctggaaccaagacccctctcttctgctttgcttactggctgctgtgactcttaggagctctcctacttgttcggcgggtccytcccagtctcctttgctgtttcatcctttgctctgcctcttaatgttagccagcgtccagggctcattcctgggtccctttctattctctctacacatgaaccctggggctttctcccagtccctggttgtaaataccagctataggcctatgacttcccagtctcaatctccagcctggaccacttccaagaaccccagactcatagtttccggtggcaacttgggtgtctaaaacacatctcaaactcaacccaccttccccatttctccatctgctcagctacatcgtcctcccaggtggtccatcgaggctccaggtgtcaaccttatctccctcctactctca

SEQ ID NO: 712230 - DNA, 595 bp, Homo sapiens
attattctctaaacaatacaatgtaacaactatttacatagcatttaaattgtattaggtattctaagtaatttagagatgtcttaaagtgtacgggaggatgggtaggttacatgcaagtataggacttgagcatctgtgcatttggtatacaccacgggggccctggaaccaagacccctctcttctgctttgcttactggctgctgtgactcttaggagctctcctacttgttcggcgggtccctcccagtctcctttgctgtttcatcctttgctctgcctcttaatgttagccagcrtccagggctcattcctgggtccctttctattctctctacacatgaaccctggggctttctcccagtccctggttgtaaataccagctataggcctatgacttcccagtctcaatctccagcctggaccacttccaagaaccccagactcatagtttccggtggcaacttgggtgtctaaaacacatctcaaactcaacccaccttccccatttctccatctgctcagctacatcgtcctcccaggtggtccatcgaggctccaggtgtcaaccttatctccctcctactctca

SEQ ID NO: 712231 - DNA, 595 bp, Homo sapiens
attattctctaaacaatacaatgtaacaactatttacatagcatttaaattgtattaggtattctaagtaatttagagatgtcttaaagtgtacgggaggatgggtaggttacatgcaagtataggacttgagcatctgtgcatttggtatacaccacgggggccctggaaccaagacccctctcttctgctttgcttactggctgctgtgactcttaggagctctcctacttgttcggcgggtccctcccagtctcctttgctgtttcatcctttgctctgcctcttaatgttagccagcgtccagggctcattcctgggtccctttctattctctctacacatgaaccctggggctytctcccagtccctggttgtaaataccagctataggcctatgacttcccagtctcaatctccagcctggaccacttccaagaaccccagactcatagtttccggtggcaacttgggtgtctaaaacacatctcaaactcaacccaccttccccatttctccatctgctcagctacatcgtcctcccaggtggtccatcgaggctccaggtgtcaaccttatctccctcctactctca

SEQ ID NO: 712232 - DNA, 2214 bp, Homo sapiens
ttgagatggagtctcactctgttgttcaggctggagtgcagtggcatgatcttggctcactgcaaactctgcctcctggtttcaagcaattctcctgcctcagcctcccgagtagctgggattacaggcactccacatagcgagacccctgtctctacaaaaatcaatttttaaaaaatgagccaggcgtggtagcacacacctgtagtcccagctatttgggaggctgaggygggaggagcacttgagccccagagttcgaggctgtagtgagctattatcacaccacttcattccagcctgggagacatagggagaccctgtccttattaaaagataaaaataaaataaagaaagaaagaagattgtgcaggtgttgcctcctccctgaacctcgcagccttcctgcagacttgggctcctcccaggcccctggtggtagccctgctcaagggtgctgtgctgcttactctgtccccacccccaagctcctagaagttgagggctaagtctcacaggtcacgctccccaacttcccagtgagggctcattagctgtttgtttattgctgtttctctacctgaacatcagctccacctgagcagagcctttcatagctgaaaccccagcacctagaacagagatcagcaaatgattcataatttgctgtgtcccaccatgcccagctttttgtatttttagtggagacggggtttcaccatgttggccaggctggtctcaaactcctgacctcaggtgatctgcccacctcagcctcccaaagtgctgggattacaggcgtgagccaccacgcatggcctggtgcttactttagaatgtttttctttatattgaagtgcagttgacttcccagaactatcgtcttcttccctggagcttctatcatcattcacttattcatccacccatctagtcatccatccatccacccaatcattcaatcatccaattattcagtagctaggaattggcatttactacatgttaggcactgtgccaggagctcgggatacaatggtaagcacattcagacagggtctctgcctttaggggctcagtctggctaccccaacagtcactgaataatacaatatcctgcttgattagtgctagaaagaaaatgaagagtgctatgagaccatacaacatgggggcttcccctggtctgaaactatcgggagaggcttcccagaggaaatgactcttacttgctgaaagacagaggatggcctggagctgacaggtgcaaggcagcagcactttctaccctgtgacctccgcatccttctctcttctggactgaacctccttttgctcctcctgccgccactctttccaagggcctgtgaaatgctcaaggaggatgagaccctccacacacagtctgatttcctttccaatgaaagccaagcctgcatctgattttttggcagccacattcgctcgtttgtgttgaaatcgtgacactatgtctatattttccattggaccagaaatatcatctaagaaaagaaataagtaagaaaatgcatgcagttaagcaagaccctcatagtggccccagaatggatcttgaggatcactggtctttttcctgagggacttgccctctgcctattgatctaagattgtcaccaacaccagggcagagctgagttcccgggtcaaacctgtctttccagctagaattccagaggaaaccccagtccctgttggggctgaaggtgcttccttttggcatcggggcctctcgacactaataattagcgtcttgcttctttgaggaacccacaggaatggccagggctttgcaaactgcttctctcaacatcccccagctcctcccagagagtcgactgggattcttatcttactgatgaggaaagcagaactcagaaaggtgaaggtgacagagctgagacctcaagccaagccctccagagccaacaccatttccatgatacacacacctcacttgaattacattattatggggcaactcactgaatgtctaaagagctaccacctactgaacacctatcacgtgctctctctaccttgcccatttattccctctctacttagtgtcccaaagacacctcaaatgtagcatgtccataagagaactgtaacatgtcattggttttgtgtccccaccctgctcttccctttggcttcccaatcttgggaaat

SEQ ID NO: 712233 - DNA, 1302 bp, Homo sapiens
tgtatatatccaagctgataaaggcacttggatggatatatatatatatatatatttaccaccactccctatgaaggctggaaaatatatgcccagaatccctttctttgtacggttttgggtttgacgttgccaataagaggaaattctgtaaaggtgtatatgaagtagaagctattattctcagaaggttatgaaagtcatgaacagccgttctgtagaccttccataagttctcattttgcagtcatggtggacatacttgacagtttggagatgtttccattagctctcattttgtagttttaatgaaacagagtagaggcatctcagacttctccatcagtcttggcttctacagtcactcccatgaatttttctcctatttttcagctacagccttccagaaaattcatatcaaccctttcacatttatttaagctctaatttttaattaattccctgattctgctaaaatctgtcgtggttctgtattgctcaacaaaaccaaattgacaaaggctttgaactctgctctttgaggagttaaaagcaaaatagcactacttgaaagaaattaaaggagtcatgaaatcatatttaatttaaaaatagtgactagtgtagtggattaaatactgccccctcccaaaattcatatccatctggaaccacagcatatgatcttatttggatatagtgtctttgcatatgttaayagttaaggatctcaagataaaatcgacctaggtttatggtgactggtgttcttaaaagaaaaggagagggcacagaggctcacaaagaaaagatgatttgaagatgattgaagtaatgcagctgcaaactcagggacactaaggattgctgagagccaacagcagtagaaaaaagcaaggcaagatacatccttagagctttttgagggaccttggcactgctgataccttgatttcagggttttagtcttcagaactgtgagcaaatacatgtctgttatgttaaggcaccagatttatggtaatttgttacagcaatcctaggaaatagtgcagccattttgaaacaaagcttgtcagaaagaatttcataccaatacatgttttcctcttcctatccctcgtgcatcatacaacacagagtatggaataaatatttgataatgtgaattctagaactctcatattgtgaaaataatacaaagtttatcatgtcttcacgatgtgttatacaaaggattttgaaaatgaaagcaatcttttcatatcacattgccctaatgtataatacaccacagatcca

SEQ ID NO: 712234 - DNA, 628 bp, Homo sapiens
tgcagatacatttctctgatgcaggttgctggcatgggtttccatgtaaatcctgttttgggtttgtccttttgtcactctaatgctcctttttgctttttcttcytgtttgccatgccctacatattatgttttttacaaatggctcactccttcaaaactccccacagataattctgggttctttggagactaaatacatagaatctcctattgaaactgacaaacccagcccttttttcctttttctataattgttgattcaaagttttttaatatataccttgaattcttcaactgaaaaaaatcctgggcatggtggctcacgcctgtaatcccagcactttgggagtctgaggtgggtggatcaactgaagtcaggagttcgagaccagcctggccaacatggtgaaaccccttctctactaaaattacaaaaattagccaagcttggtggcatgcacctataatcccagctacttgggaggttgaggcaggagaatcgcttgaacccgtggggcagggtttgcagtaagccaagatcatgccactgcactccagcttgggcgacagagcaaaattctgtttcaaaaaaagaaaaagattatatgaaaactactgattaatg

SEQ ID NO: 712235 - DNA, 794 bp, Homo sapiens
cacatatttttgttggtttgtttgcattgtgttgaatgtactacctagcttttctaattgtactcaggaagaaatggtctactagaagttagattgctacagtgagaagcagaagtgagaagttttccaaaaacctctttcacaccagcagagatgtctttcctttctatatattcatcacaaaaagttaatgtctgatttgagagcactatgtgaatatgttatatttaccttttaaataaagaaagctaaatgtgtaggtgccagatttgcttgattgagggctatttatcaattaaatgtttcttaatctatgcacctgtttgaataatacatacagtttttttagataaatactctgttsactcttgaaatgtcacataacaccctagaatatacaacatattaaatttaagaaccaatgctttacatttacaaagtaaaagataaaacgctaaatgtttccattattttatattgctctcaacattttaggcttaacttttattcatataacattgcaatctaatctcagtatgtaggctgtagattccagctgctcagattcaaatcctggctccatcacttacttaagttacttaaaggtcctatagcttaatggcaaaagactattaaaactaaactaaacctccattataggatcaatgtggaggttgacataatacgtataatgtagtgactctattgccaggcacaaataaaatttcagaaagccagtgtgaactatattatctctgtgattttagaccaaacatccaatatttttattctca

SEQ ID NO: 712236 - DNA, 1315 bp, Homo sapiens
gcagatatgaaagctggaggaaagtgaggtggagcccttcattcccctggcctccttcctattttgctgcaggttggctgtatccctttaaaagccacagcatttgtcaagcacctctccagattctgggaaccactctttctcctggcccctacatacccagaagttgtagaggctcccaactgatacagttcagggtcactgcacaatcccttgttcctgtccttacacactgytcacacttgcctacttttgtaaatgtccttctatgaaactcttctcaactgccgacttcgcatgtgctgtttctttcttaacagaacctaattaataactataattatatgtgtatcttctgtgtgattcatacacataaacatgcataaatgtgtacttacatgtacaaggaaattttctgaaggatacaaaagagattggaaagggatacattggagcttttgttcttaattttgtaccttttagatttctttcacttttaaaatgtcagtcatacataagtaatctgctttgaaagcaaaaccaaataggaaaaaattatattgttacctttttgatggcactgtaaggagggaaagaagtaatgaataccaggagaagtgacagtagtgacttatatgttcattttaaacaatgtgttatgtatgatgaaaaggatcctcacttctgaaacttaagtttgacagttaccaaaaaaattcatccactgtagagtttgtttttaccatcttgttccaatgacctacttttagaaaagcatgcttattttaaaacttgcttcaaaataaccccattttcttaacacatctcattcgtttttcaaatttgccactttccattttaaccatatattttttaaaactttcgacagtagtcataaaaatgtgcatattttgatttgatcaaatgttcgtcttttgtgattaaaacaaaataaccccattcccagaaaggaaatactgactttcaggactatttccaaagctgcctaaaactactctgagggaaaaaaaaatgcaaatcagtaatgaagtattggagcccacagttaaattaatttataggggctttaatgcaattaaatttcatccagactgtatctctaatggtggctgtgttttttttttttacttaatagactttaaagcataattcactttcatttttgcaaaattatttaaatattacaaacatcacttttatacatatttccatggtgacacaatatatttgaagtctatttaatttacagatgatggggccaaaatgaaaattctttgaggaccatagatcttct

SEQ ID NO: 712237 - DNA, 2905 bp, Homo sapiens
atatatatatatatatatatatatatatatatatatgtagtatttgatcactgcttttgcatccatgagtggcaaagcctactatgatttgtctacaatgaaatattaagcaacccattaaatatttaattcacctgctgaactgcaacagaatggtttagaaatgtgagacctccctcttcacttacagagacacttactatataaccaaatgaattattaacaccattatttagatctttattatcacctcatgatgggtatgctacgaaacattttgcctacatcagagctaatatctaacaacagagtcaacattattatttttcaaagagtgaatctaagctcataaaaattataagccatggtgtagatcaaggaaaagatgcttgctcataaaatcatttgataaactacctagtaacatccttgatattatagattcctatttcatgaatttagatatattatggatcaagtcatatttcctggaatataaatacacccacacacacacacatgcacatatatataagactgtttatttgttctgtccaaattttcaataagcaaacagaaaattaatgtaatgaacactaaacatcatgaaaagatggaagaagtgaatgtactaccagaaccccaatataactattgtgattgaatcttaaatttgatgctgaccttcctggcagtcaagtccaggaagcatattatgattggttgcaaaattcttattatcaggaaagagggaacatgtcaaattttaaagctaaatatctgtctgcactaaaattaatttttacgtggaactatgtgtagaggacattagggattatgaaagttaaatgtctactgtggctgttttgtagaatatgcagagaaaatttttacctggcagtttaatagagaatttttaaattagattatatatttgtattaatcaaggttcttcagaaaaacagaaccaataggttatatatagagcaagacagatatgtaagaagagatttattataggaattggctcacatgattatggagctgagaagtctgacaatttgccatcttcacgctgaagaacatggaaagccaatggtgaaatgcacttcaagtccaaagtctgagcatcagtagacaatgattatgtaaggcccagtctgagctcaaacacccaagaaccaggagtgccagtgtgggagggcaagagaagatggatgtctcagctcaaggtgtgaggaaattcacccttcctctgcctttttgttctatcgaggccctcaatggactggacgaggcccagtgacaatggtgaagcccatctactttacttagttcatcaattcaaatggtaatgtctcttggaaacaccatcacagatacacccagaaataatgtcttaccaggtatctggcatctcttagtccagtcaagttgacatataaaattcacatgaaaatactcctgtacaaagctggatatgatatggcctctgaaggtaatgtggtgcattggaaagtgcatgctctgtgaatactgccttggtcatgtatagctgtgtgatcttcagcaatgtaattacctttctatgttcagcttcctcatgtgcaaagatcttccgtatataattatttgtgaaggtataatgaattaatgtgtctatatagaggttgaaacttaatgttggtttgtggcttcattctttagcaccaatgcattaagtgaatgtactggaactcacatacacacacacataacacacacacacacacacacacacacacacacacacccttacccttgtgtgttttacatttgaggtttattcttaaagatgttaatgctggagaaaacagagtgatttctttattaaatttaaggccataaagaccaatatgaatatcaaagtttagcttggggtgtttccataatattatggtgttttgtaaggtagtcagctggagtgtttggatcctgtgaattgtttgagagctttaggttgtattggttgttttgaagaggagagtatggatcctccttcctacagataacctggacctcctcagatatttgcatttcttttcttgaagttactttttccatttgggtacttcaaaaatctccttaagtaaaaaagcttgcttaattattaaggatgaggtgtcatgctgctgccagagagtgataaatgcaactttcttcaggccttggagtcagggccagcaggtcagcccattctatattcattttttattctagggaaatggtgtccctacagtcattcagtggaaatgatcttggagttgggcaacacaggtccctttctggggtgatggcgaaacaaatttaagttagaattgaatgatgttcacatagcaggctgttatactgagctraaaaccttcaaagacccagggcatagctgctctttctttcttcaccctagaaaaaatgctgaaagtataagtgattccatacagttcttatttttattgcagaaccatatagactgcatcttcaggctcctttacctatttgcttctgactgggtttggtcaggaattgatgaattaacaggcattctctcttttcagcccccttcaaccgataaaacttctgttggagtagccacctgtgtttgcggcagttagataaattagtgtccacagttcaatctgtctgtgttcatgtgaattagaactagagggaaatatatagcacaattaaacagcatttttgcatccccaccaataggaggggagagatgatctgtttcatgaatctaaatggatacagcctaaaattccaaagtggtggccatgagaatggaccttctaagcccagcacagtgagagtcagtgttagctatgtgtaggtgggacagctagccattttctcttgtgtg

SEQ ID NO: 712238 - DNA, 2905 bp, Homo sapiens
atatatatatatatatatatatatatatatatatatgtagtatttgatcactgcttttgcatccatgagtggcaaagcctactatgatttgtctacaatgaaatattaagcaacccattaaatatttaattcacctgctgaactgcaacagaatggtttagaaatgtgagacctccctcttcacttacagagacacttactatataaccaaatgaattattaacaccattatttagatctttattatcacctcatgatgggtatgctacgaaacattttgcctacatcagagctaatatctaacaacagagtcaacattattatttttcaaagagtgaatctaagctcataaaaattataagccatggtgtagatcaaggaaaagatgcttgctcataaaatcatttgataaactacctagtaacatccttgatattatagattcctatttcatgaatttagatatattatggatcaagtcatatttcctggaatataaatacacccacacacacacacatgcacatatatataagactgtttatttgttctgtccaaattttcaataagcaaacagaaaattaatgtaatgaacactaaacatcatgaaaagatggaagaagtgaatgtactaccagaaccccaatataactattgtgattgaatcttaaatttgatgctgaccttcctggcagtcaagtccaggaagcatattatgattggttgcaaaattcttattatcaggaaagagggaacatgtcaaattttaaagctaaatatctgtctgcactaaaattaatttttacgtggaactatgtgtagaggacattagggattatgaaagttaaatgtctactgtggctgttttgtagaatatgcagagaaaatttttacctggcagtttaatagagaatttttaaattagattatatatttgtattaatcaaggttcttcagaaaaacagaaccaataggttatatatagagcaagacagatatgtaagaagagatttattataggaattggctcacatgattatggagctgagaagtctgacaatttgccatcttcacgctgaagaacatggaaagccaatggtgaaatgcacttcaagtccaaagtctgagcatcagtagacaatgattatgtaaggcccagtctgagctcaaacacccaagaaccaggagtgccagtgtgggagggcaagagaagatggatgtctcagctcaaggtgtgaggaaattcacccttcctctgcctttttgttctatcgaggccctcaatggactggacgaggcccagtgacaatggtgaagcccatctactttacttagttcatcaattcaaatggtaatgtctcttggaaacaccatcacagatacacccagaaataatgtcttaccaggtatctggcatctcttagtccagtcaagttgacatataaaattcacatgaaaatactcctgtacaaagctggatatgatatggcctctgaaggtaatgtggtgcattggaaagtgcatgctctgtgaatactgccttggtcatgtatagctgtgtgatcttcagcaatgtaattacctttctatgttcagcttcctcatgtgcaaagatcttccgtatataattatttgtgaaggtataatgaattaatgtgtctatatagaggttgaaacttaatgttggtttgtggcttcattctttagcaccaatgcattaagtgaatgtactggaactcacatacacacacacataacacacacacacacacacacacacacacacacacacccttacccttgtgtgttttacatttgaggtttattcttaaagatgttaatgctggagaaaacagagtgatttctttattaaatttaaggccataaagaccaatatgaatatcaaagtttagcttggggtgtttccataatattatggtgttttgtaaggtagtcagctggagtgtttggatcctgtgaattgtttgagagctttaggttgtattggttgttttgaagaggagagtatggatcctccttcctacagataacctggacctcctcagatatttgcatttcttttcttgaagttactttttccatttgggtacttcaaaaatctccttaagtaaaaaagcttgcttaattattaaggatgaggtgtcatgctgctgccagagagtgataaatgcaactttcttcaggccttggagtcagggccagcaggtcagcccattctatattcattttttattctagggaaatggtgtccctacagtcattcagtggaaatgatcttggagttgggcaacacaggtccctttctggggtgatggcgaaacaaatttaagttagaattgaatgatgttcacatagcaggctgttatactgagctaaaaaccttcaaagacccwgggcatagctgctctttctttcttcaccctagaaaaaatgctgaaagtataagtgattccatacagttcttatttttattgcagaaccatatagactgcatcttcaggctcctttacctatttgcttctgactgggtttggtcaggaattgatgaattaacaggcattctctcttttcagcccccttcaaccgataaaacttctgttggagtagccacctgtgtttgcggcagttagataaattagtgtccacagttcaatctgtctgtgttcatgtgaattagaactagagggaaatatatagcacaattaaacagcatttttgcatccccaccaataggaggggagagatgatctgtttcatgaatctaaatggatacagcctaaaattccaaagtggtggccatgagaatggaccttctaagcccagcacagtgagagtcagtgttagctatgtgtaggtgggacagctagccattttctcttgtgtg

SEQ ID NO: 712239 - DNA, 2905 bp, Homo sapiens
atatatatatatatatatatatatatatatatatatgtagtatttgatcactgcttttgcatccatgagtggcaaagcctactatgatttgtctacaatgaaatattaagcaacccattaaatatttaattcacctgctgaactgcaacagaatggtttagaaatgtgagacctccctcttcacttacagagacacttactatataaccaaatgaattattaacaccattatttagatctttattatcacctcatgatgggtatgctacgaaacattttgcctacatcagagctaatatctaacaacagagtcaacattattatttttcaaagagtgaatctaagctcataaaaattataagccatggtgtagatcaaggaaaagatgcttgctcataaaatcatttgataaactacctagtaacatccttgatattatagattcctatttcatgaatttagatatattatggatcaagtcatatttcctggaatataaatacacccacacacacacacatgcacatatatataagactgtttatttgttctgtccaaattttcaataagcaaacagaaaattaatgtaatgaacactaaacatcatgaaaagatggaagaagtgaatgtactaccagaaccccaatataactattgtgattgaatcttaaatttgatgctgaccttcctggcagtcaagtccaggaagcatattatgattggttgcaaaattcttattatcaggaaagagggaacatgtcaaattttaaagctaaatatctgtctgcactaaaattaatttttacgtggaactatgtgtagaggacattagggattatgaaagttaaatgtctactgtggctgttttgtagaatatgcagagaaaatttttacctggcagtttaatagagaatttttaaattagattatatatttgtattaatcaaggttcttcagaaaaacagaaccaataggttatatatagagcaagacagatatgtaagaagagatttattataggaattggctcacatgattatggagctgagaagtctgacaatttgccatcttcacgctgaagaacatggaaagccaatggtgaaatgcacttcaagtccaaagtctgagcatcagtagacaatgattatgtaaggcccagtctgagctcaaacacccaagaaccaggagtgccagtgtgggagggcaagagaagatggatgtctcagctcaaggtgtgaggaaattcacccttcctctgcctttttgttctatcgaggccctcaatggactggacgaggcccagtgacaatggtgaagcccatctactttacttagttcatcaattcaaatggtaatgtctcttggaaacaccatcacagatacacccagaaataatgtcttaccaggtatctggcatctcttagtccagtcaagttgacatataaaattcacatgaaaatactcctgtacaaagctggatatgatatggcctctgaaggtaatgtggtgcattggaaagtgcatgctctgtgaatactgccttggtcatgtatagctgtgtgatcttcagcaatgtaattacctttctatgttcagcttcctcatgtgcaaagatcttccgtatataattatttgtgaaggtataatgaattaatgtgtctatatagaggttgaaacttaatgttggtttgtggcttcattctttagcaccaatgcattaagtgaatgtactggaactcacatacacacacacataacacacacacacacacacacacacacacacacacacccttacccttgtgtgttttacatttgaggtttattcttaaagatgttaatgctggagaaaacagagtgatttctttattaaatttaaggccataaagaccaatatgaatatcaaagtttagcttggggtgtttccataatattatggtgttttgtaaggtagtcagctggagtgtttggatcctgtgaattgtttgagagctttaggttgtattggttgttttgaagaggagagtatggatcctccttcctacagataacctggacctcctcagatatttgcatttcttttcttgaagttactttttccatttgggtacttcaaaaatctccttaagtaaaaaagcttgcttaattattaaggatgaggtgtcatgctgctgccagagagtgataaatgcaactttcttcaggccttggagtcagggccagcaggtcagcccattctatattcattttttattctagggaaatggtgtccctacagtcattcagtggaaatgatcttggagttgggcaacacaggtccctttctggggtgatggcgaaacaaatttaagttagaattgaatgatgttcacatagcaggctgttatactgagctaaaaaccttcaaagacccagggcatwgctgctctttctttcttcaccctagaaaaaatgctgaaagtataagtgattccatacagttcttatttttattgcagaaccatatagactgcatcttcaggctcctttacctatttgcttctgactgggtttggtcaggaattgatgaattaacaggcattctctcttttcagcccccttcaaccgataaaacttctgttggagtagccacctgtgtttgcggcagttagataaattagtgtccacagttcaatctgtctgtgttcatgtgaattagaactagagggaaatatatagcacaattaaacagcatttttgcatccccaccaataggaggggagagatgatctgtttcatgaatctaaatggatacagcctaaaattccaaagtggtggccatgagaatggaccttctaagcccagcacagtgagagtcagtgttagctatgtgtaggtgggacagctagccattttctcttgtgtg

SEQ ID NO: 712240 - DNA, 2905 bp, Homo sapiens
atatatatatatatatatatatatatatatatatatgtagtatttgatcactgcttttgcatccatgagtggcaaagcctactatgatttgtctacaatgaaatattaagcaacccattaaatatttaattcacctgctgaactgcaacagaatggtttagaaatgtgagacctccctcttcacttacagagacacttactatataaccaaatgaattattaacaccattatttagatctttattatcacctcatgatgggtatgctacgaaacattttgcctacatcagagctaatatctaacaacagagtcaacattattatttttcaaagagtgaatctaagctcataaaaattataagccatggtgtagatcaaggaaaagatgcttgctcataaaatcatttgataaactacctagtaacatccttgatattatagattcctatttcatgaatttagatatattatggatcaagtcatatttcctggaatataaatacacccacacacacacacatgcacatatatataagactgtttatttgttctgtccaaattttcaataagcaaacagaaaattaatgtaatgaacactaaacatcatgaaaagatggaagaagtgaatgtactaccagaaccccaatataactattgtgattgaatcttaaatttgatgctgaccttcctggcagtcaagtccaggaagcatattatgattggttgcaaaattcttattatcaggaaagagggaacatgtcaaattttaaagctaaatatctgtctgcactaaaattaatttttacgtggaactatgtgtagaggacattagggattatgaaagttaaatgtctactgtggctgttttgtagaatatgcagagaaaatttttacctggcagtttaatagagaatttttaaattagattatatatttgtattaatcaaggttcttcagaaaaacagaaccaataggttatatatagagcaagacagatatgtaagaagagatttattataggaattggctcacatgattatggagctgagaagtctgacaatttgccatcttcacgctgaagaacatggaaagccaatggtgaaatgcacttcaagtccaaagtctgagcatcagtagacaatgattatgtaaggcccagtctgagctcaaacacccaagaaccaggagtgccagtgtgggagggcaagagaagatggatgtctcagctcaaggtgtgaggaaattcacccttcctctgcctttttgttctatcgaggccctcaatggactggacgaggcccagtgacaatggtgaagcccatctactttacttagttcatcaattcaaatggtaatgtctcttggaaacaccatcacagatacacccagaaataatgtcttaccaggtatctggcatctcttagtccagtcaagttgacatataaaattcacatgaaaatactcctgtacaaagctggatatgatatggcctctgaaggtaatgtggtgcattggaaagtgcatgctctgtgaatactgccttggtcatgtatagctgtgtgatcttcagcaatgtaattacctttctatgttcagcttcctcatgtgcaaagatcttccgtatataattatttgtgaaggtataatgaattaatgtgtctatatagaggttgaaacttaatgttggtttgtggcttcattctttagcaccaatgcattaagtgaatgtactggaactcacatacacacacacataacacacacacacacacacacacacacacacacacacccttacccttgtgtgttttacatttgaggtttattcttaaagatgttaatgctggagaaaacagagtgatttctttattaaatttaaggccataaagaccaatatgaatatcaaagtttagcttggggtgtttccataatattatggtgttttgtaaggtagtcagctggagtgtttggatcctgtgaattgtttgagagctttaggttgtattggttgttttgaagaggagagtatggatcctccttcctacagataacctggacctcctcagatatttgcatttcttttcttgaagttactttttccatttgggtacttcaaaaatctccttaagtaaaaaagcttgcttaattattaaggatgaggtgtcatgctgctgccagagagtgataaatgcaactttcttcaggccttggagtcagggccagcaggtcagcccattctatattcattttttattctagggaaatggtgtccctacagtcattcagtggaaatgatcttggagttgggcaacacaggtccctttctggggtgatggcgaaacaaatttaagttagaattgaatgatgttcacatagcaggctgttatactgagctaaaaaccttcaaagacccagggcatagctgytctttctttcttcaccctagaaaaaatgctgaaagtataagtgattccatacagttcttatttttattgcagaaccatatagactgcatcttcaggctcctttacctatttgcttctgactgggtttggtcaggaattgatgaattaacaggcattctctcttttcagcccccttcaaccgataaaacttctgttggagtagccacctgtgtttgcggcagttagataaattagtgtccacagttcaatctgtctgtgttcatgtgaattagaactagagggaaatatatagcacaattaaacagcatttttgcatccccaccaataggaggggagagatgatctgtttcatgaatctaaatggatacagcctaaaattccaaagtggtggccatgagaatggaccttctaagcccagcacagtgagagtcagtgttagctatgtgtaggtgggacagctagccattttctcttgtgtg

SEQ ID NO: 712241 - DNA, 652 bp, Homo sapiens
tttttttaaaaatctaaagaaaatagtaaaataaagcaagaatttaggaatagaaagattattcaggctgaaatatagcagaaatgactactaatttcctaattatttatctacattaggcagcaacaagaaaaaagattttatacaaagtttaaaaattaatatgctccagcccttaatgtccattacccagaaatacaattgtctctttgccaacagttgactaggaggaggtttagctmtaatttacccaaaatgttgaattatttaatacaaattcagtaacagcaagtttggatttaatatttaaaatgtcatgattaaaataaaatgaatttattaatgaattcatagcaagcatcatcccaattgatcactggaaatcacattattaataatgataatattaaatactctaaaattttaagaaatataattgatgaactggagagagaaatatttagaataagaaatactcatttaatgaagagattattaaaaacagaaatatgtaaaggactaattaagttcactatagcacctgtccatcaagtactaattgctttaaagtaataggtctaaataatagtgaaagtaaataaattatgcacattttgttacagcttgtggatccagtacttcttttccactg

SEQ ID NO: 712242 - DNA, 1896 bp, Homo sapiens
cggaggcacattcattacaaatctgttatacaggcttcaaagccagtatatattgcaagcagaactgcgaaggatctctactcagatccagaatttccttccttcaaatgcaaggagggttcctgctaagcagaaggagcctttaggcccagtggagaaataaaatctctctgacaggacatgcaagggcttagctatgctcactmaaaaaaaattgacatcccttgaggcgtctagtgcctatgaatccttctcgtgtattttggaacttctggtctaaagatcgtcttctctggtcatggggacataggcaatgctaaaggatgtaaagcagagaatcattaagggcagcaaattttttgaaattttaagtaccctaataatctttaacccaccaaagctatgcccaccctcatgctatttctctttaagcatctgtctcacattttctataacacaatggtggctcattgtttccactctcttccttctcaactgccaaaatcacgcccttccttttatttaacgtataaggtaatcttaaatttcatatcctatgatcatgacaggagtaaatcaattttctcaactactttgtctatggcaacccaacaattcacctgttagctattaaatatacagtcactataatattcgtgggttaacaagcacttctaacgtgctatgggcacaaagatgcaagcatatttaattctaccttgggttgggaggggagactgaatagacctttctcaataattaatgtttattgagtgctttcattgtgaaaagtgctttaagcaaattatgtctttaattctcacaaaaacagagggagatacatagtataattatcaactctatgttttaaacaagaaaactaagtctgggataatttaatttgctcaaagtcattctggagaaatggagatggagccagacttcaaagctagtccgtccagcttcaaattacatccattaaccattatgctgaaaagccttctcagaaacggagtctgccagaagaacaaaggaacaagtgggcaggacatctcgcgagaaaataaaacacagccagaaccaacacccatgatcataaaatatacaacgtgtttaggaaaaaatagtaatagctaaccctatcataatgcctatcatggatgaagtagttctaattgtttttgcacattaagtcattaatccttaaaactacatcgcagaaagtaccatttgtatgatacctactttacagcagaaaaatctgaagcactcagagcttgggtaacctgtccaagatcacatggctaagaacagtggggctaaactgtgaagccaggcattctgtctctggccccttgtgctctgacatacattctgggctctctacagaatgaatttcctgctgtaagaaatctgcaatgtgccattgggagaaaactacagaggaggctctaaagctacctgggccagattataaaggaccacgagaaggattttggactttaaccaacaggttcctgattttcaactggagaggaaatatatcccaataatgataaggtgtgttgtgtacttcaaaaataaagtcaatcctgtgacttattttcatatatgagaaacatgctttctgtttttgtaatgcataacacctaatataaaccctgaccaaatcacattgactgactaagatgtacaatctaagtagttgaattttctgattatagcagttctcaactaggggatactatgctcccttcagggtgataatagaataactggagaacctaaaaagtgtatattcagcaaaaaaagaatgtgggctaaaacatgctgagaaacagtacattaggcaataggtgtagagaaattttctttttgaaaatatagggtggtggt

SEQ ID NO: 712243 - DNA, 593 bp, Homo sapiens
gtaggctaactttacagaattgtgatttccaagaagtcttttgttctttatatcaccaaactgttgttttctttctcctactccctctctctgttccacgagtacattattgatataccatgattctaacccaagtgaacacattttcaaacccgcatacctttgttatatccaactcccttggttctagaaatctgccactatagacttaacattgtggaataaagacttctaatccttttggcatgtacaacagggtgttatgtatatgtcctcttacattatragaaacatcaatgtaacttaaatatttgctgtttcctagaaatgctatttatgttcttattttccaatgttattattcttattctcttactgttggtgtgtttaatagaatttatatgcaagtacactaaagccaaaaatccaatttttctctgagcacacacaaatagcaaaattttctttgttcatttgatttaaaagcaatacataagtccattatcagagaaagagtattctcaaaaaataactttaaaaatgataaaggaaacgaatacaccacttgtttcagtcggttaaacaatgaattc

SEQ ID NO: 712244 - DNA, 1388 bp, Homo sapiens
ataccgtggtcctactcctcgtgcccccagcctgtgctttcattgctagccaaggtcctgtcctctctgagctgctgtcaagcttggrtcactgctctgacgctccctgatcccgtctccttagggctgggaaagtcacgtcccagagtccctgagctgcttccttcctctccttccttttcttaggaggcctcatgcctcagtttgactggctggtcttattgtcttccaggaaactgaggccatggggacacataggtcctcttcccagcaatctctccaggatccaaggcacctctgggaaagccacagcccttctctgggccgcagttttctcattggagaagtgcctgggacagctctagacctcattgactgagctgcccagagggacacttgagatttaggggtgcatgtgtgtgagctgtgtgtgtgtgagtgtgtgggtgtccacagactttagaactgcagccctagaacatttgtcaggttacagggggagaaagagactgaagcgagggctgttctctaggaccaccaggatcccacaggactttccagcgcctgtgtctccatcctctccccgcagccttgctccttcgggtgtttcagatccccctccctgtctttatttctttgttctttctcttttctgcgtccttgttactcccccttctgctgcgcccctcaggactctgtatcactcatgttccctccaggagcctcccttgttccccaggtctcagcccttcaccctgatccatagcccaaagttcaaagagtggccgggtgcggtggctcatgcctgtagtcccagcactttaggaggctgaggtgggaggatccctttagcccaggagttcaagaccagcctgggcaatgtagcaagacactgtttctattaaaaaaaattctttttaaccaagccaaacaaacaaaaaaaacaaaattcaaagaccccatcctcttgacccctgggtgggggagcccctttctctgacttcacagctcccatttcctccagagccttccgtgactctgggacttggtgggggggctcatgtcctccaatctcctgttccaaggacacccctcccacttcaaggcagctgcagaggccccagaacaacccccagatgcctgacattttgtgggagcgttacctgtttgtgtgtgctgagagtcccctgtctctgagcctgtaatgaacatgagttttttccctgagagggacattgtccctgatctacccagtgtcactgaaaatattcaattccaagagctggccaggagggaggattgtttgaggccatggacagacccctggcttaggacttgaaagacctgggttcacattctgggtgctatctcagtgagctccagtcccc

SEQ ID NO: 712245 - DNA, 1388 bp, Homo sapiens
ataccgtggtcctactcctcgtgcccccagcctgtgctttcattgctagccaaggtcctgtcctctctgagctgctgtcaagcttgggtcactgctctgacgctccctgatcccgtctccttagggctgggaaagtcacgtcccagagtccctgagctgcttccttcctctccttccttttcttaggaggcctcatgcctcagtttgactggctggtcttattgtcttccaggaaactgaggccatggggacacataggtcctcttcccagcaatctcyccaggatccaaggcacctctgggaaagccacagcccttctctgggccgcagttttctcattggagaagtgcctgggacagctctagacctcattgactgagctgcccagagggacacttgagatttaggggtgcatgtgtgtgagctgtgtgtgtgtgagtgtgtgggtgtccacagactttagaactgcagccctagaacatttgtcaggttacagggggagaaagagactgaagcgagggctgttctctaggaccaccaggatcccacaggactttccagcgcctgtgtctccatcctctccccgcagccttgctccttcgggtgtttcagatccccctccctgtctttatttctttgttctttctcttttctgcgtccttgttactcccccttctgctgcgcccctcaggactctgtatcactcatgttccctccaggagcctcccttgttccccaggtctcagcccttcaccctgatccatagcccaaagttcaaagagtggccgggtgcggtggctcatgcctgtagtcccagcactttaggaggctgaggtgggaggatccctttagcccaggagttcaagaccagcctgggcaatgtagcaagacactgtttctattaaaaaaaattctttttaaccaagccaaacaaacaaaaaaaacaaaattcaaagaccccatcctcttgacccctgggtgggggagcccctttctctgacttcacagctcccatttcctccagagccttccgtgactctgggacttggtgggggggctcatgtcctccaatctcctgttccaaggacacccctcccacttcaaggcagctgcagaggccccagaacaacccccagatgcctgacattttgtgggagcgttacctgtttgtgtgtgctgagagtcccctgtctctgagcctgtaatgaacatgagttttttccctgagagggacattgtccctgatctacccagtgtcactgaaaatattcaattccaagagctggccaggagggaggattgtttgaggccatggacagacccctggcttaggacttgaaagacctgggttcacattctgggtgctatctcagtgagctccagtcccc

SEQ ID NO: 712246 - DNA, 1388 bp, Homo sapiens
ataccgtggtcctactcctcgtgcccccagcctgtgctttcattgctagccaaggtcctgtcctctctgagctgctgtcaagcttgggtcactgctctgacgctccctgatcccgtctccttagggctgggaaagtcacgtcccagagtccctgagctgcttccttcctctccttccttttcttaggaggcctcatgcctcagtttgactggctggtcttattgtcttccaggaaactgaggccatggggacacataggtcctcttcccagcaatctctccaggatccaaggcacctctgggaaagccacagcccttctctgggccgcagttttctcattggagaagtgcctgggacagctctagacctcattgactgagctgcccagagggacacttgagatttaggggtgcatgtgtgtgagytgtgtgtgtgtgagtgtgtgggtgtccacagactttagaactgcagccctagaacatttgtcaggttacagggggagaaagagactgaagcgagggctgttctctaggaccaccaggatcccacaggactttccagcgcctgtgtctccatcctctccccgcagccttgctccttcgggtgtttcagatccccctccctgtctttatttctttgttctttctcttttctgcgtccttgttactcccccttctgctgcgcccctcaggactctgtatcactcatgttccctccaggagcctcccttgttccccaggtctcagcccttcaccctgatccatagcccaaagttcaaagagtggccgggtgcggtggctcatgcctgtagtcccagcactttaggaggctgaggtgggaggatccctttagcccaggagttcaagaccagcctgggcaatgtagcaagacactgtttctattaaaaaaaattctttttaaccaagccaaacaaacaaaaaaaacaaaattcaaagaccccatcctcttgacccctgggtgggggagcccctttctctgacttcacagctcccatttcctccagagccttccgtgactctgggacttggtgggggggctcatgtcctccaatctcctgttccaaggacacccctcccacttcaaggcagctgcagaggccccagaacaacccccagatgcctgacattttgtgggagcgttacctgtttgtgtgtgctgagagtcccctgtctctgagcctgtaatgaacatgagttttttccctgagagggacattgtccctgatctacccagtgtcactgaaaatattcaattccaagagctggccaggagggaggattgtttgaggccatggacagacccctggcttaggacttgaaagacctgggttcacattctgggtgctatctcagtgagctccagtcccc

SEQ ID NO: 712247 - DNA, 1388 bp, Homo sapiens
ataccgtggtcctactcctcgtgcccccagcctgtgctttcattgctagccaaggtcctgtcctctctgagctgctgtcaagcttgggtcactgctctgacgctccctgatcccgtctccttagggctgggaaagtcacgtcccagagtccctgagctgcttccttcctctccttccttttcttaggaggcctcatgcctcagtttgactggctggtcttattgtcttccaggaaactgaggccatggggacacataggtcctcttcccagcaatctctccaggatccaaggcacctctgggaaagccacagcccttctctgggccgcagttttctcattggagaagtgcctgggacagctctagacctcattgactgagctgcccagagggacacttgagatttaggggtgcatgtgtgtgagctgtgtgtgtgtgagtgtgtgggtgtccacagactttagaactgcagccctagaacatttgtcaggttacagggggagaaagagactgaagcgagggctgttctctrggaccaccaggatcccacaggactttccagcgcctgtgtctccatcctctccccgcagccttgctccttcgggtgtttcagatccccctccctgtctttatttctttgttctttctcttttctgcgtccttgttactcccccttctgctgcgcccctcaggactctgtatcactcatgttccctccaggagcctcccttgttccccaggtctcagcccttcaccctgatccatagcccaaagttcaaagagtggccgggtgcggtggctcatgcctgtagtcccagcactttaggaggctgaggtgggaggatccctttagcccaggagttcaagaccagcctgggcaatgtagcaagacactgtttctattaaaaaaaattctttttaaccaagccaaacaaacaaaaaaaacaaaattcaaagaccccatcctcttgacccctgggtgggggagcccctttctctgacttcacagctcccatttcctccagagccttccgtgactctgggacttggtgggggggctcatgtcctccaatctcctgttccaaggacacccctcccacttcaaggcagctgcagaggccccagaacaacccccagatgcctgacattttgtgggagcgttacctgtttgtgtgtgctgagagtcccctgtctctgagcctgtaatgaacatgagttttttccctgagagggacattgtccctgatctacccagtgtcactgaaaatattcaattccaagagctggccaggagggaggattgtttgaggccatggacagacccctggcttaggacttgaaagacctgggttcacattctgggtgctatctcagtgagctccagtcccc

SEQ ID NO: 712248 - DNA, 1388 bp, Homo sapiens
ataccgtggtcctactcctcgtgcccccagcctgtgctttcattgctagccaaggtcctgtcctctctgagctgctgtcaagcttgggtcactgctctgacgctccctgatcccgtctccttagggctgggaaagtcacgtcccagagtccctgagctgcttccttcctctccttccttttcttaggaggcctcatgcctcagtttgactggctggtcttattgtcttccaggaaactgaggccatggggacacataggtcctcttcccagcaatctctccaggatccaaggcacctctgggaaagccacagcccttctctgggccgcagttttctcattggagaagtgcctgggacagctctagacctcattgactgagctgcccagagggacacttgagatttaggggtgcatgtgtgtgagctgtgtgtgtgtgagtgtgtgggtgtccacagactttagaactgcagccctagaacatttgtcaggttacagggggagaaagagactgaagcgagggctgttctctaggaccaccaggatcccacaggactttccagcgcctgtgtctccatcctctccccgcagccttgctccttcgggtgtttcagatccccctccctgtctttatttctttgttctttctctttyctgcgtccttgttactcccccttctgctgcgcccctcaggactctgtatcactcatgttccctccaggagcctcccttgttccccaggtctcagcccttcaccctgatccatagcccaaagttcaaagagtggccgggtgcggtggctcatgcctgtagtcccagcactttaggaggctgaggtgggaggatccctttagcccaggagttcaagaccagcctgggcaatgtagcaagacactgtttctattaaaaaaaattctttttaaccaagccaaacaaacaaaaaaaacaaaattcaaagaccccatcctcttgacccctgggtgggggagcccctttctctgacttcacagctcccatttcctccagagccttccgtgactctgggacttggtgggggggctcatgtcctccaatctcctgttccaaggacacccctcccacttcaaggcagctgcagaggccccagaacaacccccagatgcctgacattttgtgggagcgttacctgtttgtgtgtgctgagagtcccctgtctctgagcctgtaatgaacatgagttttttccctgagagggacattgtccctgatctacccagtgtcactgaaaatattcaattccaagagctggccaggagggaggattgtttgaggccatggacagacccctggcttaggacttgaaagacctgggttcacattctgggtgctatctcagtgagctccagtcccc

SEQ ID NO: 712249 - DNA, 2135 bp, Homo sapiens
cacacattcttatctgacttccagccatgcatgagctggcccccactggccttactccaccccccatycccacacctgcaccctcctgctgggtgcccagagaagctcaggcccagatggcccaggggagacctctatttcccagacagaacagctccaccccgtacagcaggccacccgggcctatcaccaccatcctcttgcacttgccctatctgcattctctctcctgtctgtggggtctctacctgtccacctctcaccattcatccagccatcccttgggcaacctttattgagtatccagatgtcacaggttctttgctaagtgcctgggataccaggttcactaaagcttggcactggcctgaaaaccctggctcatgggcttactggggaggcacactttaaacagacagcagcagaagcacccagcactctcatatctcaggccagaaaaggaccctagagcttggggtcttccatcccctatccttggggtagatttgcagcttcctgctctgggctttacagctactcaggctgggaggcagaagggctggccaaaagcaccaggctggggtcttgggggtggaggtgaatttaaaaatcagagctgggacagtcagcaaggggacctggcccctaagcatagcctgggtcccctttcctccccactacttggcctctctgaagatggcagcctatacttcccactcacaggctgcggcccctctggggtctgccttagcttgcctgcccttggcaccaggctctgtcccagtgccaggagccctgggcaagttcatacatcaaacgaggaggcagtggctggcttctttcccttccggaaatagcaaacaaatagagggtgcagccctatcttcagcctcacgccctcctgcccctgctagggactcaggcctgcccccagagagtgagtaagacttagagaggtgatcggtggacccccacccaccccactccaatgcaggactccagagcttctttctcctttccctcctgaggcacaaggccggggggcaagtgaattgagaagaatcattacaaagggacataagaggatgctagagaatcttctcccatccccaaggcatccctcacccccatcaaggtgctgaagttctcccttcattgaatgattcctttgattccgagacacgtgggtcttccagagacatcatcaaaatggagggacacatataccaaacagaaatctggcttcatgatcttcaaaacacatgcatgaaagtgttcttagcagtgctactcacagtagcccaaaactagaaatgactcgaacgcctgtcaatagcagaatggataaatggacagcgtgtcttcacacagtgggacgctgtccagcaatgagaaggaacgctcaagaccacacccaggaatatagataaagttcacaaccatgatattgagcacaaaagaatacatatgatgtgctccactgattacaagtgccattcatttattagacattctagaacaagtaactccctgtggttagaagtcgggattgcgcactgccctccaagggggattagtgactggaaggggcaggaggcacattctgagagctgtcactgttctgtttctagactctgcatgccaagtatgtgagtacgtgcgtgtgttcagtcagtgggaagtttgtacacttttctgtgtttaggaaatatttcaacacactaatacagacaaatgccttcacagccaccctctctgtgagatgagaggggttattttcaacttcctcctgctcctcgtccacatccaagccatctccatgtccagtcctttctcccaagttagtcatggccccactcagccctctccctggctgaccgtctctaactctgaccaccagggcacctccctgcctgccctgcctcccaggcaccttgctttgactctctccctcccaatccatatacacacagcatgtgtgctagggctcccggggagccaggagcagccaggaaagcctttgtccacttctataacaggtcccggctcttctccatgctgggaccttcaagtcggctgctccaaccacctggaatgcttcttcctcccagctgctcttgcttcagctcctcatt

SEQ ID NO: 712250 - DNA, 2135 bp, Homo sapiens
cacacattcttatctgacttccagccatgcatgagctggcccccactggccttactccaccccccattcccacacctgcaccctcctgctgggtgcccagagaagctcaggcccagatggcccaggggagacctctatttcccagacagaacagctccaccccgtacagcaggccacccgggcctatcaccaccatcctcttgcacttgccctatctgcattctctctcctgtctgtggggtctctacctgtccacctctcaccattcatccagccatcccttgggcaacctttattgagtatccagatgtcacaggttctttgctaagtgcctgggataccaggttcactaaagcttggcactggcctgaaaaccctggctcatgggcttactggggaggcacactttaaacagacagcagcagaagcacccagcactctcatatctcaggccagaaaaggaccctagagcttggggtcttccatcccctatccttggggtagatttgcagcttcctgctctgggctttacagctactcaggctgggaggcagaagggctggccaaaagcaccaggctggggtcttgggggtggaggtgaatttaaaaatcagagctgggacagtcagcaaggggacctggcccctaagcatagcctgggtcccctttcctccccactacttggcctctctgaagatggcagcctatacttcccactcacaggctgcggcccctctggggtctgccttagcttgcctgcccttggcaccaggctctgtcccagtgccaggagccctgggcaagttcatacatcaaacgaggaggcagtggctggcttctttcccttccggaaatagcaaacaaatagagggtgcagccctatcttcagcctcacgccctcctgcccctgctagggactcaggcctgcccccagagagtgagtaagacttagagaggtgatcggtggacccccacccaccccactccaatgcaggactccagagcttctttctcctttccctcctgaggcacaaggccggggggcaagtgaattgagaagaatcattacaaagggacataagaggatgctagagaatcttctcccatccccaaggcatccctcacccccatcaaggtgctgaagttctcccttcattgaatgattcctttgattccgagacacgtgggtcttccagagacatcatcaaaatggagggacacatataccaaacagaaatctggcttcatgatcttcaaaacacatgcatgaaagtgttcttagcagtgctactcacagtagcccaaaactagaaatgactcgaacgcctgtcaatagcagaatggataaatggacagcgtgtcttcacacagtgggacgctgtccagcaatgagaaggaacgctcaagaccacacccaggaatatagataaagttcacaaccatgatattgagcacaaaagaatacatatgatgtgctccactgattacaagtgccattcatttattagacattctagaacaagtaactccctgtggttagaagtcgggatygcgcactgccctccaagggggattagtgactggaaggggcaggaggcacattctgagagctgtcactgttctgtttctagactctgcatgccaagtatgtgagtacgtgcgtgtgttcagtcagtgggaagtttgtacacttttctgtgtttaggaaatatttcaacacactaatacagacaaatgccttcacagccaccctctctgtgagatgagaggggttattttcaacttcctcctgctcctcgtccacatccaagccatctccatgtccagtcctttctcccaagttagtcatggccccactcagccctctccctggctgaccgtctctaactctgaccaccagggcacctccctgcctgccctgcctcccaggcaccttgctttgactctctccctcccaatccatatacacacagcatgtgtgctagggctcccggggagccaggagcagccaggaaagcctttgtccacttctataacaggtcccggctcttctccatgctgggaccttcaagtcggctgctccaaccacctggaatgcttcttcctcccagctgctcttgcttcagctcctcatt

SEQ ID NO: 712251 - DNA, 693 bp, Homo sapiens
gttttttctgggaagataagttccaaaatctatttttctactttttaccatatatttttgttggggaggaagaaatagagaagatgacagaaataaaagctcagtttgtgtttgcaaactctttggaaatcatgtttagctacaatgttgagtcttctggagtttctcaactcaaaattaagtgcccacttttgtctcctttctatttctaggatttcttttctccttgagaagtagatagaggatctgaggacagcagccataagccatggcctgctttgaagaccagcagatgggagagataggcatcctgagacattctttctttggtatcctcaacactactatcactatgtttgttggaaggggcatgatgatgctgcaaaaaaatcaggtgaggacatgcacagtgcacataaccctgtttacattgaacagactgaacagtcaaatktaaatatgtgtgcagagtttgcttgagacagaagtattaatccacttcttctttctccatattttctgcatctcactaaacccaaagaataatattagtcatatgtaccttcacaataattatatttgcttttgccttttccctttaatctttgtttactattggcttcagcacacagactatttaaatttttaggttcttatttgtccatctccttttgaaagtgtggtagtgttttt

SEQ ID NO: 712252 - DNA, 874 bp, Homo sapiens
aaccaaaactaactactttgactcttctggacatattttactttacaaaaggaaatataacagactaaatctatttatagcaagtaactaatatttcaatgtttttataaaaacaattcccttcagatactctgattaacctctaagwgacataaaaaagttgcagcattctttaataccaatattttgcacaatttgacatacagccaagtttagcatttcaaagaaaaaagtttttacaaaaaagaagaatggtgactcattgagaagcttatgtacctagtaaagtttagtttgtcttggattctttaaaaaattaggcccagaattttagttatcctaattactaccctaatcaaataggatatatatgtgtggattctagctaaaagataaaatattttgaataaacatatgacccactgattggactgttcgctttgaatctgttttgctgggtttagataagaagacttcaataaagctaactatatattgagttccactgattaaaaatgcagttttaaaaattttgcttttgtggtaaatttctggagaaatcataaatgcaaagctcaatactgtaaatactgtactgttcacaggtacttgttggagaagtgaaatgtttgtattcagaccaacaaaattctgacctttcaaaataggtttttaaaaacatttttttgaaaatcagtatttgcttttaaacacttaaaatgccaatttttaaaaaatccttgcagataaatcttagtttctttcagtctcaattatttttttactttcaactatatttcaacacagaaccagtttctaaataaacatctaatgaagaacagtttaagataaaactagagagtctaataataca

SEQ ID NO: 712253 - DNA, 529 bp, Homo sapiens
ccatgattgtctcataccttccctgccacaccctggagtcagcctttcctccaagaagcctgatccctttaggggacaatggtattgtctagtaaccaaggtctggacaagatctttttttaaaattttgcatcacatggacactgtctaaaaaacaattaaraaaattttttttgagatggagtctcactctgtctcccaggctggagtgcagtggtgtgatctcggctcactgaaaccttcacctcctaggttcaagcgattctcctacgtcagctgcccgagtagctgggattacaggcgtgcaccacctcacctggctaatttttgtatttttagtagagacatggttttgccatgttggtcaggctggtctcgaactcctggacctcaggtgttctgctcgcctcggcctcccaaagtgctgggattataggcgtgaaattttaaaaaatatatcataggtgatctgagtttaggatcggaccctgagccaagaattaaaggggaagcttttgatgggaggatc

SEQ ID NO: 712254 - DNA, 529 bp, Homo sapiens
ccatgattgtctcataccttccctgccacaccctggagtcagcctttcctccaagaagcctgatccctttaggggacaatggtattgtctagtaaccaaggtctggacaagatctttttttaaaattttgcatcacatggacactgtctaaaaaacaattaagaaaattttttttgagatggagtctcactctgtctcccaggctggagtgcagtggtgtgatctcrgctcactgaaaccttcacctcctaggttcaagcgattctcctacgtcagctgcccgagtagctgggattacaggcgtgcaccacctcacctggctaatttttgtatttttagtagagacatggttttgccatgttggtcaggctggtctcgaactcctggacctcaggtgttctgctcgcctcggcctcccaaagtgctgggattataggcgtgaaattttaaaaaatatatcataggtgatctgagtttaggatcggaccctgagccaagaattaaaggggaagcttttgatgggaggatc

SEQ ID NO: 712255 - DNA, 529 bp, Homo sapiens
ccatgattgtctcataccttccctgccacaccctggagtcagcctttcctccaagaagcctgatccctttaggggacaatggtattgtctagtaaccaaggtctggacaagatctttttttaaaattttgcatcacatggacactgtctaaaaaacaattaagaaaattttttttgagatggagtctcactctgtctcccaggctggagtgcagtggtgtgatctcggctcactgaaaccttcacctcctaggttmaagcgattctcctacgtcagctgcccgagtagctgggattacaggcgtgcaccacctcacctggctaatttttgtatttttagtagagacatggttttgccatgttggtcaggctggtctcgaactcctggacctcaggtgttctgctcgcctcggcctcccaaagtgctgggattataggcgtgaaattttaaaaaatatatcataggtgatctgagtttaggatcggaccctgagccaagaattaaaggggaagcttttgatgggaggatc

SEQ ID NO: 712256 - DNA, 529 bp, Homo sapiens
ccatgattgtctcataccttccctgccacaccctggagtcagcctttcctccaagaagcctgatccctttaggggacaatggtattgtctagtaaccaaggtctggacaagatctttttttaaaattttgcatcacatggacactgtctaaaaaacaattaagaaaattttttttgagatggagtctcactctgtctcccaggctggagtgcagtggtgtgatctcggctcactgaaaccttcacctcctaggttcaagcgattctcctacrtcagctgcccgagtagctgggattacaggcgtgcaccacctcacctggctaatttttgtatttttagtagagacatggttttgccatgttggtcaggctggtctcgaactcctggacctcaggtgttctgctcgcctcggcctcccaaagtgctgggattataggcgtgaaattttaaaaaatatatcataggtgatctgagtttaggatcggaccctgagccaagaattaaaggggaagcttttgatgggaggatc

SEQ ID NO: 712257 - DNA, 1508 bp, Homo sapiens
gatgcagttcaaagagctgagaacaagttacgaaaacgcagggaaagtaaacttcggagttccagagaggtcactcaatctcctcctggccttgcagagatgccgatatcagctccatgtgaaaactggtggggaaaacctacaagtccaggctttcacttttcccttaaaagaacaggggttgtcctgagctgtgtagcctctgggatggtgagtcttccagaaaattttctcccaggggacttcacggaagaagaaattcccttcaaacttgggcttttcagttctgttactagcatttgggattggaccaatagcccctgatggcaattctggttgggcaggggaagtgtgagagtgtggtgggcaggtgggtagaggtgggaaacgaagcaaagggacagagacatgcaggctaatgtggatggtggagacctcccagcaagggcagcactgcctgcagcaatgccagaaagacagcctgaaagagaagctttctgcaaccttagttctttttgctcaggaagtactaaagttagaacctgctgtcttttaaaaagaaatgatgttatttcacagatccgcacatttaaataacaaataagccaagacaaaacaaaacaaaatgtgaagtcctaaaatttagttaagatacatttttcttctaagagactgcatggaaattttgttgttgaaataattcactgtgctgagcttcacttgaaatgcttaaataccttgaaaccatttccatttttgcctttactcaaaataagtggttactttctaatgaatgaaaagcccagtatgtgaaaagtgtggcttaggccaataaaaagggaggtaacagcattttagtagtttctcagaagcagttaaaaaataacacaatgaagtttaacaggctgaggaaacatcacaccccatcattaaaaacagcaatgccaaaaatacccaggggtgaacagaggtgagggagactgccaaaagattattgcttgaaggattgcctttccttgtacgggtacctacccagggcagttgctccaggttcatgcaggggtggccatattttgtatcacgtgatcctcagtccacaagctgattggaccagaggaggccacttccccagaggctgatcagaacaccgtgatacagctccctgcagggggcgctgcgctgtttttgcagccaaatgcaaaatgaaactgtaagtgctctcattcaaaaagcaggagaaacgtgccatggaatgtagtaaaagataaggcttttccctttttctacagtctctcaatttgttatggtgtttttactttgctccttgaggtcgttttgagtaaaraaagaatacaattttaaatcattagcatgaattttaccattactcttcatattgtgcaatttcacgtttaaatacaaacataagtacatttaactcatatgcagcatcaccaaaattacacaatttgtattttgtggcttgtacatgcatatatatttcattc

SEQ ID NO: 712258 - DNA, 1508 bp, Homo sapiens
gatgcagttcaaagagctgagaacaagttacgaaaacgcagggaaagtaaacttcggagttccagagaggtcactcaatctcctcctggccttgcagagatgccgatatcagctccatgtgaaaactggtggggaaaacctacaagtccaggctttcacttttcccttaaaagaacaggggttgtcctgagctgtgtagcctctgggatggtgagtcttccagaaaattttctcccaggggacttcacggaagaagaaattcccttcaaacttgggcttttcagttctgttactagcatttgggattggaccaatagcccctgatggcaattctggttgggcaggggaagtgtgagagtgtggtgggcaggtgggtagaggtgggaaacgaagcaaagggacagagacatgcaggctaatgtggatggtggagacctcccagcaagggcagcactgcctgcagcaatgccagaaagacagcctgaaagagaagctttctgcaaccttagttctttttgctcaggaagtactaaagttagaacctgctgtcttttaaaaagaaatgatgttatttcacagatccgcacatttaaataacaaataagccaagacaaaacaaaacaaaatgtgaagtcctaaaatttagttaagatacatttttcttctaagagactgcatggaaattttgttgttgaaataattcactgtgctgagcttcacttgaaatgcttaaataccttgaaaccatttccatttttgcctttactcaaaataagtggttactttctaatgaatgaaaagcccagtatgtgaaaagtgtggcttaggccaataaaaagggaggtaacagcattttagtagtttctcagaagcagttaaaaaataacacaatgaagtttaacaggctgaggaaacatcacaccccatcattaaaaacagcaatgccaaaaatacccaggggtgaacagaggtgagggagactgccaaaagattattgcttgaaggattgcctttccttgtacgggtacctacccagggcagttgctccaggttcatgcaggggtggccatattttgtatcacgtgatcctcagtccacaagctgattggaccagaggaggccacttccccagaggctgatcagaacaccgtgatacagctccctgcagggggcgctgcgctgtttttgcagccaaatgcaaaatgaaactgtaagtgctctcattcaaaaagcaggagaaacgtgccatggaatgtagtaaaagataaggcttttccctttttctacagtctctcaatttgttatggtgtttttactttgctccttgaggtcgttttgagtaaagaaagaatacaattttaaatcattagcatgaattttaccattactcttcatattgtgcaatttcacgtttaaatacaaacataagtacatttaactcayatgcagcatcaccaaaattacacaatttgtattttgtggcttgtacatgcatatatatttcattc

SEQ ID NO: 712259 - DNA, 990 bp, Homo sapiens
ttttttttttttttcgagatggagtttcactcttgttgcccaggctggagtgcaatggcacagtctcggctcactgcaacctctgccttcccaggcacaagcaattctcctgtcttagcctcccasgtagcttggattacaggcatgtgccaccatgcccagctaatttttttgtatttagtagaaacgaggtttcaccatgttagtcaggctggtctcaaactcctgacctcaggtgatccacctgcctggggctcccaaagtgctgggattacaggcgtgtgccaccacacccagccgaggtgttcttttaagagaagagaaagtcagagactttgagaagagggctatgtgagtcacaggcacagatggaagtgaggctgccgtcaaccaaagaaggcctaggactgccagacgctggaagagggaaagggggactctccttcgggtcttcagaatgggcccatgtggccctgctcacacttgatttcagacttcgacctacagaattgtgaaagaataaaactctgttgtctttaagccatcgtgtttttggcaatttgttataacagccccagggacggaaaacaacatctaagcaatgcaagaatatattcttttttgtgtgattttatccttaaaagccttcaccctttagtgacgttatctctttagagaaacataagcagttctcaaggaggtatggatctcactgaaacaatgaacttaatgactgccacggcccactctcgtcacccctgccaggaagggatctgaaggctgaaccatatcttttccagacactgtagctgaaaagtgtcgcacctgtcacagattctcagggccgcctccaagaagggaatacctacgcctgctgccaatgcaaagctgtgagaaagtctttttactcccagcaggagggccacattcattgactttcgttcaccatttaacggtagttcttagaatgtgtcacctagtctgctatca

SEQ ID NO: 712260 - DNA, 990 bp, Homo sapiens
ttttttttttttttcgagatggagtttcactcttgttgcccaggctggagtgcaatggcacagtctcggctcactgcaacctctgccttcccaggcacaagcaattctcctgtcttagcctcccaggtagcttggattacaggcatgtrccaccatgcccagctaatttttttgtatttagtagaaacgaggtttcaccatgttagtcaggctggtctcaaactcctgacctcaggtgatccacctgcctggggctcccaaagtgctgggattacaggcgtgtgccaccacacccagccgaggtgttcttttaagagaagagaaagtcagagactttgagaagagggctatgtgagtcacaggcacagatggaagtgaggctgccgtcaaccaaagaaggcctaggactgccagacgctggaagagggaaagggggactctccttcgggtcttcagaatgggcccatgtggccctgctcacacttgatttcagacttcgacctacagaattgtgaaagaataaaactctgttgtctttaagccatcgtgtttttggcaatttgttataacagccccagggacggaaaacaacatctaagcaatgcaagaatatattcttttttgtgtgattttatccttaaaagccttcaccctttagtgacgttatctctttagagaaacataagcagttctcaaggaggtatggatctcactgaaacaatgaacttaatgactgccacggcccactctcgtcacccctgccaggaagggatctgaaggctgaaccatatcttttccagacactgtagctgaaaagtgtcgcacctgtcacagattctcagggccgcctccaagaagggaatacctacgcctgctgccaatgcaaagctgtgagaaagtctttttactcccagcaggagggccacattcattgactttcgttcaccatttaacggtagttcttagaatgtgtcacctagtctgctatca

SEQ ID NO: 712261 - DNA, 990 bp, Homo sapiens
ttttttttttttttcgagatggagtttcactcttgttgcccaggctggagtgcaatggcacagtctcggctcactgcaacctctgccttcccaggcacaagcaattctcctgtcttagcctcccaggtagcttggattacaggcatgtgccaccatgcccagctaatttttttgtatttagtagaaacgaggtttcaccatgttagtcaggctggtctcaaactcctgacctcaggtgatccacctgcctggggctcccaaagtgctgggattacaggcgtgtgccaccacacccagccgaggtgttcttttaagagaagagaaagtcagagactttgagaagagggctatgtgagtcacaggcacagatggaagtgaggctgccgtcaaccaaagaaggcctaggactgccagacgctggaagagggaaagggggactctccttcgggtcttcagaatgggcccatgtggccctgctcacacttgatttcagacttcgacctacagaattgtgaaagaataaaactctgttgtctttaagccatcgtgtttttggcaatttgttataacagccccagggacggaaaacaacatctaagcaatgcaagaatatattcttttttgtgtgattttatccttaaaagccttcaccytttagtgacgttatctctttagagaaacataagcagttctcaaggaggtatggatctcactgaaacaatgaacttaatgactgccacggcccactctcgtcacccctgccaggaagggatctgaaggctgaaccatatcttttccagacactgtagctgaaaagtgtcgcacctgtcacagattctcagggccgcctccaagaagggaatacctacgcctgctgccaatgcaaagctgtgagaaagtctttttactcccagcaggagggccacattcattgactttcgttcaccatttaacggtagttcttagaatgtgtcacctagtctgctatca

SEQ ID NO: 712262 - DNA, 592 bp, Homo sapiens
tggtctcgaattcctgaattcaarcaactagactgccttggcctcccaaagtgctgggatttcatgcatgagccatcacacctggcctgtaaccttcttagactttttatataagtgaggcataaagttctacatgtttgagccacagtgggaaggagattatttgttaaagcagagagcttcctctaactaattaaaatatgctatatattatatacagaatttaagtaggaagataaaatatggatcatttatatttaaacatttttcaattgggaaaaataaataaaataattagaatgaactctttgtaaaccagtagtaacatcatgagtttataattgcttacattttttccaaacatgtcctcccatagaagatatgtttcaactattcatagaatctagaatagaggaaataaaaaggcaaaaacatattaagtaaaaaagagcaatacattttaaaacaatttgcactttgaagggtattcagatcataatggcattttgattatcattttctgtcttatctagccatttctctatttaataattgagttctgggtgtccaggattttagtcctagctcattg

SEQ ID NO: 712263 - DNA, 592 bp, Homo sapiens
tggtctcgaattcctgaattcaagcaactagmctgccttggcctcccaaagtgctgggatttcatgcatgagccatcacacctggcctgtaaccttcttagactttttatataagtgaggcataaagttctacatgtttgagccacagtgggaaggagattatttgttaaagcagagagcttcctctaactaattaaaatatgctatatattatatacagaatttaagtaggaagataaaatatggatcatttatatttaaacatttttcaattgggaaaaataaataaaataattagaatgaactctttgtaaaccagtagtaacatcatgagtttataattgcttacattttttccaaacatgtcctcccatagaagatatgtttcaactattcatagaatctagaatagaggaaataaaaaggcaaaaacatattaagtaaaaaagagcaatacattttaaaacaatttgcactttgaagggtattcagatcataatggcattttgattatcattttctgtcttatctagccatttctctatttaataattgagttctgggtgtccaggattttagtcctagctcattg

SEQ ID NO: 712264 - DNA, 996 bp, Homo sapiens
ctgaaattaatccaaaggtctatcaacagtagaatgggtaaaaacactgtggtacattttaatatataagtggaatttataaaaagtaatcttctatgtctgacttctttcacttgaacttaacatttgtgagattcatccacatcgtggcaggcttctattgttgggaatcaggatcgtgtttttgtctttggaaaggaggaggagtctggtggttgggaggggtcacagagtggtttctggggtgatcggtttctatcttgatttctgtagtggtagcatgggtatgttcattgtgtgayaattattctgtaggcttatggtttgtacgctttttagtatgttatacttcaataaaaaatgtgttttttacaaggcaaaacaaatttaaaaattattattaaaattattatataatgacatgtatcaaaaccattgtatctgtctgaaagtgattcatctaaaacatttctttctgtaaattctagatagtaatttcagctgtcttttgagaccttttcaaggttgtgactaaatgacaatagaaatcattctgttaacatgagtttaaagttgtttattgtttatcattattttccccaaacacctagtgctatggtttgactgtgtccaccaaagttcacgtgttggaaacttaatcccaatgcaacagtgttgagaactgggacctttaagaagtaattaggtcacgaggctctgtttttaatgaatggattaattccgttatcctgggagtaggttagttatcttgagaatgagttcctgataatagcacagtttctgctcacttcccctttctctttcacattctcttccccttccgccttccaccacagaatgacatagcaagaagaccctcaccagatgccagcaccttgatattggacttcctggcctccagaattaagaaataaatttcttttcgttacaaattacctagtctcgggtattcttttatagcagcaggggaaaaaa

SEQ ID NO: 712265 - DNA, 642 bp, Homo sapiens
ttcaagaaagaacttggagtgagtccatagaataaagtgaaagcaggtttattaagaagtaaaggaataaaagaatggctactccagagacacagcagcagcttgggctgctggactaaggatacttatagttatttcctgattatatgctaaacaaactgcggattattcatgagtttttcaggaaagaggtgggcaattcccagaactgagggctcctaccaccttttttttagcatgctaatgcattataattagcatataatgagcaatgaggatgaatagaggtcatcaatctcatctcagttctggtgggttttggctggcttcttgcctgcaacttattttatcagcaagttctttgtgacctgtatcttgtgccgasctcctatttcatcctgtgacatagaatgcctagccttctgggaatgcagccaagtaggcatcaaccttattttaccagcctctatacaagatggagttgctttggttcaaacacctctgacataacctccactctggaggaggtagtacacttgatggggtttcctggagaatgatttgggtattgtatattaatctgctgttagggtttatacatggtttacaagcagaagctattcaatcagtctctgagtatat

SEQ ID NO: 712266 - DNA, 610 bp, Homo sapiens
ggttcacttgtttgccagcattccagtgagaagagtgaattccaacacttcactttcttggtcttgacatatgaaaaagtggttgaaaagtggttgaaagatgctcagtatgcttttttatattgatatttcagattgcagcctttttacttttgttaaaatcattatgacgtcaactggggggaatatttcatattggttgttttaaagggaacatgatacaatttaggattattataacaaatctcttaatatgctataatctcagtcaatccattaatttaacacatgaacaatttgatttcttttggccatttgagttgacaggctgtgcaaatttacaggttaaatgaaatcagttaatagcataaaaatttgtatttgaaaccaggattattggatttraggataataatcactcatttcttcttccccattttaagtttggcaccagagttagagaaatggaggtcaaagaatcaactcagctatgtggctgaaataaatgaccacaagcagaattctttcaatcaaactttaagatgatctgcttaactgtggttgttttaaagtaggtacacagagtatctgacactctttccttcaaaaa

SEQ ID NO: 712267 - DNA, 641 bp, Homo sapiens
tcccttgccctctgtatttcctgtaagctggtatttggagctggaggcctgatctccttcctgttttattccttcagcaggaacaattcatgagtagagttgtggacttctgtcaggaggctcctggtgtctctttttgtgaagttagcagctattgattctcagtgtattgctttgattctaataacacctttaggttccctcaggacttaaccttatcaaagtactttcctaagtgaagacaactcattttctacccccattgcacatagtatcttcagcaaatcaaagttactgccatggtaaagaacaccgttattttatgtacaattaagaacgaaaaaaacactgcaaattaatctacaatacaacgctttcttacaytgtcagtataattttgaggcaaactgaagaataccaagggtgagttaccattttcctttttaactaaactcatagttttatttttccctcaattgaatctcattttctggaagtcaaatcaacatcagtgggaagcctctgctgatggaggtctggtgtgctgacatgggcagcctgtgcagcatgggcttgggtcacaccagcttttattgcatgactttggcccttccttcatctaccccatggattgagtagtt

SEQ ID NO: 712268 - DNA, 988 bp, Homo sapiens
tacctctttgtatagcttttctgtgatttaataaatgctagggagaatagattcatattcagaaaagtgaatatgatattgataaagaacaaaagaaaagatagagttrtaaatgccataaatttattcaacatacaaattttgtgtatttccaatgatcttcccttctttctctcactgtcctctctattgatgagtctgttcttcatttctggagaagttcacccaatgaggtccgtaagttgctgttttcaagcatttctttattcagattctaagtagtaaaagaaaagggagaaagggaaattatgtgacctacttaagaataattctttatatttcagttataaatacttgaacttagtaacttttaattatttttaatgatagggatgttctccgtgttttcatattttaaaatggagaagcaaaggtttcatggcaaattctatgtcaaagatgaaccctgtcaatcagcctaaaggaaggtcttatagaccacacctttcatgctgtgctatatggataattacagtgacaagttttttgactttagtatacacttagaaatatcctagaaaggctataggggatgaatatatcaccactgggtatagaatggaaactacatgttagataatttagtttttacatatgggaaattcttggattcatcttcaaacaagtcaccccagacaccagtaattgtatttaacttgcatttttttctgagaaattttataatacatttgatatagttcaatttatacatggtacatcagggtttttttaggatatggaaagggtacagtcttctcaagaagcagccttatgcagagaactgagatgcttatttattttgaagttgggattagactttactgtttaactgagatgcttatttattttctttcaagtggcattagattgaatcatttatactttaccagcactgcaaggggcattgtattcttcaaaggtgaattca

SEQ ID NO: 712269 - DNA, 1087 bp, Homo sapiens
aggtggaggagaatggggagttattcccaggaaaggactgtgcaaatatatatacaaaggtggaagggtgcttcacagggatagtaaaaatttaccctctagagtagaatggctattttcagggtgtgtttcccataattaggtaaacagaaggtataatatataataaaacataaggctaggacaaatgaataaggtctgttaagtgggagttagttagcttgataaaaaagaaattgatattccagaaatcagaagatatacatatatataagatatatataatctttacatattgttaacattatcttaaatatctttattataatattattctataatatatcttctgatctctggggcatcactttttaaagataattatatacgtgtgtaattataaatacatatatgatatatatataagataatagagttagatgtgctctttcaaaaccttaaatgcaataatcttatgaattctggaagtattgactatgtttgagaaacaagtgacatgagaaaagcagtgtttaagagtatgcaggacagatagaggtaaagaaaagctggaggcaaggaagttaaattagaatggtttttcagtaatctagttatgaaataatgacagacagattaaagtgctgtaactgaaaatgagaaggaagaaaaggataagcaacaaataccaaaagaaaaatttgcatagaatattacagaacatttggggtcaaagtgtaacgatgtactctgagttttcaggttttctgaatcatacctttgtttccattgatctgttttctcttaggttggaaagaaaatacacacttggtgaaatgaaagtcaattaatcatgcttttcagtttcttttttttaaacaaacatgccattaaaggaatcatgattttttttttttcattttatggtcacaatacctcartgagtttggtgttgtcattctgacttcagatttaaagaaactgagcctctaaaaggttaagtgagtctgcaaatttccaaagtcacatagtcatagcagataggagtgtgatgaaaaattgtccctttgttcttaaaacagtgttc

SEQ ID NO: 712270 - DNA, 1653 bp, Homo sapiens
tcaccttcaggcgggtgtttgaggctggcaggctctgagctgaggagaatctcaaatttacctgtaaagaggatatgattaaagcagccattttataattattacagtaaccrgcccttcttctactccaggctaagagtagccttttctatacttcctttctctttattcatcttacagcaggattaagagatgaacagcctaggaactaccaattcagtgtctctggaacaacctggaaatttgattccagttaactcaggttttccattccttatataaatgatgaaatataaattgacttaatcatatagaaataaaatgctgcatagaattgaaaacacacgtacaagaaagatgcataccttgctatcactgacctatctctgtgcagtgtttatgtgaagactgtgtgcagtttgcacggtgatgtgaaaatcacattccacccctgagaccagccaacagaagtctcctccagttggcagtctcagtcacctgaaattctaaagcagtgtggaactgttcatcatgattggagatttactggtccatttaaaaaaaataaatatctaatatacagcctaagagttcattggttcagacaatttaaaaaatggtgaataaagaacaacaggaaattgtgcagaatcttcccaaagatttgcttctactttggccaaaaaaattaattggcaagataatctattagttccttctgttgataccgacatttcttgagtagtatctgagttatatagtagtagcatcaggtaacttccttgattcttggactgaaaactgatttttattggaatgaaatatcagtatgtttagctaaataacatctgacttaggttgctaaatttcactatgacaatccagctttatggtctactgaatttaatatagcagtttggaatcacttatcataagacatatatgaaaaaaatcaataattatttatcttcaagatgcaatagtattcatctttctaactcaatatactatgaaaacattgcttatggagaatctctttaaaatatatttgcttttatttttagaaaatttaagttcattaaaatatgttagttactgtccatgtcaaaagaacaggtaatttgggattataataaactaaaaacactattagcaagaagtggacatgttagaaaatagaaaatgttttactgatatgaaaaccaaaacataactttaaggcatatttcaaaggagtctgtacctcatatattatattaattactaccaatgttattcttaatgaataattatatctggttgagtataacaaatgattccaactattacataatttttaatgtgtatgccaaatctgttgtaagtgaagaaataagtatatgaagtttgaatagaaaactatttttctctgtctcagcaaagattgaaaaaaatttaaatgtatcgttttgcagggatgcatgtctgacttggggtctttcctcacatcctcagtgcactatttatttgctcatcatcccaccaagatgtctaacttttagggtgcttaatttgtaattttaatagatctactgtttttctaatttttgtggtagtcaactttcttctgaatcttcttatgaatctttgttcatattattttttacagctgat

SEQ ID NO: 712271 - DNA, 1653 bp, Homo sapiens
tcaccttcaggcgggtgtttgaggctggcaggctctgagctgaggagaatctcaaatttacctgtaaagaggatatgattaaagcagccattttataattattacagtaaccggcccttcttctactccaggctaagagtagccttttctatacttcctttctctttattcatcttacagcaggattaagagatgaacagcctaggaactaccaattcagtgtctctggaacaacctggaaatttgattccagttaactcaggttttccattccttatataaatgrtgaaatataaattgacttaatcatatagaaataaaatgctgcatagaattgaaaacacacgtacaagaaagatgcataccttgctatcactgacctatctctgtgcagtgtttatgtgaagactgtgtgcagtttgcacggtgatgtgaaaatcacattccacccctgagaccagccaacagaagtctcctccagttggcagtctcagtcacctgaaattctaaagcagtgtggaactgttcatcatgattggagatttactggtccatttaaaaaaaataaatatctaatatacagcctaagagttcattggttcagacaatttaaaaaatggtgaataaagaacaacaggaaattgtgcagaatcttcccaaagatttgcttctactttggccaaaaaaattaattggcaagataatctattagttccttctgttgataccgacatttcttgagtagtatctgagttatatagtagtagcatcaggtaacttccttgattcttggactgaaaactgatttttattggaatgaaatatcagtatgtttagctaaataacatctgacttaggttgctaaatttcactatgacaatccagctttatggtctactgaatttaatatagcagtttggaatcacttatcataagacatatatgaaaaaaatcaataattatttatcttcaagatgcaatagtattcatctttctaactcaatatactatgaaaacattgcttatggagaatctctttaaaatatatttgcttttatttttagaaaatttaagttcattaaaatatgttagttactgtccatgtcaaaagaacaggtaatttgggattataataaactaaaaacactattagcaagaagtggacatgttagaaaatagaaaatgttttactgatatgaaaaccaaaacataactttaaggcatatttcaaaggagtctgtacctcatatattatattaattactaccaatgttattcttaatgaataattatatctggttgagtataacaaatgattccaactattacataatttttaatgtgtatgccaaatctgttgtaagtgaagaaataagtatatgaagtttgaatagaaaactatttttctctgtctcagcaaagattgaaaaaaatttaaatgtatcgttttgcagggatgcatgtctgacttggggtctttcctcacatcctcagtgcactatttatttgctcatcatcccaccaagatgtctaacttttagggtgcttaatttgtaattttaatagatctactgtttttctaatttttgtggtagtcaactttcttctgaatcttcttatgaatctttgttcatattattttttacagctgat

SEQ ID NO: 712272 - DNA, 1269 bp, Homo sapiens
ctttcattatccagttagaatcatgtcagctgaaccaatggagaagtctgcagtgttggctattgtttgtactgttaatcactaatcctcttatattatggtatcaacaagatgaattttttcttygcaaattaatatgagtggtcagccgctgtaggctttatgttcaaaatcatatcatccctgcttaaagtgagttatctatctgtgagcttctgattttcttggccattggcctcttaaactttttgaaaagcatcaattatttcaccattcttctacccaggcttcaccataaattagatgtttgcagtcactatagtttgatcagagtacatgttgctgtcatagaggctcttttcaaaatactgtcttagacttcttgatgctgcgaggtagatcctgttcacacatgttgtgacaataccgtctgagttcattttggttcgaaaaattttggaatccatgcagagctttttaaatgcaatatgcatttttcatgatctttttaggacccaatgtattacagaaagatttcctaatacaataaagttcgctatagatatctttgtgatttccaggtgactaggcagaacaaaagcatctataacgtgtgcataagaaaaatttggaggtggggggatggggaaataatcacatacatacgtttcaagaacttttccaataaaaatggcagacaaataatatgataggaaagaagcactaacagtcttaggaagacttctatagaaatgggtgatgtttcagcaggcttttgctgattgaaataatcccatagagcatagatgtaagaatcaggagacaaacgggtcacatgcagaggcaaaatccctgaccacgcaatgtggttcagaataaagtgggaagttaagatataggggtaggaaggcttcacctatgataataggagggaagccagagacctgggtttcaactgaacatgggttgctcaacttagtggtggttatggtgagatcattctgttctgatttttctgacttcttactgaattatctgagactatcagtgggcagagaggcagtttctaatattgaaccttccttgcttgagaagcagacatgccagtctctgcaaggtttttggtatgtatgttatctcattagtctccatactctaaggtagttgttatgattatgctcattttagatgaggaaattgaagccctgagaagccaagtagccttttaagaatccagagatattaagaaaaagaattaggtcttaatta

SEQ ID NO: 712273 - DNA, 1269 bp, Homo sapiens
ctttcattatccagttagaatcatgtcagctgaaccaatggagaagtctgcagtgttggctattgtttgtactgttaatcactaatcctcttatattatggtatcaacaagatgaattttttctttgcaaattaatatgagtggtcagccgctgtaggctttatgttcaaaatcatatcatccctgcttaaagtgagttatctatctgtgagcttctgattttcttggccattggcctcttaaactttttgaaaagcatcaattatttcaccattcttctacccaggcttcaccataaattagatgtttgcagtcactatagtttgatcagagtacatgttgctgtcatagaggctcttttcaaaatactgtcttagacttcttgatgctgcgaggtagatcctgttcacacatgttgtgacaataccrtctgagttcattttggttcgaaaaattttggaatccatgcagagctttttaaatgcaatatgcatttttcatgatctttttaggacccaatgtattacagaaagatttcctaatacaataaagttcgctatagatatctttgtgatttccaggtgactaggcagaacaaaagcatctataacgtgtgcataagaaaaatttggaggtggggggatggggaaataatcacatacatacgtttcaagaacttttccaataaaaatggcagacaaataatatgataggaaagaagcactaacagtcttaggaagacttctatagaaatgggtgatgtttcagcaggcttttgctgattgaaataatcccatagagcatagatgtaagaatcaggagacaaacgggtcacatgcagaggcaaaatccctgaccacgcaatgtggttcagaataaagtgggaagttaagatataggggtaggaaggcttcacctatgataataggagggaagccagagacctgggtttcaactgaacatgggttgctcaacttagtggtggttatggtgagatcattctgttctgatttttctgacttcttactgaattatctgagactatcagtgggcagagaggcagtttctaatattgaaccttccttgcttgagaagcagacatgccagtctctgcaaggtttttggtatgtatgttatctcattagtctccatactctaaggtagttgttatgattatgctcattttagatgaggaaattgaagccctgagaagccaagtagccttttaagaatccagagatattaagaaaaagaattaggtcttaatta

SEQ ID NO: 712274 - DNA, 1269 bp, Homo sapiens
ctttcattatccagttagaatcatgtcagctgaaccaatggagaagtctgcagtgttggctattgtttgtactgttaatcactaatcctcttatattatggtatcaacaagatgaattttttctttgcaaattaatatgagtggtcagccgctgtaggctttatgttcaaaatcatatcatccctgcttaaagtgagttatctatctgtgagcttctgattttcttggccattggcctcttaaactttttgaaaagcatcaattatttcaccattcttctacccaggcttcaccataaattagatgtttgcagtcactatagtttgatcagagtacatgttgctgtcatagaggctcttttcaaaatactgtcttagacttcttgatgctgcgaggtagatcctgttcacacatgttgtgacaataccgtctgagttcattttggttcgaaaaattttggaatccatgcagagctttttaaatgcaatatgcatttttcatgatctttttaggacccaatgtattacagaaagatttcctaatacartaaagttcgctatagatatctttgtgatttccaggtgactaggcagaacaaaagcatctataacgtgtgcataagaaaaatttggaggtggggggatggggaaataatcacatacatacgtttcaagaacttttccaataaaaatggcagacaaataatatgataggaaagaagcactaacagtcttaggaagacttctatagaaatgggtgatgtttcagcaggcttttgctgattgaaataatcccatagagcatagatgtaagaatcaggagacaaacgggtcacatgcagaggcaaaatccctgaccacgcaatgtggttcagaataaagtgggaagttaagatataggggtaggaaggcttcacctatgataataggagggaagccagagacctgggtttcaactgaacatgggttgctcaacttagtggtggttatggtgagatcattctgttctgatttttctgacttcttactgaattatctgagactatcagtgggcagagaggcagtttctaatattgaaccttccttgcttgagaagcagacatgccagtctctgcaaggtttttggtatgtatgttatctcattagtctccatactctaaggtagttgttatgattatgctcattttagatgaggaaattgaagccctgagaagccaagtagccttttaagaatccagagatattaagaaaaagaattaggtcttaatta

SEQ ID NO: 712275 - DNA, 867 bp, Homo sapiens
tggatcaatacatatttcagagggcgtgattgtctctgttgaatctctgatagttcacatggtttgctgctgcccttaatctcatgtcctttgagctagagacttccttaattaaaatacagaaacaaggaggccatctgcaaatccatacttccagtgcactcatctgttacattgcttaatgctgtgtacaagacctaggccctgagctagattattgccaagaataaatcttcatttagaaaactgatcagatggttggcttgataaattcagaaaaatgttaggcaatatttttttgggaaggttatttgtagaagaaatcccaggtgacagataaactattttcaattttagctattttgaggggcaccaatgtagatgcagcttcagaagacaaaggcattatcctgacttgtatattgccacctctattccttagccccatgtttaataaatgaatcagttctggaaataagttagcttcccttttatatagatataacctggcccctgaactttgaagcttctattattttccttttagacttcagtttgagatactttcacagttttcaaaaaccaattaaaaagtgaaaatgatctcttgaacaacagttctttttttaarcatctcgtatttttggctttttgtttttttgagacagggtcttgctctgcagccctggctggagtgcagtggcatgatcacagctgttttctttttttttttaatctgctgaacataatctctaattctctgccaatgatcttagttacagtatttcattatttggtggtgtgatttttttctccctctttttggctgatgaaaagttgtacccaacttccctcactaataatatg

SEQ ID NO: 712276 - DNA, 1811 bp, Homo sapiens
gttaagtctcttttaatcagtaataattttctttcctcttcctctctttaatgtcatgcatttataaggaaccaagtcatttattctaaattttctgcattctggactaggttgattgcattcttgtttcctttgtcccgtctatttatcaggatccaaagtctgaatgtgaaacttgactagtcccaagcttaatttattttttgacaagagtaattcataggtggtattatatattactggttgattacatcagaaataccaaatacctactgtctggttggtaaaagtctgactcatctattatgaagtttacaatcaaattttcattgaattattttatcagtcattgctaagtattgcctacttctgttattccattaggagatgcaaaatgattttatatatctatcttctgcatctatgaaattgaattcttatacaaagaagaactatccctcctcacctatttatttaccatgaaatatagtttggacagagctgggagcagtggcatgcacctgtagtagcagctactccagaggctaaggtgggaggattccttgagcccaggaagtcaaggctgctgtgaactatggttgcaccactgtactccatccagggtggcagagagagaccctgtctcataaacagcaacaacaaatataccatttgaacagagaaggcaggataaatgcttcattacttcttttttgttatttactagtgtctagtaggatgagttgctgccatagcaaattcaaaagaggaccaaagattttttttctgtattattgtaaattcatgattttttatacttgaattctaatttttgaagaaagttcaaagtcttttccacaggtcgcattcaaatcagatggtatggctggacccttgtttgaagtcctctaggcatttcccaacagtttaggtgacattgtcagccaaggcttgcagcggaagccttgtgtccttctctacccaggcttgtctgagtctcatctctggaccagctgagagaccttgatacagatgccttttcctttccccaagccataatacagaatgtcagtatgattttttatttactcaacttagctagtttgagttgagtaaatgaagccaaaacagagagtttttgtctgcaaatgggagctcccaagggtaggtcaagattttggtcaatgttgtattgagttccagtgatgtaatcagaattccatctctctctcaattcctggctattgaaaatttgtgttggtttcattctacagcaggctctatttgcaaaggggccccagaggttcttacacagcctgyggggtcattgttaggctccttcatattcaaccacttattatggataaaaagcatggaggttattggctgcgcaatgaattataatcatgcaattttaaggtttcataatcattagttctaagctttaccaagtaagttgtgactcagatactcagcagtaccacaatctctaatagttcttacccacaggtgctttgtctctgcctgggaattcatctgttgcaggtgtgtgcttggacggtgtcaggagctggctagaagtggctgggagatggtatcccaggggcagccctcaattagtaacaagcaggagttcaaggataaattccccagttcctcatttgtcagcaagacatcaacttacagagtttcccagaagtctccagaagtgccaagaccaactcggtcggggagaccctaacccagtggcgtcagaggaattaaagacacacacacagaaatatagagtgtggagtgggaaatcaggggtc

SEQ ID NO: 712277 - DNA, 1811 bp, Homo sapiens
gttaagtctcttttaatcagtaataattttctttcctcttcctctctttaatgtcatgcatttataaggaaccaagtcatttattctaaattttctgcattctggactaggttgattgcattcttgtttcctttgtcccgtctatttatcaggatccaaagtctgaatgtgaaacttgactagtcccaagcttaatttattttttgacaagagtaattcataggtggtattatatattactggttgattacatcagaaataccaaatacctactgtctggttggtaaaagtctgactcatctattatgaagtttacaatcaaattttcattgaattattttatcagtcattgctaagtattgcctacttctgttattccattaggagatgcaaaatgattttatatatctatcttctgcatctatgaaattgaattcttatacaaagaagaactatccctcctcacctatttatttaccatgaaatatagtttggacagagctgggagcagtggcatgcacctgtagtagcagctactccagaggctaaggtgggaggattccttgagcccaggaagtcaaggctgctgtgaactatggttgcaccactgtactccatccagggtggcagagagagaccctgtctcataaacagcaacaacaaatataccatttgaacagagaaggcaggataaatgcttcattacttcttttttgttatttactagtgtctagtaggatgagttgctgccatagcaaattcaaaagaggaccaaagattttttttctgtattattgtaaattcatgattttttatacttgaattctaatttttgaagaaagttcaaagtcttttccacaggtcgcattcaaatcagatggtatggctggacccttgtttgaagtcctctaggcatttcccaacagtttaggtgacattgtcagccaaggcttgcagcggaagccttgtgtccttctctacccaggcttgtctgagtctcatctctggaccagctgagagaccttgatacagatgccttttcctttccccaagccataatacagaatgtcagtatgattttttatttactcaacttagctagtttgagttgagtaaatgaagccaaaacagagagtttttgtctgcaaatgggagctcccaagggtaggtcaagattttggtcaatgttgtattgagttccagtgatgtaatcagaattccatctctctctcaattcctggctattgaaaatttgtgttggtttcattctacagcaggctctatttgcaaaggggccccagaggttcttacacagcctgcggggtcattgttaggctccttcatattcaaccacttattatggataaaaagcatggaggttattggctgygcaatgaattataatcatgcaattttaaggtttcataatcattagttctaagctttaccaagtaagttgtgactcagatactcagcagtaccacaatctctaatagttcttacccacaggtgctttgtctctgcctgggaattcatctgttgcaggtgtgtgcttggacggtgtcaggagctggctagaagtggctgggagatggtatcccaggggcagccctcaattagtaacaagcaggagttcaaggataaattccccagttcctcatttgtcagcaagacatcaacttacagagtttcccagaagtctccagaagtgccaagaccaactcggtcggggagaccctaacccagtggcgtcagaggaattaaagacacacacacagaaatatagagtgtggagtgggaaatcaggggtc

SEQ ID NO: 712278 - DNA, 1496 bp, Homo sapiens
ttgagtttgcagctgactcagagtaagagatggagaggaggttctggagaattcataaggggcagggacatatggcggcaggcaggctggagagctgcctctgctgggcacgagtcaagggttcaaggctaagtgagccccgctcaggtcccacacaaccccagcagtggtcccgatggacggtctgcatctctctaccagccttctccctctactcagagggccagagagcagctccctgcccctcccaggacatagcttgggggaggattcgcagcgtggtcggccaggctcctacctggatctcctcctggtacatcttcaggctcaggtcgctcttggtccttgatcgccgtcccagaaacaccatggaatgttgctaaggaagagcagaggctgcagggctcggctgcagatattcaggtcccacccctggtgccacagttggcgtctcccacttctctggcttttgcaactgtgtcactcaaaatgttaccaatatctgagggaagggattatgccacccacactgaaacctgcctccctccttcggaccagggcctgggctcctcacctggtatctctccatctgggagagggtctccagcagcctggtgacatccgaggaggccccccgtgcctcccggtagagctccaggacggcaaccagctcttctttggagatttccttctcaagggtgatgccaccatcaactgcagggatggaaggcaggtgtgggaagggcccggggctgcagctgccaacctggctgggtctcgtacctccttgcccccttccgcagggggtcttaaggttctctctctaaaccgacactgcattggtgtcctgctctcctcgttggccctcctttcccttcccctccctctgctgtgatgtcaggagcgcaggtctagctggcagctgttacagggccagagggtttcaggaaggggcctctaagcacagagaaaatggtcagatggtctgatagcacagagatctgaggatgagaggtaacaagtgtgggcacagggttttctgtttcttttaagagacagggtctcactccgctgcccaggctggagtgcagtggtgtsatcatggctcactgcagtcttgacctcctgggctcaagagatcaagtgcagacagttttgatggagaatttgggaagaagggagggtcagcacacagaaagctgtgcaatctgggaagagtgaggcagtcactaaagccagcaccatccagttgcagcaggaatacgattcgcctgtgccataagcaatatttacaccatttaaatcaagaaccgtagtgtgaacctattattgagaaacgtggagatgactaacagaagaaatagccaagaaggagaagcctctggaggacgggagggaaaggcagggcaggggctgctgctgccacataagcctttctctacttcttgatttttctccaactatgacatgctctgtcttattttaaagttagatta

SEQ ID NO: 712279 - DNA, 1496 bp, Homo sapiens
ttgagtttgcagctgactcagagtaagagatggagaggaggttctggagaattcataaggggcagggacatatggcggcaggcaggctggagagctgcctctgctgggcacgagtcaagggttcaaggctaagtgagccccgctcaggtcccacacaaccccagcagtggtcccgatggacggtctgcatctctctaccagccttctccctctactcagagggccagagagcagctccctgcccctcccaggacatagcttgggggaggattcgcagcgtggtcggccaggctcctacctggatctcctcctggtacatcttcaggctcaggtcgctcttggtccttgatcgccgtcccagaaacaccatggaatgttgctaaggaagagcagaggctgcagggctcggctgcagatattcaggtcccacccctggtgccacagttggcgtctcccacttctctggcttttgcaactgtgtcactcaaaatgttaccaatatctgagggaagggattatgccacccacactgaaacctgcctccctccttcggaccagggcctgggctcctcacctggtatctctccatctgggagagggtctccagcagcctggtgacatccgaggaggccccccgtgcctcccggtagagctccaggacggcaaccagctcttctttggagatttccttctcaagggtgatgccaccatcaactgcagggatggaaggcaggtgtgggaagggcccggggctgcagctgccaacctggctgggtctcgtacctccttgcccccttccgcagggggtcttaaggttctctctctaaaccgacactgcattggtgtcctgctctcctcgttggccctcctttcccttcccctccctctgctgtgatgtcaggagcgcaggtctagctggcagctgttacagggccagagggtttcaggaaggggcctctaagcacagagaaaatggtcagatggtctgatagcacagagatctgaggatgagaggtaacaagtgtgggcacagggttttctgtttcttttaagagacagggtctcactccgctgcccaggctggagtgcagtggtgtgatcatggctcactgcagtcttgacctcctgggctcaagagatcaagtgcagacagttttgatggagaatttgggaagaagggagggtcagyacacagaaagctgtgcaatctgggaagagtgaggcagtcactaaagccagcaccatccagttgcagcaggaatacgattcgcctgtgccataagcaatatttacaccatttaaatcaagaaccgtagtgtgaacctattattgagaaacgtggagatgactaacagaagaaatagccaagaaggagaagcctctggaggacgggagggaaaggcagggcaggggctgctgctgccacataagcctttctctacttcttgatttttctccaactatgacatgctctgtcttattttaaagttagatta

SEQ ID NO: 712280 - DNA, 1496 bp, Homo sapiens
ttgagtttgcagctgactcagagtaagagatggagaggaggttctggagaattcataaggggcagggacatatggcggcaggcaggctggagagctgcctctgctgggcacgagtcaagggttcaaggctaagtgagccccgctcaggtcccacacaaccccagcagtggtcccgatggacggtctgcatctctctaccagccttctccctctactcagagggccagagagcagctccctgcccctcccaggacatagcttgggggaggattcgcagcgtggtcggccaggctcctacctggatctcctcctggtacatcttcaggctcaggtcgctcttggtccttgatcgccgtcccagaaacaccatggaatgttgctaaggaagagcagaggctgcagggctcggctgcagatattcaggtcccacccctggtgccacagttggcgtctcccacttctctggcttttgcaactgtgtcactcaaaatgttaccaatatctgagggaagggattatgccacccacactgaaacctgcctccctccttcggaccagggcctgggctcctcacctggtatctctccatctgggagagggtctccagcagcctggtgacatccgaggaggccccccgtgcctcccggtagagctccaggacggcaaccagctcttctttggagatttccttctcaagggtgatgccaccatcaactgcagggatggaaggcaggtgtgggaagggcccggggctgcagctgccaacctggctgggtctcgtacctccttgcccccttccgcagggggtcttaaggttctctctctaaaccgacactgcattggtgtcctgctctcctcgttggccctcctttcccttcccctccctctgctgtgatgtcaggagcgcaggtctagctggcagctgttacagggccagagggtttcaggaaggggcctctaagcacagagaaaatggtcagatggtctgatagcacagagatctgaggatgagaggtaacaagtgtgggcacagggttttctgtttcttttaagagacagggtctcactccgctgcccaggctggagtgcagtggtgtgatcatggctcactgcagtcttgacctcctgggctcaagagatcaagtgcagacagttttgatggagaatttgggaagaagggagggtcagcacacagaaagctgtgcaatctgggaagagtgaggcagtcactaaagccagcaccatccagttgcagcaggaatacgattcgcctgtgccataascaatatttacaccatttaaatcaagaaccgtagtgtgaacctattattgagaaacgtggagatgactaacagaagaaatagccaagaaggagaagcctctggaggacgggagggaaaggcagggcaggggctgctgctgccacataagcctttctctacttcttgatttttctccaactatgacatgctctgtcttattttaaagttagatta

SEQ ID NO: 712281 - DNA, 610 bp, Homo sapiens
aaatgtaaaagagggtgcattctgctcccctgtttcaaaggggtgacaggaagtcaggaggagacaaatgctagaaatcactctcatctgtgcacctgccaaggctggagggaagacattcagctctactcccagagtggtggcggacccatccaaggttcagacagccggttaatgacaaaacaaaaaagcactactactactaatagtaatggccagtattcattagccacttaatatatggagcagacacygtgctgaatgctttacatgccagggatctttgcacccttctcatttaagcctcagcttcacaccaccctctcagggagatccttcctgatccctctagctgataaggccacacttatggccacctccctctctctatacccttcccattttatcttctctggagcatttcacaccaactactttattagccacatattcagcctgtttttgtaggacccagggagctaagaatgattgtcatattgtttaagggttgttaaggaaaaaaaaaaaaaaaaaaagaaaatctctaacgcagctcctgcaaaagtatctgcttcaggaagttgaaggatacactgagccagtgcacaga

SEQ ID NO: 712282 - DNA, 648 bp, Homo sapiens
gatataaacactgaacttttaatgtgtgtgctaaaaagtgttagttaaccaaaacatttatgccacaattttcctaaccctatgttggcatgccctcattgttcctcagggaaccrctagcccaggcatcttttgacttctaagggagtaaacttggccaagagggaaagatttactggaggtggggaaagacttgagtcagcaaagtaaacaagagtcaggattccatcttgaaaattgtgtgtgtgtgttttaagtttgtacccaaatgatataatcagtgtagggctcatttgctgatttccctacccaaactgctcatttccactccctttcttctggcaatagtagtgcagatttcttttggagaactacctttctacaacaattagaggtaggaaggagggacatgtgacgtagagccggccaatcagagcacagaattcctgaagccacagtgattggcttagaagtaaatccatcagaataattctattctctgactatagggagtgcttccaggatagatattcactcaagctggttcaaccagagtaaatcttgggatttgtgtgggcactattgatgaaaagatggtttttttaggctggattgtacctaggagggcttaagcctagagaaagtagc

SEQ ID NO: 712283 - DNA, 857 bp, Homo sapiens
atgggtgtaattatcagttgccctttacaggaaacccagagaggttcagaaacttaacagaaggcatcagaggtgataagtggcccaaccaggatttgatcagaatccatgttatgtgccttacactggtacattctcacctcctgtcactcctcctcaaggtttcttggtcttttcaatcacacattgggtttctaaacatgtgtgtctttgctcatcttgttcccttttgctggctgtccttccccagttcctcctacctaccccccaccgccagccctgaaaatcccttttctgtgaaggcttttcttttttttttttttttttttttgagatggagtcttgctctgtcacccaggctggagtgcaatggcacaatctcagctcactgcagcctcagcctcctgggctcaagcaactctcctgcctcagcctccctagcagctgagattacaaggacccaccaccaygcctagataatttttgtatttttagtagagatggggtttcaccatgctggccaggctggtctcctgacctcaagtaatccatccgcctcagccttccaaagtgctcagattacaggcatgagccactgcacctagtcacctttccttgttccatcagaagactgtattgttctctatgtttccatgatgcttcatgcattatagattttatcatattgtgaaatttggcctatttgtctatctgactagattactcatagtattattaataataataactagctatcatttactgaacatttactaatactattccaaagacaatagctccataagataggtactactattatctctgttttacagatatggaaactaaaactccaa

SEQ ID NO: 712284 - DNA, 857 bp, Homo sapiens
atgggtgtaattatcagttgccctttacaggaaacccagagaggttcagaaacttaacagaaggcatcagaggtgataagtggcccaaccaggatttgatcagaatccatgttatgtgccttacactggtacattctcacctcctgtcactcctcctcaaggtttcttggtcttttcaatcacacattgggtttctaaacatgtgtgtctttgctcatcttgttcccttttgctggctgtccttccccagttcctcctacctaccccccaccgccagccctgaaaatcccttttctgtgaaggcttttcttttttttttttttttttttttgagatggagtcttgctctgtcacccaggctggagtgcaatggcacaatctcagctcactgcagcctcagcctcctgggctcaagcaactctcctgcctcagcctccctagcagctgagattacaaggacccaccaccatgcctagataatttttgtatttttagtagagatggggtttcaccatgctggccaggctggtctcctgacctcaagtaatccatccgcctcagccttccaaagtgctcagattacaggcatgagccactgcacctagtcacctttccttgttccatcagaagactgtattgttctctatgtttccatgatgcttcatgcattatagattttatcatattgtgaaatttggcctatttgtctatctgactagattactcatagtattattaataataataacyagctatcatttactgaacatttactaatactattccaaagacaatagctccataagataggtactactattatctctgttttacagatatggaaactaaaactccaa

SEQ ID NO: 712285 - DNA, 857 bp, Homo sapiens
atgggtgtaattatcagttgccctttacaggaaacccagagaggttcagaaacttaacagaaggcatcagaggtgataagtggcccaaccaggatttgatcagaatccatgttatgtgccttacactggtacattctcacctcctgtcactcctcctcaaggtttcttggtcttttcaatcacacattgggtttctaaacatgtgtgtctttgctcatcttgttcccttttgctggctgtccttccccagttcctcctacctaccccccaccgccagccctgaaaatcccttttctgtgaaggcttttcttttttttttttttttttttttgagatggagtcttgctctgtcacccaggctggagtgcaatggcacaatctcagctcactgcagcctcagcctcctgggctcaagcaactctcctgcctcagcctccctagcagctgagattacaaggacccaccaccatgcctagataatttttgtatttttagtagagatggggtttcaccatgctggccaggctggtctcctgacctcaagtaatccatccgcctcagccttccaaagtgctcagattacaggcatgagccactgcacctagtcacctttccttgttccatcagaagactgtattgttctctatgtttccatgatgcttcatgcattatagattttatcatattgtgaaatttggcctatttgtctatctgactagattactcatagtattattaataataataactagctatcatttaytgaacatttactaatactattccaaagacaatagctccataagataggtactactattatctctgttttacagatatggaaactaaaactccaa

SEQ ID NO: 712286 - DNA, 984 bp, Homo sapiens
ttgaatttgagattaacaacacaaccatcacctcttaaaagtctgtataactttatcttgcatatattttgttattaaatatgtcttttagtagagaatgagtaggaagactttggtctttataatattcagttttatgtgggttatatcctgatttttaaagttagaaactcataattttatgtaattctatgtaactaaaaagattgatttgtttttataatctatatttgtataagtatgggactagattacacaaaacaacattgatcactggaactaagagctttctkttgaccacaggcaaacagctctttccagtagaaaagagctgggctccctcactgtttcctggctctttccagtagaaaagagctgggctccctcactgtttcctggctctttccagtagaaaagagctgggctccctcactgtttcctggcacacggtatgatattgagttccatgattatgcatgtaccttgggttacaacccccctggcggcagaacctctattgtgtccttctttgtattgcccacagagcctgttggtgacctgcacacaggagccctccagtcagtactgattgaattactcaaggctgcctctctgcaaagttgaggtaagcagctgagttcaatgatgctggctgcattttcagctattggggctgcagtagctaggcaggggctgcaggcccttctggctttttagccctcctgctcacccaccatttacacagtcttcctttcagagcccccctttctcctcctgcacttccttgaatattgactgcctctctgatttccctcactttgtctctcccaaatattagggctgtttttatggtctgctaattctgtgagaatgaggtacctcttctgggaggcactgccacactcaatggcactgcaaacaggtttttattggctcatctccaagctctccaagtcattctgccctcatactgattatgagaca

SEQ ID NO: 712287 - DNA, 1320 bp, Homo sapiens
ctgcggtgcatcgcctcatgctatagatctttgtatgcttctttattttctcagggatgaattcctagaagtggtgctgttgggtcaaaagggtgtggactttgaacgggctgttgatacaaatggctgggctgaaacagcagtcctgggttcacgcttggggttcsccaggtgcagtctttggactggctttttcagaagtcactggggaagcttctgaaagattaaaccccttggcctcaccctaggtctgtgaatcagaacctgggtgtgggctggaccccaggggttccttttactcggtgtttgggaaataggcacggcatctcctcagtgtccaagcactgtcctggaagggagacagagaccacgcctgtctgttccctctaagggagagctgtggtgtgagtgcagctcggtggcagcgagtgagaggagctcagtttagggacttggctctgggtgtcactttgttcctctgtaaagtgggagtggccttggggagtctaatgtgctaataccagcatacgagtgagtatttctcttactaatgtcataagatgagaaggatctcatagttggctttctggctgggccaggccagatctgggaagagtgtgcagggagaagtgggtcaggacagagagctcgtctttccagcccttccccagggggaccttgggctgctccaccgttggagccgggtgctgttggctcaggcccactgtgggtcctggcgtccttatgtccaggtcagcaaagaggagctgcttttgccgggggttgctgcatcctgtgcctagaagtgagagtgccaggaggctggggtgtgggcttcccagccattgtctgcagtgcgggaaggaggccccaaggtgcctccccacccgtcagcgtggaccgcagaagtcacggatgctgcctttctgatgcgatgcagcagtctttcctcagagggccatagctgcactgtgtggatgtgctacttcctgacaccggcgttagtccagatgggtttgctcaggtgcacccagccaaggggtaactctttgccaggtgtaacctccaggatgctactgtagatgggctgtttaccagttgtccctgtaaaggtcaagtctgctctgacggccctgtttcttggtctgtaagtcagaaggaacatcatttattcacttcttcaagtaaacgtactgtgctgtagtagtcaggatgaatggtccacattagggagcagacggcagcacagctgacttggggactgataagttgtgccttgctgtgggcgcttgggaaacacatccaaggaaagggattgtt

SEQ ID NO: 712288 - DNA, 1320 bp, Homo sapiens
ctgcggtgcatcgcctcatgctatagatctttgtatgcttctttattttctcagggatgaattcctagaagtggtgctgttgggtcaaaagggtgtggactttgaacgggctgttgatacaaatggctgggctgaaacagcagtcctgggttcacgcttggggttcgccrggtgcagtctttggactggctttttcagaagtcactggggaagcttctgaaagattaaaccccttggcctcaccctaggtctgtgaatcagaacctgggtgtgggctggaccccaggggttccttttactcggtgtttgggaaataggcacggcatctcctcagtgtccaagcactgtcctggaagggagacagagaccacgcctgtctgttccctctaagggagagctgtggtgtgagtgcagctcggtggcagcgagtgagaggagctcagtttagggacttggctctgggtgtcactttgttcctctgtaaagtgggagtggccttggggagtctaatgtgctaataccagcatacgagtgagtatttctcttactaatgtcataagatgagaaggatctcatagttggctttctggctgggccaggccagatctgggaagagtgtgcagggagaagtgggtcaggacagagagctcgtctttccagcccttccccagggggaccttgggctgctccaccgttggagccgggtgctgttggctcaggcccactgtgggtcctggcgtccttatgtccaggtcagcaaagaggagctgcttttgccgggggttgctgcatcctgtgcctagaagtgagagtgccaggaggctggggtgtgggcttcccagccattgtctgcagtgcgggaaggaggccccaaggtgcctccccacccgtcagcgtggaccgcagaagtcacggatgctgcctttctgatgcgatgcagcagtctttcctcagagggccatagctgcactgtgtggatgtgctacttcctgacaccggcgttagtccagatgggtttgctcaggtgcacccagccaaggggtaactctttgccaggtgtaacctccaggatgctactgtagatgggctgtttaccagttgtccctgtaaaggtcaagtctgctctgacggccctgtttcttggtctgtaagtcagaaggaacatcatttattcacttcttcaagtaaacgtactgtgctgtagtagtcaggatgaatggtccacattagggagcagacggcagcacagctgacttggggactgataagttgtgccttgctgtgggcgcttgggaaacacatccaaggaaagggattgtt

SEQ ID NO: 712289 - DNA, 1668 bp, Homo sapiens
tgcagcagcagcaggccaccgcagagatagctgcttgggtgcagggccatgaagacctctgagactgaacatacaaatgggcaatggccagactatatttaaaaatagaactccaacccacaacctgtagcaaccaattcagaaagctgacccaccattggcaaccaagtccaggaagccaaacagtctctgcggcaatcagcccaaaatggccagaacttgaccaacaactgacaaaatgcccagaacttgaccaacaacatcctaatttttgccccagtgtgcaacttaggaccaattggaggaagccagatgtgctcccctaaccagtcacataggatgtcccgcttctaataggcccacctacagcttcctgatgtcaacagcctccaatcagggcacacccaaagcctccccttttcccaccacaaagcttctccacttccctgcccacctttgagtcctctgacaaaggcaagtgatggtagctgactcccttgctatagcaagctctgaatcaataggctttgctcattttcatgtgggcttcgtttatttctatacctcctagttgcttaattgttttatgacttgattttcttatctgtgaaatgggaccataattttggacacaaatcttttgggaggaaaatgccttgaattgcaggggagtccccgatacatccccactccctgggtcacctctgatctcagttcagctgccacataacccacctccctcttgttctgagcataactgggcacatctacatgcccagttccttcattttttcaggggaggaccctgaatccaagcaggaaaatgctgacttacccgaggtcctctcctccagaggtttttaatgacccagtcttgctctctggtttcctccctcctgactgcccaggaaagcaagcacatgagccttttcagcaactctgcagggtggggcttcaatctatggtgaaactgaggaggctaaaggaggaaaaatgcacacaggagtgagttaccaggccacagaagcttcccaaccaggaaaggccagttgtggcctgcatacggagctctgccctccatagggaggtttttcttccttggtttcagggagcgtgagccccacccaggttttctgaacctcttttattcagggaggctggctggctctaggagagtcccttttcccttcctggggttgtttccacccaagcctggctccaccttctcactgcaagacaaaagcaaaggggatcacaaatcacartactcaccattctagtagtagtgtgccataatacacgatattaactacttttcatatatagaccctttcagtcctcagaacagccctctgatacatatatgtaccattattagcatgtccatttaacaaatggggaaactgagtcatggagccatcagatgatgtgcccaaagtcacacaaatagcaagtcgaagaacagggattaaaacccacatccagagatgagctctcaaacaccttatggtaccacttcagaatgttttcaaatgaacacaagtatgaataggacatggtcaagcgtagttgctcatgtttataatcccagcactttgggaggctaaggcaggaggatcacttgaagccaggagttggagacaaggctgggcaacatagtgagacccc

SEQ ID NO: 712290 - DNA, 598 bp, Homo sapiens
tctggtcccccttaacaagagcagaaaagtaaaaggataggcaggggcagggcacttggggtggctactcagtggttatgtggccctgggtcagtgccatccctctctcctttttaaacatctttattgagacataattcacatagtatacaattcacccatttaaattgtacaattcactggcttttagcatatttgcataattgtatatctatcaccacagtcagttttagaacattttcatcaccctaagaagaaactccttagctcaggggtccccaactcctgggccacagactggtaagagtaatggtccacagcccagcctgttaggaaccyggccgcacagcagaaggtgagcagtgggcaagcgagtgaagcttcatctgtgtttacagtcactctgcattgctcgtattaccacctgagctccacctcctgtcagatcagcagtggcattcaagtctcatagaaccatgaacgctattgtgaactgcgcatgcgagggatgtaggttgtgccccttatgaaaatctaatgcctgatgatctgaggtgaagctgaggcggtgatgcttgccctggggagtggctgcaaa

SEQ ID NO: 712291 - DNA, 653 bp, Homo sapiens
aactcttggattgtagagggtgtacatttccaactttatagatcatcacgatttgttatccaaagaggttgcactaatttaaactcgtgtcaaaagtatgtgagttcctattgttacaggtagctagtcaggcatgagcagggcaggagagggctcgacccccacccccccaccagtaatgtcaccaaccaycaggcgattgttaaactgtctctaataatgggtcgcagcctgcaccagggaaaggccatctcctaatagatagaacaaacttgaaactggtgatcagcagcttcccaataagatctcaggagttgggcgagtgggctcaagcatgcacactaagaggcaaaatggtggagtttaacttctagggacattcacctggtaggggaagaatgcctcaagtgagcatgcacacaactccagtaaacacactgcgtgctcaccgcccaactgctagcagaccactgcacacgtggacagaccactgcacacgtggacagcccactcccagggaagaatcaggggagaagggatgtacaaccctggaactatgtcaacagataaaaccccaagtcaaaggtcaaacagtgcacttgatctctcaagtcgtccgctggccctcttccaagtgtactttacttcctctt

SEQ ID NO: 712292 - DNA, 653 bp, Homo sapiens
aactcttggattgtagagggtgtacatttccaactttatagatcatcacgatttgttatccaaagaggttgcactaatttaaactcgtgtcaaaagtatgtgagttcctattgttacaggtagctagtcaggcatgagcagggcaggagagggctcgacccccacccccccaccagtaatgtcaccaaccaccaggcrattgttaaactgtctctaataatgggtcgcagcctgcaccagggaaaggccatctcctaatagatagaacaaacttgaaactggtgatcagcagcttcccaataagatctcaggagttgggcgagtgggctcaagcatgcacactaagaggcaaaatggtggagtttaacttctagggacattcacctggtaggggaagaatgcctcaagtgagcatgcacacaactccagtaaacacactgcgtgctcaccgcccaactgctagcagaccactgcacacgtggacagaccactgcacacgtggacagcccactcccagggaagaatcaggggagaagggatgtacaaccctggaactatgtcaacagataaaaccccaagtcaaaggtcaaacagtgcacttgatctctcaagtcgtccgctggccctcttccaagtgtactttacttcctctt

SEQ ID NO: 712293 - DNA, 653 bp, Homo sapiens
aactcttggattgtagagggtgtacatttccaactttatagatcatcacgatttgttatccaaagaggttgcactaatttaaactcgtgtcaaaagtatgtgagttcctattgttacaggtagctagtcaggcatgagcagggcaggagagggctcgacccccacccccccaccagtaatgtcaccaaccaccaggcgattgttaaactgtctctaataatgggtcgcagcctgcaccagggaaaggccrtctcctaatagatagaacaaacttgaaactggtgatcagcagcttcccaataagatctcaggagttgggcgagtgggctcaagcatgcacactaagaggcaaaatggtggagtttaacttctagggacattcacctggtaggggaagaatgcctcaagtgagcatgcacacaactccagtaaacacactgcgtgctcaccgcccaactgctagcagaccactgcacacgtggacagaccactgcacacgtggacagcccactcccagggaagaatcaggggagaagggatgtacaaccctggaactatgtcaacagataaaaccccaagtcaaaggtcaaacagtgcacttgatctctcaagtcgtccgctggccctcttccaagtgtactttacttcctctt

SEQ ID NO: 712294 - DNA, 653 bp, Homo sapiens
aactcttggattgtagagggtgtacatttccaactttatagatcatcacgatttgttatccaaagaggttgcactaatttaaactcgtgtcaaaagtatgtgagttcctattgttacaggtagctagtcaggcatgagcagggcaggagagggctcgacccccacccccccaccagtaatgtcaccaaccaccaggcgattgttaaactgtctctaataatgggtcgcagcctgcaccagggaaaggccatctcctaatagatagaacaaacttgaaactggtgatcagcagcttcccrataagatctcaggagttgggcgagtgggctcaagcatgcacactaagaggcaaaatggtggagtttaacttctagggacattcacctggtaggggaagaatgcctcaagtgagcatgcacacaactccagtaaacacactgcgtgctcaccgcccaactgctagcagaccactgcacacgtggacagaccactgcacacgtggacagcccactcccagggaagaatcaggggagaagggatgtacaaccctggaactatgtcaacagataaaaccccaagtcaaaggtcaaacagtgcacttgatctctcaagtcgtccgctggccctcttccaagtgtactttacttcctctt

SEQ ID NO: 712295 - DNA, 653 bp, Homo sapiens
aactcttggattgtagagggtgtacatttccaactttatagatcatcacgatttgttatccaaagaggttgcactaatttaaactcgtgtcaaaagtatgtgagttcctattgttacaggtagctagtcaggcatgagcagggcaggagagggctcgacccccacccccccaccagtaatgtcaccaaccaccaggcgattgttaaactgtctctaataatgggtcgcagcctgcaccagggaaaggccatctcctaatagatagaacaaacttgaaactggtgatcagcagcttcccaataagatctcaggagttgggygagtgggctcaagcatgcacactaagaggcaaaatggtggagtttaacttctagggacattcacctggtaggggaagaatgcctcaagtgagcatgcacacaactccagtaaacacactgcgtgctcaccgcccaactgctagcagaccactgcacacgtggacagaccactgcacacgtggacagcccactcccagggaagaatcaggggagaagggatgtacaaccctggaactatgtcaacagataaaaccccaagtcaaaggtcaaacagtgcacttgatctctcaagtcgtccgctggccctcttccaagtgtactttacttcctctt

SEQ ID NO: 712296 - DNA, 1059 bp, Homo sapiens
ttcaagatgagatttgggtggggacacagccaaacaatatcattctctgcctccctgctttgtatgtatttactgtaaattaaccacatgtcaaatactgaggtagacactgagaacataacacaagaacattagtatacttgtcttcaaagtgcaacttatatatggaggtagaagagacttaagccaacaaaaaagtgaaatgctaacctgcattttggtaaaaatactgaagtattttctctctgtctttattttgtcccttaatttccataattggaatagatgtcctttatccattcaatggatgcctatcagatttagctttctakaaaaatttcaagttaaatttttgttaagatgataataaaatttagtgctgttgcttcctatatgaaatttctgcaatgctcgtgaggactcacatgatgcaataaaacatactatgtgcaaaccattttctaatatgcttctagcatacctgtctacatcacaggccaatataataaatgtttaaaatatgaattaataactaaagggggctctgaattacataataatgtaatacataagtccgtaggtgctgaggcctaaagtcaaatcttttctccttcactttcaagctatgggactttggaaaagttactaaaattattcaagcctcagattcctcatccttaaaatagagatatcaatggtgctgacttcataggagtttttaagaaaataaaatgaactcatatatataaaactactaatacattgtaaaagctcagaaaatagtttagctaatgtttttgcattcataactattcatttcctaactttactcaatattttcatgaaactatcctttcttgtagcatatagtcttcaaaaagttaaaaatacatatctttactatagaggtagaagcccttataattccacaaatattaattttataatattaatttataacagatgcattcattatgatgtgagaacccaaaaagatgaatgaatattttcagaataagatgatacatcctcagagggtagggtcaccctaatagttgt

SEQ ID NO: 712297 - DNA, 1137 bp, Homo sapiens
gaaagtatagcccgtgactaatgatattcaagttcacttttaagacaccatacagtacaaacaagaacatgtcttcaggctgaattcagcctcatctatgtagggacttttctgataagagtgattggtagttttagctttttcagctgagctataaccttccttgcacatatgttcctgcctatgatactccactttagttcttatgaaaggattggccacatttgaataaagttaccagaggcttacttaaaccaaattatttcttctctctcttaatagactcttctcaagaatcttcccatttgtctaaattttgacaagatatacctcatttcagttcagtcatatgggaactagggagataaaatcaacaatccaacaaatacattgattcctactatgctcaaaccatatgcgagatattctttcagagattcaaggtgaccaaagttgctcctataatcaaactgaataaaccttaatcctcaccattcaacccaggcaaatctatattctcagtgcctattaacatacatgtaacttggctactgacatcagttagaatatgtgccctagctaaatgggactctatttactgaagaaaagccttccctcaaaaaggtaraagtcattaaaatttatgcagtgatagtcataagtttttattttcacactgcacaatctccaaaattggcagcattctttgccatctgatgcaatgttttccatctacttagaattaagttgtttaacataaaagccagatttgtctttaattatttagtagggggaggaaagttgtaaaattgacatttttaaaaattaagagaaaattttaaaatctgatacattgtttggttttctttctgttacctaatttataatattttgagggcaatgaactgtcttttaaaaggaaaaatcatatcaaagtaagatcaatgacatactatttcctcataaaacaattgaatgaaggtatagggtttacattagacatcttacagatgcaaaagtttctatgtattttatgcaaattaatgcaatataatacaattaacaagacacaagactggtcatctgttgaagtactcaagaggttgcatattgtcttaatttatttctataagatac

SEQ ID NO: 712298 - DNA, 1373 bp, Homo sapiens
tatgtctcctcactgctgtggatataaatcattagaaataaaggagcgccttaatttcaggaacaaagatcttctttgcagaatctttctcaccgtaatcttttaaaaattcaggttttgcttttgaattcctcccctccccccattccccaggcccttactgcagcttgtactgctcgcggtgcgcacaaaccatcttttcctcagggcaccggcagcaaagaacagcagatcacgagggcatgcagaagctagagatctccccgagtaaggtctgtggggacaagtctaggacttccttactcggagcacccaaggctggtaaagtaaacgaagcccctaagcatccagaaaagaggccctgcagsaaagaactggcgcatggctcctggaaagaccgtcagagccgggtaaaaataagtgcagcgccaaacgtgctggtcatctaggtgcctttctcctcatcccagcgagtgcaagggcatttctctattaccgtggcaatatattcaaatattcgaggtaaagatcgtccagccttcataggccacctggttccgtccccctcccccagctactcgggcacgtgtcccgactcccgccagcaggccgtgggggtgatgtggccgccatgaacccaccaaggacaagtagggcctggttttagctgcaaatgcaacaagtctctccgctgagccgcagctgctaccctctgccttctgctcctccgccagggcacggccccccctgcgccccaaactgagcggcaaagtcagggcccgcggccggatgctcagagctaaaggccgcggaggacagatgtgcttcttcctccttcccgcgtctccccatacaagtactaccccgcacgtcccatcaggcttgcctgtgggccaggattcagggtcctgagccgaaacctaccaggagagagaaggctctggagacctctgtaacagtcgtgcggagaagacaaagtcagctgcgtgcgtctcctccggcgccggctctgcaaggagggaggagggggcggggccccacaaccaccgcagcctcttaggtttctccattgtgattggaaatccgagtaccgcctacccctcccctcggctcgctcaatccccttcaaggacaagggctcaagtatgcacactccctcccccaccctccagatgaggaggtctccttccagaggcttccgctctcagctggtctcacatctcgcaggctcttcaatgcggaggccaagttatttataaaacttgcccatccccgactcttctggactttaacgctcttgttctattagatttagtacaaatagaaataaatttctttccttcttttttttattttgagacggagtctcactc

SEQ ID NO: 712299 - DNA, 1320 bp, Homo sapiens
tttttttttttttttttttaagtagaggcagggtcttgatatgtttcctaggctggtctttcctaggtgatcctcctgccttggcctctcaaatccctgctggaattacaggtgtgagccaccacgcctggcctgaccttgagcaaattaattcaccttctgtgtctcagttttctcatctgtaaaatgaggtcactaagaagttaaaatgcaatagtactgtcaagtgcgcaggagcagtatgtagtgctcagtaagcattaggtattattatcaactcctgctcctagccagtatactctcaatcaccaagtcctgttggtcctttttccttaacatctttcaactttgctttctccttgccctgccctctgttcttatgctagtccaggccaccatcattgcccactttggctgcaacagtggcctcccaactggttcctctgcttctagtcctggcttctttgaattacacttgcaaatctgatcctgttgttccttgtttaaaattctccagtggctcttctctgtgtagggctaaaaattgaacttcctgcccttctctcttgttgcctttgaccctagcatcccaccctctgggcgggaggttgtttgaggccttctcaggtttctggaccttgatgcatgctctgaacgactccctccttctttacaaggccccctctcttttccccttgacattctctgtctgacttggtgcttcctctgggacttcttagggtaagccctttccatagcaggttctaattttgtactgcggtgagtaatcccctctgtgggttgtaaaactcagatgacaaggaccagctattttatctttgtgttccttgtgcctcgcacagtgcctggcacatagtaggtgaccagtacttgggtgtgtgactgagggagtgaatggagtatagtagggggcagtacaccatgyggaagttttaaaaactcctttttcctattgcaaataataagcataataacttttacccttcagaaaagacaaacaagcaaaagaataaaagcatccagactacatggtgagatcaggtacatgctagctggctgggacttatgctttacctactagataaatccaaggagctctttaatgacttctcttgttttttccctacaccacctgacatgcttgttattatgcaagcaagacactcatggtcaacatcgattaggatccttttgattaagaagctgcagcaaagcatgtacagattattttttgaccttcagcccttcatattttgtaaatttctttgtggggtaaaattaaattaaaaaatttttttg

SEQ ID NO: 712300 - DNA, 607 bp, Homo sapiens
gaaaggtttaagaattatgtgtcaggctgagcccatctaaggagctgacgtgcccctgggtcttgtaagcccagaaagtttaagcttcacgttcacaaaatgtcaakgcagtgagaggtaaaaatgagccactcttctcccatccgcccctactcccccttcctcctatttctctcttactcgcatgttgctcacaaagcaccattctctggaaaataggagctattaaagttttcaaggagcaaaagacaatgtaggctctccccatctcccaccctaagcccccatcagaggccacattttgcaggtcactgctgggttctggagcttctgagagacagaggcgaggtggggcagggcgggacagggaaagcccattcccagcaagcaagcaaagcccacaaagcccagaatcccagaacccttagacttggccgtagggagattccaggcccttgaaccgctcactggaccttcccagcagagcacgtgcctctctcatctttctcaggtacttggggagggaagaggctctctggggagccctggagccaaggtggccagggaagaatgcaggagctcttcccccagagcctggaaggcagcc

SEQ ID NO: 712301 - DNA, 607 bp, Homo sapiens
gaaaggtttaagaattatgtgtcaggctgagcccatctaaggagctgacgtgcccctgggtcttgtaagcccagaaagtttaagcttcacgttcacaaaatgtcaaggcagtgagaggtaaaaaygagccactcttctcccatccgcccctactcccccttcctcctatttctctcttactcgcatgttgctcacaaagcaccattctctggaaaataggagctattaaagttttcaaggagcaaaagacaatgtaggctctccccatctcccaccctaagcccccatcagaggccacattttgcaggtcactgctgggttctggagcttctgagagacagaggcgaggtggggcagggcgggacagggaaagcccattcccagcaagcaagcaaagcccacaaagcccagaatcccagaacccttagacttggccgtagggagattccaggcccttgaaccgctcactggaccttcccagcagagcacgtgcctctctcatctttctcaggtacttggggagggaagaggctctctggggagccctggagccaaggtggccagggaagaatgcaggagctcttcccccagagcctggaaggcagcc

SEQ ID NO: 712302 - DNA, 1595 bp, Homo sapiens
attccagcatgagatccaaaggtggaagaaaagaggtctgatttctttcccactcctttcctcttgctgtgtttagggcagctgcatcatctcgtcatgggcagccccatttgcaaagttctggcacacactggattctggtaactatttctgcctcttgtccctttatccctagggatggatagtaataagttcctactgtggctagtttccgagaaatcagccatccctagtcagtttgttccttaatcctggagtgcttttatcagtagttctttttattaaaaaacaaaacaaaacaaacataaaaaaaacaactcttcatttgaaccatttggtaatatgatacttattaataaatatataaatttgtcaaccaccacaaaatttcaaatgaaacaaacaacctaaaatgaacacaatcactaatgtttcataaggtgcaaaaccaggttccaaaccaacatacttttgacttttttgttactataacagtagtacattataatagaaaacactataaaaaaccaccaacactataatgctctgtaatgtaaattttaaaatattttaaaataaatttgtaatcatatggtaaatttgtggtcatgctgttttgtggcctgtctgttcaattagaaggatattttgtaagcatattaccatgacattaatccaaacacttatttttaataggctgcataatatcctttcatataaatttatagtcatttacagctccttgttgtggacatttggattttttcccatttttgctgttgttttcaatgttttggttaggatccttaaatggctaatatttatttataatacattcctagaaatagcagtatttgaaaaaggatatgaatattttgaaactactgagtgatagccaataaactattctgtgattagggaaatgttatctctgatgtatgcaatatgtagccacaggccacgtggaggctgatgagggcttaaaatgtggttactgaaactgaggacataaatgtttaagtagccaatgtatctagtggtcatttagagcataggatagctctagattcttactgcccaactgtcattcagaaaagttgtagggatttacatttgcatcagcagagtatgagagtgctcacttcctcataccattattagcaatgacatttattgttttctaatatttgtcaatttgacaaaaaaaaagattgtacaattggtttgttgtttggttttgtttcttgagacccggtcttacaccgtcgcccaggctgaagtgcagtggcatgatcacagctcactacagcctcaaccccctgggcttaagtgatcctcccaccttggcatcccaagtagcttggactacaggtgtgcgccaccatgcccagcaaattttaattttttttgtagagatggggtctctctatgatgcctaggctgatcttgaaattctaggtccaagcaattctcccacctctagctcccaaagtgctgggattacatgtawgagaaaccatgcctggctataattttttaattttttaaatttaaatttttgaatgcttgggataaatatttttatttttattttt

SEQ ID NO: 712303 - DNA, 3064 bp, Homo sapiens
agagagaggatgatagagcaaagggagaatgaaagcgtgagcacaagtataccggtgtgttagcttgctttcagtagctatttgagatgtctcataattctatgcatttttggaagaagaatctgggtagtgcattttagctgacctagaaggacttgaaatcaggagctgtttaaatcaccatatgtctcttgctcctctatgaccttgattctgccattaaaattgtaaaccgcttaaagtcaaatttcacccacagacttcagatgagtaaytccagtgttccctctgctctcaacttaggaattccatatggcttagaaatactactcatctgcttaatgtgttgatgaaactactaaggatgactgtaatgtcaaaaacttcactgtcatcagaggacaaaaattaatttactactttacatatatttcatacctagaagaatactatgaatcagctgtccatatttctgcccaaaatctactcaattttaaaatataattagatttcaacttggtttaaaccaaaagcacaaaggcattttaaggaagcatacagtaaagtaaaagaataggggttttgaggaagcagtaaagagctcagactgggaaaaagtgttaaattatggtctaagtataaatcttagtcagagatgctattggttttgtaattttgtgctagtaattcctttttcagaagtcacattgaacagaaatgttcaatatgatgctcaattatgtccaaaattgttcctgaccccgtacatatttccatattgtcatagcatctcatcaagattagaattattcaatttatcaattcactcattcaacaaatatttactgaatacatactaggtgctagggaacacaatggcacaaaatatataccatctttgccatcatggggtttactgtgtagtggtattagtatattagtagtagtaataaataacagaaacggttaacatatttagtatgcatgccatttaagacaacagaaccaatgaggtaaaattatcaccattttatggatgagaaaatgaggcttaagtaggtaaatgctaataaatgcataattacaaaaaaaagagaaaaatgttgagaaggaaaactaaagtgtgtagggaatatctgataattgcctaggagttggggacatatttctgaagaaataatcttcatagtagctttcttgactcaacctaaaatatgacagaccaaacataggtttaagaattataattcttacaaagatgaactttactatttactgtttcaaatcacttcagaatgattgcagtgaatagttcataagaggaataccgaaaaaatagtgttaatgcagaatattatttcggatacctttcttttgagttctataagactgcaaaaatcaattttggaacatcaacttctccaaaaagccataaaataggtatttctgcaccactgattcttgatcattaggatgcttggagatgattaaagtttaaagaggtcattgcttatacctcaaataattaccagcctagtccctgataaatgcaattttttctcttattaccaaaggtagaatgcacgtgcttttactacaaactcctactatattctccatctaaattacaaagataaggtcataacaataacttacaggctccagataccctttttttctttccatctagattactttatgttacaggttctcaaactttagggaacatccaaatcacctagaagtgtcattaaaacgcagaaagctgggccctactttcagagtttctgattctgtaggtgtggggtggagtcagaaaatttgcatttctaacaagttcccaggtgatgttgactttactggtccagagcctgcgctttcaaaacctctggtctaagaagtgagccacagggaggtctataagtaaaagtgggaaagtactcatgtttcccagtgtcagtggtccttaattagcatcattgatggttataagaaacaggcacaaaaattcaataaactcttactatgaacatgaaattacaggcactctcctcttagatgccacttggagaggcagcatggcataatgttgaagacaaaataccctcaagtcaaaatgtctgggttggaatccaagctctgccacttaatagttatgcagtcttgaacaaattatgtaacttctctgtgcctcaatttcctcatccataaaactaggaaaataatatccacctcgtaagatttttacaaaaatttaatgagtaaagcacttagaacaatgtctgatttatattacatataaatgtttattaaataaatgctagtcttctgattaaagccttacaaagctatctctaaggtctcaggactatgcacagctgttctcttcagcaccttcctttattttacacttttattgtttacccactcagaactgaatgtgtagcctatatcgactttagaggaaccttgataaacatttctgtataatatttaccttatataaggagggaatatgtatttataccctccttaaatatgtatatatgctttttttctcttctctccagtttcaacatcccctcacttttagcctgtttgatttaacatagctttgcaaatgtctcctaatcctttaggggaattaagcaagatatataaatcaatgacccccataaatatgctctgactttttcctatgtttaaatactacagtcattaaacaatggaagtaaactaaaacacattattaagcttcaattatgaactaaaaaaaaaacttcagcgattgtgtattaccttttacacaataatgagctataatacaagcataccttattttattgtgcttcactttactgtgatttgtagatatttcttacaaattgaaggtttggcaaccgtgggtcaatcaagtctattgatgtcattttccaacagcgtgtgctcacttcttctctaaaaaaccctaccaaaagttattcttttcccctttaacaaaaacatgtttttcagtttttactaaaattttatcaaatgacaagaaatctgaattataagttga

SEQ ID NO: 712304 - DNA, 1320 bp, Homo sapiens
gggcgaggtggctcacgcctgtaatcccagcactttgggaggccaaggtgggcagatcacgaggtcaggtgatcgagaccatcgtgggtaacacggtgaaaccccgtctctactaaaaaatacaaaaaaaaaattagccgggcacggtggcgggcgccttagtcccatctactcgggaggctgaggcaggagaatggtgtgaacccgggaggcggagtttgcagtaagccgagatcccgccactgcactccagccagggtgactgagtgagactctgtctcaaaaaaaaaaaaaactttctcaagcatgctaagtcacaaaatttgagttatcctgagctttttttactttaagctatcaagccattgtttggaatcttcagaacctctttagagtttgggatttaagagtcagtaggtagatagtgagcttaagatgccaaacacaacatataaagctataaaaatccatatgatcttgaaagattaaatggaagcccagcacaaaacaattgctgagtatattatttacattatctgaaagtatgccagacagacactttatatgttaataaagatatgagaaagaaaattccaaagagtttctaaaaagtgaacaaccacaaaatttcaatagcttgcaacaaacattttcttctcactcatgttacctgatggaaaatcaaatggctgcctggagacagcatggagggagagactgattactgaggtgcacaagaaaacttttcataatgatggttgtgaatgtagtgatatttccaaaagtatatacatatatatatatatatatatctcaaatttgaccacatcacacrtttcaagtatactgaattgactgtgcatctcttattataccccaggaaagttgaagatatgacaatgaaaaaaaaattcttccaccgactacccatcaattttcttctcattagcctcacagatttcacagttaattaaagggaagatgcaaatatgttcaaactgtacatattctgaggcccataccttgccattagctcaataaagagagacattgtccctggcatgaaaatgaaaaacttgcacactccctaggtggcttctggacactcttaagacatgaacacactttgggggctcaccctgtcaggctttgctctccgagcttagatgagaaaaacacaaaaataaaaccaaaaggtgacatttaggtgcccatcaagaaagatgtgttgggaactggacaggtcagggctttaagtactgtatcttactgtatgtttaagtactgtatgttactgtggaaacttacccattttcccct

SEQ ID NO: 712305 - DNA, 1320 bp, Homo sapiens
gggcgaggtggctcacgcctgtaatcccagcactttgggaggccaaggtgggcagatcacgaggtcaggtgatcgagaccatcgtgggtaacacggtgaaaccccgtctctactaaaaaatacaaaaaaaaaattagccgggcacggtggcgggcgccttagtcccatctactcgggaggctgaggcaggagaatggtgtgaacccgggaggcggagtttgcagtaagccgagatcccgccactgcactccagccagggtgactgagtgagactctgtctcaaaaaaaaaaaaaactttctcaagcatgctaagtcacaaaatttgagttatcctgagctttttttactttaagctatcaagccattgtttggaatcttcagaacctctttagagtttgggatttaagagtcagtaggtagatagtgagcttaagatgccaaacacaacatataaagctataaaaatccatatgatcttgaaagattaaatggaagcccagcacaaaacaattgctgagtatattatttacattatctgaaagtatgccagacagacactttatatgttaataaagatatgagaaagaaaattccaaagagtttctaaaaagtgaacaaccacaaaatttcaatagcttgcaacaaacattttcttctcactcatgttacctgatggaaaatcaaatggctgcctggagacagcatggagggagagactgattactgaggtgcacaagaaaacttttcataatgatggttgtgaatgtagtgatatttccaaaagtatatacatatatatatatatatatatctcaaatttgaccacatcacacatttcaagtatactgaattgactgtgcatctcttattataccccaggaaagttgaagatatgamaatgaaaaaaaaattcttccaccgactacccatcaattttcttctcattagcctcacagatttcacagttaattaaagggaagatgcaaatatgttcaaactgtacatattctgaggcccataccttgccattagctcaataaagagagacattgtccctggcatgaaaatgaaaaacttgcacactccctaggtggcttctggacactcttaagacatgaacacactttgggggctcaccctgtcaggctttgctctccgagcttagatgagaaaaacacaaaaataaaaccaaaaggtgacatttaggtgcccatcaagaaagatgtgttgggaactggacaggtcagggctttaagtactgtatcttactgtatgtttaagtactgtatgttactgtggaaacttacccattttcccct

SEQ ID NO: 712306 - DNA, 465 bp, Homo sapiens
aagtgatcctcctgcctcgacctcccaaagtgctgggattacagacctgagctaccatgcccagcctggtttagtttaatttcattttacattcattcattcattcatgagatagggtcttgttctgtcacccaggctggagtgtagtggtgcaaaccacagctttgacctccgggactgaagcagtcctcccacctcagcctcccaagtagctgggaccacaggtgtgtgcctccatgcttggctaacttttgtactttttgtaggctagtcttgaactcctaggctcaagcagtcctcccacctcggtctcccaaagtgcttggatgacagacatgagccagcgcgcctgacctaaagacatatttttccttctagtgtagttcagccttaagactgtatcagcagacagagacggaaaagtaagaaaaattgagtatcagkttatatttataaataaagcag

SEQ ID NO: 712307 - DNA, 1132 bp, Homo sapiens
ggcacggtggctcatgcctgtaatcccagcactttgggaggccgaggcaggcagatcacgaggtcaggagatcgagaccatcctggctaacagtgaaaccctgtctctactgaaaatacaaaaaaaatcagccgggcgtggtggcgggtgcctgtagtcccagctgctcgggaggctgaggcaggagaatggcatgaacccaggagttggagcttgcagtgagccgagattgtgccactgcactccagcctgggcgacagtgagactgcttctcaaaaaaaaaaaaaaaaaaaaaaaaaaaagaaagggtcttcaaagacaataagatctgtgctctcacgtagggtggatgaggggctgccaagttagcaatgaatgtttcccatttcttcttagtttatggactttccataaactcaggatggcagtttggttggttggagaaggatatggtgatggcgggagttacaatacattacttataggggaagataggcttttgaaaggttaaagcttaaaagtgagaatggaaaagggatgaatgaatgaacatgatgaggtgagagggaagaggtaaagggaaaaggagaacaagmaactcttctctgcgtggcacctgggatgaatggtttctggggacatccctgatggcagttttgtggagaggtgcaaagctttatgtgttaagaaatgagctgtaggctcagtgcagtggctcacgcctgtaatcccagcactttgggaggccgaggtgggtgaaaagaaaaaatgggctgggcgccgtggctcacgcctgtaatcccagcactttgggaggccgaggtgggcggatcatgaggtaaggagttcgagagcagcctggccaacatggtgaaaccgtgtctctccaaaaaaatagaaaaaacatccctgcatggtggtgagcacctgtagtcccagttactcaggaggctgaggcatgagaatcgcttaaacctcggaggcggaggctgcaatgagctgagatggtgccactgcactccagcctgggtgacagagctgggtggtggctcaagatatgttttgtaaacctgaagatttgagatcatataagccaaatcgaaacttaattggcattcataacttttggttc

SEQ ID NO: 712308 - DNA, 2906 bp, Homo sapiens
gggcgatgtgctgggcttgggcttctgagggcagcaggcccacctgaagcccccagctgtgtacagtggggctgggcttggaggcaggggcctgcctcccagttcaggactcaatggctcgagttcccacgagagaggcaaaggtcttcttttggtctctgtccctctctcatcccattctctattttatttacattttgcttaggacatttcatgaagacattatacagccaaattcccaatgtgacctccaaacatcaaacatatgtattccccagcccctccccaggtgtttccctggcggccacaggcccctgtttgtgaattctgggcatctccaataggcactttcctctgacctggttacgctgtttaacaaattcatttgggggtgagctcagagatgaggattggagaggagaaagaattgtcttttcttcttaactgtccccaggacgccctgagcaagcttggaggattctcactaatctaatccctgtcagaaaaggaacgataaaacaattcaggctttagaagccaaatccccttcctgcactcatactatttctatatctctgccttaccgtttttctcctttgcaatgaaactgagcttcggtttctcagtgagggtttcagtggataaggatttcatatttcactcttccatttttcgtatttaaatttgctttactctccagtttgactttccactgacccttgaagaattggcgtatttcaaggagggggaaaagatctcattataggaaatgagaaaaatggagcagagttttaaaacttttaatgactaaaacacagtgttcccagtcggtattgtattggggttgaagtcactgtttggttacaagtcttttaggtctaaacggggttgatgacatctgtttaattttagatgtctggaatacattcggaaaataatgaaatccaaatgtatgaccaaattagagaacaattttatctgcgacaaagaagtttttaaaataagaacaactatttcgaccaaacaaagctttaaaagacccatcaaatctttggtcatctcgccttgtcttttcccagtgggtctccatggttgagagaacattgattttctcggtgtgtgcctcagacattattatgtaattttatacccattttcccgtcgtttctctgggcatgcgttctgctctgtgccatcagccctggagagaccacgttcagggaactgaggamgctttatgggaaagctcctttgataaagcaaaggtctcctgtcacaacactcgagggccacctatcacctgtttcatagtgacccaagcaactgtgggaaaagtcctgggaagataaaaaaaaaaaaaagtgccaaggccttgccaatggggcatggcgctaccaatggacatcaggagaaagcagtattcccaactcttatcgtgcctgtgtgacctggcagtgggccagtgtgaccctgtgtgaccctctatgcctgtgtgaccctctatgggcctcgcttgcccaatctgtatgaagagctcaggcactcagggatcctgagaggctggcaggggttggcctctctccaggaagattctgatgtggtgctgaggcactgctactgggatgtgcattaagcagttcctcccatactccctggaagcccagcatctgggatgatgtggagactctggtcacatgggtctcctttattgtccctaccccaggaagtgcaacaagggtagtgtcagcagacagacattctcagagtccactccactccagaccaggtccagtgttcagccatatccttcatccttggtgggactttcatgtacagatagaaagtgaattatgggcaaggccttgcctgatgccttaaaacacttggctactaggcaaggtaattccatccctccagggtatttgagccttccaaatgtttgcagactcttatcctgccctgtcccatccctccagtattggctgaagcctttccccgagaaccagccccttctgtgttgaggtgccccacccccattcagtgctgtttggtcaggctcagtcgtcccagagtcagcttcctgaaccactgtcccatggagaatgtctgcacatttcactcgagacttgggcttgttcgccagatgtcccagaagtggaaaaaggtgtcctaagtgcttgcccttgactagtgaccacagataagcctggagatggggatgatacacttgtgatgcccaggctatgcctgggtaaagctgggtcttggcagggtctccagcctgggccgacctctgcagaaatgagcgggctgagtggctggctgcatgaatagaggggtggaaaatgctgaggggtacccaggcccacctagaactctgggctggggtctgtgtattttgttagccccttgcctgtgccatctggccccttcttgatgccccacccagctggggggcatcattggctgtgctctaggaagggttgaaggatcatctgattgctgtgatatttggcaggtatgtttcagtacattcatgggggcttccagaggatcccagaggcctcgtggtcaagggccatggactctgttttctcatggtcaatgggctgaggttagcaaggagagaggtacaggagagggcagagtggtacatccaacaactggtagttggtgaggaactgtggttctgtggttctacgggaagctagggtggagtttcattcaggcctgggaggtggtgggtggagatcatggagcactgagctggcagtcaggagacatggcccctgcctctgaagttccacgtgaccttgggtgagccagaagcctcgctgggcctcagttcacaatctgtaagatgtggagatgaataccaacctgagaggcttgtggtgaagcccaga

SEQ ID NO: 712309 - DNA, 2906 bp, Homo sapiens
gggcgatgtgctgggcttgggcttctgagggcagcaggcccacctgaagcccccagctgtgtacagtggggctgggcttggaggcaggggcctgcctcccagttcaggactcaatggctcgagttcccacgagagaggcaaaggtcttcttttggtctctgtccctctctcatcccattctctattttatttacattttgcttaggacatttcatgaagacattatacagccaaattcccaatgtgacctccaaacatcaaacatatgtattccccagcccctccccaggtgtttccctggcggccacaggcccctgtttgtgaattctgggcatctccaataggcactttcctctgacctggttacgctgtttaacaaattcatttgggggtgagctcagagatgaggattggagaggagaaagaattgtcttttcttcttaactgtccccaggacgccctgagcaagcttggaggattctcactaatctaatccctgtcagaaaaggaacgataaaacaattcaggctttagaagccaaatccccttcctgcactcatactatttctatatctctgccttaccgtttttctcctttgcaatgaaactgagcttcggtttctcagtgagggtttcagtggataaggatttcatatttcactcttccatttttcgtatttaaatttgctttactctccagtttgactttccactgacccttgaagaattggcgtatttcaaggagggggaaaagatctcattataggaaatgagaaaaatggagcagagttttaaaacttttaatgactaaaacacagtgttcccagtcggtattgtattggggttgaagtcactgtttggttacaagtcttttaggtctaaacggggttgatgacatctgtttaattttagatgtctggaatacattcggaaaataatgaaatccaaatgtatgaccaaattagagaacaattttatctgcgacaaagaagtttttaaaataagaacaactatttcgaccaaacaaagctttaaaagacccatcaaatctttggtcatctcgccttgtcttttcccagtgggtctccatggttgagagaacattgattttctcggtgtgtgcctcagacattattatgtaattttatacccattttcccgtcgtttctctgggcatgcgttctgctctgtgccatcagccctggagagaccacgttcagggaactgaggacgctttatgggaaagctcctttgataaagcaaaggtctcctgtcacaacactcgagggccacctatcacctgtttcatagtgacccaagcaactgtgggaaaagtcctgggaagataaaaaaaaaaaaaagtgccaaggccttgccaatggggcatggcgctaccmatggacatcaggagaaagcagtattcccaactcttatcgtgcctgtgtgacctggcagtgggccagtgtgaccctgtgtgaccctctatgcctgtgtgaccctctatgggcctcgcttgcccaatctgtatgaagagctcaggcactcagggatcctgagaggctggcaggggttggcctctctccaggaagattctgatgtggtgctgaggcactgctactgggatgtgcattaagcagttcctcccatactccctggaagcccagcatctgggatgatgtggagactctggtcacatgggtctcctttattgtccctaccccaggaagtgcaacaagggtagtgtcagcagacagacattctcagagtccactccactccagaccaggtccagtgttcagccatatccttcatccttggtgggactttcatgtacagatagaaagtgaattatgggcaaggccttgcctgatgccttaaaacacttggctactaggcaaggtaattccatccctccagggtatttgagccttccaaatgtttgcagactcttatcctgccctgtcccatccctccagtattggctgaagcctttccccgagaaccagccccttctgtgttgaggtgccccacccccattcagtgctgtttggtcaggctcagtcgtcccagagtcagcttcctgaaccactgtcccatggagaatgtctgcacatttcactcgagacttgggcttgttcgccagatgtcccagaagtggaaaaaggtgtcctaagtgcttgcccttgactagtgaccacagataagcctggagatggggatgatacacttgtgatgcccaggctatgcctgggtaaagctgggtcttggcagggtctccagcctgggccgacctctgcagaaatgagcgggctgagtggctggctgcatgaatagaggggtggaaaatgctgaggggtacccaggcccacctagaactctgggctggggtctgtgtattttgttagccccttgcctgtgccatctggccccttcttgatgccccacccagctggggggcatcattggctgtgctctaggaagggttgaaggatcatctgattgctgtgatatttggcaggtatgtttcagtacattcatgggggcttccagaggatcccagaggcctcgtggtcaagggccatggactctgttttctcatggtcaatgggctgaggttagcaaggagagaggtacaggagagggcagagtggtacatccaacaactggtagttggtgaggaactgtggttctgtggttctacgggaagctagggtggagtttcattcaggcctgggaggtggtgggtggagatcatggagcactgagctggcagtcaggagacatggcccctgcctctgaagttccacgtgaccttgggtgagccagaagcctcgctgggcctcagttcacaatctgtaagatgtggagatgaataccaacctgagaggcttgtggtgaagcccaga

SEQ ID NO: 712310 - DNA, 626 bp, Homo sapiens
tgtgccgaatgttggtgatatttctcccaagactcacccagatgattgctgggctcctgcccctccccatcttcccagcaacccaccacactgaattgattgggtttactggcctcaaagtggccaaacctgaatttgcctcagcttctggtcagaacttctgactaatgaaggctgacccctggtgaattttcagaagccatgacttgcctgcactgagcctattctgctgataagataggcttttgtgcagagcaggcaagagggtagcagcttcaataaggtccatatcaaggtgatactaatccttcggctggctaatgtttgccaaataaatagcctcattaggaagggctataaaagcccgataagattcttctaattatcccccaaagcacaratacttggggtttcagtttagcataataggagacgtggagaaaagagggaacaatgtgtgtaagtgaatattttcaacaccggcctcaccgccgctaacagcggcacatctagcatttcatattttgctttgccagagcagcaaattgctgaacagaagggaaaaaaagacaattacatattttaggttactatttcacctttgcaaatcaatatacaagccatta

SEQ ID NO: 712311 - DNA, 2699 bp, Homo sapiens
  misc_feature 937, 1013, 1014: n = A,T,C or G
gaggtcaggagtttcgagaccagcctgggccagtatgataaaaccctgtctctactaaaaatgtaaaaattagccgggcttggtgacacacacctgtagtcccagctactcaggaggctgaggcagaagaattccttgaacccaggaggcggaggttgcagtgagccaagatcgcgccactgcaccagcctggacagcagaacaagactttgtctcaaaaaaaaaaaaaaaaaagtaaataacgggacatgcagaaaaagaaatagttattttaaattaaagggctgcttttgaaaaattatgaaatggctatttgtatgattctgagaactcaaactacaaattagggctattgtgctattagctttgttctgttgttcaggaggtagtgatacagctatatcagcctaagttccagactaaaaaaatttaatcatcttaactactaacctacctgacttttatacasgtgctaagatgcattgtcttgcttaaatgctggttaagttgactgcatgtaccgtatacagcctacaatggcagactttccacttgcttataataagaaatactgtactctgtatgtgataaaaacacagaatctttctccagagtaaaatgatttgggggatagtagaagggcttgtctgagctgtgtataatcactctattaacaggagcttttttccccctcgtgtttatcagcattggagaaaccaatgtagaaagaaaggccaagaaaaaaaggtatgtgtggttttagcagtgttttatagataacatgtaatactaattggcgggatgggacaaggtgcattttacaacacaatagctatgccagatgcagtggctcatgcctataatcccagcactttgggaggccaaggtgggtggatcacctgaggtcaggagttggagaccagcctgtccaacatgngtgaaaccccgtgtctacatacgtacacacacactaagcacaacaaatctacgccttggggtgggtggtggccacnnatgcctgtaatcccagctacttgagaggctgaggcaggagaattgcttgaacctgggaggcagaggttgccatgagccaagatcatgccattacactccagcctgggcaacagagcgaaactctgtctcaaaaaaaaatagctataagatttggatctgaagcctcttactgcaatttataattaaataatcatcctattttctgataagttcctttttttaacctgtctggaaatgcattgcttccatttctccttttactccaactttctagagtccttgtacgtggaaacaataaataattgtcttctcttggcttagaataggaagtgttaatagactggtaagaaattgttggccagccatatctggtctgaagtagttaaaataaagatgatgaaacagtcaccagctaagctacgtgaggtttaaatagacccaattgttatactgcagctttattctgacattattccctctgaaatgtaatatagtagatatgcttatcttgaattccatccaagagaattaagttgctgaagtaacaatgccttgtaaagagagggactgtggtttacaacaggcaatctccaaaatatcaaacctaaggataacatgctagcaaagcttcaatatataagcatatatatggaatcatatgaaatcgcttttggctgggcgcggtggctcacgcctgtaatcctagcactttgggaggctgaggcgggcagatcatgaggtcaggagttcgagaccagcctggccaacatggtgaacatgatgaaaccccgtctctactaaaaatacaaaaatcatctgggcgtcggtgtgcgcacctgtaatcctggctacttggaaggctgaggcaagagaatttcttgaacctgggaggcagaggttgcagtgagctgagattgtgccactgcactccacactgggcaacagagcaagactctgtctcgaaaagaaaaaaaaaatgaaattgcttttaacattctattacatgtcaccttcccatgtatataactctgtattgtctaataggtctaagagtgtaaccagttccagtagcagtagcagtgacagttctgccagtgattcttcatcagagagtgaagaaacatctacctcttcctcctcagaggacagtgacactgatgaaagctcctctagttcctcatcctcagcctcctccacaacctcttcctcctcctctgattcagactcagattccagctcttccagtagcagtagcaccagcacagatagcagctctgacgatgaaccaccaaagaagaagaaaaagaaatagagttgctccattcatattggactgatggactgaaaacattgatgtgattcttgaaagggaatttagaatatgttaaggccaagtaggttaactggtgaacatttctagaattcaaaagtttctaaatgttttacattgtaagagcatagagaatattaataatggcttatagagagagacttttatttgaagggtgaatcttgttttttttatctttaaaatatatctctagaacttaaagctgaaatctgcaaatctgtttgtgtgatgaaactatcttttctctctgtgaaataaatgccatactttgttatatatgttagtggtatgtatcagacatattttcaggatggtgcgtcaggatatctggcag

SEQ ID NO: 712312 - DNA, 2699 bp, Homo sapiens
  misc_feature 937, 1013, 1014: n = A,T,C or G
gaggtcaggagtttcgagaccagcctgggccagtatgataaaaccctgtctctactaaaaatgtaaaaattagccgggcttggtgacacacacctgtagtcccagctactcaggaggctgaggcagaagaattccttgaacccaggaggcggaggttgcagtgagccaagatcgcgccactgcaccagcctggacagcagaacaagactttgtctcaaaaaaaaaaaaaaaaaagtaaataacgggacatgcagaaaaagaaatagttattttaaattaaagggctgcttttgaaaaattatgaaatggctatttgtatgattctgagaactcaaactacaaattagggctattgtgctattagctttgttctgttgttcaggaggtagtgatacagctatatcagcctaagttccagactaaaaaaatttaatcatcttaactactaacctacctgacttttatacacgtgctaagatrcattgtcttgcttaaatgctggttaagttgactgcatgtaccgtatacagcctacaatggcagactttccacttgcttataataagaaatactgtactctgtatgtgataaaaacacagaatctttctccagagtaaaatgatttgggggatagtagaagggcttgtctgagctgtgtataatcactctattaacaggagcttttttccccctcgtgtttatcagcattggagaaaccaatgtagaaagaaaggccaagaaaaaaaggtatgtgtggttttagcagtgttttatagataacatgtaatactaattggcgggatgggacaaggtgcattttacaacacaatagctatgccagatgcagtggctcatgcctataatcccagcactttgggaggccaaggtgggtggatcacctgaggtcaggagttggagaccagcctgtccaacatgngtgaaaccccgtgtctacatacgtacacacacactaagcacaacaaatctacgccttggggtgggtggtggccacnnatgcctgtaatcccagctacttgagaggctgaggcaggagaattgcttgaacctgggaggcagaggttgccatgagccaagatcatgccattacactccagcctgggcaacagagcgaaactctgtctcaaaaaaaaatagctataagatttggatctgaagcctcttactgcaatttataattaaataatcatcctattttctgataagttcctttttttaacctgtctggaaatgcattgcttccatttctccttttactccaactttctagagtccttgtacgtggaaacaataaataattgtcttctcttggcttagaataggaagtgttaatagactggtaagaaattgttggccagccatatctggtctgaagtagttaaaataaagatgatgaaacagtcaccagctaagctacgtgaggtttaaatagacccaattgttatactgcagctttattctgacattattccctctgaaatgtaatatagtagatatgcttatcttgaattccatccaagagaattaagttgctgaagtaacaatgccttgtaaagagagggactgtggtttacaacaggcaatctccaaaatatcaaacctaaggataacatgctagcaaagcttcaatatataagcatatatatggaatcatatgaaatcgcttttggctgggcgcggtggctcacgcctgtaatcctagcactttgggaggctgaggcgggcagatcatgaggtcaggagttcgagaccagcctggccaacatggtgaacatgatgaaaccccgtctctactaaaaatacaaaaatcatctgggcgtcggtgtgcgcacctgtaatcctggctacttggaaggctgaggcaagagaatttcttgaacctgggaggcagaggttgcagtgagctgagattgtgccactgcactccacactgggcaacagagcaagactctgtctcgaaaagaaaaaaaaaatgaaattgcttttaacattctattacatgtcaccttcccatgtatataactctgtattgtctaataggtctaagagtgtaaccagttccagtagcagtagcagtgacagttctgccagtgattcttcatcagagagtgaagaaacatctacctcttcctcctcagaggacagtgacactgatgaaagctcctctagttcctcatcctcagcctcctccacaacctcttcctcctcctctgattcagactcagattccagctcttccagtagcagtagcaccagcacagatagcagctctgacgatgaaccaccaaagaagaagaaaaagaaatagagttgctccattcatattggactgatggactgaaaacattgatgtgattcttgaaagggaatttagaatatgttaaggccaagtaggttaactggtgaacatttctagaattcaaaagtttctaaatgttttacattgtaagagcatagagaatattaataatggcttatagagagagacttttatttgaagggtgaatcttgttttttttatctttaaaatatatctctagaacttaaagctgaaatctgcaaatctgtttgtgtgatgaaactatcttttctctctgtgaaataaatgccatactttgttatatatgttagtggtatgtatcagacatattttcaggatggtgcgtcaggatatctggcag

SEQ ID NO: 712313 - DNA, 2699 bp, Homo sapiens
  misc_feature 937, 1013, 1014: n = A,T,C or G
gaggtcaggagtttcgagaccagcctgggccagtatgataaaaccctgtctctactaaaaatgtaaaaattagccgggcttggtgacacacacctgtagtcccagctactcaggaggctgaggcagaagaattccttgaacccaggaggcggaggttgcagtgagccaagatcgcgccactgcaccagcctggacagcagaacaagactttgtctcaaaaaaaaaaaaaaaaaagtaaataacgggacatgcagaaaaagaaatagttattttaaattaaagggctgcttttgaaaaattatgaaatggctatttgtatgattctgagaactcaaactacaaattagggctattgtgctattagctttgttctgttgttcaggaggtagtgatacagctatatcagcctaagttccagactaaaaaaatttaatcatcttaactactaacctacctgacttttatacacgtgctaagatgcattgtcttgcttaaatgctggttaagttgactgcatgtaccgtatacagcctacaatggcagactttccacttgcttataataagaaatactgtactctgtatgtgataaaaacacagaatctttctccagagtaaaaygatttgggggatagtagaagggcttgtctgagctgtgtataatcactctattaacaggagcttttttccccctcgtgtttatcagcattggagaaaccaatgtagaaagaaaggccaagaaaaaaaggtatgtgtggttttagcagtgttttatagataacatgtaatactaattggcgggatgggacaaggtgcattttacaacacaatagctatgccagatgcagtggctcatgcctataatcccagcactttgggaggccaaggtgggtggatcacctgaggtcaggagttggagaccagcctgtccaacatgngtgaaaccccgtgtctacatacgtacacacacactaagcacaacaaatctacgccttggggtgggtggtggccacnnatgcctgtaatcccagctacttgagaggctgaggcaggagaattgcttgaacctgggaggcagaggttgccatgagccaagatcatgccattacactccagcctgggcaacagagcgaaactctgtctcaaaaaaaaatagctataagatttggatctgaagcctcttactgcaatttataattaaataatcatcctattttctgataagttcctttttttaacctgtctggaaatgcattgcttccatttctccttttactccaactttctagagtccttgtacgtggaaacaataaataattgtcttctcttggcttagaataggaagtgttaatagactggtaagaaattgttggccagccatatctggtctgaagtagttaaaataaagatgatgaaacagtcaccagctaagctacgtgaggtttaaatagacccaattgttatactgcagctttattctgacattattccctctgaaatgtaatatagtagatatgcttatcttgaattccatccaagagaattaagttgctgaagtaacaatgccttgtaaagagagggactgtggtttacaacaggcaatctccaaaatatcaaacctaaggataacatgctagcaaagcttcaatatataagcatatatatggaatcatatgaaatcgcttttggctgggcgcggtggctcacgcctgtaatcctagcactttgggaggctgaggcgggcagatcatgaggtcaggagttcgagaccagcctggccaacatggtgaacatgatgaaaccccgtctctactaaaaatacaaaaatcatctgggcgtcggtgtgcgcacctgtaatcctggctacttggaaggctgaggcaagagaatttcttgaacctgggaggcagaggttgcagtgagctgagattgtgccactgcactccacactgggcaacagagcaagactctgtctcgaaaagaaaaaaaaaatgaaattgcttttaacattctattacatgtcaccttcccatgtatataactctgtattgtctaataggtctaagagtgtaaccagttccagtagcagtagcagtgacagttctgccagtgattcttcatcagagagtgaagaaacatctacctcttcctcctcagaggacagtgacactgatgaaagctcctctagttcctcatcctcagcctcctccacaacctcttcctcctcctctgattcagactcagattccagctcttccagtagcagtagcaccagcacagatagcagctctgacgatgaaccaccaaagaagaagaaaaagaaatagagttgctccattcatattggactgatggactgaaaacattgatgtgattcttgaaagggaatttagaatatgttaaggccaagtaggttaactggtgaacatttctagaattcaaaagtttctaaatgttttacattgtaagagcatagagaatattaataatggcttatagagagagacttttatttgaagggtgaatcttgttttttttatctttaaaatatatctctagaacttaaagctgaaatctgcaaatctgtttgtgtgatgaaactatcttttctctctgtgaaataaatgccatactttgttatatatgttagtggtatgtatcagacatattttcaggatggtgcgtcaggatatctggcag

SEQ ID NO: 712314 - DNA, 1022 bp, Homo sapiens
tgccttagcacagttccctgtccacagcctgttaagagcaccccagattccccaccttcatgctccctttctcatccttgagcccctgaggtgcctggaaggatctagagcgcagagctgagccctgcaatggctccccatcaccctcaaggtgaagcccaagctcctctaaggccccttctaaactggctctgacaacccgccagtctttttttttttggccctgaggctccagccaagccaccttcctcccagttccctcagtaaaccatgcatcccccgtgtctttgcagatgctgttccttctgcctggaaagcccttcctgcctcactatccacttggcctctgcaaatccttagctccagactcaccttttcagagaagccctccagcttctctaaggtgatgaagagagaggcaccttagagaaacctgtgttagagggggtgacacactgtagcttaaggatctgctttcctgctcgtgtccccattcggctgtgaactttttttgtttttgagacagagtttcactcttgttgcccaggctggagtgcaatggtgccatcttggctcaccgcaacctctgcctcctgggttcaagtgattctcctgtctcagcctcccgagtagctgggattacaggcatgygtcaccacgcccggttaattttgtattttttttttttttagtagagatggggtttctccatgttggtcaggttggtctcaaactccctacctcaggcgatccatcacctcagcctcccaaagtgctgggattacaggtgtgagccactgcgaccagcctcagctatgaagtttttatgtctcactcttagagtaagacaagagaccttggcagagtcattctcctacttagttactcacgggtttccactgtgcgagatcaaggcctctctgggcctccgtgccatcctctgtgtggtaggggttatgacattggccttgccaggctagcgggagtgttaaggattgtgactgtgggggtttggcacacag

SEQ ID NO: 712315 - DNA, 1022 bp, Homo sapiens
tgccttagcacagttccctgtccacagcctgttaagagcaccccagattccccaccttcatgctccctttctcatccttgagcccctgaggtgcctggaaggatctagagcgcagagctgagccctgcaatggctccccatcaccctcaaggtgaagcccaagctcctctaaggccccttctaaactggctctgacaacccgccagtctttttttttttggccctgaggctccagccaagccaccttcctcccagttccctcagtaaaccatgcatcccccgtgtctttgcagatgctgttccttctgcctggaaagcccttcctgcctcactatccacttggcctctgcaaatccttagctccagactcaccttttcagagaagccctccagcttctctaaggtgatgaagagagaggcaccttagagaaacctgtgttagagggggtgacacactgtagcttaaggatctgctttcctgctcgtgtccccattcggctgtgaactttttttgtttttgagacagagtttcactcttgttgcccaggctggagtgcaatggtgccatcttggctcaccgcaacctctgcctcctgggttcaagtgattctcctgtctcagcctcccgagtagctgggattacaggcatgtgtcaccacgcccggttaattttgtattttttttttttttagtagagatggggtttctccatgttggtcaggttggtctcaaactcccyacctcaggcgatccatcacctcagcctcccaaagtgctgggattacaggtgtgagccactgcgaccagcctcagctatgaagtttttatgtctcactcttagagtaagacaagagaccttggcagagtcattctcctacttagttactcacgggtttccactgtgcgagatcaaggcctctctgggcctccgtgccatcctctgtgtggtaggggttatgacattggccttgccaggctagcgggagtgttaaggattgtgactgtgggggtttggcacacag

SEQ ID NO: 712316 - DNA, 1982 bp, Homo sapiens
gtggtatgaatttttaagaatgtatatctctaaatataccatgtgtgtttgtgcatatgcttaaagcatgaagatgtaattatatggaaacatatataagaaatataatggcagttatttggagaaggggactgggggttttaaaggatagtagaggagaatttttcattttatatcttttgatagtgtttggatttttttgtcgttccttattattttgtaattaaaagttaaattgttattcttttggttttacatggttagaagaaattatcctagacagccctaaagtaactcttgtttttaccatagtaatccatgagaatgttagttactcactttaactaggcatttgacaatgaaatgtagaattaggcctttttttttgctttggtgccattactgtagagcacatttaagagattcttatgtcagggactatttctgttcatttttgcttccttgctctgtcagtctgccttgtgcatagggggttctctataaatggttttgagtgaatggacaaataataataatgtggccaactaattgtagttcactattttattttgtttggcccatatttgtatataacaaaggtctttatgaccttggtaactggtgagccacagaagctgcacatagtacctataacatgcccttcaatatgtgaactggagaagtagacactcttttagcataacttattactttttacttttcagtattatttattgatttttgttratgctgggaaattaaatctgacctggaatagaacaaattaataatagttttaacaatagcaaactatagcacttagtctgcgctaggttctattataaatgctttactcttattaacttatttaataatcacaataaccctatttgacagatgaagaaattagcttgcagttcagtaatacccatgtatacctgtccccctgaatcccccaccccacctttacctgtactataccaccgaagtattttctctaagagcccatgttctggttctgccatttactacctgtgaaaccttcagccagttaaactgtttaaagcccttagtagtggagatcagaatacctattttaccttcttgtggcattgtttgaataatgaaggaatgtttacacatgcctttgtaaaccttaaagtgctatcaatccaatttgttcttgaaaaaacatttgacatccaataattataaaggaataaaaggtatgccatatttctatggtaaacagctggcagtatggggaggatggatatattaaaataagacatttataaaagtctttatttgaaagttttattatatgtgataatatgtgatctggatgtaaaattgacaagttggctaagatactagatatcagattccaaagtgagatatcagatcaagatagattgctgtagcatatagaatcctccagtataacctgaactcagccttgagccatgggacattccagtgcccccagggctgcggcattcaactcaggagtacagagctgagatctgtggctggcacttgagttggggaggagcccctaccctcaagagctaagaggggtgagatgcatgggttcctgggcaaggacaagagtggggcatgcctccctttgcagggccagtccagaaaagttttggcatatctccctgtcatagtccctgcacaaggggacccagcaacccaaatcacctaacaaaagtaatgtgggcatggagtgaatgatcagagggggcttcccctaaggccctggagcagagctggtgaggtggtcctttctatcctgtccccgccatcaccactgaagagcatgcctgtgaatgtgaagaagtacagaagagccatgtggctaagtgttagcctagttacccaccgttactcttatgcactagctatctactggattgcagcccaaactacaacaccaaaaattatcttgctaatgtatacgcctgtgaaaccaa

SEQ ID NO: 712317 - DNA, 1051 bp, Homo sapiens
caaaacaaagatttcagctaacagaacccattgggcttttaagctatctggaagagaaaatacatatgcttatcacacttctgtacaaacattttactatggatttttaatgaatatatatatatacattatttaaatatatatattcattaaataatgtatatatatatttaaataatgtatatatatattcataaaaatatacatatatatatattwttttttttttttgagacggagtctcgctctgtcacccaggctggagagcggtggcgcaatctcggctcattgcaagctccgcctcctgggttcacgccattctcctgcctcagcctccagagtagctaggactataggtgcccgccaccacgctcagctaattttctgtattttttagtagagacggggtttcaccatgttagccaggatggtctcgatctcctgacctcgtgatctgcccatctcggcctcccaaagtgctgggattacaggcgtgagccaccatgcccggcctaatgaatatattttttataacaacatatgctgaagccgtttgtattctggatttaaccattcaagaaatctgaattaaatcatgtataaagatgcttttaaaaacttacttgaagcagaaacagcagataacagtgccaagtataaatctatcctctttggctgagtgttgttcactaaggccagtttatcatcagcgtgacaggctgccattagcccagcccagatagcaggatcacctgaaaacaggaaatacacagtgataagtcttgttaaaatcaacatgttgcttaaaaactatcaaaaatgagattaagagtttacaagttaaaaaaaaattgtatctaaaaaaaaatttcactttctcaaaggaaaattaaattgcacttgttttcagagacacattgctacattcatctttccagatttgccaatttttccaaacatatcagaggatgataaacatcctattaagctgttcatccatggctggttagctcagctgcctagagtgctgtattactgtggaaagggcaat

SEQ ID NO: 712318 - DNA, 844 bp, Homo sapiens
caatgtgttgggtgctaaagatacaaagttgaatttgacatatctctgtactgggtaattattaactttctactgtggtagtgttttcaaagttggatgatattatttgagtctatgcatttgcttcattgaccaaacactttttcttttcttataaatcactgtctactaaacaagcgtcagcagtaagagctatctagggagtgactggtaagtgctgcccctgccaaacccttgttaaaagacagctttatttcctgatggccaagactcttgctgtgtaagaactaagtaggcttaggacattacttagcagaagctcagaggatgatccttctgaggaggaggcacagtggaggggttcagtgcatgtctttgtcggatctagagatcagtgcccaaatcccagcaattcactagaaaagtgtcagaaaacactgtagcttttaagttcaatataagtttagttgaccattaaacttgaatttgtaaatgtttctaaatgggaagattgcctatttaaccttttttttttaatttgcagacatagttttatttatatttatttatttatttagatacagagtctcactctgtcgccaggctggaggagagtggcacgatctctgctcactgcaacctccacctcccgggttcaagccattctcctgcttcagcctcccgagtagctgggactacaggcgcccgccaccacggccggctaatttttgtatttttagtacaggcggggtttcactatgctggccaggatggtctccatctcttgatctcgtgatctgcccgccttggcctcccaaagtgctggaattacaggsgtgagcca

SEQ ID NO: 712319 - DNA, 1783 bp, Homo sapiens
  misc_feature 800, 801, 802, 803, 804, 805, 806, 807, 808, 809, 810, 811,812, 813, 814, 815, 816, 817, 818, 819, 820, 821, 822, 823,824, 825, 826, 827, 828, 829, 830, 831, 832, 833, 834, 835,836, 837, 838, 839, 840, 841, 842, 843, 844, 845, 846: n = A,T,C or G
  misc_feature 847, 848, 849, 850, 851, 852, 853, 854, 855, 856, 857, 858,859, 860, 861, 862, 863, 864, 865, 866, 867, 868, 869, 870,871, 872, 873, 874, 875, 876, 877, 878, 879, 880, 881, 882,883, 884, 885, 886, 887, 888, 889, 890, 891, 892, 893: n = A,T,C or G
  misc_feature 894, 895, 896, 897, 898, 899: n = A,T,C or G
tgacttcttcgataagatattagtaaaattatttcataactttgtcaaagttaagttataggttaagccctatatatcttaatggcccatccagctaaattaggccttcaggataccacatcccctattatagaagaaccacttatcttccatgaccatacccttataattatttttctaatcagttccttacttctatacattatttctgtaatattcacaacaaaactaatactaacaccatagatgcccaagaactagaaaccatctgaactatcttgcctgccatcatcttagtcttgatcgccctcccatctctatgcatcttatatataacagacaaaatcaagaacccttctctcaycattaaaacaattgggcatcaatggtattgaagctatgaatatacagattatgaagaattaagctttgactctcatatacttccagcaacagacagaggtgatcctatcttctgtcaacatttattctgattctttggtcaccctgaagtctacatcctcctccaaccaggcttcaagataatttgccatatcataacatagtattctggaaaaaaataaccatttggatataggggcatgatgtgagctataatatcaattgttttcttagagtttatcgtatgggctcaccatatatttacagtaggcatagatgtagatacacaagcctacttcactctgttacgataattattggtatttccactggcgtcaaagttttagtggactagtacacttctggggggatactaaatgaaccccgaatgtctgacnnnnnnnnnnnnnnnnnnnnnnnnnnnnnnnnnnnnnnnnnnnnnnnnnnnnnnnnnnnnnnnnnnnnnnnnnnnnnnnnnnnnnnnnnnnnnnnnnnnnctggggtatgcgggatctgattataactataggtgtagaggctgtgggggaggtagaaattggtatgagaagaaccgtcctttcttccaaggtaactacattaggtgtcggtaggtttggcctcatcaaaggaggagcctctgttagcaggagaagctctgaagtcctcattcccttgtctcctattctcactcctaaccaaaacatttcctatatttgctaaagaagacctggtgaacgaagttctgaatcaacttacactgtaattcagtcatgtgcatgattggcctccatttgggagttttggcgaaatctggccagcagctacaagagataagcaatcatttaggacttagaggcttgtcactggacataccttgaactgagaatgtaaacccctgagctggaattttctttctttgaacgcttcagtttggtcatgagcagctggcacccgccctccttagagtcctcattctcactatgatgttgctgcagtcactgggtcctccctctgccttcaacaggctttgtattcccagggaccacaggtgataatttaagcagctgtttcttagtgtgtcatatgtccaagttctcatttactagtggtaattaggttcttactgccttcaaatccaaccaaggctgataagcagttgtatggtcttgttcttgaggaactgttgcctacaactactttttctaccaaattccatattagtaagcattaaattgcaagaaataaaaacaggcacaaaaagaagaatactgcatgatctcacttacacgtggaatcttaagaagttgatctcgtaaaaacagagagtagaaaggtagttaccagagaggggggctgaagggtagggtcaggggagatgttg

SEQ ID NO: 712320 - DNA, 1783 bp, Homo sapiens
  misc_feature 800, 801, 802, 803, 804, 805, 806, 807, 808, 809, 810, 811,812, 813, 814, 815, 816, 817, 818, 819, 820, 821, 822, 823,824, 825, 826, 827, 828, 829, 830, 831, 832, 833, 834, 835,836, 837, 838, 839, 840, 841, 842, 843, 844, 845, 846: n = A,T,C or G
  misc_feature 847, 848, 849, 850, 851, 852, 853, 854, 855, 856, 857, 858,859, 860, 861, 862, 863, 864, 865, 866, 867, 868, 869, 870,871, 872, 873, 874, 875, 876, 877, 878, 879, 880, 881, 882,883, 884, 885, 886, 887, 888, 889, 890, 891, 892, 893: n = A,T,C or G
  misc_feature 894, 895, 896, 897, 898, 899: n = A,T,C or G
tgacttcttcgataagatattagtaaaattatttcataactttgtcaaagttaagttataggttaagccctatatatcttaatggcccatccagctaaattaggccttcaggataccacatcccctattatagaagaaccacttatcttccatgaccatacccttataattatttttctaatcagttccttacttctatacattatttctgtaatattcacaacaaaactaatactaacaccatagatgcccaagaactagaaaccatctgaactatcttgcctgccatcatcttagtcttgatcgccctcccatctctatgcatcttatatataacagacaaaatcaagaacccttctctcatcattaaaacaattgggcatcaatggtattgaagctatgaatatacagattatgaagaattaagctttgactctcatatacttccagcaacagacagaggtgatcctatcttctgtcaacatttattctgattctttggtcaccctgaagtctacatcctcctccaaccaggcttcaagataatttgccatatcataacatagtattctggaaaaaaataaccatttggatataggggcatgatgtgagctataatatcaattgttttcttagagtttatcgtatgggctcaccatatatttacagtaggcatagatgtagatacacaagcctacttcactctgttacgataattattggtatttccactggcgtcaaagttttagtggactagtacacttctggggggatactaaatgaaccccgaatgtctgacnnnnnnnnnnnnnnnnnnnnnnnnnnnnnnnnnnnnnnnnnnnnnnnnnnnnnnnnnnnnnnnnnnnnnnnnnnnnnnnnnnnnnnnnnnnnnnnnnnnnctggggtatgcgggatctgattataactataggtgtagaggctgtgggggaggtagaaattggtatgagaagaaccgtcctttcttccaaggtaactacattaggtgtcggtaggtttggcctcatcaaaggaggagcctctgttagcaggagaagctctgaagtcctcattcccttgtctcctattctcactcctaaccaaaacatttcctatatttgctaaagaagacctggtgaacgaagttctgaatcaacttacactgtaattcagtcatgtgcatgattggcctccatttgggagttttggcgaaatctggccagcagctacaagagataagcaatcatttaggacttagaggcttgtcactggacataccttgaactgagaatgtaaacccctgagctggaattttctttctttgaacgcttcagtttggtcatgagcagctggcmcccgccctccttagagtcctcattctcactatgatgttgctgcagtcactgggtcctccctctgccttcaacaggctttgtattcccagggaccacaggtgataatttaagcagctgtttcttagtgtgtcatatgtccaagttctcatttactagtggtaattaggttcttactgccttcaaatccaaccaaggctgataagcagttgtatggtcttgttcttgaggaactgttgcctacaactactttttctaccaaattccatattagtaagcattaaattgcaagaaataaaaacaggcacaaaaagaagaatactgcatgatctcacttacacgtggaatcttaagaagttgatctcgtaaaaacagagagtagaaaggtagttaccagagaggggggctgaagggtagggtcaggggagatgttg

SEQ ID NO: 712321 - DNA, 799 bp, Homo sapiens
ataattttatgaatatgtctatacaaaggagattaaattgcctcaccatacaatgtaaccaatcactcttacaaactatttcataaaatagtgccttgaagtcagattaggaactaatcctccctttcaaggttagtctcaaagaaagcaatcaattggctgcagacataaagaggtacttccattgccccaaacataattcatttgactctataataggccctgggatttttgactatgatgactcgtgacttaactgtgttaaggttggtaaaagaaaattatctggattggatggcaaattaaaccattctaagtcaatagcattttagtctcaatgactttgttagattataatacagtcaaaaacagagctttaggggaatgagataaagatctggtaagttttgtttttgtttgttttgtttgagacagggttcattcaaagctggaatgcagtggtgtgatcatagttcactgcagccttgaactcctgggctcaagcaatccttccacctcaatctcctaagtagctaggattacaggtgcacaccaccacacctgggtagttttttttttwatttttttattttttgtagagacagggtctccctatattgcccaggccggtctcgaactctagcctttagtgatcctcctgcctctctcccaaagtattgggtttataggactgagccactgcacctggcctctggtaaattttgatgaaaggaaaccaaaaggaaaaggtttgggacatcgagtgaggatcctactggaacaatatctaaatggatga

SEQ ID NO: 712322 - DNA, 801 bp, Homo sapiens
ctaaagcttgggagatccagaatcattattcgatgtgctagcagaaagaaatcccctgaatcaattaactactcaaatgtaaactgcccatctctagaatcagccatataaaaatcaaaagctcttctctgcttcgtaacacccactatattgaagctggttattttataatagtgatgttgttctggtcatagacacgtagtatctggattttccctataagtgacactttgtatgctcacatattggatgcatcagctaaaccatgttcaatgtttagcaaatcagtggttttagaattcaaagttagcaaacaaactcttttttcaaatgacattttacytcaaagacctgtgagaagtgaacacagcctattattcttgaatactctaaaaaaaaccctagagaattggaattatttggcctgtgcaaaagagaaaattttgagaacaaattagctgttctcaaccttatcaaaagacaaagaggaaatgcataaataaaatgcctttaatgcatgtatagcaagaggggatttttctttactctcatttttgagagtggcaagcatgtgtgtttttattaaaccagaggcagactttgttatcataatggtgcatcaaatgtatgtacacatgaaaccattaccataatcatgatagtgaacacattgatcacccttgaaactttccctgtgcctcttttgtctctctcgcctgtcccccaacctgacctcacaatccccagagcgacactgctaaccttctgacactatagatgagtctgtattttctagaattt

SEQ ID NO: 712323 - DNA, 672 bp, Homo sapiens
tggtctgttactttttgtatttgttatggactgaatgtttgtgtcctccccaaaattcatatattcaaatctgaacycccaatgtgatgatatcatgaggtaggtccttttggaggtaattgcaccatgagcggaaagctttcatgaatttgaccagtgcccttataagatgagacaggagagagatgattttttttttctctaggccatgtgagaacaaaacaaaaaaaaatagccatttcaaaagaggtagagtgtcctcaacagacactggatcttttgaagctttgatcttggactccccaacctccataactgtgagaagtaaatgctgtttaagctacccaatctgtggtgtctcgatatggcagcctaatcagactaacacaataatcaaataacatattatcttaatttgtcacaaatatctaccataggcaattaatttttttgtgttcctattgattacaaaaccaataaaacataaagaaataaatttattaactgaatctcagtatgattgatttccagtccatctctgttgactttaaaaaagtcacaatagggattaacatatctttattaaaaatgatcaatcttaaagtttattctccttttaagtgtttagattttacctcttgaaatgctttctgcaattcagtgaaatatttc

SEQ ID NO: 712324 - DNA, 672 bp, Homo sapiens
tggtctgttactttttgtatttgttatggactgaatgtttgtgtcctccccaaaattcatatattcaaatctgaacccccaatgtgatgatatcatgaggtaggtccttttggaggtaattgcaccatgagcggaaagctttcatgaatttgaccagtgcccttataagatgagacaggagagagatgattttttttttctctaggccatgtgagaacaaaacaaaaaaaaatagccatttcaaaagaggtagagtgtcctcamcagacactggatcttttgaagctttgatcttggactccccaacctccataactgtgagaagtaaatgctgtttaagctacccaatctgtggtgtctcgatatggcagcctaatcagactaacacaataatcaaataacatattatcttaatttgtcacaaatatctaccataggcaattaatttttttgtgttcctattgattacaaaaccaataaaacataaagaaataaatttattaactgaatctcagtatgattgatttccagtccatctctgttgactttaaaaaagtcacaatagggattaacatatctttattaaaaatgatcaatcttaaagtttattctccttttaagtgtttagattttacctcttgaaatgctttctgcaattcagtgaaatatttc

SEQ ID NO: 712325 - DNA, 672 bp, Homo sapiens
tggtctgttactttttgtatttgttatggactgaatgtttgtgtcctccccaaaattcatatattcaaatctgaacccccaatgtgatgatatcatgaggtaggtccttttggaggtaattgcaccatgagcggaaagctttcatgaatttgaccagtgcccttataagatgagacaggagagagatgattttttttttctctaggccatgtgagaacaaaacaaaaaaaaatagccatttcaaaagaggtagagtgtcctcaacagacactggatcttttgaagctttgatcttggactccccarcctccataactgtgagaagtaaatgctgtttaagctacccaatctgtggtgtctcgatatggcagcctaatcagactaacacaataatcaaataacatattatcttaatttgtcacaaatatctaccataggcaattaatttttttgtgttcctattgattacaaaaccaataaaacataaagaaataaatttattaactgaatctcagtatgattgatttccagtccatctctgttgactttaaaaaagtcacaatagggattaacatatctttattaaaaatgatcaatcttaaagtttattctccttttaagtgtttagattttacctcttgaaatgctttctgcaattcagtgaaatatttc

SEQ ID NO: 712326 - DNA, 611 bp, Homo sapiens
tgtgacccatcagcactaactaggagactgtttatgagatggccagtgagatttttatttcttgttatccagctgtaaatcagcattaaaagaatctttgtttcagtccaagtatctagaaaataacagctttgccatgtagtggatacaatgcttttaatatatcatgtggctttgaatttttttaaccaaagaaggtcataacatttcattaacactgttgcttttatggcagtggttcatgatttgtcaaaggctaagctgagtctagctgtaattggaaagtatcttcttaacgaaagtattataatatgaaacaatcaatggaaaaaaattygtaaataaaaaaccttctatagattttaaaatggaggaaagaaaacacatctagtgttttctttattgccttaaaatgcttctattcaaatagtaaaaaacttaaattgaatctcaaaaagtaccaaatccaaacttttcattttatagttgagaaaatgagctcaaagagggaggataaatgcttatactagtatgaccagctggttggctgtttataaaatttctttcttcttccaccttgatagtaaggtatgaccttgtgatgaagttct

SEQ ID NO: 712327 - DNA, 986 bp, Homo sapiens
ttgtaataagaatgaataaaagttctaaagcaaacaggcaaaaacctagttactcaagaatatttaccccttttaaaagacaatttgtcttcaaactggatctatactgtatttttcacatgtaccaggggtccttacacaataatgaaattaacatgagatgtgttggaaagcagaacatttactgtgctcctcttagtgcctatatccctaaaccataaacactgttgcctactgcatttcaaaagggaaatggattttttaattttcaagagaattggaaactttacatttccactaatgagggcaaagggaaataaggcaatatgttttaaagttccattcaggacaaaacatcttcagaaaagagatatgtatttaaagtatgggaactacattcaaaacaaaattcttagtactcttgattcttcctttgactatgatcaggttcatgatgtaactcaagctaaacttgcggtatttcaatctatggttcgtctgattcatttgcatctctctcaagmggcagagatgggattagttagtaatgaacatagagagtgttttgaaaaggaaatgagacactaccattttctattaatgttattacgtttaagtgccaggatcaaagcacaaccctctactgttagaggtgaaattactgctaccaatgagcgcagctaccatggtatgtaaattgaatatatactaatttaagaccaacaatgaagctcaggggaagaaggagataatcaaattatcctgttaagcctgataattgcagactagataatgcaataaaagaatctatcagaaacttaacttaatcagatcatctacagcaactaaattacccagataatttaggttgtataggccgagttcaaatctccataaaatggtcaggtatgtctgagacatacctaaggcacaccataaagctgtatgttcaaaagtcaagaacgtatataacacaaaaaaattat

SEQ ID NO: 712328 - DNA, 1600 bp, Homo sapiens
ggtagaaaactataaaactctatctacgaataatatatgctaaattctaatcatccctgccacctatgtcgcctcaacacacaatacacacaaatgcactttaaagtatttcccagtggtgttgctttggttttaagtattgtccaaattgaaccaactcttggtgttcccaaggagaatgctgagtaagggctgaagtacagtttatttaaatgagggctatcactatctccacctttttcagatgtacaggctgggattccaatcccatgtgtgccacagaggacaagctaccatcatctccctgagcctcagttttctcatctgtaaaactgagatggtgatggtgggctgaatatttttcattggtactcagcctctactgactcatctataatctactctctactgcagagatagaaagcctggaaattttatattcctggacactttgccagctgggttctagttaagagagactccagttagatctgaaggcagagaacaggaaaagttattttccttctagttgtacctgtggcatcaactcttgcactcctgagaagtgggggttctttgttcggctacagtggtggtatctccagcagtgtcagcaagagtggtccctgtctagcatccatcacggtgcctgcagcattgtcagcagcaagcacaggctcaggattgcctgctcaaaggtggaagcggcttctggtctccaggtaacacccacttctctctttgcattccttcagtccagaggcagtaaaagcagctagatctcttgagttacaccactctctgctttttgcaccttcaatcctacttatacctttgcaccaattccctacttaatccccctctgctagaatcacatcatgcctgaatacaaatgccatttcccaaagggttattattgggattacatgagataatatagagcaagcactttgctcagtacttggaatatggcaataccaaacaaatgcctactattaccctattattctgtctaatcattgttggacctgatctagcaccctcatgtcagtcctactacatgaaggtaatatagacccttctcttcttaaccatcaaaggatttcagtgaagttgaacttggtttcagaaagctgggggcaaagctctgggaaactagcagaagcaaaagggatcaagcaggaaaaggccagcaagtgtgtattaactagrgcataggtgaaagaagggcttggcttccaaacctgcagtgtgcacaaaaagagtcttgatggttacctgacatcatgaactgaaacttcttgtaagtataaaagtcatttaggctgggtgcagtgactcatgcctgtaatcccagcaatttgggagacctgaggtgggaggactgcttgaggcctaggaattcaagaccagcctgggcaacataacaagtgagaccccatctctactttaatttatacatttttatttttttaaaaaaggaaaaagaggccgggcgcggtgactcatgcctgtaatcccagcattttgggaggctgaggcagagggatcacgaggtcaggagttcgagaccaacgtggagaaaccctatccctactaa

SEQ ID NO: 712329 - DNA, 593 bp, Homo sapiens
aagcagaaactgaaagcctgcaaaatgactgttctgagatgcctttagtaatctggggtattctttggccatgaagatctccactagtttgaatagrgaggtttagttgagttctgtttatttttgtgtttgtttgcttttggtggggacagtggggtattatcagacttcacttgattttaggacagtagacaagactagaggagacataaaaataatagacatgctgaaaagccaaaatagatatataaataaaaaataaaaatattgaacactttcagtcaaatttaccgtctgagcagaccctagaccttactagagatttcatggcaacagaaatagtcatcacattctgtgtccgtctggatttctgccattaattatccactctcttctcagtactgtcaaccttttcctttccactggcatctttccctttgtgcataaacatgctcaagtctctcccatcttaggaataaatacttcctcgattctgcctccactctagctactgaatcttctcctttgtaattttttaaaaatagatcagcttctagaacaagcagtctacatggactgtcttcacttcctca

SEQ ID NO: 712330 - DNA, 1734 bp, Homo sapiens
tatgtcttgccaacactaacccaaagaaagttgattaggtatattaattttggcatcatcttcaagtaatgtgttttgctagcttttaatgggatggaatgagctactctttttttttttttttttttttttttttttgagatggagttttgctcttgttgcccaggctggagtgtaatggcacatctccactcaccgcaacctccgcctcccaggttcaagggattctcccatatgagcctccagagtagctgggattacaggcatgtgccaccatgctcagctagtttttgtattattagtagagacagggttttaccaagttggccaggctggtctcgaactcccgacctcacatgaaccacccgcctcggcctcccaaagtgctgctgggattacaggcgtgagccacctcgcccaaccagaatgagctacttctataggcccagaaggttcacggaaatcagaagggatttttgttttgttttgttttgtttttgagacggagtctcactctgtcgcccaggctcgagtgcaatggcatgatctcggctcattgcaatctctgcctcacgggtttaaacaattctcctgcctcagcctcccagcctgtagctgggaatacaggcacccgccaccatgcccagctaatttttgtatttttagtagagatgaggtttcaccatgttggccaggctggtctcaaactcttgacctcaagtgatccacccgcctcagcctcccaaagtgctgggattacaggtgtgagccaccatgcacagccagaagtcggaagttttaagttgcagttactttgactcaaatgtccccagcccaaattcagcattccattccttctcaaccaagattcttaccttgaatggcagaattgctggccttgagaactcaaattctctgctgtcaggaagcccagttcaagtcctgatattcagcacttctttttctctggctttcagaaattagaacttctttatatcttactactgaggtcctttggctttcacagataagtcactgatcaatcaccctcagccttttgttgtctttctccactgtaccaaggccactcagcaagagacattcaattccacagaccttatgattactatttcccccaaagctgttaaataccagagatattgaatcttctagtttatttccttccaccagcatctgatcttggtttactaccaatggaagtttgaataactggactgctacatcatgccacaggctatttatattccacataccaccagtaatggttgtccttattgccggctgccttgcacataagcatctccaagatctcatttaagagtacaactgtcatttagaatttkctgataccaactgtcctaggtcaggtttcctagtaaacaggctctgagattaaggttttcaggtggtttattaagaaatactttcaaaataaaatccaagagcagtgatgggaaagatagagtactggacaaaatgagaacatgaactgtgatgcagttgtgacagagagcttggctgataccatggggttctctgtagttggaatgtcccaaataaaagcaagagggccaagcccttatgccccacattggcctgcctttggataggatgttcctgaaaaggagacataatcttgggcaagaagacttgcctttgctgaaggtaattccttgttaggcagtcagctgtgagctgtcaataaagtagaaa

SEQ ID NO: 712331 - DNA, 1734 bp, Homo sapiens
tatgtcttgccaacactaacccaaagaaagttgattaggtatattaattttggcatcatcttcaagtaatgtgttttgctagcttttaatgggatggaatgagctactctttttttttttttttttttttttttttttgagatggagttttgctcttgttgcccaggctggagtgtaatggcacatctccactcaccgcaacctccgcctcccaggttcaagggattctcccatatgagcctccagagtagctgggattacaggcatgtgccaccatgctcagctagtttttgtattattagtagagacagggttttaccaagttggccaggctggtctcgaactcccgacctcacatgaaccacccgcctcggcctcccaaagtgctgctgggattacaggcgtgagccacctcgcccaaccagaatgagctacttctataggcccagaaggttcacggaaatcagaagggatttttgttttgttttgttttgtttttgagacggagtctcactctgtcgcccaggctcgagtgcaatggcatgatctcggctcattgcaatctctgcctcacgggtttaaacaattctcctgcctcagcctcccagcctgtagctgggaatacaggcacccgccaccatgcccagctaatttttgtatttttagtagagatgaggtttcaccatgttggccaggctggtctcaaactcttgacctcaagtgatccacccgcctcagcctcccaaagtgctgggattacaggtgtgagccaccatgcacagccagaagtcggaagttttaagttgcagttactttgactcaaatgtccccagcccaaattcagcattccattccttctcaaccaagattcttaccttgaatggcagaattgctggccttgagaactcaaattctctgctgtcaggaagcccagttcaagtcctgatattcagcacttctttttctctggctttcagaaattagaacttctttatatcttactactgaggtcctttggctttcacagataagtcactgatcaatcaccctcagccttttgttgtctttctccactgtaccaaggccactcagcaagagacattcaattccacagaccttatgattactatttcccccaaagctgttaaataccagagatattgaatcttctagtttatttccttccaccagcatctgatcttggtttactaccaatggaagtttgaataactggactgctacatcatgccacaggctatttatattccacataccaccagtaatggttgtccttattgccggctgccttgcacataagcatctccaagatctcatttaagagtacaactgtcatttagaatttgctgataccaactgtcctaggtcaggtttcctagtaaacaggctctgagattaagkttttcaggtggtttattaagaaatactttcaaaataaaatccaagagcagtgatgggaaagatagagtactggacaaaatgagaacatgaactgtgatgcagttgtgacagagagcttggctgataccatggggttctctgtagttggaatgtcccaaataaaagcaagagggccaagcccttatgccccacattggcctgcctttggataggatgttcctgaaaaggagacataatcttgggcaagaagacttgcctttgctgaaggtaattccttgttaggcagtcagctgtgagctgtcaataaagtagaaa

SEQ ID NO: 712332 - DNA, 647 bp, Homo sapiens
gtggacactcctcttttaatccagcttattatatgcttgttacatgaagctcctaccaagcatttagcaaagtggagaactttgtttttggatttccctctctttgtctcaccatgctccatatatctggttcccactttggccttctccctattattctttgatttaaacatatgtattgagcctttaacatgtgccaggtattgttttgggttctagggatgcatcaaaggacaaaacagagaaaaacaaatgcacccattagtggaacttgtattctagtcagggatgggtttggcagagtatgttggaaagaaggagacgataaatatcaaacaaaatcagcaaataaattacgtagcatattaaatgaattgaaggggcagccaagagckgggtgagcattccagacagtgaaaacaggtccaaggtcaaaacatgcctggcataagagcaaaaaggaaattctcatggattagaggtcaaacctgagaaaaagagagatgccctttgccctgagcagttggaagaatggagttgccatcagctgggctgggaaaagctgtgagcagaataacattggtggagggatataaaaaattcagttttagaaatgcaaggtttgaatgatctgttagatattcaag

SEQ ID NO: 712333 - DNA, 1185 bp, Homo sapiens
tcactacacagcgattgagaaatcaaggctgttggctgcttggacatctttaatgtgcggcttccaggtaggtcattctgagtgttgccatcacagtcaacctaaactgggaaagagaatggaggagtgcacgtgcaaatcatttatggtccagatttggaggtggtacacatcacctctgctaacatgtcaaaggagagagctcaatcatatgccacgcctaactgctatgtagttttgggccagaagaaggggaatatgtattttggtggacagctaactgacttaactgctaacacccctttatggctttatttgctgatggagaatgattccagaagaaaaaagcatcctacctttacttaccacagattctgtccactaaataatcatattcatgaaacctcaaatccccraattcagtatcaactctcttgacttgaatttctcacttattacctttcccatgctttaagtcaatttaaaggacattttttattgatacagttgattcacattcaagctgatactaactggcaattatcaaccagtgactctaactttagcagggatcataaacacctggtgtaatgtgcaaattctacaccctaaccccacaaagtttcagatttagtatgtctagaatagaacctggtatttatttgtttttttttttgtttttttgtttttttgttttttttttagacagagtctgtctctgtcactcaggctggagtgcagtggcctgaacacagcttactgcaccctacctcatcctcctgagcttaagcaatccttccacctagctgagaccacaagtgtgcaccaacacacctggctaattttttttttttttttttcagtagagatgaggtttctccatgttgcccaagttgttctagaactcctggcctcccaaagtgctgggattacaggcataagccactgcacccgaccctgatattttcatttctaacaaatttcacatgatactgattctgctgatctgggaccacactttgagaataactaccctagacttttgcaatgatgcctgaatttttctctgcttacacttttgcctacctccttacagcaaaaccatccttccttgaacccaagaggacttaaagatatctgctcaccttctgtaaggcaaactgaaacttctatttgagctggtgt

SEQ ID NO: 712334 - DNA, 1185 bp, Homo sapiens
tcactacacagcgattgagaaatcaaggctgttggctgcttggacatctttaatgtgcggcttccaggtaggtcattctgagtgttgccatcacagtcaacctaaactgggaaagagaatggaggagtgcacgtgcaaatcatttatggtccagatttggaggtggtacacatcacctctgctaacatgtcaaaggagagagctcaatcatatgccacgcctaactgctatgtagttttgggccagaagaaggggaatatgtattttggtggacagctaactgacttaactgctaacacccctttatggctttatttgctgatggagaatgattccagaagaaaaaagcatcctacctttacttaccacagattctgtccactaaataatcatattcatgaaacctcaaatccccaaattcagtatcaactctcttgacttgaatttctcacttattacctttcccatgctttaagtcaatttaaaggacattttttattgatacagttgattcacattcaagctgatactaactggcaattatcaaccagtgactctaactttagcagggatcataawcacctggtgtaatgtgcaaattctacaccctaaccccacaaagtttcagatttagtatgtctagaatagaacctggtatttatttgtttttttttttgtttttttgtttttttgttttttttttagacagagtctgtctctgtcactcaggctggagtgcagtggcctgaacacagcttactgcaccctacctcatcctcctgagcttaagcaatccttccacctagctgagaccacaagtgtgcaccaacacacctggctaattttttttttttttttttcagtagagatgaggtttctccatgttgcccaagttgttctagaactcctggcctcccaaagtgctgggattacaggcataagccactgcacccgaccctgatattttcatttctaacaaatttcacatgatactgattctgctgatctgggaccacactttgagaataactaccctagacttttgcaatgatgcctgaatttttctctgcttacacttttgcctacctccttacagcaaaaccatccttccttgaacccaagaggacttaaagatatctgctcaccttctgtaaggcaaactgaaacttctatttgagctggtgt

SEQ ID NO: 712335 - DNA, 983 bp, Homo sapiens
tttcctaacaagccccacttattttcaacccggaggcatctttctctctgattgttaaagctaaaagccttagatggtgggagacgtgatcaaggaaagatcatggaaagaattcaagataaattgatcaaggaaagaattcaagataaatttgtttataaagggataggatgaaagagttcaggggcaggacaggagatggaagtaggacctgtggagatgcagcagctgctccatctaaaccacaccccgaatgcctggggaggcatctcccaggaagacrcaagaggatgggatagggcggcctgtcccagggaacaggtgggggtatccaggtggctgtacctccacagcaaggtgtaggtggatggggcaacttttgaaccaagaaccttctttcaactgtgcacagaaacataacaaggtggggagttagaacatccactgcccaccactgccatctgcacagtcgcatgcgaggatggtgttgtcagaatctgactatattttgtgagcctctgcattcatgagtaaacagaactgctcggttcagggggtgacccccgcactggacactgggttgatgtgactgcggagctgtggcccgccaaggtcaatgctgtgacacaggtaggtcatcacacagcaaggggcttcacctctgggctctcctctcctattgccacagaacgcagcagaaatgctgatcccaccccagacacaggcgaagtcagaccccacctccctcccccaagagtggccgcatctcacagccatcgagcttacaggacagaagaagacttctgcaaacacctactgctaaaacccccaaatgggaacacaggtgagcacttaaatacaaacgtaatcatacaccaaaaagtgaatgatgagaaaaacaagcctgctgcctcattccggctatggatggatcactctttttataactgtttacattcttcttaaaattatgccaacagcca

SEQ ID NO: 712336 - DNA, 983 bp, Homo sapiens
tttcctaacaagccccacttattttcaacccggaggcatctttctctctgattgttaaagctaaaagccttagatggtgggagacgtgatcaaggaaagatcatggaaagaattcaagataaattgatcaaggaaagaattcaagataaatttgtttataaagggataggatgaaagagttcaggggcaggacaggagatggaagtaggacctgtggagatgcagcagctgctccatctaaaccacaccccgaatgcctggggaggcatctcccaggaagacgcaagaggatgggatagggcggcctgtcccagggaacaggtgggggtatccaggtggctgtacctccacagcaaggtgtaggtggatggggcaacttttgaaccaagaaccttctttcaactgtgcacagaaacataacaaggtggggagttagaacatccactgcccaccactgccatctgcacagtcgcatgcgaggatggtgttgtcagaatctgactatattttgtgagcctctgcattcatgagtaaacagaactgctcggttcagggggtgacccccgcactggacactgggttgatgtgactgcggagctgtggcccgccaaggtcaatgctgtgacacaggtaggtcatcacacagcaaggggcttcacctctgggctctcctctcctattgccacagaacgcagcagaaatgctgatcccaccccagacacaggcgaagtcagaccccacctccctcccccaagagtggccgcatctcacagccatcgagcttacaggacagaagaagacttctgcaaacacctactgctaaaacccccaaatgggaacacaggtgagcacttaaatacaaacgtaatcatacaccaaaaagtgaatgatgakaaaaacaagcctgctgcctcattccggctatggatggatcactctttttataactgtttacattcttcttaaaattatgccaacagcca

SEQ ID NO: 712337 - DNA, 1924 bp, Homo sapiens
accatgcatccaccatccccaaatctgtgattaaggcttaaaatatgtgaggcatcttgccaggcaagaggttccattgtgaacatgaccttctttgcctcttggtcttcatagggtaaagaaggaatttgctgtaaatcaccatttggcgcatacagaaagagatgccccaatgaaaaagatttgtaaactataaaagactctccgagtgcaaggaattgtttttactgagtccaaaggaatgtctcaatgaagggcaaacagtaggacttgtgaaatgatggaaccttctggaatgctggcggtagactcaactggacatgctgaaaacatttcttaaattgtctgcacaagtgttcagaacatttaaacaagtgctgcattattcccccaagaaattaaatggatgcatctactgggtgattcatgtcatgaagaaaatgcaaggcagtgaaacacatcgacgtagtgcagctgggaagatggcattttgctgcctggtgatctcactccatatttccaccatgttaaaggaaggttttctgcattgtgtgagtcatctcatgaagggttttaacaccagttcttaaatctcctgcatgtatttcattatatacttagaagttaaggtgcttattaaagacacagcttcgtattttccctggctatatctccttcactaataaaccagattttggagcttgaaatgttaacaagtaaacgttcagtgttttaattcagatatcaattgctttcatattgcgctgtggtttaaaatctcatatggttacaatcactgtgcaatgaaatgtcatgatctttcgagtcccctgggatcctcgccattgtgataagtgtgttgtgttaatggccagggctttgcctggctgaggtctttgtcagcagggaacaaacagtgatgctcctatggctgctcccatgaagactgctgcgagcacccgggtatgttctctttcagacaggctttaattacgttcattactatatggtgtcaggggcctctgttcttggccagaacggagtttagagattaaaaaaaatgtatgcagaacccaaggaacccatgaattcaagggtcctgaatgtaattctccaaacagacaactggccagctctatttgcttgcaggaatgacaacttgatagaatgccaggataaaaataaactcccttaaaaccacagcctgtgcacaccggctcgatgtctgggtggcaatatgataggtcagaacgggagactagggagagagattgagcagcccctgggcggctcacagaggcctcctggaccgatggggcgtagagacctcctgcttcaggaggctgagcatgcatacctaaggaatgaatgaatgagtgtgaaagcagattccttcatactgaatgaatgagggtgaaagcagaagctgcttgtgtggttgggtgatctgggagatggccacaatggtccagtagagtttgggattcccaggtagataagcagctccagggtgaattttgcaagcagatgtgggcaggcaggacccctgagtcctcactgtgcacatgaggacagcaacgtctaatcgtggacttgtcctggggactaaatgcagtggttataggtaatgtgttcagctcagggcctggcacctgaagtaaaggcactagggcactgcacctttcctttctcgcttaagggcttgaggagacaatggcacaggtctccgtctgcgttcagggctctgccgtgtggctgctgtgatcttagggatctagggtcctaattcacagggctgtttctaaggctactcaaaataatacaaggtaaagtgtgttttaaaatgttaaattattggccgggcgcggtggctcacrcctgtaatcccagcactttgggaggccgaggcgggcggatcacgagg

SEQ ID NO: 712338 - DNA, 616 bp, Homo sapiens
gaagggattgctccttcctgtttgctttctgactctgattttctgcttgttattcctatgtctctctggaagcactctttcatcctgcagtggcaggtcgttccaggaacaacagttgaatccagtttgcagcttttgcaactcaaacagaaacagtctcagtgcctcttatcagcaacaccagcactggctggctggagcatcatcctcagagacctgaggtccagcttcatgggaaattcctctgaggtccgagccacctacaccagccaaacagggagccctcttcacaagtccatagagaacctccttcaatcctctatgttttaataattttaacctcttcattttgttcccccagtcctaggggtagctgtttcctgaagttatcacacgtcctccacacacaataacttagyttagtgttcctcttttgccttttccgtttttgagtatctagtcaccaattcattatcaattgatttcctatgtaaaaagctaaatctgtttctgttttagagagtgagttacaggttaatttttttaatcaaaaggagcttttgcaatttcatcttttcttgcctctctataataatgtccattttctatttttttt

SEQ ID NO: 712339 - DNA, 1259 bp, Homo sapiens
gataagcaaacttctccagagaatctgtatcttctttatgttaccaatacaaaataattaaaacaaataacagatttgatatccatgccatacttccatttaatatcaattattctgattctatagcccttatgaatttttcaaagaatgctgcattcatcatccctcacagaaacatccaaagaacaggcagcttagaaactcagagttctactggtgagaaaattgaagctgacggagtaaaaaatatacaagatatatatcttacagcttgccaatcacaaatatccaccattctaacattaagacattgaaaccctatctccacgtgcaggtacctgattggccggttctctttactgtcaaagagtgagaagatgacctccagctcctctcccaggttggaacacatgaggctcttcatctggacaaagaggtggtgactgctggcctgcaccggggtgtctttcttccgatgtcgatgttccatctgaatgacaccccccaacaaaaacatgatcagcatggactgaaggaaataacaggacccaacaaactagttagctatgaggtgactgtgatgtcctacgccataactttttattttgctgtggatttggtatctaaatccacagcaaaatatacattctatgtctttcagactgtggacatagaaatagtctggaagatatccaatttaactttggatgttaagttccaaattttcttccaacttctaaaataagaaactgtgaagtttatagattatcaaggaaccttgcttgaagaatttttaaaatcattaatgttaaaataacaactcactgagtagattcaggaagcaggaagttcaaaggattcttttgctcccttatcaactcccaagatgagaacaaattattagtcatctttttaaaaagcagactaaattatatctaagttataacttctcattactcataattaaaagttcttttaggttatactaaattgtaaagttgtggtagttgtctgagacaggctgtggcaaataatagtttctaacttgctgtggcgctatagggagaaacctaggaaagccagcaaggtgtctaaagctaagaatagcatctatgtccaccttcaatccmttcctcaatacagccagtccaggctcaacttgggcaacaagacaagatgtgagttcccacaggttgagggagaaaaagaatcattcacgagtccaggaaggaggataacatggggatgatcattcatcc

SEQ ID NO: 712340 - DNA, 657 bp, Homo sapiens
ctggactgcttgttaaattaaccaggcctcacttcctagatggttacattatccatattttcaagtttctgtctgattctgatcacattattcaactcaaaacttgtgtaggctatttccctctgaaatccttctacacttgtggcacacaatggacttgtctatgtgcatatttagcctattcaccctttatatatattgaaatttaagatgtatattttcacattttaacatcttgaaaatccagaaatatcttacagttgacgacatcttaawatcagaacataattttcagtgcccatggattcaggaatttggtttgttgttcctggaggcctgactggacaattgtagaccatcaatgttgatgtttaagtcaatcaacagtttgagaatcatatgaggaaagaatatgatacccagttgttatctgatgattttttattgacaccttcagatacaagtaagaacagaggcatcaaattttgcataatgggtgtcagcaagtttgagaaaaatttcctggaggaaatactgctgtgtttttacaaaatacctcagtatgtgtcaattcagtggcacagcattttctgtggaaaaaactcaggcattgatgcctcagaattgaagaatgattcacaacaactggacaaagga

SEQ ID NO: 712341 - DNA, 657 bp, Homo sapiens
ctggactgcttgttaaattaaccaggcctcacttcctagatggttacattatccatattttcaagtttctgtctgattctgatcacattattcaactcaaaacttgtgtaggctatttccctctgaaatccttctacacttgtggcacacaatggacttgtctatgtgcatatttagcctattcaccctttatatatattgaaatttaagatgtatattttcacattttaacatcttgaaaatccagaaatatcttacagttgacgacatcttaaaatcagaacataattttcagtgcccatggattcaggaatttggtttgttgttcctggaggcctgactggacaattgtagaccatcaatgttgatgtttaagtcaatcaacagtttgagaatcatatgaggaaagaatatgatacccagttgttatctgatgattttttattgacaccttcagatacaagtaagaacagaggcatcaaattttgcataatgggtgtcagcaagtttgagaaaawtttcctggaggaaatactgctgtgtttttacaaaatacctcagtatgtgtcaattcagtggcacagcattttctgtggaaaaaactcaggcattgatgcctcagaattgaagaatgattcacaacaactggacaaagga

SEQ ID NO: 712342 - DNA, 633 bp, Homo sapiens
tttaatccaagtccctggagttgttgtacccagagccaggtgagctcgatggaagtctcactgaagggcttrgagatgtagtctaagatggagaggaacaaggggctgtttttgaaacccacaggaatcacaaaacaatgccaagcacagtgactcatgcctgtaatcccaacactttgagaggacaaggcaggaggactgcttgagcccaggagttcatgttcagctgtgcgcaacatagtgagaaccccatctttaaagaaaacaggccgggtgcggtggctcacgcctgtaatcccaggactttgggaggctgaggcaggcagatcacctgaggtcaggagttcaagaccaactggccaacatgatgaaaccccgtctctactaaaaatacaaaaattatctgggcatggtggtgggtacctgtagtcccagctactcgggaggctgaggcaggagaatggcatgaacccaggaggcggagcttgcagtgagccgagattgcgccactgcacactccagcctggggtgacagagcgagactccgtctcaaaaaataaataaataaataaataaaagaaaacaaacataaaaagataaacgaaaccatagaacaagaattctcgacctcaa

SEQ ID NO: 712343 - DNA, 592 bp, Homo sapiens
gggatttacatgaagacctatggtttgagttgtctgatgagacgctttgtaactggwtgatgtttgtacggccagcccagaatcacctggagcagaacctggtggcttaccagtatggccaccatgtgtattatacaaccataaaaaatgtggagcccaagcaggaactgaaggtacagtgctgcctgacccgtgctgctatttgctagcaagagtgattgtttagggctttttgcaattttattttcctaaagtgggtttgtttaacaaaaaagggggaggggggtcattttctggttattcacatacttattgagtagctaccatgtagtacacactgtcataatcctgtaaatagaatgaaaagtatatggcttttatgctaatcaaagggcctatgtgaagccgggcatggtggctcacacttgtaatcccagcacttcaggaggctgagacagttggatcacttcaggtctggagttcaagaccagcctggtcaacatggcaaaaccccatttctactaaaaatacaaaaattagccgagcatggtggcgggtgcctgtaatcccagctacttgtgaagctgaggca

SEQ ID NO: 712344 - DNA, 628 bp, Homo sapiens
ctgaggaagacacggggcatcactgcctcgtctgtatgtcctccctaccactgtgggcacaggagcagctggcgaggctagctagcatcaacgatgtgaggcacggtggctttgacttcgcagggcctgctgaatgtagtgtctgccttaatygttacagtgacactgtcgagtataggaatcgtctccacctcagcagtgctcaagaggttagggagcttgtccttggtcctatagccaggaagcagcagagccaggagttgggccctgggtttgtcccactttttactgtttccattattccatgctaccaagttgaggtagctagcaccaagccagagagttcagtggagaaaagatgatacctttttgggaagaaaagacagtccttctaagactaggaggtgagatgggaagaaccccacatcagaagtcagtactgagttctctctcttttctagttactgtgatacttctctaaagcccatttccagactctgtaaaacatagtaatacttaacaagactgtttgcaaagcacatgagacaaggaatgcagaagagctttataattaaatgctgtacggtagaaagattggaactgggttctgtgcagcagtatcaagtta

SEQ ID NO: 712345 - DNA, 527 bp, Homo sapiens
tctcctaatgatatccctccctcctcccccaccccacaacaggccccggtgtgtgatgttccccttcctgtgtccaagtgttctcattattcaattcccacgtatgagtgagaacatgtggtgtttggttttttgtccttgcaatagttttctgagaatgatggtttccagcttcatccatgtccctacaaaagacatgaactcatccttttttatgactgcatagtatttcatggtgtatatgtgctacatttttttaatccagtctatcattgttggacatttgggttggttccaagtctttgctattgtgagtagtgctgcaataaacatacgtgtgcatgtgtctttatagcagcatgattataatcctttgggtatatacccagtaatgggatggctgggtcaaatggtattkctagttctagatccctgaggaattgcaattttagttttatgttagtgttgtacagatgaagaatatttacctctgtgcgttttgtggtttggggtggtttccaagattc

SEQ ID NO: 712346 - DNA, 593 bp, Homo sapiens
agagttatttaaaaggtgcagagtttctgtatggaatgacgaaaaagtcatggaaacagacagtggtaacgactgcacaacactgcaaatgtatttatcactgaattgaaacctgaaaatgatgaaaatggtaaacagcatattatgcatagttttcaacaataaaaaagattaaaaaccccttatgaaatattattcayataatattctacatgaggtgttatacaggctattaggctaaaaaatataccatcatcgtcctctaaactccactttttcccttgtttcatctcttcgatttcctttttcagttctcctatgttttccatagcctttttacgttgctcttctcgccatttttctactctttcttttcgctttctcatttcttcttccagcttattctggtcaaagttcttgggggaataaaagaaagaaagagatgggggaaaataaaaagcaaaaccaaatttaataattttgctccaagtgacattccagtaagttcttcaaagtataaagaaggggaaaaaaggcatatatacaaacccctcagggtagacttagatcacatacctttataaatatacaca

SEQ ID NO: 712347 - DNA, 1318 bp, Homo sapiens
ttttaaacctttaagttggacttgctagcaggacatagttttgccttctatgaaatggagataatgtttatttataaattttaatgagaataaaatgtgatcattttctttgatgttatatagatagaaggtctcttttcttttttagagaaaaggtctccctctgtcacccaggctggagtgcagtggcatgatcaaggctaggcccactgcagccttgaactcctgggctcaatcccacctcagtctcccaagtagctgggactacagacacacaacacaccaccatgtccagctaatttttaaattttttaggaaatgaggtcttgctacgtcgcccaagctggtctagaacttccggcttaagcgatacccctggttaggcctccccagtcagtgggattataggtgtgagccaccacagcaggcttagaaggtccattttttattcacactcaagctaggggtagagttctttttaaaagaacacaaacaaaactccatcttattacttagatattgcttcactgtacaatggtctctctcatcaagaaatgacattggtaacagacccattctctatatttatttatttaacatttatatagaacttactatgcaccatgccttattctcaggactttgtaagtattagtgaatacgatcctgtaaaaccccttgtggtatataccattattacccacccattttatagatgaaactatgccgcagagaagtgatttgctcaaggtcccacagctagtaaatggcagagccagaagtcaacgccagtggctctagctgtgctccgaccactactgcacatcttctgctccctgaaagcctggccatctctgacatgtgacaagcctgtgatgtatccagccccttgggtctgacaccactgcctgcccctgtgcccagataggcgttcctgccttggttcttacaaaacccctgctcaaaagaagcctgttagtaytgagggcaacacccctctttgtctctcagtcctccccaggctgctgccagccacccagcactgtgtcctttgtgcctttcttctaatgccctaggtcagcctccaccccgcattgccacacacagcttttttggtatcctgctctctccacgcgccccgcctcactgccagttgttacaagttgttttaaactcttgcaagtatcacgttttccactcgtgttgcggcagaccatgtgctacattgagcccagtgctgaagacaggagatgaacatgacctgacccatgacctctccagagaccttcagctagaagacgtgcctttcactttttag

SEQ ID NO: 712348 - DNA, 1007 bp, Homo sapiens
tgtgagagatggaagtacgcaatggaaggagaagctgaatttgaaattggaaaactcatgatgtggaattgtaatagggattctacgatgatcattaagttaattaacagttaattgtaatagaaactctctaacagcacttaaggaacattaataccagatagactcattcataacttaggtgatcacaagaaaagccatgtggattcaataatgataacaatgattactcttatgtgttgggcacctactatgtgtcagataatggacttgaacctgtatctatctgattagcgtttagaccactgattgttcttggagaccacgaagaactggcagtcccttggcttggccaattgaaaaaaatcatgctaaaatgacataaaatttaccattttaattattttgaagtgtaagattcagtggcatgaagcaagtttacaacactgtgcaaccatcaccactgtccatttccagatccttttcatcatttcaaacaaactctgtacatattaatattaaacagtaaatttccagtctccctcattcgctggtggcctctactattctttccatctctatgaatttgcctgggccaaatttggtaacactaatgtcayctctacctcaccccaactcccaaactgctcattgatgacaaggtctgctgtcctcattgtgctgatccctcatggcatgcagagctgggcaggctggctggaaacacctctggacccccagaacgttctcagaggcattagaaccagagcaacttcatcttgaataggagctgggtaaaataaggctaagacctactgggctgcattcccagaccgttaggcattctaagtcatggaataatataggaggtcgacaggagatacaggtcataagaccttgctgataaaacaggttgcaataaagaagctggccaaactccactaaaaccaagatggcgacaagagtgacctctggtcgtcctcactgctacactcccagcagcgcca

SEQ ID NO: 712349 - DNA, 1351 bp, Homo sapiens
gtgagtaacatgtgaccctatgggatgtaacttcccaggcctcatctgcacggcactcagtgtgacggtcttgtaagggtaactgccttctgctgttttgtcttgaaagcccttatcagaatgtgacggagttcgacgggcaggatgcrtgtggttccaacagttggacggtggtagacattgacccacccctgaggtccaacgaccccaaatcacagaaccacccagggtggctgatgcggggtctcaagccctggacccagtatgccatctttgtgaagaccctggtcaccttttcggatgaacgccggacctatggggccaagagtgacatcatttatgtccagacagatgccaccagtgagtgtgtcttgggaatgtgaattcgtatgtgaatcagacctcttgcttttaataggctgatgcagtgaggttgtataaaatgctccttgatatggttattggctttttttttttttttagacagggtcttactttgtcacccaggctagagtgcaatgcagtggggtgatcatggctcactgcagcctcaaactcctgggctcaagcaatccttctgcctcagcctcctaagtagaaggaactaccagagtataccaccatgtgtggcttttttttttttttttctttgagatgaagtctcactctgtcacccggactggagtgcaatggcatgatctcggctcactgcaacctccgcctcccaggttcaagtaattctcccacctcagcctcctgagtagctgggactacaggcatgcaccactatacccagctaatttttgtatttcttgtagagacagaacgttgctgtgttacccaggctggtcttgaacccctggcctcaagtgatcctcctgcctcggcctcccaaagtcctgggattagaagtgtgagccaccttgcccagtcagttattggcttttaaaggagctgggtattgaggcttatagtttcagacgaggcagtagcaacaagccacttgatgggaatatttatatttttcatcctattatgaaaaattgtcaaatattcacaacacagaacaaaaccccatagttagccgcctcccagcttcagcctttggtcatttttgtttcatctcgacgcctgttccctcttcccacttgttacttctttttgttttgttgtttgttttggcctggagtatttcacagcaatttaattatgtttgtttgtttgagatggagtctcactctgtcacccaggctggagtgcagtggcgccatctggactcactgcaacctccacctcccaggttcaagtgattctcctgcctcagcctcccaagttgctgggattacagcac

SEQ ID NO: 712350 - DNA, 1351 bp, Homo sapiens
gtgagtaacatgtgaccctatgggatgtaacttcccaggcctcatctgcacggcactcagtgtgacggtcttgtaagggtaactgccttctgctgttttgtcttgaaagcccttatcagaatgtgacggagttcgacgggcaggatgcgtgtggttccaacagttggacggtggtagacattgacccacccctgaggtccaacgaccccaaatcacagaaccacccagggtggctgatgcggggtctcaagccctggacccagtatgccatctttgtgaagaccctggtcaccttttcggatgaacgccggacctatggggccaagagtgacatcatttatgtccagacagatgccaccagtgagtgtgtcttgggaatgtgaattcgtatgtgaatcagacctcttgcttttaayaggctgatgcagtgaggttgtataaaatgctccttgatatggttattggctttttttttttttttagacagggtcttactttgtcacccaggctagagtgcaatgcagtggggtgatcatggctcactgcagcctcaaactcctgggctcaagcaatccttctgcctcagcctcctaagtagaaggaactaccagagtataccaccatgtgtggcttttttttttttttttctttgagatgaagtctcactctgtcacccggactggagtgcaatggcatgatctcggctcactgcaacctccgcctcccaggttcaagtaattctcccacctcagcctcctgagtagctgggactacaggcatgcaccactatacccagctaatttttgtatttcttgtagagacagaacgttgctgtgttacccaggctggtcttgaacccctggcctcaagtgatcctcctgcctcggcctcccaaagtcctgggattagaagtgtgagccaccttgcccagtcagttattggcttttaaaggagctgggtattgaggcttatagtttcagacgaggcagtagcaacaagccacttgatgggaatatttatatttttcatcctattatgaaaaattgtcaaatattcacaacacagaacaaaaccccatagttagccgcctcccagcttcagcctttggtcatttttgtttcatctcgacgcctgttccctcttcccacttgttacttctttttgttttgttgtttgttttggcctggagtatttcacagcaatttaattatgtttgtttgtttgagatggagtctcactctgtcacccaggctggagtgcagtggcgccatctggactcactgcaacctccacctcccaggttcaagtgattctcctgcctcagcctcccaagttgctgggattacagcac

SEQ ID NO: 712351 - DNA, 966 bp, Homo sapiens
ctggctccccaggatagaaagcttcatcagaaaagaaatgcccactgaaagttgctatggcagatgtcccccgtaaaagaaacctgaagaccttgaataaaggtggcacccaagtgcctactctgtttaaagaatgtgtgcagcatccagcaaacaggaatgcatgctcattttctttatgtggattggtgttaacrgttgggtgacatgctggggctttgatgacaccacttgcatctgtgagttgatggggcatctgcaagagtggagttaagtttagtccatcttggttatggtggatgcttctggagtgagttaagcacaggaaaaggggcggaacactcacccaaaccaggatgtgtaccagagagggctccattgtctacagctctcaaggctgtgtgtgatgctgtgactgcctcccctcccagagcttcctgcctcccaggaagaatgatcattccactgtgcctgcacattccttcccctctgctgataggaacttagcctccaagggtttgaaaaccagcctccagggcttgctctgctctttacccattgctgcttataagtcaggacctgtgagtgataaacctctccaccccagccttcacaccaaatggaaaaagatgggcaccttggagtattcctttgaaagattactgatttctccaccccaccaccacctccatcatgaaaggtccatcgatagccatcagatttctgaacacactcaggtttagtgtcccctgctatgcaccagccttggaggcctggacacccctcctgttattggtggatccagccagtggtgcctgactcttttgctcctcacctccaccacctcctcttggacttggttctgttgttcatccctgtgtggtacatgtctatggcctttctttcaccagtggcttatttctcccattaagatgtccaagtctcactgatccttaaaagggacca

SEQ ID NO: 712352 - DNA, 642 bp, Homo sapiens
ggctcacgcctgtaatcccagcactttgtgaggccaaggtgggcagatcacttgaggccaggagtttgagaccagcctggccaacatggcaaaactccgtctctactaaagatacaaaaattagccgtgcgtggtggtgggtccctgtaatcccggctactcaaaagygtgaggcacaagaatcacttgaatgtgggaggcagaggttgcagcgagcctagattgcaccactgcactccagctgagccacagagcaagactcatcttaaaaaaattgagagagagagggagaaagaaacaacaatagaatatgaagtatgtctcaaaaatttaaaaaataaaaagtttggcatattaaattcgcatatgggaaataacagtgctattcattgtagcttccaaagtgcagaagatcagaaaaacaccaaacgccctaagcaggggagggatgacctatacaatggattgtctttacaacagaaaactgggcagcctgcacaagaatggggccccccgctgcaggctgatgactaacggggctcaaaccaagtgggaaaattcagtgatttcatgacaaagacagcaaatccagtacaaagacactgacaggcctttgtgcctccctgcatctccaaaattgcc

SEQ ID NO: 712353 - DNA, 1268 bp, Homo sapiens
gctgtaactaacagaattctgcctttcttctttccaagtgtcactgtcttgtgtctttctttgaaaaaaatatttaaatcttatcccacatatatgctttctctccttgtgtctttaaccctgatggacataaaccttcctggttgttttacccacccctgcccatccctcatttctgcctagtgtcccctctccattatcccttttatccccataaccactgcaccccgtagtccctcagagcagaatgtgtgcagttcccttaacttccttgcacactctgtctcatgctacactgaaacccagcagagccctttaaacrcactgcatcctgtaacccccaagtgcttagggagtggtgtccgtgctcttaaaatgccatgtctagtaggagtatctccgtttactttcagacttgtttcctgaacactaagtttgtttgttttttttttttctgagatagagtgcagtggtgcaatttcggctcactgcaacctccgccttccaggttcaagcgattctcttgcttcagcctcctgagtagctgggactacaggcatgcgccaccatgcccagctaatttttgtatttttaggagagatggggtttcaccatgttggccaggatggtctcgatctcttgacctcgtgatccacccacctcggcctcccaaagtgttggggttacaggcatgagccaccgcgcctggccatacgttttgattttttattagggctttggatataccatatcaattctgaactctggaggaactgtaaatctatatataaggctggacactgggaggggctggaaactaatggtcagctatggagagtatgtgatcacacctcagtaaaactctgggcactagggcttgaatgagcttccctggttggcaatatcccataggtgttgtcgtgtattggttcctggaaaggaattcacctatgactctgcagggagaagacaaatggaagctccaaatgtggtgcttatcctggactctgccctgactgcttcttcccttggctgatgctaccctggatctttttcatgtaataaactgtaactgtgagcatggcagctttcagggagttccatgagttcttccagtgaattgtccaactttagggtgatttggggaagcactgaaattgcagtgggcatctgaagtgagtgtggtcttgtgtggactatgtttcctgtaacttctcagtttacctcaaatgtctcctaggagaatggagagtggacttaggtcaaat

SEQ ID NO: 712354 - DNA, 610 bp, Homo sapiens
gagaacataaaatgttgagggagagaggaaccaggacagagaagagcaggacagcagggtaaggggctgcayaggtagaagggaagagcttcaagcccccaatgcaagagcagcccagaagggactggaagaaaaataattacaataaggttacgaaactgtttcccatggagctggatggcatctctttccttgtgtgtcagccatgcagtgtctttaataaaggccagggttgggcacggtggctcacacctgtaatcccaactgtttgagagtccaaggcaggaggatcacttgtggccagaagtttgaggccaacctggacaacatagtaagaccccatctctctcttaaaaaaaaggcccaatatggtggctcatgcctgtaatcccaacattttgagaggccaaggcaggaggatcacttgaccctggggtttgagaacagcctgggcaacatggtgagacttcgtctccacaaaaaaattcaaaaattagccaggcatggtggtgtgtgcctgtgttcccagctactcaggaggctgagacaggagtgtcacttgagcccaggaggttgagctatgatcccaccattgtaatccagcctgggt

SEQ ID NO: 712355 - DNA, 610 bp, Homo sapiens
gagaacataaaatgttgagggagagaggaaccaggacagagaagagcaggacagcagggtaaggggctgcacaggtagaagggaagagcttcaagcccccaatgcaagagcagcccagaagggacyggaagaaaaataattacaataaggttacgaaactgtttcccatggagctggatggcatctctttccttgtgtgtcagccatgcagtgtctttaataaaggccagggttgggcacggtggctcacacctgtaatcccaactgtttgagagtccaaggcaggaggatcacttgtggccagaagtttgaggccaacctggacaacatagtaagaccccatctctctcttaaaaaaaaggcccaatatggtggctcatgcctgtaatcccaacattttgagaggccaaggcaggaggatcacttgaccctggggtttgagaacagcctgggcaacatggtgagacttcgtctccacaaaaaaattcaaaaattagccaggcatggtggtgtgtgcctgtgttcccagctactcaggaggctgagacaggagtgtcacttgagcccaggaggttgagctatgatcccaccattgtaatccagcctgggt

SEQ ID NO: 712356 - DNA, 1815 bp, Homo sapiens
aggaaagagaaaaagctaaaagatataatattttttagagtttaaaaaaagaacagtgggctgggcatggtggttcacacctataaatcccagcacttttcgaggctgaggtggctagatagcttgagccctggagtttgaaaccagcctgggaaacatagtaagaccgtctctataaaaaatcaaaaattagctgggcgtggtgttgtgcacctgtagtcccagagtcccagctacttggcaggctaaggtgggaggatcacttgagcctggaggtgttgaggctgcagtgagccgtgatcgtgccacagcaytctagcctgggcgtgccacagcattctagcctgggcaacagagtaaacccctgtctcaaaagaaaaaggaaaaagaacagtgaagggattgggttggtttcagacatttgctggggttggctagactggatggtgggaggagggtcagggctcaccttctcctttttatctcttctccgcactaaagaacctttgtgctgttccgtcgctctgtgatgcaggcctagaactctggtctgagatgcacgctctcagtgtccagtagctccaggcagcagtgccaacaagagtgcccttcaaataatagagagccatttctttgtgggaggacactcagtgcctatggctgaactcaaactggactccacgtggcatagattctactttctacctcctgtgtgggctggagctcctcttgtttttctgccatctagaggagaatcaatttttatcattatttgagtaaatcagagacccaagtcaagtaagagatcactagatcccatcaccagcataaactgatatttgcctatttgttttccttgctaaatcaataacatcagtgcaaagagacacctaagatctgtctcctcagagaatatcatccttctagagatacaggttgggcggggctcagagtgatacacagaggttttttgttgttgttgtttttttttctgatacagagtctcactctgtcacccaagctggagtgcagtggcacaatcttggctcactgccacctctgcctcctgggttcaggagaatctcctgcctcagcctcccgagtagctgggattacaggtatgcaccaccacgcctggctaatttttgtatttttttatttagtagagacggagtttcaccatgttggccaggctggtcttgaactcctgacctcaagggatccgcctgcctcggcctcccaaactgctgggattacaggcatgagccatcgagctcggcctaaacagagcttttatccaaaaattccaatctatgtatgtgtgggagacagatctaggaaaaattctagcgtctttcagtggccctggaggaaattattaaggggcagcaagatccctgcaagagagccgagtgcaacagtatttgttcataagataccttcccacgtcagctgtctctaggctaaacttgtgtaatggtgttgatccgaaaagtaatgcagagcctctaaaagcctctgatcatatgcaaaagatgaagttctggtctcagggagaagaatccatccatagaatgtcacactcctgtgggtcacagcaaaggaccactgactgaaaagtcaattgcggatcacatacagatcagccttctttgagtttctcgaggaaggaaaaatagtatttatttattgagacgaagtattgctctgtcgcccaggctggagtgcaatggtgccatctcagctcactgcaaccttcctgtcctgggttcaagagattctcctgcctcagtctgagtagatgggattacaggc

SEQ ID NO: 712357 - DNA, 623 bp, Homo sapiens
tccccaagctcctacctcctggctccctgagacacaccccgcaacgaatcccggtcccgtcaccttgtgctgtgtctgagggtgaggcaaggtgagggggctctttctgtctctgtcgtcagtcccaggtggccgccagccttgagcccacgttaaaggtagggggctgatggcaggaagctagctgtgagttttggagcagataaacgtccaggaaagaaccttgagcaagagcttcagagatcgctatcagtccgggaaatgtcaccagatgtgggccctaataataggccccaggggctgcaggcttggggsataaggaggaggcgggtgccagggaggtctttccgcaaggccattccaattctcctctgccctctttgtgctaatgaaatttgttaagagatacaaaacacttaaaacttcttgcggccgggctcggtggctcacgcctgtgatcccagcactttgggaggccaaggcgggtggattacctgagacaaggagttcaagaccagcctggccaacatggcgaaaccctgtctctactaaaaatacaaaaattagccagacatcagggtgggtgcctgtaatcccagctacttcggaggctgaggcaggcg

SEQ ID NO: 712358 - DNA, 623 bp, Homo sapiens
tccccaagctcctacctcctggctccctgagacacaccccgcaacgaatcccggtcccgtcaccttgtgctgtgtctgagggtgaggcaaggtgagggggctctttctgtctctgtcgtcagtcccaggtggccgccagccttgagcccacgttaaaggtagggggctgatggcaggaagctagctgtgagttttggagcagataaacgtccaggaaagaaccttgagcaagagcttcagagatcgctatcagtccgggaaatgtcaccagatgtgggccctaataataggccccaggggctgcaggcttggggcrtaaggaggaggcgggtgccagggaggtctttccgcaaggccattccaattctcctctgccctctttgtgctaatgaaatttgttaagagatacaaaacacttaaaacttcttgcggccgggctcggtggctcacgcctgtgatcccagcactttgggaggccaaggcgggtggattacctgagacaaggagttcaagaccagcctggccaacatggcgaaaccctgtctctactaaaaatacaaaaattagccagacatcagggtgggtgcctgtaatcccagctacttcggaggctgaggcaggcg

SEQ ID NO: 712359 - DNA, 623 bp, Homo sapiens
tccccaagctcctacctcctggctccctgagacacaccccgcaacgaatcccggtcccgtcaccttgtgctgtgtctgagggtgaggcaaggtgagggggctctttctgtctctgtcgtcagtcccaggtggccgccagccttgagcccacgttaaaggtagggggctgatggcaggaagctagctgtgagttttggagcagataaacgtccaggaaagaaccttgagcaagagcttcagagatcgctatcagtccgggaaatgtcaccagatgtgggccctaataataggccccaggggctgcaggcttggggcataaggaggaggcgggtgccagggaggtctttccgcaaggccattccaattctcctctgccctcyttgtgctaatgaaatttgttaagagatacaaaacacttaaaacttcttgcggccgggctcggtggctcacgcctgtgatcccagcactttgggaggccaaggcgggtggattacctgagacaaggagttcaagaccagcctggccaacatggcgaaaccctgtctctactaaaaatacaaaaattagccagacatcagggtgggtgcctgtaatcccagctacttcggaggctgaggcaggcg

SEQ ID NO: 712360 - DNA, 616 bp, Homo sapiens
gttacgaatgaccccaccacccaggtactgagcgtagtcccctacagttggttattcaaccctcgccgcctccccctttccggtctctagcagtcgccagtgcccatttttccatctttacatcatgagtacccaatgttaagctctcacttataagtgagaacatgtggtatttggttttctgttcctgcgtgaattccatgaggataatggtctccagccgcatgcatgttaccacaaagcacaagatttcatccttttttttttgagacggagtttctcttttgtcgtccaggctggagtgcaatggcacgatctcggctcactgcaacctccgcctcccaagttcaagcgagtctcctgcytcagcctcgaaagtagctgggattacaggcatgcacaaccacacccaaataattttgtatttatggtagagatggggttttgccatgttggccaggctggtctcgaactcctgacctcaggtgatccacccacctcagcctcgcaaagtgctgggattacaggcctgagccaccgtgcccggcccccagctttatgttcatctcctaccagccactcaccaccgctgctctgccggctctgaacctttttt

SEQ ID NO: 712361 - DNA, 330 bp, Homo sapiens
gggtgaggagggtgaaagtcgccctggggtgcggtctgggcaatgggaaaggggtggaagagggtggggtgggagggtgggactaccgtgggggcggggcctgggcagtggggaaggggtggggtgagaagggtaaaagtcgccctgggctggggtctgggcaacgggaaagggctggaagagggcggcrggatgggagggtggaagctgctatggtgcagcctgggctgtgggaagcgggcagggccgggaaaggagcgggcctgggctctctactcctcttggccccaggtcattttctgctatgtcagcctttctctccactaggac

SEQ ID NO: 712362 - DNA, 516 bp, Homo sapiens
aaccatccctttaccaactcttctttcatcatccatccatccacccatccacccatgtatccttccacccattcttacatccattcctccatctatccatcttttcatctatcttcttccatcatccatwcatccatccatcaattcatccacccattcatccttccacccattcttccatctgtctatcaattctcccatccttttgcccatctttcaccagccatctatctatccactcatctgtccattcatttatccttctattcatccattattcattgaatccatcctcttatcatccatccatcaatcattcatcaaataagtatttaagaaacccaccatccataagaaactgtgtcaagtaccaagaggaaccatacatgatttctgccttcaacaatcagagataaatcgtttcatccatccttcagtttattcatccacttctcatccatccttccatccatccattctttcactgttcatccattcttctatccacccatcctt

SEQ ID NO: 712363 - DNA, 1728 bp, Homo sapiens
tcccctgaaaaaatgtcatcatgcaaagagagagatgacaggatcccccaaatccccagttcagccaggttgttgcaaagtctttcctagaagcctcctacctccgcgctggtctgtcctggaccacccagaggctgtgtctctgttagatgggtcgtctgttccgtccctcacgtcctgacatcgatctgtgccatgaaacagaaaagagagattcctcctgacctccgcccaaagcaagacactccagcaatgcaaaggttaaaataaaagtcaaaataaagaattaacttcatgccttcctccaactttttcttgctttgaagtccatgaattagatgtttaaaatgagtcatctggttcaatagctttgttttattttattttattttatttttgtatttatgtattatgtatgtatgcatgcatttatttatttatttttgagacagagtctcactctgtcacccagactggagtgcagtggcgcgaattcggctcactgcaacctccgccttctgggttcaagcgattcttacgcctcagcctccagagtagctgggattacaggcgtgcactcgtgtgccactatgcctagctaatttttttttttttttaagtagagatggggtttcaccatgttggccaggctgtcttgaactgacctcatgtgatctgcctgcctcagcctcccaaagtgctaagattacagacgtgagccactgcacccagcctatttatgtatttatttttgagacagggtctcactctgttgtccaggctggagtgatctcacctcactgcaacgtctacctcccgggctcaagccatccacccacctcagcctcaccctcctcagctgggaccataggtgcatgccaccatgcctggttaatttttgtatttttttttttgtaaagacagggttttgccatgttgcccaggctggttgcaaactcctgggctcaagctatccacccttttcagctcccccaaagtgctgagattacaggtgtgagccaccacacccagccaatagctttgttttataaaataaaaaaattaagaaaaagtggagcccttggggaagccgaggagggagggtcacttgaggctgggagttcacaaccagcctggcaacatgagaccctatctctacaaaaaaaaaaaaaaaaaaaaaraaagaaagaaaagaaaaaaaaaatagccaggcatggcagtgtgtgcctgtgatcccagctactcaagagactgaggcaggaggaaagcttgaactcagaagtcaaggttacagtgaaccaagatggcaccctgcactcagcctgggtgacagagtgagtccctgtctctaaaaaagaaaaagtggaagcagaataatgttatttcctaatctcaagctctttcctcagctccatcccattccatccacacatgcacccatccgccccttcatttcttcagtcacccattcaaaaaagattttctaagtacctggtctatgcctgacattgtttcaggtaatggaaatagagcaaggacaaggtatttggcctcaacagtctcatattttagaaccatgcaattcaatagaatcttctgcgaggatagaaatattccagacccgcgctgtttattatggtagccacatgtgactactgagtattaaatgtgtgagcaaggctgagaaactaaattttattttatttttatcaagtgagaacagtttta

SEQ ID NO: 712364 - DNA, 1728 bp, Homo sapiens
tcccctgaaaaaatgtcatcatgcaaagagagagatgacaggatcccccaaatccccagttcagccaggttgttgcaaagtctttcctagaagcctcctacctccgcgctggtctgtcctggaccacccagaggctgtgtctctgttagatgggtcgtctgttccgtccctcacgtcctgacatcgatctgtgccatgaaacagaaaagagagattcctcctgacctccgcccaaagcaagacactccagcaatgcaaaggttaaaataaaagtcaaaataaagaattaacttcatgccttcctccaactttttcttgctttgaagtccatgaattagatgtttaaaatgagtcatctggttcaatagctttgttttattttattttattttatttttgtatttatgtattatgtatgtatgcatgcatttatttatttatttttgagacagagtctcactctgtcacccagactggagtgcagtggcgcgaattcggctcactgcaacctccgccttctgggttcaagcgattcttacgcctcagcctccagagtagctgggattacaggcgtgcactcgtgtgccactatgcctagctaatttttttttttttttaagtagagatggggtttcaccatgttggccaggctgtcttgaactgacctcatgtgatctgcctgcctcagcctcccaaagtgctaagattacagacgtgagccactgcacccagcctatttatgtatttatttttgagacagggtctcactctgttgtccaggctggagtgatctcacctcactgcaacgtctacctcccgggctcaagccatccacccacctcagcctcaccctcctcagctgggaccataggtgcatgccaccatgcctggttaatttttgtatttttttttttgtaaagacagggttttgccatgttgcccaggctggttgcaaactcctgggctcaagctatccacccttttcagctcccccaaagtgctgagattacaggtgtgagccaccacacccagccaatagctttgttttataaaataaaaaaattaagaaaaagtggagcccttggggaagccgaggagggagggtcacttgaggctgggagttcacaaccagcctggcaacatgagaccctatctctacaaaaaaaaaaaaaaaaaaaaagaaagaaagaaaagaaaaaaaaaatagccaggcatggcagtgtgtgcctgtgatcccagctactcaagagactgaggcaggaggaaagcttgaactcagaagtcaaggttacagtgaaccaagatggcaccctgcactcagcctgggtgacagagtgagtccctgtctctaaaaaagaaaaagtggaagcagaataatgttatttcctaatctcaasctctttcctcagctccatcccattccatccacacatgcacccatccgccccttcatttcttcagtcacccattcaaaaaagattttctaagtacctggtctatgcctgacattgtttcaggtaatggaaatagagcaaggacaaggtatttggcctcaacagtctcatattttagaaccatgcaattcaatagaatcttctgcgaggatagaaatattccagacccgcgctgtttattatggtagccacatgtgactactgagtattaaatgtgtgagcaaggctgagaaactaaattttattttatttttatcaagtgagaacagtttta

SEQ ID NO: 712365 - DNA, 805 bp, Homo sapiens
gcgtgagccaccacacctggccagctcagcatattcttaagtaggattcacatttaattcttggtattataagttgcaaccatttgatttagaatgtatgcagctctcatgtttgtagtaataaagtttcatttttcctaagtatgaatgaatcgtgttttctaccgtcataatttcatcccacctcaggaggatggatactctgtagcacacagtaatgcaccattgggattttaagattggagcatccagagcaagttttctggttgtgaaatgaaacatgtcctttggttacatatccttaggtaagtgtgaatatgagtaatcatacttagtacttgaattattgtatctgtgctctgccctagaatgcttctgtgggtacagtgaaartcccaaagcagtgcaactccagcatcctataccctcaaatgtgtttatagcccttggcaaatgtttagtgtatcattatatttctatgtgcctttttcttgtgtgctaaattagacccatggcacacattctctctttttttttttttttttttttttttgagagtcttgctctgtcacccaggctggagtgcaatggcgcgatcttgactcactgcaacctccacctcctgggttcgagcaattcttctgcctcagcctcccgagtagctgagattacaggcatctgccaccagtcctggctaatttttttgtatttttagtagagacagggtttcaccatgttggccaggctggtctcaaacacccaacctcaggcgatccacccaccttggcctcccaaagtgctggga

SEQ ID NO: 712366 - DNA, 643 bp, Homo sapiens
ggcctttccatgtattagaaatgaacttggggccaggcacagtggctcacacttgtaatcctagcactttgggaggctgaggttagtggattgattgagcccaggagtttgagaccagcctggacaacatggcaagaacttgtctctacaaaacatataaaaatttggctgtggtggtgcacacctgtagtcctagctactcaggaggctgaggtgggagaatcacctgagcccaggaggtcaaggcagcagccagccatgatggcrtcactgaactccagccttagtacagagtgataccctgtctcagaaaaaaaaataagaagaaaataaaaaataaatgaacttatttgtatttagtcaacagttccatatggtactctttgtcttctttgttttatatgtgtggggatgttgtatcagggaatggccattgatttatatatttttgaggacctttattttattttattttttgcctaggagtttatgtaacacttatatacactccaggagttttggaatgggtagtataaatatttcttttcctttcctttacctgattaagatattaaataatatttttgtcagttacgtttattagaatgtataaattgggaatttattttcatttttctttttt

SEQ ID NO: 712367 - DNA, 643 bp, Homo sapiens
ggcctttccatgtattagaaatgaacttggggccaggcacagtggctcacacttgtaatcctagcactttgggaggctgaggttagtggattgattgagcccaggagtttgagaccagcctggacaacatggcaagaacttgtctctacaaaacatataaaaatttggctgtggtggtgcacacctgtagtcctagctactcaggaggctgaggtgggagaatcacctgagcccaggaggtcaaggcagcagccagccatgatggcgtcactgaactccagccttagtacagagtgataccctgtctcagaaaaaaaaataagaagaaaataaaaaataaatgaacttatttgtatttagtcaacagttccatatggtactctttgtcttctttgttttatatgtgtggggatgttgtatcagggaatggccattgatttatatatttttgaggacctttattttattttattttttgcctaggagtttatgtaacacttayatacactccaggagttttggaatgggtagtataaatatttcttttcctttcctttacctgattaagatattaaataatatttttgtcagttacgtttattagaatgtataaattgggaatttattttcatttttctttttt

SEQ ID NO: 712368 - DNA, 1059 bp, Homo sapiens
gaactcccccctggggtacagagggaaaccctgtcttgaaagaaagaaaagaaaagaaaaaaaaacaagagaaagtgctttcggaacagagatgaattaaagtttggaaatggtgtgtgtgcgttgttttggggacactgtcatgctgtccagtcagcggaagttcatcttgtcttaaaatcattctatgtgggaactgtcatcacatacacagtaatgaatgtgattggtgtcgrtcaggtttcctaggaacgtcagggagcagagaaggctgcccaggacacaggaaacatcagtgtttaagtcgtctcgcaagagacaaaggctgctctctgttcacccgcgccaggcacagggcgcggtacctcctcggcaagtctttggaatggatgaataatcggaaggttcatggtgttgggagggttgctgagcagggaagccttaaatccagaaagcctcatctgcttcacaatgaaacacagcacagaggaagcaacaaggaggcaacacacatttataagaagggtgaggccccaggccaggcaatgaggacacagtggctatgaagacactgctcctgctctcagggtatcatgttggatttcatcccacaacgacataacagaacaggaaaacccgaacctatagggtaaatacaataccatgtcactttaacagtttttcacaccaaaatatgtggtttaagggtgtgatattgcagtttggtagcctttttttttttcttcctttttttttcagagacagggtcttgctttgttacccaggctggagtgcagtggcatgatcacagctcactgtagtcttgacctcctgggctcaagcgatcctcccatctcagcctcccaagtagctaggactacagatgtgtgtcaccatgcctagctaactttttatatttgtagagatgggaggggtggtctcactatgttgcctaggcttgtcttgaactcaagcaatcctcccctctcagaatcccaaagtgctgggattataggtgtgagctactgcaccactgagccaaaaacctgccttggtagc

SEQ ID NO: 712369 - DNA, 1059 bp, Homo sapiens
gaactcccccctggggtacagagggaaaccctgtcttgaaagaaagaaaagaaaagaaaaaaaaacaagagaaagtgctttcggaacagagatgaattaaagtttggaaatggtgtgtgtgcgttgttttggggacactgtcatgctgtccagtcagcggaagttcatcttgtcttaaaatcattctatgtgggaactgtcatcacatacacagtaatgaatgtgattggtgtcggtcaggtttcctaggaacgtcagggagcagagaaggctgcccaggacacaggaaacatcagtgtttaagtcgtctcgcaagagacaaaggctgctctctgttcacccgcgccaggcacagggcgcggtacctcctcggcaagtctttggaatggatgaataatcggaaggttcatgktgttgggagggttgctgagcagggaagccttaaatccagaaagcctcatctgcttcacaatgaaacacagcacagaggaagcaacaaggaggcaacacacatttataagaagggtgaggccccaggccaggcaatgaggacacagtggctatgaagacactgctcctgctctcagggtatcatgttggatttcatcccacaacgacataacagaacaggaaaacccgaacctatagggtaaatacaataccatgtcactttaacagtttttcacaccaaaatatgtggtttaagggtgtgatattgcagtttggtagcctttttttttttcttcctttttttttcagagacagggtcttgctttgttacccaggctggagtgcagtggcatgatcacagctcactgtagtcttgacctcctgggctcaagcgatcctcccatctcagcctcccaagtagctaggactacagatgtgtgtcaccatgcctagctaactttttatatttgtagagatgggaggggtggtctcactatgttgcctaggcttgtcttgaactcaagcaatcctcccctctcagaatcccaaagtgctgggattataggtgtgagctactgcaccactgagccaaaaacctgccttggtagc

SEQ ID NO: 712370 - DNA, 917 bp, Homo sapiens
tgggcttggaaagctccatctccttccccactctggctctcagtctctgccccagttgggatccttatccaggggcacagcgaggccacctgtgcctattcatgccagactctgccggtgagggtgaggatctggggacagctgaggccccggcaggagagggctgggctccccrgggcattcacctctcccagcggcatcttctctagtcctgggctctggggcctccacctgcctggagctaagacccccttttttcccccacctcatctttgtcccctacccaacttgggccccccattccaggctcaaagccaccaggtggcgggtggcagcttccagataaagccattcaagatgaggtggcagcaggagcaggtgagctagagaaggtggtagcaggcattgcaggtaggagcagagagcagcagcgtgagggccgggcgtgtgtgtgcgtgtgtgtgtgtgcatgtgttgtgtgtgtgtgtgaccgcagcactgcacacaccagggccttatgtgaatatggttttaggttccccagccctcctgggtccccaccctgtgtcgcccggaggaagctttctgtacatgcatgtggacattcacacccaaacgcactcacagcccctccacacacacccttctccccacttcacatgccccgcccccccgggaagcctctgtgtcccccagaagcggtccccagctgctccatgcatggcgccaggcctgcccgcagaatggcagggaagaggcggttactggctgtcatgtgcagggtgcagggaaggggccaggaaggaatccggagaggggataaaaagctacagtacctggattaacctatcagccagagcagcgctctcctacccggcgaagggggttcccagcgacagggggaggaggcagagcgg

SEQ ID NO: 712371 - DNA, 786 bp, Homo sapiens
atatgctatattcatacaatgaaagtgcactcaatagcagagagaatgaactactaatacatagaacaacatggatgaatctcagaagcatcatgctaagtgagagaattcagacacaaaatgattccatatatacagaatatctttaaagagcaaaacagtatctagaggaagcagattagtgactgtgatcaagacagggagcagggattgactacaaatgagcatcaggaatcctttggggaatgaaaatcttctagaactagactatgttgatagctgcacaactgcataaaactaatcaatttctaccttaaatggatgtcttgtaaaatgttyttaaaaggctaaaaaacaaaaacaaaattaaatgtatgatgtggcaattacataactgtgtaagaagaatcatgactagaacaatggttgcaaagaaaaaagaaagattggctaaagccagccagagaaatgtataaatcttggaagacatgagaaaagtatgctttgtttgcttattctttgaggggatgtgtaggataattatcttacaggtagataggtatagctctttactgatttctaggaatgcctcaaagactagtcaatatacggacaagatgtgctagctagagatgtgtaatatgctggctaaagttggaaaatatcttagaatagctggcttatattgtttagtgatttatggattgatgcctttaaaacctctataactgattacacagcatgccttaagttatgtgaccagtggagtatataagaccctcctgg

SEQ ID NO: 712372 - DNA, 786 bp, Homo sapiens
atatgctatattcatacaatgaaagtgcactcaatagcagagagaatgaactactaatacatagaacaacatggatgaatctcagaagcatcatgctaagtgagagaattcagacacaaaatgattccatatatacagaatatctttaaagagcaaaacagtatctagaggaagcagattagtgactgtgatcaagacagggagcagggattgactacaaatgagcatcaggaatcctttggggaatgaaaatcttctagaactagactatgttgatagctgcacaactgcataaaactaatcaatttctaccttaaatggatgtcttgtaaaatgtttttaaaaggctaaaaaacaaaaacaaaattaaatgtatgatgtggcaattacataactgtgtaagaagaatcatgactagaacaatggttgcaaagaaaaaagaaagattggctaaagccagccagagaaatgtataaatcttggaagacatgagaaaagtatgctttgtttgcttattctttgaggggatgtgtrggataattatcttacaggtagataggtatagctctttactgatttctaggaatgcctcaaagactagtcaatatacggacaagatgtgctagctagagatgtgtaatatgctggctaaagttggaaaatatcttagaatagctggcttatattgtttagtgatttatggattgatgcctttaaaacctctataactgattacacagcatgccttaagttatgtgaccagtggagtatataagaccctcctgg

SEQ ID NO: 712373 - DNA, 786 bp, Homo sapiens
atatgctatattcatacaatgaaagtgcactcaatagcagagagaatgaactactaatacatagaacaacatggatgaatctcagaagcatcatgctaagtgagagaattcagacacaaaatgattccatatatacagaatatctttaaagagcaaaacagtatctagaggaagcagattagtgactgtgatcaagacagggagcagggattgactacaaatgagcatcaggaatcctttggggaatgaaaatcttctagaactagactatgttgatagctgcacaactgcataaaactaatcaatttctaccttaaatggatgtcttgtaaaatgtttttaaaaggctaaaaaacaaaaacaaaattaaatgtatgatgtggcaattacataactgtgtaagaagaatcatgactagaacaatggttgcaaagaaaaaagaaagattggctaaagccagccagagaaatgtataaatcttggaagacatgagaaaagtatgctttgtttgcttattctttgaggggatgtgtaggataattatcttacaggtagataggtatagctctttactgatttctaggaatgcctcaaagactagtcaatatacggacaagatgtgctagctagagatgtgtaatatgctggctaaagttggaaaatatcttagaatagctggcttatattgtttagtgatttatggattgatgcctttaaaacctctataactgattacacagcatgccttaagttatgtgacyagtggagtatataagaccctcctgg

SEQ ID NO: 712374 - DNA, 1970 bp, Homo sapiens
cagaatagctggcactcacatacactggtgatgggaatgcacaacacagccacttttgaaagtgtatgtaagttttatataagtgcatatgtaccctaaaacttaaagtataataataaaaaaaaaactaatcatacacttatctggctcagcaattccattcgtagtgtctaagggaaagaaaaccttaggtttgtggaaaatctgtatagaaatgtagcattttaaactaataatcatcaaaatctagaatcaaatccaacactctttatccagtaaatggttccaaacaaacaaaaatcctgtggcacatccatgttgttcagcaataaaaaaatgaacttttgatacacacaacatcatgttatcctctcagatgtgtttttgttaagtaaaaagagccagaggcaacctagtatatattttcatttctgtgactttctggatgagacacttaagtggttgctagaggagagaagttgactaaaaggagcagcatgagggaaatttatggttatggatacattactttttgcgtatttcaaaactcatagaactgtacaccacaaagtaaaatttagcttatataaattcaaaaatgaattaagttatttttattttttactgatgtgaatattgaggctttggtgtatcaaattactcagatgtaaaagagttaatatccttttttaagccattctgttgtgaaacttcaattttttaaaaaaatgtttatcacggaaaatttagtgctgttttgtttttctttttaccactttgtatttttctgaatacttccaagtatattcagaacaaacgacattatatctttcaatttccctttccctttattagataaatgcaatgataaatactggcttactatcaagcaaattgaaatgatctctttattttactttcactcttgctttgttgttcgtattgcgattgctgcatttttgtttgattctttgtttattataattatctacatcagtttactttagtttctgggattattccttcaatatctttttaaaataattccaaaagttgtattttactttccacataaaaaacagaactctagccaagaataatgcacacatatttatcttaagaaaacatgttgctgcaaatgttctattattgattaatgttaaaaatcctatattcaaagtgattctctaaaatcttcatgcttaattttctttccaaaatatcaaacacttcaatgaattttaaatactgtgagtagtatgcaggatgttacacagatgcatttattaactagaaaaatattataaaatggataaacatctatgtaacaaataagaatttgtaattgctaacctcacctttttcatatgttcctagtttcttttaagtgtccttccaacagttttcttagataattctgcttttccgtgctttccctcatggttcaattttacatgaataagcaacagcactcatttaccaaaagatgctaaagaagcataattttcttttttatcccctcttccttagccattggcaatgttttctgttctacaatctcattaactagactamaaaaaaacatgaaacttttcaaataactcctttaatcgttattagaggacatcattttcaaaataaatgtgtagactgttatttttaacagcatatcagatctatttattttgctattgcaatctagttttgcaatttgatcttggtttattgttccctccaagccccatccctttattatgttatattttgttagggccctcttttgttaatgtttcttacaatccaatttatgaaacatactttaactttcaagccatgaatgactcaagttaatgcctttctaaatgtgaaccacaatccataggattcgaattgtttaatataaaaatgattagattgctttgtatctcagagcatgattgaacacgtctgtgatgagtttcagagcatgt

SEQ ID NO: 712375 - DNA, 1970 bp, Homo sapiens
cagaatagctggcactcacatacactggtgatgggaatgcacaacacagccacttttgaaagtgtatgtaagttttatataagtgcatatgtaccctaaaacttaaagtataataataaaaaaaaaactaatcatacacttatctggctcagcaattccattcgtagtgtctaagggaaagaaaaccttaggtttgtggaaaatctgtatagaaatgtagcattttaaactaataatcatcaaaatctagaatcaaatccaacactctttatccagtaaatggttccaaacaaacaaaaatcctgtggcacatccatgttgttcagcaataaaaaaatgaacttttgatacacacaacatcatgttatcctctcagatgtgtttttgttaagtaaaaagagccagaggcaacctagtatatattttcatttctgtgactttctggatgagacacttaagtggttgctagaggagagaagttgactaaaaggagcagcatgagggaaatttatggttatggatacattactttttgcgtatttcaaaactcatagaactgtacaccacaaagtaaaatttagcttatataaattcaaaaatgaattaagttatttttattttttactgatgtgaatattgaggctttggtgtatcaaattactcagatgtaaaagagttaatatccttttttaagccattctgttgtgaaacttcaattttttaaaaaaatgtttatcacggaaaatttagtgctgttttgtttttctttttaccactttgtatttttctgaatacttccaagtatattcagaacaaacgacattatatctttcaatttccctttccctttattagataaatgcaatgataaatactggcttactatcaagcaaattgaaatgatctctttattttactttcactcttgctttgttgttcgtattgcgattgctgcatttttgtttgattctttgtttattataattatctacatcagtttactttagtttctgggattattccttcaatatctttttaaaataattccaaaagttgtattttactttccacataaaaaacagaactctagccaagaataatgcacacatatttatcttaagaaaacatgttgctgcaaatgttctattattgattaatgttaaaaatcctatattcaaagtgattctctaaaatcttcatgcttaattttctttccaaaatatcaaacacttcaatgaattttaaatactgtgagtagtatgcaggatgttacacagatgcatttattaactagaaaaatattataaaatggataaacatctatgtaacaaataagaatttgtaattgctaacctcacctttttcatatgttcctagtttcttttaagtgtccttccaacagttttcttagataattctgcttttccgtgctttccctcatggttcaattttacatgaataagcaacagcactcatttaccaaaagatgctaaagaagcataattttcttttttatcccctcttccttagccattggcaatgttttctgttctacaatctcattaactagactaaaaaaaaacatgaaacttttcaaataactcctttaatcgttattagaggacatcattttcaaaataaatgtgtagactgttatttttaacagcatatcagatctatttattttgctattgcaatctagttttgcaatttgatcttggtttattgttccctccaagccccatccctttatkatgttatattttgttagggccctcttttgttaatgtttcttacaatccaatttatgaaacatactttaactttcaagccatgaatgactcaagttaatgcctttctaaatgtgaaccacaatccataggattcgaattgtttaatataaaaatgattagattgctttgtatctcagagcatgattgaacacgtctgtgatgagtttcagagcatgt

SEQ ID NO: 712376 - DNA, 653 bp, Homo sapiens
ttatgtgggtcacaaaatccattatgcactattaaataataatatttataatttatttaaggatgtgtagggggtcagtagctgtaatattcacacatatttgatcattttcataggaaatagatgtttcaaaatcarttgtccctgatcattcttaatgatgttaggcatatttgaaagctccaaaacatttggaaaggagaagagtaaaaatgaaaattttgttttgatagtattgaaactctcaaagcaatttcactagtaaagtatttagtcccattttaatgtccaaatcattatagtaaatcttcatttgatatttctctttctcattcaacttttttactttggtattggtgatgttaattttaaatgctcactattaaccataagttccttagcctgaatgcctatatattaacattcaataacaagagtgttttcaatgtataacagaactcattactttaaaagtctgtcagaaaaacaaatactcattgttaatgtgaactctgcatttagtaattccttctcacatttatatcagtttgtcacttattagaccaaatgaaagtacaaagatgttcctattatactaaaggaaatatagataaattacaaatttataaatcatatttctctttgaccaaaat

SEQ ID NO: 712377 - DNA, 653 bp, Homo sapiens
ttatgtgggtcacaaaatccattatgcactattaaataataatatttataatttatttaaggatgtgtagggggtcagtagctgtaatattcacacatatttgatcattttcataggaaatagatgtttcaaaatcaattgtccctgatcattcttaatgatgttaggcatatttgaaagctccaaaacatttggaaaggagaagagtaaaaatgaaaattttgttttgatagtattgaaactctcaaagcaatttcactagtaaagtatttagtcccattttaatgtccaaatcattatagtaaatcttcatttgatatttctctttctcattcaacttttttactttggtattggtgatgttaattttaaatgctcactattaaccataagttccttagcctgaatgcctatatattaacattcaataacaagagtgttttcaatgtataacagaactcattactttaaaagwctgtcagaaaaacaaatactcattgttaatgtgaactctgcatttagtaattccttctcacatttatatcagtttgtcacttattagaccaaatgaaagtacaaagatgttcctattatactaaaggaaatatagataaattacaaatttataaatcatatttctctttgaccaaaat

SEQ ID NO: 712378 - DNA, 628 bp, Homo sapiens
ggtcctgctgagtacctgggacaataggcacgaaacacaaagcccagctaaatttagtgtgtgtgtgtgtgtgtgtgtgtgtgtgtgtgtgtgtgtatagagatatataaaatattatatattatatataaaatattatacatattatatacaaatatacatattatatataaaatatatataatatataaaatattataaataatatataaaatattatatatattatatataaacagcctattttaaaagtgtataaaattttctttatactatttggattttttcatctcactgaagagtcaatgcrgttatccatcatttaccaagcttttaaaggccaggctgacattatatatacacattttatttccatgaaagtggacagagctagttattttattcttacataaatattgtgccattctctactgtttcattgcacagaacattttttgtattcagactcagtattccatgacaatactgaatacataggatcaggagcaaggggtgccttttgcttagatgcataaaactgtagaattctgacattttacacttttgatattaatttacaaatagtgtattctttggtggagataatttgtttaaaagtagataatgt

SEQ ID NO: 712379 - DNA, 1233 bp, Homo sapiens
ccatgctgcctaatacttaatacaaaaaaagaaaaaaaagcaggttggcagagagtagaagtgaaaacagctcattgtgccatctgtagaggggctttctaatgacatgtcacgattacaatgtttcctgtttccctttaaatgtcaattatccttattaagaagttaattcataataacgactctcattcatttctagaagaacatgaatagtgagctcataattcaatttgttattacagttaaacaaattaactttacttggcctaaagtgctcttctctgatcaagcataccttaatatttaacagatatagattattaatgagcttattgattcacttcattgaaaacagttaaaattcacattaggaggtcgtgatagagacacatatgactgactgtgactaaatgcaaaacttggacactctaagccaattctgttataatttatttcctctggcaggcttgaaaacataaattattctgtgaaccttgtatgcctcttaaggactagacacatgtaacaatatttaacataacaggtcagccatggtggctcacacctgtaatccagcactttgggaggccaaggcgggagaatcacctgagtttgggagttcgagaccaacctgaccaacatggagaaaccctgtctctactaaaaatacaaaattagctggttgtgatggcgcatgcctgtaatcccaactactcgggaggctgagcaggagaatcacttgaatccgggaggtggaggttgcagtgaggtgagattgtgccatggcacattgtgctcctgcctgggcgacaagagtgaaactccatctcaaaaaaacaaataaataacatactttaaaaattttaagattaattaaataaatatgtgcctaaaaatatgaggaatacattactatatataaattggttattaacgtataaaaataaacagatatgctaggagacacagagcaagayggtggaatagaagcctccactgatcaaccctcctgcaaggacatcaacttagcaactatctacaaaatcaaagcgcctttatatgaaccaaaaatcaggtgaacactcatagtacctggttttaacttcgtatctgaggcactgaagaggtaaagagtcttggaacactgacaccatcactaccctatcccctggcagcagtgttggcatgctatggatagattttctgtgtgccgatgagagggtgagagcagca

SEQ ID NO: 712380 - DNA, 622 bp, Homo sapiens
taaaacactgctaaaaatgtgtgtttcttgtttcaattgttaaagctcatttttttttcttttgagacagagtctcactctgtcacccaggctgcagtgcagtggtacgatctcggctcactgcaacctcttcctcctgggttcaagcgattctcctgcctcagcctcccaagtagctgggaytacaggcacgtgccaccacacctggctagtttttgtatttttagtagagacgggttttaccatgttggccaggctggttttaaacccctgacctcaagtgatttgcctatctcggcctcccaaagtgctaggattatagacatgagccactgtgcccaaccagttgttaaagctcatgtctagaaaacaagagcttctgtatttttatctcgaaagagtatatttagaccaggcatgctggctcacacctgtagtcccagcactttgagagactgaggtggacagatcacttaaggtcaggaatttgagaccattctggacaacatggtaaaagcccgtctctagaaaaaattacaaaattagctgggtgtggtggagctcacttctggtcccttctactgagggaccagtagaaggaggctgaggtgggaggattgtc

SEQ ID NO: 712381 - DNA, 1282 bp, Homo sapiens
tcagccggggctgtgtgggaatcggcagggagtgcatcagggagtcagggctcagaaggagactcattgtggatttaccttcacttgatggagaacccccagctcctgctaggctgaccattccatggaagctatttttgtgggtgagcccctaatcctagactctagagtatgaaaagcaatgcacctggggtggatggtcagagagatttctgtttctcagggaggaggttggagctttgacaagacacagctggttgagggagggagctggaagattcagccctggggtgaggaagaagaggaggagggtgcctttatgaagcaggtggcttcactgtttctataaatgaaaatggcacgttttcactgaacactgattatgaaaatggtcttttattaggcagctgtaccagcccataggacagcccttgaggctctagctggggaactctccctgcagttcataaacatggttggctgcaactcgctgcagagccaagagtgtttgttatttctttctactcaaggactgcacaggacaggaatgagcgcctgtggaggtagaaggacagaaagaggccagggctttacctcaaacactgccagatttaattatccctgccatttgtgtttttatctgggagtccttcatcctccttttgaagagactgaaaaagagacccagtcttctgtctaacgaggttggggaggaaggtgctggaatgaggctgggcttgcaaagacaccgatgggtctcctctccttgcagcagaggtgaatgtaattggtctcccttctctttaattaacagaaaaatcccctctgaaatggcgaatgaatagggcaggagactgaggagcacttcagccctgagcaaatcacctgccttccagcctccttgcttttaggaagytgaaccccatgtctcatggcaggttaagcagtccactccacttgcccaggtccctggaaacatggtggcccaagttgtggggaaatcacagggagaatccaaacctcactggtcaggtccccacacaaagccaggggttccactgtggtttcccaaggagaggtaaataacaacagctagtatttattgagcacatactatgtgccaggctcggtgttactcatttaacactgtgttttctattaactaatttaattctaacaattccatgatgtagtttttattttcagatgaagtcaccaagacttgctcatggagacacagctggaaagcagaagcaccaggattcaagcctgggccggtggg

SEQ ID NO: 712382 - DNA, 1282 bp, Homo sapiens
tcagccggggctgtgtgggaatcggcagggagtgcatcagggagtcagggctcagaaggagactcattgtggatttaccttcacttgatggagaacccccagctcctgctaggctgaccattccatggaagctatttttgtgggtgagcccctaatcctagactctagagtatgaaaagcaatgcacctggggtggatggtcagagagatttctgtttctcagggaggaggttggagctttgacaagacacagctggttgagggagggagctggaagattcagccctggggtgaggaagaagaggaggagggtgcctttatgaagcaggtggcttcactgtttctataaatgaaaatggcacgttttcactgaacactgattatgaaaatggtcttttattaggcagctgtaccagcccataggacagcccttgaggctctagctggggaactctccctgcagttcataaacatggttggctgcaactcgctgcagagccaagagtgtttgttatttctttctactcaaggactgcacaggacaggaatgagcgcctgtggaggtagaaggacagaaagaggccagggctttacctcaaacactgccagatttaattatccctgccatttgtgtttttatctgggagtccttcatcctccttttgaagagactgaaaaagagacccagtcttctgtctaacgaggttggggaggaaggtgctggaatgaggctgggcttgcaaagacaccgatgggtctcctctccttgcagcagaggtgaatgtaattggtctcccttctctttaattaacagaaaaatcccctctgaaatggcgaatgaatagggcaggagactgaggagcacttcagccctgagcaaatcacctgccttccagcctccttgcttttaggaagctgaaccccatgtctcatggcaggttaagcagtccactccacttgcccaggtccctggaaacatggtggcccaagttgtggggaaatcacagggagaatccaaacctcactggtcaggtccccacacaaagccaggggttccactgtggtttcccaaggagaggtaaataayaacagctagtatttattgagcacatactatgtgccaggctcggtgttactcatttaacactgtgttttctattaactaatttaattctaacaattccatgatgtagtttttattttcagatgaagtcaccaagacttgctcatggagacacagctggaaagcagaagcaccaggattcaagcctgggccggtggg

SEQ ID NO: 712383 - DNA, 864 bp, Homo sapiens
tgtctagcacattttcagtgttatatattagctattcattgttagctagaggccctgaaaatgtgtcgcagtgaagccagaggtccctgaggtcaggckggggatatcaagtcccaggttttctgcccacccacctcctcttccaaataaggcaaatgcactttttttttttttttggcccaccattggtgcagtaaaactgcatcctacatagatttaacttaagcaaattcaagaatgcccagctggctggatgagactgggagaaaaataacttcaatactgccagtcctactccattctctgagagcaaatgccccaggtgaacctggaggagagggagaacaggcactcccctccagccacagttttccccacctttccccggtctaagcagcttgacgtatactttgttaaaggattttcaagcctaattgtgactacctgcaattttcaccccacaagccgactttaaaacctaactcttgctaaaaagaagacactccagcacctctgtccgcttagcatcaagtaaattccaatcaaattagaaatcttgaaggctttctgagagctggtctttactttaaacagtttaaatcacccctaagcttagcctgaggagtaggattaaagcctccctgatgtggaaaaaaacaaaagaaggaactgtgatttactgcctaagccaccacccttagcttcccccaccacactctccaggtaaaatctgcttccgttctgcctactaccgtaggctaaaaagagatcaccggtcctgagactctagtcacatggatgcgcagcaggacaggcacagagctccgcagcttgaaacatagatgcttgtagctcacaagccca

SEQ ID NO: 712384 - DNA, 864 bp, Homo sapiens
tgtctagcacattttcagtgttatatattagctattcattgttagctagaggccctgaaaatgtgtcgcagtgaagccagaggtccctgaggtcaggcgggggatatcaagtcccaggttttctgcccacccacctcctcttccaaataaggcaaatgcactttttttttttttttggcccaccattggtgcagtaaaactgcatcctacatagatttaacttaagcaaattcaagaatgcccagctggctggatgagactgggagaaaaataacttcaatactgccagtcctactccattctctgagagcaaatgccccaggtgaacctggaggagagggagaacaggcactcccctccagccacagttttccccacctttcccsggtctaagcagcttgacgtatactttgttaaaggattttcaagcctaattgtgactacctgcaattttcaccccacaagccgactttaaaacctaactcttgctaaaaagaagacactccagcacctctgtccgcttagcatcaagtaaattccaatcaaattagaaatcttgaaggctttctgagagctggtctttactttaaacagtttaaatcacccctaagcttagcctgaggagtaggattaaagcctccctgatgtggaaaaaaacaaaagaaggaactgtgatttactgcctaagccaccacccttagcttcccccaccacactctccaggtaaaatctgcttccgttctgcctactaccgtaggctaaaaagagatcaccggtcctgagactctagtcacatggatgcgcagcaggacaggcacagagctccgcagcttgaaacatagatgcttgtagctcacaagccca

SEQ ID NO: 712385 - DNA, 1062 bp, Homo sapiens
tgatttgaaaggattatttatggtttctaaacattcgtctctcccaacttggctcatatattgcctttacaaagtggaaactgaattccattagaatgttctatttttcaatatatacaccttgttatattgtattgtaatatgattactttcagtttccctacttgctatattagaaactgccaaaacacattaaataatgtttaagtttttactataaatgtactgatgactgtgactaatactcttggtgatcatttcaaaggtaatctttagtaacagtaatgttttgcattgacccaagaagaaaatagttcatagtaatgtagaaaataataattatgaaaaatggttatacaatatactctccaagaccttacaaggtggaaagcagaagtgtagcatttactttatgtattttacttttttgagacagggtttcactctgtcacccatgctggagtgcggtggcgcaatcaggactcgctgcaccttcaaactcctgggctcaagcgagtctcctggttcagtttcacaaagtgctgggattacaggcatgagacaccatgcctggccagaagtgtagagtttaaatgacatttctccgaatttgaattttagaaatgatttctttggcttacattgaattgcattgtttgatattaaacaggtatcatgtaaatagaacattgtattaatatgattttttgtgactataaagttctggaattcttgaactcttaaattatgtttctctgtctatgagatggtgttgcttaggggtgaggaacagactgagatctgacaaaagagtctcaatgatgccacgtccctaagaaattatgataaagagaggcaatcagactgaagagtacccatcagactttggmaattgtctctgttgttctgttttggccaaatgcttgcttcataggaggagacaccatctgctttaggcattattcacactgaggggggcatgagcagtaattaagaggagatagtgcataggctgttaaccacagaggaagacttcagaggaatttggtactgtgcacaaac

SEQ ID NO: 712386 - DNA, 2208 bp, Homo sapiens
aaaaattggagatattcactttggagctgcaattaagttgttttaaaactaggattctaataattttctgtgttgtgttaactctttggactttcttagtagaggagcccatggggaaaagaatttaatttctgatgtcttgtactatatatatatatatatatatatatatatatatatatttctgaatttaaagccaggtgtcttaacatagaggctttaatttcttcctgagagcttcataagggagtatatttatattcccatttggtaatttttatgttgttgatgctattattggagaataattatgcctctatttgacttcatcgtgtaacctctggtgaattatgatggagagtgaggctgggcacaaattagaatgagaaacagaatagggagtaaaaatagaacttcgtatgagggtagaagtagaactttggaataagtttacttaacgtatgattctttggacacagtggagcattggttggtatttgcagagaagccttcataaacagggttgttctgaagctcatctctgtccctggggatgaactgaacccatcattagccatttgcttagctgttaaaccaaatatgtgaagagaatggaaaccagaggaatatgtgtacatgtgtgggaatcttatttactactcctcatatttccacaagtagaaaataatatatattcaatctccaagaaggaaaatgggctaaaatccttctagacttctctctactgactttactcctagataaaattcaaatgatgacttttgggattgatacattggggaaaaggtactgagcatgaatggttttgatctttctgggtttccctttctttggagtcaacttgactgaagcacacactagagggaagcttaccagggcagattctgtctctgcagcagagcagtcagcagtcttggacggggttaaattcagatcaaagtgaaatgtattaggagacccatttggccactgatccaagccatattcttcagtttaatgttatcactaatacagttgaatttttatgttcatttccctgacttcctattctgtatttttactctgggaggctataggcacaagagtgattatcactcctaaaaccccaggagatttagagaagtaccaactaatgaaggaggcacagtgagtgcaggagcagtcagtgagctgggagagcccgtcacggggcaccatgtattcaaacttaagaggaagatttgggtcatcaaaagcggaataaaaacgatgacttgtgactatgaccactttttatttttttatttatttttattttttgagacggagtctcactttgttgctcagactggagtgcagtggcgcgatcttggctgactgcaagctccgcctcccaggttcacaccattctcctgcctcagcctcccgggtagctgggactacaggtgcccgccaccacgcccggctaatttttttgtattttcagtagagacggggtttcaccatgttagccaggatggtctcgatctcctgacctcatgatccgcctgcctcggcctccgaaagtgctgggattacaggcatgagccaccacacccggtcaactatgaccacttttttttctgaagcaatggttaagatttcacatgtctacaaggtgaaatgaaaagtaacaaagggctggacttatgtgttttttgtgtgagcagaggtgatgactggcaggcagatgtctcctccagagtagaagttcttgtgtgtgttagcagcctgtagctatgggggaattgttgggtcttcttattttaaagaaaatgccgatataagtatttttataagaaattccctaagttttaaatgttggcttaaatttataggaaaaaattcttggccaattaaaacaggtctatagacttgaagtggtttygggactgttgtaatagaaatgatatttctttcagcatgttggggacctgctccctaatgcacttagatttgagtttctttcttacgagtttattttattccaattggctaaggcagttcagtttcctgtctgtttgctgtatttaaacttctgctctaccttttttattaccactgatttaagaatttatcatatactgccctagaccaaatgtaaagtttatgagtccagtgttcatgggacttgactggatccaagaaagcacatatagggaaatgtgc

SEQ ID NO: 712387 - DNA, 2208 bp, Homo sapiens
aaaaattggagatattcactttggagctgcaattaagttgttttaaaactaggattctaataattttctgtgttgtgttaactctttggactttcttagtagaggagcccatggggaaaagaatttaatttctgatgtcttgtactatatatatatatatatatatatatatatatatatatttctgaatttaaagccaggtgtcttaacatagaggctttaatttcttcctgagagcttcataagggagtatatttatattcccatttggtaatttttatgttgttgatgctattattggagaataattatgcctctatttgacttcatcgtgtaacctctggtgaattatgatggagagtgaggctgggcacaaattagaatgagaaacagaatagggagtaaaaatagaacttcgtatgagggtagaagtagaactttggaataagtttacttaacgtatgattctttggacacagtggagcattggttggtatttgcagagaagccttcataaacagggttgttctgaagctcatctctgtccctggggatgaactgaacccatcattagccatttgcttagctgttaaaccaaatatgtgaagagaatggaaaccagaggaatatgtgtacatgtgtgggaatcttatttactactcctcatatttccacaagtagaaaataatatatattcaatctccaagaaggaaaatgggctaaaatccttctagacttctctctactgactttactcctagataaaattcaaatgatgacttttgggattgatacattggggaaaaggtactgagcatgaatggttttgatctttctgggtttccctttctttggagtcaacttgactgaagcacacactagagggaagcttaccagggcagattctgtctctgcagcagagcagtcagcagtcttggacggggttaaattcagatcaaagtgaaatgtattaggagacccatttggccactgatccaagccatattcttcagtttaatgttatcactaatacagttgaatttttatgttcatttccctgacttcctattctgtatttttactctgggaggctataggcacaagagtgattatcactcctaaaaccccaggagatttagagaagtaccaactaatgaaggaggcacagtgagtgcaggagcagtcagtgagctgggagagcccgtcacggggcaccatgtattcaaacttaagaggaagatttgggtcatcaaaagcggaataaaaacgatgacttgtgactatgaccactttttatttttttatttatttttattttttgagacggagtctcactttgttgctcagactggagtgcagtggcgcgatcttggctgactgcaagctccgcctcccaggttcacaccattctcctgcctcagcctcccgggtagctgggactacaggtgcccgccaccacgcccggctaatttttttgtattttcagtagagacggggtttcaccatgttagccaggatggtctcgatctcctgacctcatgatccgcctgcctcggcctccgaaagtgctgggattacaggcatgagccaccacacccggtcaactatgaccacttttttttctgaagcaatggttaagatttcacatgtctacaaggtgaaatgaaaagtaacaaagggctggacttatgtgttttttgtgtgagcagaggtgatgactggcaggcagatgtctcctccagagtagaagttcttgtgtgtgttagcagcctgtagctatgggggaattgttgggtcttcttattttaaagaaaatgccgatataagtatttttataagaaattccctaagttttaaatgttggcttaaatttataggaaaaaattcttggccaattaaaacaggtctatagacttgaagtggttttgggactgttgtaatagaaatgatayttctttcagcatgttggggacctgctccctaatgcacttagatttgagtttctttcttacgagtttattttattccaattggctaaggcagttcagtttcctgtctgtttgctgtatttaaacttctgctctaccttttttattaccactgatttaagaatttatcatatactgccctagaccaaatgtaaagtttatgagtccagtgttcatgggacttgactggatccaagaaagcacatatagggaaatgtgc

SEQ ID NO: 712388 - DNA, 1203 bp, Homo sapiens
aatggttcttggcattgtgggggattttgttaaaacccacaccaaaaacagaatctgactttaacataacccccaggtgatttgatgaacactggcccaagtgttcctaggcactatgagaacatacaccattggctacagccccagctccatgtcagcgctcaacttctttgatactcctcgaccatcattcagaggagttgatgttgtttgaatatcctttattttcaggcgaacacgaacgctgaagcctccaggggccttagttttttctcctatggttctaagattaactcattttctcaaaatatgaaaaggagggggaaggctgcatatcattttgctatgtggtctgttgtgtgactgtgaaagaaaactgacctcaaacttcccaaggatgatgcaaaaataaatcctctgctgacctccaggacatagaaacagcccgtgtccctgttgacagcctctaacttccaaagggctgggaaaaccacaggaggaaagcctggggttagcccttttccaggctgtccttctgcacggcatccaggtcaagtgagtcttcatgaggcaagccccagatatgcagctcccttggtccctcagaaggaccctggtactcacagagggtccggatgatgtcactgggccagctgcgggggctggggccatgggaattcattgccctcacggcaaactggtagttggtatctggatcgaggcccttgataaccatggagtccatctggatccgctcatggattgaggtccacttcttgtcgaaatctggcctttattgattagaaaaacagaagaagcagtagttcagaaataccagagggaagggaagctagctggctatgtaaactaatagcatttgaactctggaagcaatacttgtaaaagtaagttaacatttcctatctgaaagtaatcctgatttgaaatcacaagtcatcatttgcaagtccctgccgataaaaacaagtagattatttttagggtcagttgtaaacactacttaaagacaatccgtttttccttgcaaggccctcactatgatgaaaagatcttcacataggaattcrctttcaagggactctgccttccagatgttcacaaacaatcctccctttggcagtccccatccccagaggtcagaagaacacagattccgtctattcacaatctgttcacaaaata

SEQ ID NO: 712389 - DNA, 635 bp, Homo sapiens
atgccatagttaaaatggtaaactcaggcaatttattttaactgaagcctttaaaatattacatttcgatctgtcataacagttaacatatcatttttctataaagaaagaaactaagttcctttcataatttatggctacccgaacacaaagttgaggtgggagttttctaaactttcatgaatcaaataaatgcctatacaagactagwaaggcagatgacaattaaatagcagcagcaacacagttaggtttggtttggttttattataatcagaaatttgttctttgcttgtgatatctcctttcttatgtagagctgacacatcaacatttttctcacattccatctgagattttcagccaatagtatcatttttcaataacaacagtagctgtttcagagagattatactacttacttttcctcattttgataaggcataaaccacaaatgtccttaaaagttcaggttctccttggcacccatgaaattatattagaattttcaagttggtagaaacctggattcgatgagatttgctatctccccaggctcgctaattaacaggaaccctggagacaggacgcttggctcttgggctggtgcactacccccacagcactggcttctg

SEQ ID NO: 712390 - DNA, 1310 bp, Homo sapiens
tggaataatcaccattgtggagcgtggaggaggaaaccaaggactccagaagttgcctaagatttcacagcttgagatggagctgaaatgtgaacccagatctgtctaaattcaaatcctcggctttccactttgcttatttttatcttccctgcctcaacaatacatcctccttttgggttttgaggtgcaattcaaatcttttatctcccggaagtattcatccactcctccctacctcagctcttgctctcacctgcaccatccttaggaggcccctatgctgtccctcctgctggctcaggttagatatggarttcctcctgtggtccctggggctgaggtggtgaaaaaaatagtggtcaggccctcagttcccactctccagggaggaggaggggaaggtgaatgtggctggcatttcgcactaggaacaaccacacgcagttgttggagaggtttaggggcctgtggtgccttgggttctggttcccatcaggagacaactggccaggctccagagccccacaaatgggagtaaaagaatgtggaaaactaccgggtcctccaggaagcttggagtggggcaaaggtggaacaagagctccgtttccgccaggacctgtgtccctaagaaggctgatgctgttatttacccacagggaagtcacaatttctaatgcttgagacagaggcagccttcatttctaaacctgtgtccctcagggaaggggacctgtttcagaccttggaagcctcccaggcacctcctgatgagcttggtagaaacagtgtgcagctatggctttcaggccgtcccagagccacttcccaccagacaccgtttccaggcccatggccaagggcatgttctggaactacaccggaagactctacagaccagatatccctcagagactctgtcagcaagtgagggagagatctgcaaagagaaagaagagcagggcaaagacaactggatgtgctggcccaggaagaggagcagccacacagggacagagagtggaaacctggagatgaagcaacgcagcagagaacagccaccctcccttccctggggtctgggcactagcgaggcaaggtggcattaggcatgatttagggcaacccatcttttaaatatatgggagttggccaggcacaatggcttacagctgcaatcccagcactttgggaggccgaggcagatggatcacctgaggtcaggagtttgagaccagcctggccaacatagtgaaaccccgtctccaccaaaaatacaaaaattaggtgggcatggtggtgcacgc

SEQ ID NO: 712391 - DNA, 581 bp, Homo sapiens
tcaaccttattgtgtgtttcaaggattgagttaatacagatgatgcgtttagaataatgcttgatgtaaacattcaatayattttagatcttatgtttggctaatctttttgatttactgatatattttcttatttcattttaaagttatttaaatttataatttatttattagagtcctttaggaatgttaacccttctcagtcacccgatgcaaatatttttcttgttggttatttgcctttacttttatttatttgttttgatatgtagatacatttacattttttatgtaatatatctttttaaaaatggtttctgcttttcctgaacatgttttcagaatttaaaattgtatatggaaaacaaattacatgaaagatttgagcatttcaaaattttaaacataaaagcataaacgtagataaaatgaaggtgtactatgatatcttcagttttatcagaaatgatgtaaaaattacaacctctttaaaaagtagtgttaatcattaagttagaaaatatatagctgggcatggtggcagatgcctgtaatcccagctacatgggaaggtgaggtgg

SEQ ID NO: 712392 - DNA, 653 bp, Homo sapiens
ttaacaaggctggagacggagaggaagatacggacatgagagagacttgaacggagaaaccccatccatctggcatatggcaccatgcttggtgttgtgcagagaacagaagtagcaaagaggctggaaacttacaagaaaggtaaactgaagggataagcaagagcacagccatacaaacgccatcacgaggcagcacgctgacaaccgctgaatggtgggatgggcagatgagccccttttgcgttctaaagagaagtcctgtggagtaccaagagctgggacgttatcaagaawgaggaattttgctaaaaatgtgaatcaattgcatgtaataaaagagaagaaatgactcagagatgacgccaacatgccgggctgggtgcaggggtcccagggatctccactggtctagacaaccacagtcctttcacctgctctgctagcgacaggcctgggcaggggccagtgtcacgattccacaaagacataatgtcgtaatgtcaagggtactgtgggctcctaggggaggtttgcgcgcacacacacgacactgggcggaaatgtcccttttgcggcagacaacaaagatctgacgatctaaacctgtcttgaaatcataaagcaaaagccaagaaaatcagaggcaagcc

SEQ ID NO: 712393 - DNA, 1611 bp, Homo sapiens
tatactgtgttacgtaacatatccagtggggtctagtgtagcacttcgcaaataaattaatatctcagcagccaaaagtggaactattacaagagtaggataaataaagatgataaatggcctcagggtggttgagatcaggcaaagttttgctgtcagatgtcttacaaaagaaaaaaaaactcagttgtcaaagctttttggatctggagttgcagatagaaactgtggacctatgaaagtaaaggccctggtgagactaaccaagtcctctgaggaggtcttaaagagataaatagggctggtccacttcttttcagattggcttccactgaattagttgacccaggctttacagtctccagctgtaagcacgaagagcaaaccagcaccttggcttcttattgctccttatcattctttccccctctgtggcaaaacccacggggtcaggtgctgagcttccaacccattgtcctacgaggtgactcagggtaggtgayggatatggtgcaggctgcacacacacgtgagcacatgtgcacacacacatatctgggtcctggggtgctgaggggattgctcaccaggctgtcttctcactccagaaagctgaggagaaccaccttggaggtgctgattacctcctgcgtcccctcccttccttttctcctcaatgaagagtgaatgaatatactgcagagttgacttaatatttgctctgcttgagagcattgggtttccccaagcagggggtggtcagccaggtcacaacaggccaaaacgactcttttggtttttgtttcctttccaggctcccctgggggtaattagcatttcccaagcagcagcatcaaggatgttgccctgcatatggaggctggccaagagctgggagctcaatggcctagcatctgtgggattcaggatggacttgtccagaccctatttccagatgaagccacatgtatccacaaggttttttgttttcttgttttttggggggtttttatttagatagagtttcactcttgtcactcaggctggagggcagtggagtgatcttgactcgctacaacctccacctcctgggttcaggcagttctcctgcctcagcctcctgagtagctgggattacaggcacttgccagcatgcctggctaatgtttgtgtgtgtgtgtgtgtgtgtgtgtatacatatatacatatatatacatacatatacatatacacatacatacatatacacatatatatacatatacatatatatatatatatatatattttttttttttttttttttttttttttaagtcgagacggggtttcaccacattggccaggctggtctcaaactcctgacctcaggagatctgcccgccttggcctccaaagtgctgagattacaggtgtgagccaccacgcccagcctgcccacaaggtattgctgtacgagcaaaactatgtgttaagtcaactagcccttcatatgtatgtgatatgtctaataagttaagaatattggtgttagatttagtccctaaagttccagccatttggtctggattctactgaggcttgtcatggctgattgtatccttagagtcc

SEQ ID NO: 712394 - DNA, 1611 bp, Homo sapiens
tatactgtgttacgtaacatatccagtggggtctagtgtagcacttcgcaaataaattaatatctcagcagccaaaagtggaactattacaagagtaggataaataaagatgataaatggcctcagggtggttgagatcaggcaaagttttgctgtcagatgtcttacaaaagaaaaaaaaactcagttgtcaaagctttttggatctggagttgcagatagaaactgtggacctatgaaagtaaaggccctggtgagactaaccaagtcctctgaggaggtcttaaagagataaatagggctggtccacttcttttcagattggcttccactgaattagttgacccaggctttacagtctccagctgtaagcacgaagagcaaaccagcaccttggcttcttattgctccttatcattctttccccctctgtggcaaaacccacggggtcaggtgctgagcttccaacccattgtcctacgaggtgactcagggtaggtgatggatatggtgcaggctgcacacacacgtgagcacatgtgcacacacacatatctgggtcctggggtgctgaggggattgctcaccaggctgtcttctcactccagaaagctgaggagaaccaccttggaggtgctgattacctcctgcgtcccctcccttccttttctcctcaatgaagagtgaatgaatatactgcagagttgacttaatatttgctctgcttgagagcattgggtttccccaagcagggggtggtcagccaggtcacaacaggccaaaacgactcttttggtttttgtttcctttccaggctcccctgggggtaattagcatttcccaagcagcagcatcaaggatgttgccctgcatatggaggctggccaagagctgggagctcaatggcctagcatctgtgggattcaggatggacttgtccagaccctatttccagatgaagccacatgtatccacaaggttttttgttttcttgttttttggggggtttttatttagatagagtttcrctcttgtcactcaggctggagggcagtggagtgatcttgactcgctacaacctccacctcctgggttcaggcagttctcctgcctcagcctcctgagtagctgggattacaggcacttgccagcatgcctggctaatgtttgtgtgtgtgtgtgtgtgtgtgtgtatacatatatacatatatatacatacatatacatatacacatacatacatatacacatatatatacatatacatatatatatatatatatatattttttttttttttttttttttttttttaagtcgagacggggtttcaccacattggccaggctggtctcaaactcctgacctcaggagatctgcccgccttggcctccaaagtgctgagattacaggtgtgagccaccacgcccagcctgcccacaaggtattgctgtacgagcaaaactatgtgttaagtcaactagcccttcatatgtatgtgatatgtctaataagttaagaatattggtgttagatttagtccctaaagttccagccatttggtctggattctactgaggcttgtcatggctgattgtatccttagagtcc

SEQ ID NO: 712395 - DNA, 1611 bp, Homo sapiens
tatactgtgttacgtaacatatccagtggggtctagtgtagcacttcgcaaataaattaatatctcagcagccaaaagtggaactattacaagagtaggataaataaagatgataaatggcctcagggtggttgagatcaggcaaagttttgctgtcagatgtcttacaaaagaaaaaaaaactcagttgtcaaagctttttggatctggagttgcagatagaaactgtggacctatgaaagtaaaggccctggtgagactaaccaagtcctctgaggaggtcttaaagagataaatagggctggtccacttcttttcagattggcttccactgaattagttgacccaggctttacagtctccagctgtaagcacgaagagcaaaccagcaccttggcttcttattgctccttatcattctttccccctctgtggcaaaacccacggggtcaggtgctgagcttccaacccattgtcctacgaggtgactcagggtaggtgatggatatggtgcaggctgcacacacacgtgagcacatgtgcacacacacatatctgggtcctggggtgctgaggggattgctcaccaggctgtcttctcactccagaaagctgaggagaaccaccttggaggtgctgattacctcctgcgtcccctcccttccttttctcctcaatgaagagtgaatgaatatactgcagagttgacttaatatttgctctgcttgagagcattgggtttccccaagcagggggtggtcagccaggtcacaacaggccaaaacgactcttttggtttttgtttcctttccaggctcccctgggggtaattagcatttcccaagcagcagcatcaaggatgttgccctgcatatggaggctggccaagagctgggagctcaatggcctagcatctgtgggattcaggatggacttgtccagaccctatttccagatgaagccacatgtatccacaaggttttttgttttcttgttttttggggggtttttatttagatagagtttcactcttgtcactcaggctggagggcagtggagtgatcttgactcgctacaacctccacctcctgggttcaggcagttctcctgcctcagcctcctgagtagctgggattacaggcacttgccagcatgcctggctaatgtttgtgtgtgtgtgtgtgtgtgtgtgtatacatatatacatatatatacatacatatacatatacacatacatacatatacacatatatatacatatrcatatatatatatatatatatattttttttttttttttttttttttttttaagtcgagacggggtttcaccacattggccaggctggtctcaaactcctgacctcaggagatctgcccgccttggcctccaaagtgctgagattacaggtgtgagccaccacgcccagcctgcccacaaggtattgctgtacgagcaaaactatgtgttaagtcaactagcccttcatatgtatgtgatatgtctaataagttaagaatattggtgttagatttagtccctaaagttccagccatttggtctggattctactgaggcttgtcatggctgattgtatccttagagtcc

SEQ ID NO: 712396 - DNA, 943 bp, Homo sapiens
aacaggtgaacaatttcagagcaggagtgattggctgttacagttctccagaagaccgtgggactccaattaccaagggattagccttgactagggaaaggcttctatcttgaagacaagattgcagaccaaggaggaaggctgagcagagaaacgtgtttttagtagcagggagtccaatcagtagaatgctcctgcaatggtttggggattttctcaggaggttagaggcacagtaatttcctaatagtaaagagacagagatgttaagtgtttttaggattgcctaagacagtcacagtgaacaagtataattaaagactgattctttgatcaataattataataaattagagtaacaatgttttaaataattgtttcttttgagcatttgcattattttgaaaaatcatttcttgtcttccttggtaataaaaaagaacattagtaaaattgcaatgttttgccagtcrttttaaaaagtgaattatagctctgccatctccgaggtattttcagccaatttctacaatttatttgggaagcataaaccaaaaaaaaaaaaaagccatattttcaactacacaatcaggaaaggaagatcacttaataacatttttctccctcaatcagtgctaggctacatcattactcattggtaataagtggcatgttcctgttttttgcctctatctttattttcttgtttgttacaaacagagcgcaagtgtgacttcctgtcctagggaacgagagtccggtcctgatctgaagaacccaagacacacagtctgttgcataagtgtcagagacatccgacatacaggatatttgctaggcttgatgccacacacctgtagtcctagctacccggaaggctgaggcatgaggattgctcgagcccaggagctcaaggttacagtgagctatgatcctgccactg

SEQ ID NO: 712397 - DNA, 659 bp, Homo sapiens
atggtgagagagaagagagagagaaagttatgtttaggttctctcttctcgagaagattctggatgtagtatggagcaaacacactgcgtgatcaacttcatgagccacttcacttttgctttctgtttaaataagtaggcgtggcctaaacctagattctatgtgccagacactttacaaggattatgtaattaaattttcccagcaatcttataagagggttcgaaaattatccctattttaaaatattaggaaatgaaaactcagagatgataagggacatgtctgaggctacagcaggagggcagccaggctggtattcagtcttgtctcayggcaaagcctgagtgctgaccatgctgctggactgccttctccatgtcttctgatgacagaaggcttccaaccttgccgccacacatgccctgcacacacattccccttctacatgagtgtgggccttgctgcatctgtctggacagacgtgatgcccttgactgtgggtttttgctcctgcaagtctcttcatccttcactgcatcaatatctgttagacatcttacttcctgtcgcctgttcacactccacctgtaacacgggagcatgtctagacctctccctagcatgggtcccacaataactggtctattccacctgg

SEQ ID NO: 712398 - DNA, 1078 bp, Homo sapiens
  misc_feature 736, 774, 775, 798, 799, 801, 806, 809, 810, 813, 817, 819,821, 823, 825, 827, 828, 830, 832, 834, 835, 837, 838, 840,842, 843, 844, 846, 848, 849, 851, 853, 854, 858, 859, 861,862, 864, 866, 867, 870, 872, 874, 875, 877, 879, 881: n = A,T,C or G
  misc_feature 882, 884, 886, 888, 890, 891, 898, 901, 904, 905, 911, 912: n = A,T,C or G
tccaatttctctacacattcagggacacttattayctggggctctttgttgttagtagccatcctaatgggtgtgaggtcacctcatacagttttatactgaggaactgacagatagtacagaatattctgaaacagtagtgtatttctacagtgtattgatataaaatatttctccttttatgttttgccagaatgttaacttttcccatcatattttccttagagccaataatgagaaatttcaaacttagcatgtttcctgcacccacgtgtgtgaagtcagttggtgcatagtcagtgagagaggcctttcctgggcagtgcccacctgctgctgtccttccagtgaggctccccttggcggctggctggtctgggttgtgccctcagccctgcggttgttgatggccttcacggtcctttaagctggaatgtaatgttgtgtttattttcctgtgctcatgtagacctctgtaaagatgtcatttctgggtgatgttttcttgcatggtcataattgccatggtgttggtgatactttattccaaaaggtgtgtgagggggagtatggggcacataatagtttagttgtaatgaaattacaccttcaagtgtgatttggggtcagttgttaggactgttgaatcctgctcagattttagtgttcattagctaggaatttaggaaaccatgattccaggcagcttgagcagcacagacacctcctgtttccncttgccacagtctgctttcagatccctgagaaagaaannatggactgcatttattaatttgnncnatgcnctnnagntctngncncnantnntntnanncnngnannncntnncnanngaanncnntntnnggnangnngngntnngngngncnnccccccnagnttnncctggnngcgcactcactgcattcttggctggtgctcttttgtcttttgtaaagacagcttcccccggtttctcggtgagcagctttcttgacttggggtgagtggtcacagccccatcttgtgctgcttagcttcaaatgtttgtagattctttaagcatttgctactctcc

SEQ ID NO: 712399 - DNA, 1078 bp, Homo sapiens
  misc_feature 736, 774, 775, 798, 799, 801, 806, 809, 810, 813, 817, 819,821, 823, 825, 827, 828, 830, 832, 834, 835, 837, 838, 840,842, 843, 844, 846, 848, 849, 851, 853, 854, 858, 859, 861,862, 864, 866, 867, 870, 872, 874, 875, 877, 879, 881: n = A,T,C or G
  misc_feature 882, 884, 886, 888, 890, 891, 898, 901, 904, 905, 911, 912: n = A,T,C or G
tccaatttctctacacattcagggacacttattatctggggctctttgttgttagtagccatcctaatgggtgtgaggtcacctcatacagttttatactgaggaactgacagatagtacagaatattctgaaacagtagtgtatttctacagtgtattgatataaaatatttctccttttatgttttgccagaatgttaacttttcccatcatattttccttagagccaataatgagaaatttcaaacttagcatgtttcctgcacccacgtgtgtgaagtcagttggtgcatagtcagtgagagaggcctttcctgggcagtgcccacctgctgctgtccttccagtgaggctccccttggcggctggctggtctgggttgtgccctcagccctgcggttgttgatggccttcacggtcctttaagctggaatgtaatgttgtgtttattttcctgtgctcatgtagacctctgtaaagatgtcatttctgggtgatgttttcttgcatggtcataattgccatggtgttggtgatactttattccaaaaggtgtgtgagggggagtatggggcacataatagtttagttgtartgaaattacaccttcaagtgtgatttggggtcagttgttaggactgttgaatcctgctcagattttagtgttcattagctaggaatttaggaaaccatgattccaggcagcttgagcagcacagacacctcctgtttccncttgccacagtctgctttcagatccctgagaaagaaannatggactgcatttattaatttgnncnatgcnctnnagntctngncncnantnntntnanncnngnannncntnncnanngaanncnntntnnggnangnngngntnngngngncnnccccccnagnttnncctggnngcgcactcactgcattcttggctggtgctcttttgtcttttgtaaagacagcttcccccggtttctcggtgagcagctttcttgacttggggtgagtggtcacagccccatcttgtgctgcttagcttcaaatgtttgtagattctttaagcatttgctactctcc

SEQ ID NO: 712400 - DNA, 617 bp, Homo sapiens
tgaaattattatgtcatttggattgaaggaataaagaggattgaatagtcaagaggcttcagataagaaatgtagaaaagtaattgccaaagaatgactgatatgaatgtatatttttttgttttatatcaaattaaatcttgtaaatagctttagcttgactttctgctatgtttctgttatttttgtttcatattatttctataattaggttaagttaatgtaagttgatatatgttaattcatactatattaaaacatctaacttttgtaatattatgtgaccgttaacattttctatagcagagaccatttaacaacaacgattaaaagcatgctattttatactttcagttgtcttagtccttgaacttaaaaatatgtaaccccagatcaattaaagttaatacaaagaatttgtttggaccaggaaaatttwaaaaaaagctttttacttcaattctgttttgtccaaatggcatagggcaaatgatgggaaaaaagcaagaggtgcaagagctgaggaaaaagcaagagatacaaaacaatgacctcttaaacagcttggcattgtaacaactatagtcatttggaaacattttggaccctgaaccaaa

SEQ ID NO: 712401 - DNA, 599 bp, Homo sapiens
tttttaactgtcactttgagtttttgtattataaaagtgctacatacttgcctgaatctatcagggcataaaattacagaaaggaaaaggttatctccatctgactctcctctaccacatttcatttcccagacagccaatgcctgcagcccagtgtgcatcttcttcacatactgctgagcatttgcagggacagatgaacacacacacacacacacayatatatatatatatatatatatgtttatgtgttttttatatataaatatgtttatgtgttataaatatatatatatatatatatatacttactgccccacagaatttatgccagtaaacacaaagctatctcatttccattaacagctgcatagcattccactatgtagacatggcgtaatttgtccaaccataccgcaatgattgctatttacataaaaatgctgtggtaataatgcacacacacagatcattatgcaccataaagaggtttctctggaattattagcagtggaacctctaagagaaagggaatgtgcatttaaaaattgatagatattgtcaaactgtgctccataaagggtcacacccatttaggc

SEQ ID NO: 712402 - DNA, 1115 bp, Homo sapiens
ccatatagttacaaggtttggaattatgcattttatatatccaaaaagtcaatctaagttttacagatgaaaactgctgaaaatttaaaacaaagtcaacacaactatatatcagggagaatcacaaaaacagcaagaaaatattccaagggatgttaaaacacaatattccgaccctatgtatttcgtgaaatgcakccttagaatggagacagcaacaaaaaaatcttagcactcaatcagtggtcatagtattagtgttaatactggtgtttcaaaaatgtatattatatataaatatgtgtacgtgctcacatacgtatccttttttttttttttttttttttttttttttgagacagagtcttactctgtcgcccaggctggagtgcagtggcgtgatctcggctcactgcaagctctgcctcctgggttcacgccattctcctgcctcagcctcccgagtagctgggactacaggcacccgccaccacgcccagctaattttttgtatttttagtagagacggggtttcaccatggtcttgatctcctgacctcgtgatccacccgcctcggcctcccaaagtgctgggattacaggtgtgagccatcacgcccggccttgtattccacaataaaacaagaataaataattatttaaaggtgttgagtacgtagattttaaatgtaagagtatattcaggcataaaactgaagttccgatctcataattttaaatttaaataagaaatgttagcataaactcatggtctctttctcttcaaaaacacttcgtttctagttctgtctcctaaaaatacatgaaaacaatgacatggagcaatgagccctccttaaacaccattcccatccctgctgtggaaaaggaaagatggagggtgtgtcaggggtattttgttgtgcagaaatccaaaagctaagaaagactaacaggctgtgtccaaggatgcagaagtgaacgtcatggggctctgactagccaaagaagggataatttgagcatcaaaaataatggctgtaactgatagaaacacatcaactacataagaacatttaggataatattcaggagtatcaatccaagagtttatg

SEQ ID NO: 712403 - DNA, 1598 bp, Homo sapiens
gtacctagtctcccgatttaatttgaatatgttgaatgtcagccaaggaaactgacctacttggagatctagggaatgtctgctctaaaacattttcttacatctcttgtcaatatgcaatgaattttgtagcaatttaatgagagagaaggagagggagagagaatagaatttgaaaccatacatacataaaaaaggatatgcccatttctgccatctacaagccatattgactttgggaagctaccatatttttttgagcctcaggtttctcttttaaagatgggcataataatatctaccttgcaggatttgcatgaggattaatgtaaatgagaaatgtaagtgtaactggaaatataaacgtccttagcacatacccttgctctagaagtcttagttttttagaatttttagttgtttccttttcctttatttaagcacatagtgagcatttgcttgttttatgccagacatgtaagctgcaaaaatgcacgtacacagccttggatgtcattactctactcctagaaacttcagattcagttctaattctgcttagatctggaattgctctcatctcctctttttttcgttagtgaattgaaaatctatttttttcatgttttaatgagttcatcatactgcatgcctgtattcagacccaatgtatgagtcactttgaaaaatagctaatttctataaaataattgattattaaaaaaacacttttgtatactcaaaaatgtccttgcttatttcttagctgaattgaaatacatcttcttataatttagtttctcccttcactgatcataaatgattatacacatactggatatttttttctctccctgacaattcattacattgaatggcacatgcaatatcccacctgtctttctaaagggacatcaatattggcctactttgattgaactagctagatcagcaattcattaacctgtaacacactaggcctgttgtttcattactgctcccttaaagcttctctgttagttagaaacaactaaagtttctagttttctgcttatatatttagctttataaaatacagtgattttctctcttaaacaagtgctagactgtggcctcttgatacaagtctataagaaaatctgccagttgatacatgatgccgaataaataagaaatgtcttacagtttttttctttgtaccttattgcatttcccctgtcttcttacattttacattattttccttctttctatctctcatatttaattagcttgtgggttgaaatggaatgcaagagattattttcctctttgtcatcttgataagaaattgtcccttttgggtgtggttgaatgtgacagtggaataaatcatcagatactccttggtactgggagtagatatgtgagttataacatcagctgatatttgtaaatgcaattgggtatcttctaccacttcattcttgctgtatatcttttctctcttccttgctatatcaaaattatttttcttataaatgtctattgagaatcataccattgctccttaatagcctttaattttttttataaaatcacattttwtagttttgaga

SEQ ID NO: 712404 - DNA, 1104 bp, Homo sapiens
taattttattagcaattgttatgaccagttatgatatttccaatcttatttactgtgatgttatataagcatattttccctgagaaaaatttcaagtggtcatcaaaggtccatggcatattttaaatggaattactattgtgacatgattaacttttcattcttgagcgttaaaagcatcatcagtcatttcttttgcatttagaccagggtatcattacaatatatcacctaaatgaaggctaaggagcagcacaataagatgtaaatacctttccttttatggctcagtgtcttcaaaatgtatacccaagagggatgtctggtttctagtctttaaattaatttattccagtttttcataggctctcaaataacctaaagataatattgctccaatgtttaccagttcattgttaaggttttcatcaagtacatcttcctattcttaaaattagtcccttagtagcagaggctctctttgcactctttgcaaacacaatgtataaaatgttgcagtcctaaggtcacagcagttaagaaaacattgcaaatacaaaataactaagctagaagaaatctaatcagttgcttttttgtctgactttccttcctgcagagtgtgaaaagtgggctctcaggtacatgtaggttgtgaaagtaatttcctctcatttcctgaagtgtccaaattattttctatccatcctgccttttctagtgtcaaaggtatgagaataaaaccttcactttcaatctaattattttgactctgactcctactctccagtttctattgaaactataattctccaggccaataagtrtgttactttttgacttttatatctcctttttgacttgtttcttaatattttctttggttttcattgaggtcaagaagagaggatcaataaaacctgcaacaaataagtcataaagaagcaatctgcactacttattcggctagatttattctaacacagcatatcaactgaatgttaaaaatgttaaattgtctgtaacagaacaaaatgagttactaatagattcatttatcctgcagggaaactcaaaagcctcatatgtatgtttgtgtgtgtg

SEQ ID NO: 712405 - DNA, 290 bp, Homo sapiens
  misc_feature 264: n = A,T,C or G
gttcacctaaatgcatcctcaaacattttatcatgtgtatttctctgtactctgttacttaaattctacctagagactaggagtasctaactgggctaaataaagagacaagaaaaagtaaggtaataagtattggtttcaccatcctagtcctattcatgtgttcaaccgattcacagtactctatggaaaaaaaataatgcttaggctaggatcaaaagcacaggccatagttcctagctctggccttgccaagaactctgnctcttgaccctgcataaatatcaatc

SEQ ID NO: 712406 - DNA, 605 bp, Homo sapiens
atagttcactgcagaaagagagacagagaggagagaaagggatacggcaaatgtggcaaactaataattgctgaaattatatgagtttatgggttgtcaatgtattacttttgaacttttgaggataataacaaagaatcaatactttttggttaatattttgctattttattacatatataaggcatatttagtgtaaatattaggaaatacaaaaaaaaactagaaaataatcacttataacacatataatttaacccaaatggactctttgtcaatcactttgtttatatcactccagatttttaaaataaatattttttaagtaataaaaattgtatttacttagaagtattcagaatgtcaacaaacagctgaaactattttttttttttgcaattacagagtggtattcagctaacagaacaattatttcataaaagctgcatgacagataactgcagatgaaaaaactaccatccgtatacacaattaatttgtgttgtgcaccaaaamgaacctgctttaaatatccatgccaatttacaacccccatactgtaccaagcaaggttagtggctatggcaaacaccaccaggacagta

SEQ ID NO: 712407 - DNA, 872 bp, Homo sapiens
tttttagaggattccaattgtagagaaaacaatatttgtactttattttcactataatagtaaaactagtaaaaaccaacccaattaaatagaataaaaatgatatattctgctgaattatcccttcaggaaaaaaatcactcaattactgtatactttttcttgccacatctttaaacatcccaccccctatccgtatttgccaatacccactcttgattttctggtcatgaatttctcaaaaggtggtaagatgctcatcaattaaagcygaaggctgaaagataaatgctttccactttgaaagcaaaaagaagctaatggaataagaatatttatggagaacagattaatttaggaaacaaaccaacatatttgatttaattaatgaatgctaaatgagtatggtgctaactaaaggagcaattggagatcaaagagtaacaaatccacatgcagagtcttgaggatctgagcagagcacaatcagactttgtcaaggatagtaactgaggtacaggaaataacaagacagaagacacttcataaaatacaacgctttgtggttttaggagtccagcttgttcattttcctggggaagaatatatatacattttccctggaaaatagagtaatacaatgtccacatgttgctggtaaattaacaactctgtggttgagtcagatttttagtcatataattagctgaatgccacttatttaaaagaaagcattaaaaaatcaaaaataaccaacgagctgtgttgcactccagcaattcagtagacttgttgtgagcatccaaacattactagcagcaaaactgctgattgagcaggattatgaatatatttgccatcacaattttcat

SEQ ID NO: 712408 - DNA, 872 bp, Homo sapiens
tttttagaggattccaattgtagagaaaacaatatttgtactttattttcactataatagtaaaactagtaaaaaccaacccaattaaatagaataaaaatgatatattctgctgaattatcccttcaggaaaaaaatcactcaattactgtatactttttcttgccacatctttaaacatcccaccccctatccgtatttgccaatacccactcttgattttctggtcatgaatttctcaaaaggtggtaagatgctcatcaattaaagctgaaggctgaaagataaatgctttccactttgaaagcaaaaagaagctaatggaataagaatatttatggagaacagattaatttaggaaacaaaccaacatatttgatttaattaatgaatgctaaatgagtatggtgctaactaaaggagcaattggagatcaaagagtaacaaatccacatgsagagtcttgaggatctgagcagagcacaatcagactttgtcaaggatagtaactgaggtacaggaaataacaagacagaagacacttcataaaatacaacgctttgtggttttaggagtccagcttgttcattttcctggggaagaatatatatacattttccctggaaaatagagtaatacaatgtccacatgttgctggtaaattaacaactctgtggttgagtcagatttttagtcatataattagctgaatgccacttatttaaaagaaagcattaaaaaatcaaaaataaccaacgagctgtgttgcactccagcaattcagtagacttgttgtgagcatccaaacattactagcagcaaaactgctgattgagcaggattatgaatatatttgccatcacaattttcat

SEQ ID NO: 712409 - DNA, 578 bp, Homo sapiens
taatgtttattatttaatttgactacttgtgacatttgcatagtgtttcttaaatttcagtgaagtctatttcctttgtttctgttcttawcttgtccatacctaactcccagaaaccgactctggcttaacttagaaaaagtgatttattggaaagctggctggaccacagaaatcactaaaaaaatcatagtccccgaacaatggttatgtccctgtcagggatacctcagcatttctcactatcagggaactctgaacttccagtttacccagttttcttaccccatatttcactagccaaagtcataattaggaaaatgtggttaaactagttttgaccacatttctgtccctttgctgctaggcagagagaaatgaaaatattgatcaatttttgcttctgtagtggacaacagggcccctttctacatttttaaagattagccttaaataacaagaaattgtcagatactgaatagttttttaaaaaggcaaaaaaatagtccaattgatcactccgtattattaatttttccttgttggcattttctagatttttgttactagacatattc

SEQ ID NO: 712410 - DNA, 578 bp, Homo sapiens
taatgtttattatttaatttgactacttgtgacatttgcatagtgtttcttaaatttcagtgaagtctatttcctttgtttctgttcttatcttgtccatacctaactcccagaaaccgactctggcttaacttagaaaaagtgatttattggaaagctggctggaccacagaaatcactaaaaaaatcatagtccccgaacaatggttatgtccctgtcagggatacctcagcatttctcactatcagggaactctgaacttccagtttacccagttttcttaccccatatttcactagccaaagtcataattaggaaaatgtggttaaactagttttgaccacatttctgtcccyttgctgctaggcagagagaaatgaaaatattgatcaatttttgcttctgtagtggacaacagggcccctttctacatttttaaagattagccttaaataacaagaaattgtcagatactgaatagttttttaaaaaggcaaaaaaatagtccaattgatcactccgtattattaatttttccttgttggcattttctagatttttgttactagacatattc

SEQ ID NO: 712411 - DNA, 595 bp, Homo sapiens
gagagaagagatcaagggggttaagcatatatgaggaattatagggatgatttagttacggatacttgcttggtggtatgttgtggcttccatttctatgcatcacattaatttgtccccatccttctttgcgtgggtgagagaatttccaagcaaagcaccctctgcgtttgaatccatgccaactgtcaaaggtacacaacaggactgctaaaagcaagagaggggctgatggaatcttaatagctctgggaactcactcactccttcctctccttggagccccattaattgtacagttggtaacatcaaatgattttgaatcccttttctacaactgctattttagctcctttcccatctttaaactrtatttcccatggtaattattacatttcttttatttccaatgtcagcttatttaaaaaaaaaatcggacagcacagctaaaggagccaaaatagaacaatttgttatattaagcaaatatttatttgcataattgtcactctcatttctatattagcacagcagcaaaactaacaatattcaattcagaagggcaagacatggtatacaagacgttgtatctcac

SEQ ID NO: 712412 - DNA, 372 bp, Homo sapiens
agagtggtttccaggagtggcaggctttgagtcccatctgtcttggcttccacacaaccctagctcagtaacctccatctataatacatatacttgaggaccagacgactgggccagtgttctgactgyatgtgtaacaggcacattgtaggttttcatcagctgggtctgagtctggtaggatgggaaagtgaggcctgcctgacttgcatagtgaggaaatcttggaattagaacaacacatacatagcgggtgagttacaggggtgggctcacatttctcgttttaccttgacactggttcatatcaagtggactttactactattttgagttctccttcctaaatttctagcttccagtttgagatta

SEQ ID NO: 712413 - DNA, 372 bp, Homo sapiens
agagtggtttccaggagtggcaggctttgagtcccatctgtcttggcttccacacaaccctagctcagtaacctccatctataatacatatacttgaggaccagacgactgggccagtgttctgactgtatgtgtaayaggcacattgtaggttttcatcagctgggtctgagtctggtaggatgggaaagtgaggcctgcctgacttgcatagtgaggaaatcttggaattagaacaacacatacatagcgggtgagttacaggggtgggctcacatttctcgttttaccttgacactggttcatatcaagtggactttactactattttgagttctccttcctaaatttctagcttccagtttgagatta

SEQ ID NO: 712414 - DNA, 603 bp, Homo sapiens
ataatataatcctataacttacaaggatgtcaggcaaaaagctggctaagcaactagggaatcagctcaattgacagatgtgttcatactgcctataagcctctgaaaagtcaatgaatccaatatgtgattcagaaattagaattaattttttttaaaaatgtggcttttatgcataatgatttttcattttcttcttctggaacatggagggaatggacaacctaatgactccgcctttcatatccaagccatctctagctaygctggaggacttttcaccagccagagaattcagtttgcatgtgatgtggctggggagcctgttgaggctgctctcagcttggtgcagaggattgggtttagcctactctcagcacaagggccagttattcaggcctcactgttggcaaagcagcaaattgctcttttgtggggcttggggaagtcacaattggttgtctgtttcttgatggacacaataaagggacagagcagctccatctccctgagcccagtacaagaattcacacactttgcctcctgcctccagctctcccactaaggggctttccctgcagagtcagtcagccaaccctctgt

SEQ ID NO: 712415 - DNA, 605 bp, Homo sapiens
ttttatcaggggtttctgcttttccatcctcattttctcttgccgccgccatgtaagaagtgcctttcatatcctgccatgattctgaggcctccctagccatgtggaactgtacstccaattaaacctccttttcttcccagtctcaggtatgtctttataagcagcatgaaaatggactaatatgatgagttatttgttaacaacaacaacaaaaacaaataggactttgttattataacagttgcccaacttttagctcctttgacaaaacatgttaataatgaaatataaaatgaagtgaaatgtttaattaatctcatgaatttgcctcctttaaaaaatatgtgaatatacctacacacactatgggaattttcaaagccttcctaaagcagtgacatttatcagaataaaagtaatcattaaagaaaatatggaagatgttcttaatgatctctgcctgagatatttttaaacatttataaaattattggttttagtaaaaattgaggggagacaaggatttaatggttaataaaatttctcaatgcaggaagtaaatgaggaatcacatgctcattcattgctattactatatcaca

SEQ ID NO: 712416 - DNA, 1112 bp, Homo sapiens
tccagataatttttggcttctgtgtagcattcctttccccagcgtacaggacaggacactctttggagtgagagtcttatgacccacgatcacattagagttctgcagtggacaggtgaatggggggcaggagaaggtcagagagagagagtttctgtttactgtaacaaggactatgggagttatgagtcaggaagcatggatggaaaccaatgtataaatcataatagcatagctgatatctttgttttctcaaaggaatcattacttgccagttttaaaatccatataaagtattttagaattttttgtcttccagcttatacataaccacagaaggaaagcaggaactctgctagtttcttaaaaacaaacaaacagcaaaggggattgaaggtcttttttcttacctaagtggatcagtgttggtgagaagcaagtgaataaactgcagtgggcaggagagcctgagaccagtctggagcctgcaaagagagggaaagggtgcttcttgggcagcctgccckcccttgcaggtggcctccagctgctcaggagtgcagattctttttttaattttaattttattttttacttttattatttttttgaggcagagtctcactgttttggcacccaggctggagtgcagtggcgcagtctgggcttactgcaacctctgcctcccgggttcaagcggttctcctgcctcagcctcccgagtggctgggattacaggcacgcgccaccacgcccggctaatttttgtatttttactatagacgaggtttcaccatttggccaggctggtctcgaactcctgacctcaggtgatccgcccgcctgggcctctcaaagtgctggcgtgagccaccgcgcctggccaggaatgtggattctgagaagctgcagagctgtgaaaagcaggagacccatgtgcagatgtggttgggttgggggtggagggttctgtcttttctgaggttgtacctttggcgcctggggccatttcctggacagtgttttggttttagcattcatggggtcgctgagtcaggctgtaatttgtatacatgaagaaaatctgtgagggtcagactcagtgaaaaact

SEQ ID NO: 712417 - DNA, 1198 bp, Homo sapiens
agaggagccaaccatgttttcagcacagtagggatgcccatgggaagccacgaaactcagagtcgaccagtgagacgctcttctctagggtaagggaaaagggagttgtgcaaatacgtttcagaacactcatttcccctctctctgtcctccaaatctcctggccttgtgcatagttgctgtcttctccagtgcctgtgtggtcttttgtgactccaggctctatcaaaacactgaagaagcctcatctcaacccagctgagctggtcagcaagtctcatgttctccttgcccagaataaccagaacagatcactcttctatttttttttaatatacaccactttgatttaatgagctcatttctacctgaaacctgccactcccacattaatgcctcattttaccttcttcatacctsctagataccccaaatgatttgtaggtgtgtatctccattttattaatatatatgatgaaaaacaaattactttgctaaaagaataacagatactcagtgcttataaagaaggtgccttttctctctgatctcccccgtaagaactaaacctcatccctggtctctattttgggaaatttttcatctcacaggccacaaagacaaccaatttcttgaacagaatggcactgtgatgagcgcagaggtcatgctgaatactgcatgccgttagttaattacacacttttccaaggccgtccttggtacagatgcagtgaatgctaatggcatgtgctttttgttccagcaattagttttgatctctgtggcttaatgctgtgttcagttgttctgaaagagaaaaaaaaaagctcttcgtcagcaccatttattttcatatattcattcaggaagacttattgaagcctacctagttctcttctaggcattgtgaagaatgaaaatgaatcattctccccactcaagaagttaacagtatctaagaggagagagaacatgtaagcaaaatatgacatactctatgatcctgtgtttggaggagggaaaagtcctttcctttattcaataaatatatgctaggcaccatttgaagtactcaggagacagaagtgaaggcaaaaaggggccctgttctgttagggagagatcgtcattatgccagtaaaaaattaaatatataaagtttattttagaaatgataaatacaattaatagaaca

SEQ ID NO: 712418 - DNA, 606 bp, Homo sapiens
acacacttcattgatattctaataattccatgatgttcttataagatgaatttagtgaactaaaaattaatagctatatatagttccctaaggcaataatggtttatgattaaaaagcaaacttatgcttcaattacragcttcagcatgtgaaattattatttcagtccaatctttactacaaaatttgaacttttgtgaacttctgttttattggtataaattgccttcataaatagtaaacaacttatttattttattttttaaataatatatattttattgcagtagcttttgtggtacaagtcatttctggttacacgaatgaattgtgtagcgctgaaacctgagactgcacatccatcacccgagtagtgtgtacactgtacccaatatgtagctttttatccctcgatcttttcccaacctcctgcttctgagtctctaaagtccattatgccactaggtctctctttgggtacccatagtctagctcccacttacaagtgagaatatgcagtgacataaataataaataatttgcctcaagacatcgtggattcagattgaaaagcatactttaaattatacaatcatgaatttaac

SEQ ID NO: 712419 - DNA, 1018 bp, Homo sapiens
tgctatccacatgtgtgccaaaatattcactatggttacaaaacaaaagatggatgattaggtgaaaaataaagaaactttaccttaaatttttctaaataatattttccctggaaaattcctttggcaccaattaatatgatcgctaaaaacacaggtcgcatctattaataaaatatggtgacaaaaccccgtctctacccaaaatacaaaaaattagctgggcgtggtagtgcgtgcctgtggtcccagctacttgggaggctgaagtgggaggatggcttgagcccgggaggtaraggttgcagtgagccaagactgtgccactgcacaccacctgggtgacagagagaccccatctcaaaaaatacataaaataaaataaaataaaataaaatacggaccattattttcaataagatttctatgacctgcaactattatattcgtaaagactttaaaattgtttttaaaaacttaagcactcggttctttctatggttaagggaactcaccaacttcatagacattcctgttggctgaagttgagttattgatctctgcatatggggaatctcttcgtgccggcgatttcatctccacataaccacactctgagcttttcgggataagtacaggtgggtctttaatagtggcatatgggttctcagaactgcttagggagcagttacttgaattatattcagaattctttcccaggtctgtgaagagaaatgagaagagaaagctaatgctgtgtcactggcaacatcatttcttggtgatattttactgtttttctttatagctaggtttccataattctacacactgaaaataatactgtaccttttccacttgttttggagagaatctgctataaaatgacccatccctaaagtagttttagctcctctccaagatgagtactgacatcaatatcattaactgatttcatttttatgatcacattagaatataatcaattacgttttgttttattaatagaaaatttaca

SEQ ID NO: 712420 - DNA, 641 bp, Homo sapiens
atagtgatcccaacagcagccaaaatgcaaacttagggacaccaggccattggtgggtttwgcttccatgctctattccctagtttgccccatcaggagcaaaaccaggttttgtgaggccggagcctatgtaatttagaggccttctttagaagtataacattacaaatataccattaactgaagttttaatgtaatgtgttaccatagtttacttaaaggaaggaaaaagtcccagctttattctaaacaaatcagcactgttatttgtgatacttatcaggtaggtatcattcagtaggtatccaataaatgttgattgattttattaaatatcaactggaaattctgaatacttttatctgatgtgactgtttatatccccaactaaattatatatatatatatatatatatatattttttttttttttttttttttttttttctgagagagtttcactcttgttgcccacactggagtgcaatggtacgatcccggctcactgcaacctccacctcctgggttcaagcagttctcctgcctcagcctcctgagtagctgggattacaggagggcaccaccacgctgggctaattttgtatttttttagtagagatggagtttcaccatgttggtca

SEQ ID NO: 712421 - DNA, 604 bp, Homo sapiens
caaatatatatttgacattataaactgttaattatcacatacttcttttatgacagtatacaagttactcttgtacttcttactatatttttctaactaggcagtaaatttcttaaggtatggaagtatgccttattcacctttgcagtgcttgaaatagaaccatggatatagtagttgatctgtatagctacagattacattactgcatatctagataaatatgtatatatatacatattgaattaagtagataaaagaattgcagtcatatcaaaaagaaaatggaccatgttttcctttatggcagagatggtgacaattcttcacttgactttttctattaaaaacagcccacaaccagtaaacggcaggttcttttaaccaaaaagttataaagcttgaacacacaattcaacagccaaagtggataattaactcactcctgcagtgacatgttttaaatggtgtgcttttctatctgttatatctacccaaagacaatattcaggatttttccacctacgactttgtctcttaataaattgtatwggaaacttttgtatgctcctctctaaaatagcataccaacttcaaaatttcc

SEQ ID NO: 712422 - DNA, 1166 bp, Homo sapiens
gccatttgtttgaattagatagagttaggtacttttgctcaggatcatagtttggaagtttgaggatctttacagttttagacgcaagcttcactgaaataaaactggatacacagatatatatttcagccttttagtctgggcaatgaaaagtagatggtgcacaatgagtctctatgccaaatatctttcttctcttgactttttgctgatgtgttgcaagcatttgtgattctttatgtgtatgtatgtgcattcatgtacataaacttgtctgctagttattaccctgaaatctaaaaatttatattgtattgttgctcagaattatgagaataatatgtcttgacacaaacaaatggaaaaacattccatgctcatggattggaaaaaatcaatattgctaaaatggttatactgcccaaaggaatctacagtttcaatactattcctgtcgaactaccaatgtcatttttcacagaattagaaaaaacttttcgaaaatttatatggaacctaaaatgagcctgaatagctaaagcaatcttaaccaaaaagaacaaagtctgaggtattacattacctgacttcaaactatactataaggctttagtaaacaagacagcatggtcctggtactaaaacagacacatagatcaatggaacccagaacagagaactcacaaataaagccacacacctacaaccatctcatctttaacaaaattgacaaaaataagcaatggggaaagaacatcttgctgaataaatggtgctggaataactggctagctgtatgcagaagaatgaaactggacccttaacattcaccatatacaaaaattaacccaagatggattaaggacataaatgtaactcctcaaactataaaaaattctagaaaaaaatgtagaaaatacccttcttgacatcagcttttgcaaagaatwtatatctaagtcctcaaaagcaattgcaacaaaaacaaaaattgatgagtaggaccactacctcagtgactagaccattcctaccccaaactttggcgtcatgcaatatatccatgtcataaacctgaacatgtaccacctggatctaaaataaaagttgaaattttaaacagacatctttattgtagatcatttgcaaatataaaacccaaagaa

SEQ ID NO: 712423 - DNA, 775 bp, Homo sapiens
tttccccatattctttttcagcmcccaggggaacctgagcaagaccataggcacacacacagccatggagaagggtggcttctccccttccttgaaagcacctcaatttcagaactgattctcttggggattcacagttgagaatttgagagagcagaagccagaaaaataccttctgctccacggggatatgaagggcatggatgggatctggactttctcctcaatctcaatcccgtgcacgatttctccagttctgcctctagttcttgctcttgaggatgaggaggttacaaaccaggagtctctcatttaaaaaccggggttctcaataggttgctctttctatgcaatcccacactgagttttgaaagtcagatcaggaaagttgaatattttactgttttgagtaggtggcagttgcacaaaatataagatgaaatggcccagaaagtatgtaaaaagcaatgagaagattccagcacattgtaatatttaagggaaaggtggaagaaaatgagtcaatgatggaaagcagaagaatcttagaaaagagggagcacagaaaacatgatgctagaaaatctagagtgaaaaaccatttcctaaaggtgcagcttgtggtatcagatggtgtgaataagtcaagtagcttcagaaatgaaaatagtccattatttttggcaacctggagattaggaacctttagagcaattttaatgtcatctagtgggcagaagatataggcaataggttgaaagatcaatataaaatg

SEQ ID NO: 712424 - DNA, 620 bp, Homo sapiens
gaggtacttttgtgcgtgggttgtgtgtgggtgtstttggtgctctatataattaaagtaggattttctccattgcctagtcccagatgaagcccagaatttttgttcaaatttacttcattctaaaacttcactccttcaaggttttcctcgatttgcgctcatcccccagagggcgctgggcagctgcttccacagctctccctcctgctattggtccccaaacctatgtgcattttatctctcagatatacaggtttggtgccaaaaatatctacctataaaacgtgagtaacataaaacctcaagctatgcattctatcacatacaacatggtaaatcgcacaatcccaggaggaattctctttttccttaagttttgtcttctgaaggaaataagtcatccttcattactatttaatagaggtgctgtagtgggctggggggtgcttcatgttctacacagttaaaggagggttttcttcattgcctggtacaagatgaagcccagtttttgttcaaatttaatttattccaaaacttctctccttcagaattttcctctgtttatgtttattgacagggtaacagttaactgatgattgttttggcatcaatac

SEQ ID NO: 712425 - DNA, 663 bp, Homo sapiens
ctctctagccctagagagagtattataggaaggatggagacttatacagttgctgtataaccatcgacatgatcaaaatgagtatttttagtactttgaggtagacagataagagacattaaatattagacctagtttgaaaatgatcaaattaaaataaaaggcctcagaagactcattcatggtaagtagcccatggatgggargtgccaacttaagtttcccgactgtatgttcacatcacctgtcctgttcatgtgcagaatcataaatgtgatcattactttcttaaactttctgatagaacctatgctgaaagggtggtgttatacaaaaattgcaagagtatcatcttaggagtagtaagttacaaacaagtttcattgcataaaaagccaaaaaaacaaagttctgtctctgagttttctgacataggtataccaactcacaaatattttacttccccttaaaaaatgtaaactgcacgctttagatagtgatcaactgaattatgtataattccataaactattctaattaaataacgtcaccagtaatcacgtgagcaatttcaaaagctaaaaacaaaatcattccaaaatttgcctactataattttgaagatgtgtatgaaatcatgataaaactgaattacctttaaaa

SEQ ID NO: 712426 - DNA, 663 bp, Homo sapiens
ctctctagccctagagagagtattataggaaggatggagacttatacagttgctgtataaccatcgacatgatcaaaatgagtatttttagtactttgaggtagacagataagagacattaaatattagacctagtttgaaaatgatcaaattaaaataaaaggcctcagaagactcattcatggtaagtagcccatggatgggaggtgccaacttaagtttcccgactgtatgttcacatcacctgtcctgttcatgtgcagaatcataaatgtgatcattactttcttaaactttctgatagaacctatgctgaaagggtggtgttatacaaaaattgcaagagtatcatcttaggagtagtaagttacaaacaagtttcattgcataaaaagccaaaaaaacaaagttctgtctctgagttttctgacataggtataccaactcacaaatattttacttccccttaaaaaatgtaaactgcacgctttagatagtgatcaactgaattatgtataattccataaactattctaattaaataacgtcaccagtaatcacgtragcaatttcaaaagctaaaaacaaaatcattccaaaatttgcctactataattttgaagatgtgtatgaaatcatgataaaactgaattacctttaaaa

SEQ ID NO: 712427 - DNA, 1332 bp, Homo sapiens
ggtgaatacgcaaattattatcactcagctcacactgtggcttctacctcaaattaacatttggcaaataattcttagaaatgccttaaaacaaacaagacagacaatggaaatgaagcagctgtctacaaatgcagtgactcactttcagtttattttaagactgttgtagacgtaaatccatatgaattatctcagaaagtattttttttttaattcatgttgatgttttgtcaagaaaattaaagtaaacaaaaattagacaggtttgagaagatttaataaacaattttgaacaaagaaagaaggaaattaatgaaatgacatttaggtatgtttcatgattcatcctttagtgatccattgaaatatctgggactgttctgttctctatttagtgactatctatttagtgattttacttaaatacttttttgctagctgataaaagcacaccataccactacccgtagcaagatgttctttgcatatgatataagcaattatgacagagcagaagatccttaaatgttcaaaactctcaattcagtagatgaatctcaggctttttatgcaacttggattcaaaactgaaactcacatcaaatgtctgatcctcactcatcatttacccaatactgcaaagctacagaatagagtatcttgttttaaagtaacacatctgaaaagtaaaacagaagtatttattaactttcaaagtgattatttcaaaaacatcatataataaatacttgaattcacaaatgttctcctgtagctaartgttctttatcgggaaaactatacactcgctagtcttaacttgctaatatcatcaacataataccaacgatatcaattacctagtaaactcattggagtcctctactactgctaaaagaacttcaagcctaaacatgcccacgaagttcataattggatccagtcctacctacacacctgcccaccatttcattaacattctagagagttgtggctgctgattcttccctgcacagtctctcctgatatattttgtttggttttgttactacttctcctttaaaatctgctcttgccccacagtggtaggggatcgcagggttaaaggaattaatatccacaatggaacagtgcctggtttgcagaaaaccttcatatgttagcctcgacgggcgcaaagtctcttttgacaagttcaagcctacatgcatccttcttttctctgaattaggatggcacatagtcagtagtgccccttgtcacttaattattctgtaactctttcacttacattggtcatcccagttgccctccaaatcatttggtggg

SEQ ID NO: 712428 - DNA, 653 bp, Homo sapiens
tcttccagtagaaactgcaaaaatataagttgtattgatctcctcccttccatcccattcccaccttatatttgactttaatactttttcagctatatagggaaaagctacatamacagaaaaacatgaacctgtaattagtgctaacaatgacattttagagagaagtgatacatccacactttctatgttccatagtcttccccactgttttccaagagggttgtggctataaaataaccaaagtgctgacttggggagtttttgttgccgttgaggaagggatgtcggacacctcgctgatcccaggctctcagggccgcagcctcctgtagggtccccacaccacaaaaccggcagagccaacacccacgtgctgagtgcagcgtcaacacagcgtggcctgcctggcagcaacccaccactcaatctggcacctgtcaccaggagggccttgggcaggggcgcatctaaaggtctgggaggctgcagggcaggacgtggtgaagaagcctcctgggcaggggctgccgtctgtgcttaaggaggccccagtgctcctttgatgacactgaagggcctggctacaatcgcaaacacgcagccacgtctctgattcgatctttggggcctggtgtttttcccagtgacag

SEQ ID NO: 712429 - DNA, 569 bp, Homo sapiens
gtaatccttgtctggagtgaacattgtatatgaggttgcagtggcttaaaaaggaaggacttttgcggggaggggttgagattgtactttctaatttcgcttgcttcagacttgactttggaatgaagttcgaaggcatcacaattgacctggacattccaaaaacaaaactgaagaggcagcatttctcttccgtagtccagtcagctcatttggtagatgcgctttttcctcctttgcgcttattcatccataaggatatataatttgcatatatatttcatatgcgtgcatatgtgtgtgtatgtgtgaactggcaggtgttgatttcataaggacaaaattgttctgcaaaccttgcaccaattatggggtgtttcaacggaaaaacttcaccaaatgatctgtgtgttckttcaaagagaagttatgtctaattaaaatgtgtaacggactatttctgtgttggattgtttaaaaagtgattgcttcatagtgtactaagatcatctctttaagcagaagggagaaaacagctttctagttactttcacatattaggtttgcta

SEQ ID NO: 712430 - DNA, 1006 bp, Homo sapiens
gttcctatgtttctcgtgtgatttctatgtttcgatcacgtcttccctgcttctgtgtgttttccactcatcttaaagttcattgatctgctttgctattaaactcacttatttcattattggtttatttttgatatgtaggtttgtgtttgattccttttatttgatggatttcggtttccttttgagactctctatcctgtgatctacttcctgccacattaatcctggttacctccacggcctgtctgagacgtccaaacctttatctcgtggatgtttaattatctggggttttcctcagcctttcctcattttgtcctttctctgggtgtgcctgataatttttttattaagtagtagatatgatgtaggaaatgtgtaaggatcatttgaggcccgggctggtgtcttcacctccagaggatttatttttgtkggaagagcaggggtggttcatctgaatgcactccggggagggactgcatgaagtccgcctcagacctttgggcagctgatccagcttccgtttgtcccactcctggcaaagtccatgctcccttttcaggtccccactgaatgtctgggagtttcccaggcccttcctcccagtggtccttgaattccagattttatctccccaccctgtgcgttttcagaagctctcagcctccaagctccaagatgagctctctgctcatcggccaccagcagtgccctgaggggtagaaaggtgtcaagtttccagtggcctgtgaacgccacatctgcccaggacattggccctttgaggctagattgccttgtcacctccagaaaaccttcaaaaagtgtgtccagcttttctggttgttcttggccgtgggcttggatgtaaggtacacgagcaaacccactgcagccagagcaggaagctgtcccgcgtccacgtgcacagctctaaccctaaaatagccttcggagttaggggaagagcaatgtcctgttcactgcccaactccaagcc

SEQ ID NO: 712431 - DNA, 1006 bp, Homo sapiens
gttcctatgtttctcgtgtgatttctatgtttcgatcacgtcttccctgcttctgtgtgttttccactcatcttaaagttcattgatctgctttgctattaaactcacttatttcattattggtttatttttgatatgtaggtttgtgtttgattccttttatttgatggatttcggtttccttttgagactctctatcctgtgatctacttcctgccacattaatcctggttacctccacggcctgtctgagacgtccaaacctttatctcgtggatgtttaattatctggggttttcctcagcctttcctcattttgtcctttctctgggtgtgcctgataatttttttattaagtagtagatatgatgtaggaaatgtgtaaggatcatttgaggcccgggctggtgtcttcacctccagaggatttatttttgttggaagagcaggggtggttcatctgaaygcactccggggagggactgcatgaagtccgcctcagacctttgggcagctgatccagcttccgtttgtcccactcctggcaaagtccatgctcccttttcaggtccccactgaatgtctgggagtttcccaggcccttcctcccagtggtccttgaattccagattttatctccccaccctgtgcgttttcagaagctctcagcctccaagctccaagatgagctctctgctcatcggccaccagcagtgccctgaggggtagaaaggtgtcaagtttccagtggcctgtgaacgccacatctgcccaggacattggccctttgaggctagattgccttgtcacctccagaaaaccttcaaaaagtgtgtccagcttttctggttgttcttggccgtgggcttggatgtaaggtacacgagcaaacccactgcagccagagcaggaagctgtcccgcgtccacgtgcacagctctaaccctaaaatagccttcggagttaggggaagagcaatgtcctgttcactgcccaactccaagcc

SEQ ID NO: 712432 - DNA, 1118 bp, Homo sapiens
caatcatcccacagtgtatatatacttcaaaacatcatattttccattgtaaacacatcgaattttatttgccaatgtaaaaaataagatgatatatattaaaagctgcatgacaaaaatttaaacattaaaatataattgatatgctgaaagaagacaaagtgtactcaaataattgcatgataaagcaaaaatgtcttttatctattttgttcactgctgtcctcaattatctataaattctggctcataaaagtagaaaaatatttacgtgtaaaataaaaaagtacatgagctacaagcaaaatatatgaagtttagtgtgctctgaaagttaggaatacatttttcaggtttttagaaagattaaaatgactaaaattattaaaataaatattagtatttactgtttcaaragaaatacttttttaatggcaaaaaatataaatacaagtatcctacaaacacaaacacacacatacacacaagcattcaggatgatttacttaaagcaagaaaaacaggaaaaaacaagaataaacaagaatttcttcagccattaaaaaaaaattaacaggttaatacttgtagagaaaacaactatgcctctatttcacaaatattcatcatgttaaaatttaaagtcagaattataatttttaataacaatattacattgtcttaaagatcaatatttcacactcatatttttaattttgtcaaattgcttaattaatatcagaaaactgttttcctttgacagcatcattaaaattttttcttcatttatatttgtagcatttgtattcttatgagatgaaattagtttttgaagcaagaataaaataattacattgtctgttctgaactctttttacaaaataaaaatctctaaaacagtcttgtaagtaataggaaattggactctcacaaatattttctataatctgaaatagcttaccagtgatttaattttagtaaaatatgtcttcaaagcaataaattatttctgtatgcaaattaaatggttaaaattagaacttattgtcaccttatcctttacatctgtctttattccattgtctataaaaatcacattatatatccaattttccaag

SEQ ID NO: 712433 - DNA, 1965 bp, Homo sapiens
cacactgacaggttggtaaaatattcattctcggactggactctggagccaaaataccctcggcccctgagctgctccagatactccctactctgccagtccaggctgaacctggaagaatctagacccttcttgttacagttttttgccctaggaggccttgaaggaagccagtcaaaccccctcattttacagatgggcagactgaggcccaggtctccccagtgctcaggcttcatccaagcggagcttccaaatggtggatggtagaatatggtgattaagaacaaatgttctggccaggcgcagtggctcacgcctgtaatcttagcacttcagaaggtcaaggcaggaggattgcttgaacccaggagttcaagactagccctggcaacacagggagccccttgtctctacaaaaaataaaaaaaattagccgggcatggtggcatgtgtctgtagtcccactgtgagcctgggaggtcaaggctgcagtaagccatggttgtgccactccactctccagcctgggcgacagagtgagactctgtctcaaagacaaaacaaaacaaaaaaaaacaacaaaagaacgagggttctgagtctgtctccttatctgtataatggtggtcctacctcacaggactcaagctgtgaaggtcatagtggtaacaaaattgccacacatgtagtataagcatgatcaggagccagtgtccaacccatcaggtagcaattacatagtgtcccaccatgagcctagacccccactccctgcgcccaggcatcagggactcccagaagtctaaagaggtccaggctggcacatccagaactctctccttcctgttccagccccttgcctctcctttgtctgtgaggctgggtctcctggaattcattgctgcccagtgggcatctgaggccctttctcctcctgcagggccagaagtttgcctggcactattgcccagagaacacagtggctggatgacatcatggagatgatggccttgccaaactggtttcccaacaggtcctcagtcccactccgagggctgctggccatgacctagggctcacccagttctgcacataaggaggaaggtcataccccttggatccagccaaccccaacaagaaccatccacttctagggactccattctccagcctcacctgcctgtctgttgcccaacaaggtcctcacaatcctacttccgttcctttgctaatgctgttcccatctccagaatgacagtgctgtcctggggagagaggcttagagagcccaaggcacagctcctccattgtgcatatgagcaagttgaggctccaagagggccaacccttacctagggtggagccaggggtaagacacccatcacccttcttgcctcctgacccaagcctgggttttccctgcaggacactgactgggtggagggttagccaggtgacttagggatgcaatgcagacagcttggtaaaatagtcattctcagacttgggctctggagcaaaatattacccctagcctctgagctgctccagccacttcccattctgcctttctggggttgaacctggaagaacctagagtagaccctttctgtgacagccccttgccctaggaaggcctgaagcagaccagtctaatcacctcattttacaggggcaggctgaggcccaggcctctctggcgcccacaagatacattcrtcctgctcacctggcattcagaatcctttgccaagagaagcacccacatttcctgctccacccacagcctatcctcctccttttcccagactattggtctttgctcacactgttcctctgccacaaatgccctttcatgcctttccccctcttctatgtgggatgaattttaaaaattagttgggcgtggtggtgtttgcctgtagtcctagcctcttgggaggctgagatgggaggattgct

SEQ ID NO: 712434 - DNA, 1965 bp, Homo sapiens
cacactgacaggttggtaaaatattcattctcggactggactctggagccaaaataccctcggcccctgagctgctccagatactccctactctgccagtccaggctgaacctggaagaatctagacccttcttgttacagttttttgccctaggaggccttgaaggaagccagtcaaaccccctcattttacagatgggcagactgaggcccaggtctccccagtgctcaggcttcatccaagcggagcttccaaatggtggatggtagaatatggtgattaagaacaaatgttctggccaggcgcagtggctcacgcctgtaatcttagcacttcagaaggtcaaggcaggaggattgcttgaacccaggagttcaagactagccctggcaacacagggagccccttgtctctacaaaaaataaaaaaaattagccgggcatggtggcatgtgtctgtagtcccactgtgagcctgggaggtcaaggctgcagtaagccatggttgtgccactccactctccagcctgggcgacagagtgagactctgtctcaaagacaaaacaaaacaaaaaaaaacaacaaaagaacgagggttctgagtctgtctccttatctgtataatggtggtcctacctcacaggactcaagctgtgaaggtcatagtggtaacaaaattgccacacatgtagtataagcatgatcaggagccagtgtccaacccatcaggtagcaattacatagtgtcccaccatgagcctagacccccactccctgcgcccaggcatcagggactcccagaagtctaaagaggtccaggctggcacatccagaactctctccttcctgttccagccccttgcctctcctttgtctgtgaggctgggtctcctggaattcattgctgcccagtgggcatctgaggccctttctcctcctgcagggccagaagtttgcctggcactattgcccagagaacacagtggctggatgacatcatggagatgatggccttgccaaactggtttcccaacaggtcctcagtcccactccgagggctgctggccatgacctagggctcacccagttctgcacataaggaggaaggtcataccccttggatccagccaaccccaacaagaaccatccacttctagggactccattctccagcctcacctgcctgtctgttgcccaacaaggtcctcacaatcctacttccgttcctttgctaatgctgttcccatctccagaatgacagtgctgtcctggggagagaggcttagagagcccaaggcacagctcctccattgtgcatatgagcaagttgaggctccaagagggccaacccttacctagggtggagccaggggtaagacacccatcacccttcttgcctcctgacccaagcctgggttttccctgcaggacactgactgggtggagggttagccaggtgacttagggatgcaatgcagacagcttggtaaaatagtcattctcagacttgggctctggagcaaaatattacccctagcctctgagctgctccagccacttcccattctgcctttctggggttgaacctggaagaacctagagtagaccctttctgtgacagccccttgccctaggaaggcctgaagcagaccagtctaatcacctcattttacaggggcaggctgaggcccaggcctctctggcgcccacaagatacattcatcctgctcacctggcattcagaatcctttgccaagagaagcacccacatttcctgctccacccacagcctatcctcctccttttcccagactattggtctttgctcacactgttcctctgccacaaatgccctttcatgcctttccccctcttctaygtgggatgaattttaaaaattagttgggcgtggtggtgtttgcctgtagtcctagcctcttgggaggctgagatgggaggattgct

SEQ ID NO: 712435 - DNA, 1366 bp, Homo sapiens
attttaaaaatttcatgttatataaccaatgatgaacactaggaaaataaattaatatgagtaataatctaccagtattattcaaattaatttatgtcacagattctaaagattagggcaaaaagaaaaatataataatttatgtgtccaactaatttcctttttctggtgcaagatccaatctaggaccaaatatttagttgtcatgtctctttagtgtcttccaacacaattcctcatttttttctttgcttttcatgactttaaaacttttgaagagtattggccagttatttcaagagtgttcttaatgagcgttttaatgttttctcctgattatggtatgtatttttagtaaaaatataatggaagtaatggtttatgtttttttgatacatcatttcagtgggtggatgatggcaatatgagtcattactggttacgttaactttgtatgcttggtcaaagtggtgtatgacaggtttctaaatagtaaggttatgtttttatcttcacaattaatatgtattgtggggagaaacttcgaaagtatgcaaacaaaaatgattttatcatatttgtgctaattttggaaacatttcatatcaagcttttgtcttttttaattaaacaaagtagtaacttatctctctacattgcaccacctgtaataattgaaggataattttagtttgcttaaatatgtcatatgtttaaccctatatatttgtattacttacttagacatacaataaactagaacaatgtgtttggaataaatataaaaagaaaatatgtagccatggctttagacagctgcaaagtacatggctttaggaatagtctgaaaccctgcttaaatagacaataaagagagtcttgatgagaatggaaattgaaggctagtgcccatttgatataaaagaaaaaataatagcttactatattatttctactgccccattgaacattaacaaaactgaattaccctataaagagaataatgacttggaaatgtgtatggaagagaagatgttcagtagtctttattacagaattttttttctmataatgaatataaaaatttagcaaatgaaaaggtgccaaactttgcatatactttagcagtattaggaggaacagagtttttaaattgatctgaagtcttaaaatctggatttatgttttaagaaaatgatcacacattaaagatggatgccaatataactgaaacttagcagagcagctgaaaattacccaatacatgcatgaccttagtgacaatgatatccttttagagagcacctctaattgcaaattttaacatttattgtaggcatgaaaaggcatgccagcatacaattca

SEQ ID NO: 712436 - DNA, 1501 bp, Homo sapiens
atctgaggctatagaggtcaaggttgtagtgagccatgatcccgcaccactgcactccagcctaggcgrcagagtgagacaccatctcaaaaaataaaataagataaaatgaatacaataataaaaaagaaacttatttgaccatggacttctttttttatattagcatcttcaaatatggacatctgagtttcacactgtagaaaacaatactataaagggaatacttttgtttgttttttcctgacataaagcagtgtccagcaaaaaccaatcaggcagaatttttgtttgtttgtttgttttgagacagggtctcactctgttgcctaggctggagtgcaataccctgatcactgctcactgcagcctcagcctcctgggctcaggtaattcttccaccccagccccctgagtagctgggactacaggtgtgcaccaccatgcccagctaatttttgtaattttttgtagagatagggttttgccatgttgcccaggctggtcttgaacccttgaacccttggttcaagtgatccacctgcctcagtctcccaaagtgctaggattacaagcatgagccaccacgcctggtctcagaatcttaatttaccattttaaaatctaagcagcagctcacgactagccacatattcaaagattcgtctaccttggtcttctttcttacccattgactcttgaggccctgcaaaggtcccatccagctagggaagtggtgaccacttttcatggggccccaggacacacagcatgctgtcagcaaactgaccaacacagaactaaatcacagtgatgtcttccggcctcagggatgcgcctctgctagtttggagatggtttggggacaactaattgcttttcagctcaggctacacagctttctcacttccattattccccagagccatattttcccgagctacatttttcagataatagagccagaggaagacagaaagagagagagaacaggggcgggcaggaaattgatttttatcttcattagaagttttagaagttaagttaccatcttcaaaatccttcacttaaaacaataagcagtcctttcccaatggtagcttttgggcttcaagttgaaggttgaggctgcaaactagagggaagtgtggtcaccgatgttctgggagggaggaagagcatcctccagcgaggagtacatgtagtttcctctccagagctctgacaatctggttaccattagcagtggtgttgaaggaatgccagtgtcctctgatgtggcagtggatgaggtctgggttataactagagagggggctccaggagagagtgccatcagcaatgggcctgagaaccccaatttagtctctgtcctcttcctttgggtaattctttttttttttttcttgagacgcagtcttgctctgtggcccaggctggagtgcagtagcgtgatctcggctcactgcaaactccacctcccgggttcaagcaattctcg

SEQ ID NO: 712437 - DNA, 1501 bp, Homo sapiens
atctgaggctatagaggtcaaggttgtagtgagccatgatcccgcaccactgcactccagcctaggcggcagagtgagacaccatctcaaaaaataaaataagataaaatgaatacaataataaaaaagaaacttatttgaccatggacttctttttttwtattagcatcttcaaatatggacatctgagtttcacactgtagaaaacaatactataaagggaatacttttgtttgttttttcctgacataaagcagtgtccagcaaaaaccaatcaggcagaatttttgtttgtttgtttgttttgagacagggtctcactctgttgcctaggctggagtgcaataccctgatcactgctcactgcagcctcagcctcctgggctcaggtaattcttccaccccagccccctgagtagctgggactacaggtgtgcaccaccatgcccagctaatttttgtaattttttgtagagatagggttttgccatgttgcccaggctggtcttgaacccttgaacccttggttcaagtgatccacctgcctcagtctcccaaagtgctaggattacaagcatgagccaccacgcctggtctcagaatcttaatttaccattttaaaatctaagcagcagctcacgactagccacatattcaaagattcgtctaccttggtcttctttcttacccattgactcttgaggccctgcaaaggtcccatccagctagggaagtggtgaccacttttcatggggccccaggacacacagcatgctgtcagcaaactgaccaacacagaactaaatcacagtgatgtcttccggcctcagggatgcgcctctgctagtttggagatggtttggggacaactaattgcttttcagctcaggctacacagctttctcacttccattattccccagagccatattttcccgagctacatttttcagataatagagccagaggaagacagaaagagagagagaacaggggcgggcaggaaattgatttttatcttcattagaagttttagaagttaagttaccatcttcaaaatccttcacttaaaacaataagcagtcctttcccaatggtagcttttgggcttcaagttgaaggttgaggctgcaaactagagggaagtgtggtcaccgatgttctgggagggaggaagagcatcctccagcgaggagtacatgtagtttcctctccagagctctgacaatctggttaccattagcagtggtgttgaaggaatgccagtgtcctctgatgtggcagtggatgaggtctgggttataactagagagggggctccaggagagagtgccatcagcaatgggcctgagaaccccaatttagtctctgtcctcttcctttgggtaattctttttttttttttcttgagacgcagtcttgctctgtggcccaggctggagtgcagtagcgtgatctcggctcactgcaaactccacctcccgggttcaagcaattctcg

SEQ ID NO: 712438 - DNA, 1501 bp, Homo sapiens
atctgaggctatagaggtcaaggttgtagtgagccatgatcccgcaccactgcactccagcctaggcggcagagtgagacaccatctcaaaaaataaaataagataaaatgaatacaataataaaaaagaaacttatttgaccatggacttctttttttatattagcatcttcaaatatggacatctgagtttcacactgtagaaaacaatactataaagggaatacttttgtttgttttttcctgacataaagcagtgtccagcaaaaaccaatcaggcagaatttttgtttgtttgtttgttttgagacagggtctcactctgttgcctaggctggagtgcaataccctgatcactgctcactgcagcctcagcctcctgggctcaggtaattcttccaccccagccccctgagtagctgggactacaggtgtgcaccaccatgcccagctaatttttgtawttttttgtagagatagggttttgccatgttgcccaggctggtcttgaacccttgaacccttggttcaagtgatccacctgcctcagtctcccaaagtgctaggattacaagcatgagccaccacgcctggtctcagaatcttaatttaccattttaaaatctaagcagcagctcacgactagccacatattcaaagattcgtctaccttggtcttctttcttacccattgactcttgaggccctgcaaaggtcccatccagctagggaagtggtgaccacttttcatggggccccaggacacacagcatgctgtcagcaaactgaccaacacagaactaaatcacagtgatgtcttccggcctcagggatgcgcctctgctagtttggagatggtttggggacaactaattgcttttcagctcaggctacacagctttctcacttccattattccccagagccatattttcccgagctacatttttcagataatagagccagaggaagacagaaagagagagagaacaggggcgggcaggaaattgatttttatcttcattagaagttttagaagttaagttaccatcttcaaaatccttcacttaaaacaataagcagtcctttcccaatggtagcttttgggcttcaagttgaaggttgaggctgcaaactagagggaagtgtggtcaccgatgttctgggagggaggaagagcatcctccagcgaggagtacatgtagtttcctctccagagctctgacaatctggttaccattagcagtggtgttgaaggaatgccagtgtcctctgatgtggcagtggatgaggtctgggttataactagagagggggctccaggagagagtgccatcagcaatgggcctgagaaccccaatttagtctctgtcctcttcctttgggtaattctttttttttttttcttgagacgcagtcttgctctgtggcccaggctggagtgcagtagcgtgatctcggctcactgcaaactccacctcccgggttcaagcaattctcg

SEQ ID NO: 712439 - DNA, 1501 bp, Homo sapiens
atctgaggctatagaggtcaaggttgtagtgagccatgatcccgcaccactgcactccagcctaggcggcagagtgagacaccatctcaaaaaataaaataagataaaatgaatacaataataaaaaagaaacttatttgaccatggacttctttttttatattagcatcttcaaatatggacatctgagtttcacactgtagaaaacaatactataaagggaatacttttgtttgttttttcctgacataaagcagtgtccagcaaaaaccaatcaggcagaatttttgtttgtttgtttgttttgagacagggtctcactctgttgcctaggctggagtgcaataccctgatcactgctcactgcagcctcagcctcctgggctcaggtaattcttccaccccagccccctgagtagctgggactacaggtgtgcaccaccatgcccagctaatttttgtaattttttgtagagatagggttttgccatgttgcccaggctggtcttgaacccttgaacccttggttcaagtgatccacctgcctcagtctcccaaagtgctaggattacaagcatgagccaccacgcctggtctcagaatcttaatttaccattttaaaatctaagcagcagctcacgactagccacatattcaaagattcgtctaccttggtcttctttcttacccattgactcttgaggccctgcaaaggtcccatccagctagggaagtggtgaccacttttcatggggccccaggacacacagcatgctgtcagcaaactgaccaacacagaactmaatcacagtgatgtcttccggcctcagggatgcgcctctgctagtttggagatggtttggggacaactaattgcttttcagctcaggctacacagctttctcacttccattattccccagagccatattttcccgagctacatttttcagataatagagccagaggaagacagaaagagagagagaacaggggcgggcaggaaattgatttttatcttcattagaagttttagaagttaagttaccatcttcaaaatccttcacttaaaacaataagcagtcctttcccaatggtagcttttgggcttcaagttgaaggttgaggctgcaaactagagggaagtgtggtcaccgatgttctgggagggaggaagagcatcctccagcgaggagtacatgtagtttcctctccagagctctgacaatctggttaccattagcagtggtgttgaaggaatgccagtgtcctctgatgtggcagtggatgaggtctgggttataactagagagggggctccaggagagagtgccatcagcaatgggcctgagaaccccaatttagtctctgtcctcttcctttgggtaattctttttttttttttcttgagacgcagtcttgctctgtggcccaggctggagtgcagtagcgtgatctcggctcactgcaaactccacctcccgggttcaagcaattctcg

SEQ ID NO: 712440 - DNA, 1501 bp, Homo sapiens
atctgaggctatagaggtcaaggttgtagtgagccatgatcccgcaccactgcactccagcctaggcggcagagtgagacaccatctcaaaaaataaaataagataaaatgaatacaataataaaaaagaaacttatttgaccatggacttctttttttatattagcatcttcaaatatggacatctgagtttcacactgtagaaaacaatactataaagggaatacttttgtttgttttttcctgacataaagcagtgtccagcaaaaaccaatcaggcagaatttttgtttgtttgtttgttttgagacagggtctcactctgttgcctaggctggagtgcaataccctgatcactgctcactgcagcctcagcctcctgggctcaggtaattcttccaccccagccccctgagtagctgggactacaggtgtgcaccaccatgcccagctaatttttgtaattttttgtagagatagggttttgccatgttgcccaggctggtcttgaacccttgaacccttggttcaagtgatccacctgcctcagtctcccaaagtgctaggattacaagcatgagccaccacgcctggtctcagaatcttaatttaccattttaaaatctaagcagcagctcacgactagccacatattcaaagattcgtctaccttggtcttctttcttacccattgactcttgaggccctgcaaaggtcccatccagctagggaagtggtgaccacttttcatggggccccaggacacacagcatgctgtcagcaaactgaccaacacagaactaaatcacagtgatgtcttccggcctcagggatgcgcctctgctagtttggagatggtttggggacaactaattgcttttcagctcaggctacacagctttctcacttccattattccccagrgccatattttcccgagctacatttttcagataatagagccagaggaagacagaaagagagagagaacaggggcgggcaggaaattgatttttatcttcattagaagttttagaagttaagttaccatcttcaaaatccttcacttaaaacaataagcagtcctttcccaatggtagcttttgggcttcaagttgaaggttgaggctgcaaactagagggaagtgtggtcaccgatgttctgggagggaggaagagcatcctccagcgaggagtacatgtagtttcctctccagagctctgacaatctggttaccattagcagtggtgttgaaggaatgccagtgtcctctgatgtggcagtggatgaggtctgggttataactagagagggggctccaggagagagtgccatcagcaatgggcctgagaaccccaatttagtctctgtcctcttcctttgggtaattctttttttttttttcttgagacgcagtcttgctctgtggcccaggctggagtgcagtagcgtgatctcggctcactgcaaactccacctcccgggttcaagcaattctcg

SEQ ID NO: 712441 - DNA, 1501 bp, Homo sapiens
atctgaggctatagaggtcaaggttgtagtgagccatgatcccgcaccactgcactccagcctaggcggcagagtgagacaccatctcaaaaaataaaataagataaaatgaatacaataataaaaaagaaacttatttgaccatggacttctttttttatattagcatcttcaaatatggacatctgagtttcacactgtagaaaacaatactataaagggaatacttttgtttgttttttcctgacataaagcagtgtccagcaaaaaccaatcaggcagaatttttgtttgtttgtttgttttgagacagggtctcactctgttgcctaggctggagtgcaataccctgatcactgctcactgcagcctcagcctcctgggctcaggtaattcttccaccccagccccctgagtagctgggactacaggtgtgcaccaccatgcccagctaatttttgtaattttttgtagagatagggttttgccatgttgcccaggctggtcttgaacccttgaacccttggttcaagtgatccacctgcctcagtctcccaaagtgctaggattacaagcatgagccaccacgcctggtctcagaatcttaatttaccattttaaaatctaagcagcagctcacgactagccacatattcaaagattcgtctaccttggtcttctttcttacccattgactcttgaggccctgcaaaggtcccatccagctagggaagtggtgaccacttttcatggggccccaggacacacagcatgctgtcagcaaactgaccaacacagaactaaatcacagtgatgtcttccggcctcagggatgcgcctctgctagtttggagatggtttggggacaactaattgcttttcagctcaggctacacagctttctcacttccattattccccagagccatattttcccgagctacatttttcagataatagagccagaggaagacagaaagagagagagaacaggggcgggcaggaaattgatttttatcttcattagaagttttagaagttaagttaccatcttcaaaatccttcacttaaaacaataagcagtcctttcccaatggtagcttttgggcttcaagttgaaggttgaggctgcaaactagagggaagtgtggtcaccgatgttctgggagggaggaagagcatcctccagcgaggagtacatgtagtttcctctccagagctctgacaatctggttaccattagcagtggtgttgaaggaatgccagtgtcctctgatgtggcagtggatgaggtctgggttataactagagagggggctccaggagagagtgccatcagcaatgggcctgagaaccccaatttagtctctgtcctcttcctttgggtaattctttttttttttttcttgagacgcagtcttgctctgtggcccaggctggagtgcagtagcgtgatctcggctcactgcaaactccacctcccrggttcaagcaattctcg

SEQ ID NO: 712442 - DNA, 2610 bp, Homo sapiens
taaaatagatatgcatttgtattatacatacaaatatgatatacatataaatatgcacacaaatatgagttcctaaaaacattttgaattacgcattttgaaatggcatgaatctattttatttttgaggtgttaaaatataaaataattcatctctaatctattaaactacatcaagttttcccaaatatcactaacataacaatgcacttttgatgcttgcataatataaaatatttgtaacattaactatttaccatttaatgaactgatcagtagatatgtttctttgcacacaaatgatattgaataatttattgtagaataaagaaatggtgaaaaggtatcaaaggtatgtgaaaaatagaaattatttttggtcaaaatgagccaacaaatcagtttattaacaaacatttattattaaatatttgcctaaggagaagtttctttgtaaggaagaggatccagctcattgctgtttagttttaagttaagatgagcaagagaaaactgataaagtaataagtaaaacacacatgcctgagagttcattatgtccaatataaatacattgtggaaagaattatcttttcactgaagactccagaagaataagtagatcaaccacattctcaaaactattagagatagacaatcagaaggaaaaataaaaatgaatgcacatactcaaatacctaatgtgggtatatatacatatgattatttatttcctgataatgtgaggctatgttgtaaatgactttcaaaatatgatgcttgtgtttaagtcatagtcatgacatttgtagttatcaaatgtgtgcatgacataatttttttttgttttttaccaaagattcggtgcctagaatgtgtggttcttctacaacagaagctgcttttgccaagtatgcaggcgtttccatctattatttctctcaaatcatctaataccttctttgaaacttaacttcctgagcaaaacatttatctcaccaagcatcactttcaaatgttcaaatgtctggtgttattgctatatcaacatggtaatacatgaaattattcaacaattgctatcaatgcattgcacttgatgtttctctaattttgtaaaaatcatyataccatgctagaaactcaagctttcaacagacaacaatgttattttatttaatttctcagtaacagaaaaaatatatacttgaaggttatatgcatggccaagcctacctcttacagggattaactactctctctttttttaataatcattttaattttatttatttatttatttatttatattttttattatactttaagttctagagtacatgtgcacaacatgcaggtttgctacatatgtatacatgtgccatgttggtgtgctgcacccattaactcatcatttacattaggtatatctcctaatgctatcccttcccccttcccccaccccacaatagtccacagtgtgtgatgttccccttcctgtgtccatgtgttctcattgttcaattcccactatgagtgagaacatgtggtgtttggttttttgtccttgtgatattttgctgagaatgatggtttccagcttcatccatgtccctacaaaggacatgaactcatccttttttaaggctgcatagtattccatggtgtatatgtgccacattttcttagggattaactactctcaatatgctttatcacttttaattttttttcttctaatcagtggcttttataggacttgtagcctttcatgctttgtttacaaacttttgtgcttcttggaaacttttgttttacttaaaaatatggaaagatgatcatggtaatgcacacatattaaaataatctgagcattacttcctattgagagaacatctaaaatactatagtagctccttctatatccttgatatgcataatgtttaaatttttacatgcaaatctattatggaggaagttccacttctgtgtagaatataaatagtcacaaggaatattgctcccactatagcaagagaacggggacaaaaattaactttttctttaaaaggcatcctgtagatgatgtcacaaagcaaccaggtaaaccagagtgacaaacatctcagaagaaagatgtgacactcaatccattttatttttgacagaacatggcagaaaaaagtagtcaccttgaaaataaatatgaaaataggtatattttcaaacacatcttaaagaacaatgctagctaatgtgacagtgtacaatctcaggtaactgttgacaaaagggagtttgcacaaaggagttcacttaaagaacaatgctagctagtgtgacagtgcacaatctcagataactgtggacaaaagggagtttccacaagggaggagtttgcttaaataacaatgctagctagtgtgacagtgcacaatctcaggtagtggtggatacaagggagtttgcacacatttgccagatcttttccaagagcaacttccaagcaataaagactgggaccagggcagaagacttgagagagccttgttcagtggtgtaggtgtgcaggaccgttttaggtctgaggttggattagtagattgctga

SEQ ID NO: 712443 - DNA, 2610 bp, Homo sapiens
taaaatagatatgcatttgtattatacatacaaatatgatatacatataaatatgcacacaaatatgagttcctaaaaacattttgaattacgcattttgaaatggcatgaatctattttatttttgaggtgttaaaatataaaataattcatctctaatctattaaactacatcaagttttcccaaatatcactaacataacaatgcacttttgatgcttgcataatataaaatatttgtaacattaactatttaccatttaatgaactgatcagtagatatgtttctttgcacacaaatgatattgaataatttattgtagaataaagaaatggtgaaaaggtatcaaaggtatgtgaaaaatagaaattatttttggtcaaaatgagccaacaaatcagtttattaacaaacatttattattaaatatttgcctaaggagaagtttctttgtaaggaagaggatccagctcattgctgtttagttttaagttaagatgagcaagagaaaactgataaagtaataagtaaaacacacatgcctgagagttcattatgtccaatataaatacattgtggaaagaattatcttttcactgaagactccagaagaataagtagatcaaccacattctcaaaactattagagatagacaatcagaaggaaaaataaaaatgaatgcacatactcaaatacctaatgtgggtatatatacatatgattatttatttcctgataatgtgaggctatgttgtaaatgactttcaaaatatgatgcttgtgtttaagtcatagtcatgacatttgtagttatcaaatgtgtgcatgacataatttttttttgttttttaccaaagattcggtgcctagaatgtgtggttcttctacaacagaagctgcttttgccaagtatgcaggcgtttccatctattatttctctcaaatcatctaataccttctttgaaacttaacttcctgagcaaaacatttatctcaccaagcatcactttcaaatgttcaaatgtctggtgttattgctatatcaacatggtaatacatgaaattattcaacaattgctatcaatgcattgcacttgatgtttctctaattttgtaaaaatcatcataccatgctagaaactcaagctttcaacagacaacaatgttattttatttaatttctcagtaacagaaaaaatatatacttgaaggttatatgcatggccaagcctacctcttacagggattaactactctctctttttttaataatcattttaattttatttatttatttatttatttatattttttattatactttaagttctagagtacatgtgcacaacatgcaggtttgctacatatgtatacatgtgccatgttggtgtgctgcacccattaactcatcatttacattaggtatatctcctaatgctatcccttcccccttcccccaccccacaatagtccacagtgtgtgatgttccccttcctgtgtccatgtgttctcattgttcaattcccactatgagtgagaacatgyggtgtttggttttttgtccttgtgatattttgctgagaatgatggtttccagcttcatccatgtccctacaaaggacatgaactcatccttttttaaggctgcatagtattccatggtgtatatgtgccacattttcttagggattaactactctcaatatgctttatcacttttaattttttttcttctaatcagtggcttttataggacttgtagcctttcatgctttgtttacaaacttttgtgcttcttggaaacttttgttttacttaaaaatatggaaagatgatcatggtaatgcacacatattaaaataatctgagcattacttcctattgagagaacatctaaaatactatagtagctccttctatatccttgatatgcataatgtttaaatttttacatgcaaatctattatggaggaagttccacttctgtgtagaatataaatagtcacaaggaatattgctcccactatagcaagagaacggggacaaaaattaactttttctttaaaaggcatcctgtagatgatgtcacaaagcaaccaggtaaaccagagtgacaaacatctcagaagaaagatgtgacactcaatccattttatttttgacagaacatggcagaaaaaagtagtcaccttgaaaataaatatgaaaataggtatattttcaaacacatcttaaagaacaatgctagctaatgtgacagtgtacaatctcaggtaactgttgacaaaagggagtttgcacaaaggagttcacttaaagaacaatgctagctagtgtgacagtgcacaatctcagataactgtggacaaaagggagtttccacaagggaggagtttgcttaaataacaatgctagctagtgtgacagtgcacaatctcaggtagtggtggatacaagggagtttgcacacatttgccagatcttttccaagagcaacttccaagcaataaagactgggaccagggcagaagacttgagagagccttgttcagtggtgtaggtgtgcaggaccgttttaggtctgaggttggattagtagattgctga

SEQ ID NO: 712444 - DNA, 2610 bp, Homo sapiens
taaaatagatatgcatttgtattatacatacaaatatgatatacatataaatatgcacacaaatatgagttcctaaaaacattttgaattacgcattttgaaatggcatgaatctattttatttttgaggtgttaaaatataaaataattcatctctaatctattaaactacatcaagttttcccaaatatcactaacataacaatgcacttttgatgcttgcataatataaaatatttgtaacattaactatttaccatttaatgaactgatcagtagatatgtttctttgcacacaaatgatattgaataatttattgtagaataaagaaatggtgaaaaggtatcaaaggtatgtgaaaaatagaaattatttttggtcaaaatgagccaacaaatcagtttattaacaaacatttattattaaatatttgcctaaggagaagtttctttgtaaggaagaggatccagctcattgctgtttagttttaagttaagatgagcaagagaaaactgataaagtaataagtaaaacacacatgcctgagagttcattatgtccaatataaatacattgtggaaagaattatcttttcactgaagactccagaagaataagtagatcaaccacattctcaaaactattagagatagacaatcagaaggaaaaataaaaatgaatgcacatactcaaatacctaatgtgggtatatatacatatgattatttatttcctgataatgtgaggctatgttgtaaatgactttcaaaatatgatgcttgtgtttaagtcatagtcatgacatttgtagttatcaaatgtgtgcatgacataatttttttttgttttttaccaaagattcggtgcctagaatgtgtggttcttctacaacagaagctgcttttgccaagtatgcaggcgtttccatctattatttctctcaaatcatctaataccttctttgaaacttaacttcctgagcaaaacatttatctcaccaagcatcactttcaaatgttcaaatgtctggtgttattgctatatcaacatggtaatacatgaaattattcaacaattgctatcaatgcattgcacttgatgtttctctaattttgtaaaaatcatcataccatgctagaaactcaagctttcaacagacaacaatgttattttatttaatttctcagtaacagaaaaaatatatacttgaaggttatatgcatggccaagcctacctcttacagggattaactactctctctttttttaataatcattttaattttatttatttatttatttatttatattttttattatactttaagttctagagtacatgtgcacaacatgcaggtttgctacatatgtatacatgtgccatgttggtgtgctgcacccattaactcatcatttacattaggtatatctcctaatgctatcccttcccccttcccccaccccacaatagtccacagtgtgtgatgttccccttcctgtgtccatgtgttctcattgttcaattcccactatgagtgagaacatgtggtgtttggttttttgtcyttgtgatattttgctgagaatgatggtttccagcttcatccatgtccctacaaaggacatgaactcatccttttttaaggctgcatagtattccatggtgtatatgtgccacattttcttagggattaactactctcaatatgctttatcacttttaattttttttcttctaatcagtggcttttataggacttgtagcctttcatgctttgtttacaaacttttgtgcttcttggaaacttttgttttacttaaaaatatggaaagatgatcatggtaatgcacacatattaaaataatctgagcattacttcctattgagagaacatctaaaatactatagtagctccttctatatccttgatatgcataatgtttaaatttttacatgcaaatctattatggaggaagttccacttctgtgtagaatataaatagtcacaaggaatattgctcccactatagcaagagaacggggacaaaaattaactttttctttaaaaggcatcctgtagatgatgtcacaaagcaaccaggtaaaccagagtgacaaacatctcagaagaaagatgtgacactcaatccattttatttttgacagaacatggcagaaaaaagtagtcaccttgaaaataaatatgaaaataggtatattttcaaacacatcttaaagaacaatgctagctaatgtgacagtgtacaatctcaggtaactgttgacaaaagggagtttgcacaaaggagttcacttaaagaacaatgctagctagtgtgacagtgcacaatctcagataactgtggacaaaagggagtttccacaagggaggagtttgcttaaataacaatgctagctagtgtgacagtgcacaatctcaggtagtggtggatacaagggagtttgcacacatttgccagatcttttccaagagcaacttccaagcaataaagactgggaccagggcagaagacttgagagagccttgttcagtggtgtaggtgtgcaggaccgttttaggtctgaggttggattagtagattgctga

SEQ ID NO: 712445 - DNA, 642 bp, Homo sapiens
tatagacaaaatcattattgtttacattttgccacatttcctttcacttcattttgggcattaaaaaataatgataagccaggcacggtggctcacacctgtaatcccagcactttgggaggctgaggcaggcggatcacctgaggtcaggagttcgagaccagcctggccaagcacggtgaaacctgtctctactaaaaatacaaaaattagccgggcgtggtggcgagcgcttgtaatccccgctacttgggaggctgaggcaggagaatctcttgaacccaggaggcagaggttgcagtgagccgaggttgcaccattgcactcaagcctgtgtgacatactgagactccgtctcaagaaaagaagtgatcatactgaataagcaattttatagmttacgtttcccagttaatattttagcttcagcgtgtcctcatgttgttaggcactttgcaagtgtttatttttttacaggttaaaatctttttctgttacaggcaagcaccacagtgcgtgtaaccaactccaatgccaatgcggccagtcccctcatagttgctggctacaatgtgtctggctctgtccgaagtgatggggagcccatgaaaggggtgaagtttcttctcttttcttctttag

SEQ ID NO: 712446 - DNA, 592 bp, Homo sapiens
cgttgaaacatttccctatggattacaatcactttcatcagataaagcaccactttcaggatgattttaaataatctgccatgtttctgttatcctcacaactgtacccttacacaatctatctctacctagaaaacgtatttcagatggctagaagagtacagtctgagccggtcacggtggctgacgcctgtaatcccagcactctgggagggcgaggcggatggatcacgaggtcaggagattgagaccatcctggctaatacggtgaaaccccgtctctactaaaaatacaaaaaattaggcgggggtggtggcaggcgcctgtaatcccagctactcgggaggctgaggcaggggaatcacttgaacctgggaggcggaggttgcagtgagccaagatcacgtcattgcactccagcctgggtgacacagcgagactccatctcagaaaaacaaaaacaaaaacaaaaacaaaaamaactgtacagtctgatccaaactgttgctatattgattcctcctcttgcttactgcctgctgacttctgagatgatagtttccttccccattctcagtatatccctaattc

SEQ ID NO: 712447 - DNA, 1777 bp, Homo sapiens
tctcccttccctcccaagtaaaatcagtgtgaagcctgggatgcgtttccaggcaacagaggcctgaatgtgattcaccagcccagccctggaagagagtggggtggccagggcacttacctgtaagcggttcggtaccccgtgatggtgatcttcaggttctggccttcctgcacctcgatcatctgtgaggatggctcaaaccggaactccttcatcatgggtttgaagtaatactggccagggctctgccaagataatcacactgagcctcagcagccacatctaggcatggcttaaaagtgaggggcgaatgtcacgatggaccagaattacaccaggggagcgccatggcttccctggcagccaaaaatagtaaccctctctctataatcaccactcacagtcaggtagtggcaatcacaactctaacaacggcagctgatggtatcacctgcctgcaatgactcagagaggtagaagtcatatttaatttttcttttcttttttttttttttttctgagacagggcctgactctgtcccccaggatggagtgcacgatcacagcacaccgtagtctcaaccttctgggctcaagcaaatctcccacctcggcctcctgagtacctgggaccacaggcatgcaccaccatgcccagctaatttttttattttttgtagagatggggtcttcctatgttgctggtctcaaactcccaagctcaagcgatcctactgcctcaccctcccaaagcggtgggattacaggcgtgggccaccatacctggctcatatttgaatttaatgaataaagaaactgaggctcagagaggcaaagtaacttgcctgataggacacagcaagtaaggagcagtctgcatcactgcaaagtggtgtcttcagatgcccccactgcccggtctccagtagccccaccacagccactttgtcaccatgactgacaagatgaccaactaacacacacttcctgaatccccaccagtcagggcctccgactgcatcttgaaagaaaaactgctgctctcttcccaccaagtggaatgtcttttcagaagaaacgcaagctaaccaccaaacaagactcagcatcataaacatgattctgtggcaaaacgagaagacgcctaagagagcagccgttgtggccagggaaattaattacactgtcttagtgacaagcgggtgatcagaaaacaagaagcgcgtgtggaagggaacatgaatcagcagcattaagttcgagtaagagcaatactctaatgaccgtgggcccccaagaaactgaaaccactccacattggccttctcttctcacgttgtcaagcaacacataagtctcgcatgctgcatcctggctctctctcagggaagacaggcaggtggtaaattgcagaacacgttaccaggtttgagaatgtcagaatgccgttgtcctgggtcaagaggttggaacgaaacaggccaccrctcagggataagaggactcccgggaggggctggtcatcctcagcttttatctggggatgagaaggtgagaccagagcaaggttaaactcctactaactatgaaaataacagttccacaagtcaagaggtcattttttcaaggtttttttcttttattgttactcaaaggaggacaggggacctaatcttcctccccacaggtaactactgttgtaagttttgtaagtttggtgtgtagccttctagaactttttttttttttttttttgagacagggtcttgctctg

SEQ ID NO: 712448 - DNA, 643 bp, Homo sapiens
ttggaaacagagtctggcactgtcgcccaggctggagtgtaatggcatgatctcagctcactgcaacctctgcctcccaggttgaagtgattctcctgcctcagcctcccgagtagctgggattacaggcgcctgccaccacgcctggctaattttttgtatttttagtagagatggggtttcaccatgttggccaggctggtctcgaactcctgacctcatgatccacccgcctcaacctctcaaagtgctgggattacaggcatgagccaccatgtctggcctatacatcaatttttaagataatgaattgattccctgtcatcatcaaaaactgacttaaaaaaaaaamaaaacaaaactatgaactcatggaggtgtctcatcattagggaggtgagtcaggttgttcaacaagaccaaggctgtggagtcagccagtgttacttcctctacattccattgttgaaagcaagtccagacacaaagagtggaaggatagactccagcttttgatgtaaggagctgcagagtatttgccaccattatttaatctgtaatatctagttttgctgtaaatgcttccatgcttttttggttttctgtttcagtgtgagaattcgaagagattcaaagactatat

SEQ ID NO: 712449 - DNA, 577 bp, Homo sapiens
tatatatatatatatayacacacacacacacacacacacatacacatataattagtaggaaatattgcctaagcctaagtctatcttgttagaaatgcaagaaatttagctagtgcattcctgtagtcccagctactcaggaggctgaggcaagagaattgcttgaacccaggaggcagaggttgcagtgagctgagattgcaccactgcactccagcctgggcaacagagtgagactccgtctaaaaaaaaagcaagaaataacttctaatattctttgggttctgttgaagcactttaggttgtgagggtagaaaacttcttaagtgagttggatagggagaatcccacacaccgccagggcaggaagtatagccagtcctcactggaagttgcctgaaacctgtaaagtcaagagttaaggttaccagctgcatttctgctgatccatgaggtctcacatctcaagattgctatgccttatgctgtacatttatctcttcttcctcctcactttgtgtttctttgtctttctctgtctttctctacctctgtccccactcctcatccctggaat

SEQ ID NO: 712450 - DNA, 577 bp, Homo sapiens
tatatatatatatatacacacacacacacacacacacacayacacatataattagtaggaaatattgcctaagcctaagtctatcttgttagaaatgcaagaaatttagctagtgcattcctgtagtcccagctactcaggaggctgaggcaagagaattgcttgaacccaggaggcagaggttgcagtgagctgagattgcaccactgcactccagcctgggcaacagagtgagactccgtctaaaaaaaaagcaagaaataacttctaatattctttgggttctgttgaagcactttaggttgtgagggtagaaaacttcttaagtgagttggatagggagaatcccacacaccgccagggcaggaagtatagccagtcctcactggaagttgcctgaaacctgtaaagtcaagagttaaggttaccagctgcatttctgctgatccatgaggtctcacatctcaagattgctatgccttatgctgtacatttatctcttcttcctcctcactttgtgtttctttgtctttctctgtctttctctacctctgtccccactcctcatccctggaat

SEQ ID NO: 712451 - DNA, 1657 bp, Homo sapiens
ttcttcaaggttcatattcaaacctcaccgcttacrggccgcctctctcccttccatgaaccagcagaatgcattgatcccaagttcattattccaacctttgcacatccctctcttctagcaatgagctcatggcattcttgctaattgcccaaacagttgtctttatgagacatttgccagaggcatgggaggtactctgatagatgtatgctaaatggagataacctgtgttcagagctgggcatgagacttagaaattacctaggcccacactgtccatagaaagataacgcaagccagaaatgcaagccacacatgtaacttaaaatgttctggcagccacgacttttaaaatatgcaaataaaagggcaaaattcatttaattttatttatttattttgagacagagtcttgctctatcgtccaggctggagtgcagtggcggatctcggctcactgcaacctccaccttccaggtgcaagtgaatctcatggctcagcctctcaagtagctgggactacagttgtataccaccacacctggcccatttttgcatttttaatagagatggaatttcatcatgttggccaggatggtcttgaactcctggcctcaagctatctgcctgcctcggcctcccaaagtgctgggattacaggcgtgagccaccgcgcccagcctgcaaaattaattttaatattttattttatttaacccactatatccaatgtatactcatttcaacatggaaccaatataaaaatattttagtgagatactttaaatcctctctctctttttttttttttttttgagacagagtttcatttttgttgcctgagctggagtgtagtggtgcaatctcggctcactgcaacctccacctcccgggttcaaccgattctcctgcctcagcctcccaggtagctgggattacaggcatgcgctaccatgcccgtctaattttgtatttttagtagagatggggtttcaccatgttagccaggctggtctcgaagtcctgacctcaggtgatcctcccgcctcggcctcccaaagtgctgggattacaggcatgagccaccgcgcccagactttttttttttttttcctcactgtcctgaaagtccagtatgtattttgcacttacagaacatcagtaagattcagtctcacaccatttacgtgctcaacagctacgtgtgtctagtgattgttataccagacagcgcagctctagaccagccctctcattttacaaatgggaagactgaggcctaaagaaatccagtgctccctctgtttcactatttcatgcccttgaactctttttttttctacttttttcttttccctctatccccaggaaaggttggacaccaatgatctccacctgaatggatttgtttcatgcatttgaagcttttccctctgtctggtgaatttcagacatcggttcacacagagcagagatacttttgtggagcagaaggaggttgggagcctctgggtgtttgtcctcctttttcctcctcacccaaatcatgctgtttggtcaaacacatacgccacacaacagagtggacaaattgggtggtcaaatttgatggccacacatacattttgtttaggcttgaaagtaagaatgtttc

SEQ ID NO: 712452 - DNA, 647 bp, Homo sapiens
gtcaaatactgcaaattattagatgacctagaagagacaggacgaacattcttgagttccaaactgcctcttccatctactgactacttagaccaggtagtataatatgtcgagctcactttccttaagtggaaaaagaagacaatattatctagtttctaggattactagaaggatttataaataacacataaaaagtgtttatataccaggcttatataaatagaagatattgtcataatttatctaattacttcccctaaaacctaacttaatagtgcttataaactacttttaatttgttgatgaaaactaagtgttaagtgcttcttagctacacacaatgaatgcaattttcagtcagttgcaaatatggtttattagaagagaaccccctggragaaggaagccaggaagaattgatgaggtcaacacagctagggcatgattacctgttataaggtgtagaaaacgttgccaggacaacatcacgcccgttgatacgaatcacatctgtaactgcctggagaatgttgaaataaaaatgagagtctccaggaactgagcagttcaagcgcgccttcaggaacgacgtccactgtttctccaggactctttgagatcctcccatatcattcttacaaacc

SEQ ID NO: 712453 - DNA, 1079 bp, Homo sapiens
ttaaaaaggcctttaaaatgcagatagcctccagaataggtttcaggctccatgtaaatcagaaggcactyggaaacagggaagccagcctccatacatccacccacgcaccgacaaggcccagagccagcacgtaagcctgaagggttgcctgtgtctttaaactccaattacttggatgggcaggagctcaggtgagtcacttctgaagctgagtccttgggtaacaatcccacatagaagataaaaccaaattggacttggatttcacacttgatccagacttttgattttattaaggaagctgaggctggtggaagttaaaagaagtttcgaagttaaagcaactagtgagtggcaaaatgaggactcagtgccttgcctcacagccagggttttcgccactaccttactttcagttctcggctcactacaacctctgcctcctgggttcaagcaattctcctgcctcagcctcctgagtagctgagattacaggtgcctgccaccacacccagctaatttttgtactttcagtagagacagggtttcgccatgttggccaggctggtctcgaactcctgaccccaggtgattcgcctcccaaagtgctggaattacaggcgtgagccaccgcgcctgacccagagcgaacttttaatgtaatttaccaacacttacgatcacctctgtgccaatcatcgcactaggtgttgtggggctacacttatatgccaatcatcgcactaggtgttgcggggctacaccaacaaggagtgtagggccttggcctgtaaacatattactacagtctagtaggggatgaaggttcccatgtattaaattgacacacagcgctgagtggcatcatcactaaacagagaggtacaggtagctgcacactccaaaatgttcctttgaaaaagagaattgaagccagggcaaacatatcatgctgagtgatgggtacagagggagtagggagttcctggtaaacattgtctctggaaatataccagaatgaatcactcttttaatatcattattccagcgataccttttacaattattatttaatt

SEQ ID NO: 712454 - DNA, 815 bp, Homo sapiens
gagaagtgagaaggagattagtgggttgattaaattccattcaggtacttaaagttagctccaaaaatttagctatttgtaaattgtcatgcattgttaatgtataagagatgtagatttcatttatctttggtggagcgagatgaagcagtgaatcattgaagactgaaagaaagaaaaaggtcttttcccttttctttaagaagcatcattagttaaaaacatgttagttgataccagagaactatatttaaagggacagcaataagcaaattgattactctggtgattattggagtgacattgccttttagttgtactttcacaaaaattcacaatatttgccaaagtcaagttatccattacactattaatttgtcattcttttgtttatatagtcaatatctctatctcaattggatctatctcaactgcttctaaacaagccaccatagtctctcccatttcaacaatctcttccaagtaccacttcatttcttcttttcatatttttgaaaacttttgaaaaactacctattttcctcctccatttcttgttcattccattctagtggacatggaatctgttcctcctccaaaacggaatttggtcacccttaaattactaaacccaaaacaatatgttgtctttatctttacctctctgtggcatttaatgataagaccactactttcttctcttttacccttctttcttgaattcagtcaaacaacgtacttacatttttygtcttattctccatcttagaaaccacctcagctttctccattcagctataaaattgtgcttttcc

SEQ ID NO: 712455 - DNA, 1188 bp, Homo sapiens
attcaaattctgtcggaaagggagttaaggcttcatcctgctgctgggagaatgatatgctaaatgtagcttcctggggccctggcagccagccagggctttgtaatttatagttcaccttcgtggttctccaagtgaccttggaacctgcatgctggtggattttttaggttcacacgttgtcctccatcccctggtgagattgctccccaagtgagtgctccctggtccatcaggcaagagcttgagggagaggatgtggatggggggcacccagagaatgcatggctggggatcagaagatttcttgttgctgctgacctttcttctaaaattgctgtcagccaggaaacagtcaaatattgtgcttaaaggtggcttgcaggtgacaggagcctctctccagtcctagcacacagcaggtgatcctgaccaaaaaaaaaaaaaaaaaaaaaaagaggaggtacaatatgcgattacgttcatcagctatttttggctgaggaataaacaaaatggcccaaactgctgccattcgagattctagcaggggagtggcatgtagaaaagattaatgtacagttaaaacccgtgtacgggtaaattacagggtgacagctatctaatgcaaacactgcagacgtgtaattaagaggagttacagcgctcgaggatgaatttgctgagggaagtgctagggtgctgtctggagcccaggggcaggggcatggcactgggatggtgtgggggctgcagaggtggccaggaggagcctctyagcatcggggcagccttgtaaccataacaggtccattgcctgatgcacgcagcaagtcaatgtgctaagatgccaggttgcggcagaaaaagaggattaatggtaaggtcatggaacgaggagatggcagacaacctcaaatccatctccctggggaatgtggggttaggatttgtaagttttggagtgggtgaagtgtggagatcgttgatgggtggaagagtgcagggtaaagtcttgggaccgggagaggaagaagctgtgttctcaggctgatccccctcctctgtagggggtcctcaaactgttgggggcaatttggggtcttttcaacatcttaagtgaacaaaaaccttatgattctaaaatcaggggtcctgtctatagggacaatggagaagcaaatcaaa

SEQ ID NO: 712456 - DNA, 1458 bp, Homo sapiens
ccaggtgtggtggctcacactggtaatcgcaacactttgggaggctgaggcaggaggatggcttgaggccaagagtttgcgataggccttggaaacaaagggggagtcaccatccctacagaaaaatacatgaattagcctagtgtggtggcatgttcctgtagtcccagctacttgggaggctgaggtgggaggatcacttgagcccagggaggctgagaccgcagtgagtcatgatcaggcctctgcactccagcctgggtgacagagtgagaccctgtctcaaaacaacaaaaaagtagcagctaacatcaactgaccttttaccaggtgcctattgataccatagtttaatttcttataactgtttcttatttcacttaccaactctgtcttcagttactcccagatttttactgtgtgtgtacagatgaccttttgcttagattgaattgtctccccagaagtaagattactgtgagtcatggtgaatggacattctccttacccttgatgtaaattgacagggttttgggtgcctcccagctataatcttagcactttgggaggctaagagaggaggattgcttgaggccaagagttggaggaggcagtatggcagtatggtgagaccctgtctccattattttaaaaaattgacaggctttaccctggaaggcttatacacaatttaaccacccctcatagtataagaaagtgcccatttcactgcacctttgccagcacagggtattataatttagtaagccattttttgtttgattattttaaatagacaaaagacctcatattactttacttgtcacatttcaacatctttcctcagcttattagctctatttcttttctgtctgtaaatggttgttgtggttttgttctttgagacagggtcttgctctgtcatccggctggactgtagtggcataatcatgcctcactgcagccttgacctcccaggctcaaacttcmgcattccgagtagctgggactacaagtgtgcaccaccacccccagctaacttttttcttcttttggatagagacagggtctcactgtgtcgtccagagcggtctctagctcctggccttaagcaatcctcctgcattagcttctgtaatggctggaatttcaggcatgagccaccatgcctggcctgggctagtcccatattctctagagttatctttactctgtgctagccaatctctcattatgctgttcacctgttataatgaataattctctgtattaaattttaccactttaaacttttgagtggtttatgcttcctgattggactctgactaatatgttaggaagggtcccaggaggtaaacccacacagatgggatttgggcataggtttggtttcccagggggcagtgctgagctctttgccagtgggaaatgggatgctggtgatttccagtaggtgac

SEQ ID NO: 712457 - DNA, 1458 bp, Homo sapiens
ccaggtgtggtggctcacactggtaatcgcaacactttgggaggctgaggcaggaggatggcttgaggccaagagtttgcgataggccttggaaacaaagggggagtcaccatccctacagaaaaatacatgaattagcctagtgtggtggcatgttcctgtagtcccagctacttgggaggctgaggtgggaggatcacttgagcccagggaggctgagaccgcagtgagtcatgatcaggcctctgcactccagcctgggtgacagagtgagaccctgtctcaaaacaacaaaaaagtagcagctaacatcaactgaccttttaccaggtgcctattgataccatagtttaatttcttataactgtttcttatttcacttaccaactctgtcttcagttactcccagatttttactgtgtgtgtacagatgaccttttgcttagattgaattgtctccccagaagtaagattactgtgagtcatggtgaatggacattctccttacccttgatgtaaattgacagggttttgggtgcctcccagctataatcttagcactttgggaggctaagagaggaggattgcttgaggccaagagttggaggaggcagtatggcagtatggtgagaccctgtctccattattttaaaaaattgacaggctttaccctggaaggcttatacacaatttaaccacccctcatagtataagaaagtgcccatttcactgcacctttgccagcacagggtattataatttagtaagccattttttgtttgattattttaaatagacaaaagacctcatattactttacttgtcacatttcaacatctttcctcagcttattagctctatttcttttctgtctgtaaatggttgttgtggttttgttctttgagacagggtcttgctctgtcatccggctggactgtagtggcataatcatgcctcactgcagccttgacctcccaggctcaaacttcagcattccgagtagctgggactacaagtgtgcaccaccacccccagctaacttttttcttcttttggatagagacagggtctcactgtgtcrtccagagcggtctctagctcctggccttaagcaatcctcctgcattagcttctgtaatggctggaatttcaggcatgagccaccatgcctggcctgggctagtcccatattctctagagttatctttactctgtgctagccaatctctcattatgctgttcacctgttataatgaataattctctgtattaaattttaccactttaaacttttgagtggtttatgcttcctgattggactctgactaatatgttaggaagggtcccaggaggtaaacccacacagatgggatttgggcataggtttggtttcccagggggcagtgctgagctctttgccagtgggaaatgggatgctggtgatttccagtaggtgac

SEQ ID NO: 712458 - DNA, 1458 bp, Homo sapiens
ccaggtgtggtggctcacactggtaatcgcaacactttgggaggctgaggcaggaggatggcttgaggccaagagtttgcgataggccttggaaacaaagggggagtcaccatccctacagaaaaatacatgaattagcctagtgtggtggcatgttcctgtagtcccagctacttgggaggctgaggtgggaggatcacttgagcccagggaggctgagaccgcagtgagtcatgatcaggcctctgcactccagcctgggtgacagagtgagaccctgtctcaaaacaacaaaaaagtagcagctaacatcaactgaccttttaccaggtgcctattgataccatagtttaatttcttataactgtttcttatttcacttaccaactctgtcttcagttactcccagatttttactgtgtgtgtacagatgaccttttgcttagattgaattgtctccccagaagtaagattactgtgagtcatggtgaatggacattctccttacccttgatgtaaattgacagggttttgggtgcctcccagctataatcttagcactttgggaggctaagagaggaggattgcttgaggccaagagttggaggaggcagtatggcagtatggtgagaccctgtctccattattttaaaaaattgacaggctttaccctggaaggcttatacacaatttaaccacccctcatagtataagaaagtgcccatttcactgcacctttgccagcacagggtattataatttagtaagccattttttgtttgattattttaaatagacaaaagacctcatattactttacttgtcacatttcaacatctttcctcagcttattagctctatttcttttctgtctgtaaatggttgttgtggttttgttctttgagacagggtcttgctctgtcatccggctggactgtagtggcataatcatgcctcactgcagccttgacctcccaggctcaaacttcagcattccgagtagctgggactacaagtgtgcaccaccacccccagctaacttttttcttcttttggatagagacagggtctcactgtgtcgtccagagcggtctctagctcctggccttaagcaatcctcctgcattagcttctgtaatggctggaatttcaggcatgagccaccatgcctggcctgggctagtcccatattctctagagttmtctttactctgtgctagccaatctctcattatgctgttcacctgttataatgaataattctctgtattaaattttaccactttaaacttttgagtggtttatgcttcctgattggactctgactaatatgttaggaagggtcccaggaggtaaacccacacagatgggatttgggcataggtttggtttcccagggggcagtgctgagctctttgccagtgggaaatgggatgctggtgatttccagtaggtgac

SEQ ID NO: 712459 - DNA, 643 bp, Homo sapiens
aactcctaggcttagtaatcctcccaccttggcttctcacagggctgggattatggacgtgagccactgtgcctggccacgcggatgacctttgagaaggaagcttagtgcgcacaggcaggtgtgcacacgagctgattcttagtcacacacagaggctcggaggcacaaggtagggccctccgcagtagctgtatctgcagcagtggggacccagcatgacagaaggtggtcagtgaatgtttgttgggtgagcaaatggatggacagatggatggctgaatagacggacggatggatggcatgggtgggtgtgtgactgggtgattggccaagtgtcccctkgtggggacagaatcatccagactgggaaccgctatcctgtggatatgcaggaatgcacggaatagcagttcccaatctgggtgattcttactgtttgtaagaatagtggttcccttactgtccgaactccaacccctgcactcggaaggaactctgtgctctctgtacccagatggatttggcagcctctgtgtgtgtgtgtgtgtgtgtgtgtgtgtgtgtgtgtgtgtgtgtgcgcgcgcgcgcgcatgcgtacattttccctttgtgttaacacaaacagaaatgcaaagactgt

SEQ ID NO: 712460 - DNA, 643 bp, Homo sapiens
aactcctaggcttagtaatcctcccaccttggcttctcacagggctgggattatggacgtgagccactgtgcctggccacgcggatgacctttgagaaggaagcttagtgcgcacaggcaggtgtgcacacgagctgattcttagtcacacacagaggctcggaggcacaaggtagggccctccgcagtagctgtatctgcagcagtggggacccagcatgacagaaggtggtcagtgaatgtttgttgggtgagcaaatggatggacagatggatggctgaatagacggacggatggatggcatgggtgggtgtgtgactgggtgattggccaagtgtcccctggtggggacagaatcatccagactgggaaccgctatcctgtggatatgcaggaatgcacggaatagcagttcccaatctgggtgattcttactgtttgtaagaatagtggttcccttactgtccgaactccaacccctgcactcggaaggaactctgtgctctctgtacccagatggatttggcagcctctgtgtgtgtgtgtgtgtgtgtgtgtgtgtgtgtgtgtgtgtgtgygcgcgcgcgcgcgcatgcgtacattttccctttgtgttaacacaaacagaaatgcaaagactgt

SEQ ID NO: 712461 - DNA, 677 bp, Homo sapiens
cacaccctgcctcaaagctgggcttcagtaagaatgtatcccctaattggccgggtgcggtggctcacacctgtaatcccagcactttggaaagccgaggcaggcggatcacaatatcaaaagatcgagaccatcctggtcaacatggtgaaacccgatctctactaaaaatacaaaaattagcccggcatggtggcrggcacctgtaatcccagccactcgggaggctgaggcaggagaatcacttgaacccaggaggcggaggttgcagtgagccgagatcacgccactgcactccagcctggcgacagagggagactccatctcaaaacaaaacaaaataaaacaaaaaaaacaatgtatccctcaattgatggaaggttgaaggaaaggcagtaggggtcgaagagagagaggggagacaagggagggtggagcgcaggctcttacctgggaggtcagtagatgggggagtcagtgacaaggtgaacggtgtctgtgagaatggcttcacactgagggaaaaaggaagccaggggttagccaggtagaaagatgctaatgtcaccagcaaatgtttactgagaggccacaacaagcaagaccctgtgcattttgtgcacaatctcactgaagcctcacagtgcgtgaggtaggtagaatgactgctcttttca

SEQ ID NO: 712462 - DNA, 645 bp, Homo sapiens
tgaggtcagggtctggggccagtgtgggagagaaaggccttgaatggaaacaaaataaattactttaaggagtttataaaactcacacttatagggagagccgcggggccctgtggtcaatgtaccagcaggcccatgacgcaactgttccgtttggaaatttctggaaagcagtaatttttggaatcataaatcttgagtattttttttttaaactttggaaaggtttttaaactttttttttttaagttttttttaaacttcggaaagttttaagctttggaaagaatgtaacaaaatgttattaacatatgtggagctatcgaatcatttaatggtggkttctgtattttctgttttgttttttatcacataccttcttaattaagaaaaacccaaactaatttgaactttaaaagggaggcaaacaaaaaagtgtcagagtgactggatttttgtgcgcaagtcatttaacaatgcagcgctgcgtctcctatttctctggcttttaaccttgctttggacaaattggtcgctttttgttttgatgtcgtttcaagcttacggaaaaattgcaagattatatctagatcaatcaattgtttacgttttattctacttgttttattacctttctaatatatt

SEQ ID NO: 712463 - DNA, 600 bp, Homo sapiens
ctttcaaaacaacagacagcaacttccagttccaaatatctttgtgctcccctgttgcagagcctattggcctctaaacccagcaggctgagagcagctttcagcattagctctgccaagctgaagraaaacatctcagcctcagcttgaagcaaggggcattccaccggggtcgctccatgtgccaccccaggctgagaccatggcaagagaatgcagggatggtttgtctgctgccactgggatggaaccagctggaacccactcacatcctacaccagcaagcagatgcactgtgatggatgagggtcaagaacctgcccccagcctgtgtcctggagtgggaggggctttactggagccccagagtcttctagggggagggaaataaagccagctgagcctcacagcaaaagctgatgagctgtctagagaagcctttgtcggggcagtctacgcatactttgacaagcagaaatagagtcctacatcacgcggtgtcacgagggacccctctgcaccatataatacctggaaatgctgtctccaaagacattgacctataaggtcaggtgaaatccttcatttgacctgcctttt

SEQ ID NO: 712464 - DNA, 600 bp, Homo sapiens
ctttcaaaacaacagacagcaacttccagttccaaatatctttgtgctcccctgttgcagagcctattggcctctaaacccagcaggctgagagcagctttcagcattagctctgccaagctgaaggaaaacatctcagcctcagcttgaagcaaggggcattccaccggggtcgctccatgtgccaccccaggctgagaccatggcaagagaatgcagggatggtttgtctgctgccactgggatggaaccagctggaacccactcacatcctacaccagcaagcagatgcactgtgatggatgaggktcaagaacctgcccccagcctgtgtcctggagtgggaggggctttactggagccccagagtcttctagggggagggaaataaagccagctgagcctcacagcaaaagctgatgagctgtctagagaagcctttgtcggggcagtctacgcatactttgacaagcagaaatagagtcctacatcacgcggtgtcacgagggacccctctgcaccatataatacctggaaatgctgtctccaaagacattgacctataaggtcaggtgaaatccttcatttgacctgcctttt

SEQ ID NO: 712465 - DNA, 600 bp, Homo sapiens
ctttcaaaacaacagacagcaacttccagttccaaatatctttgtgctcccctgttgcagagcctattggcctctaaacccagcaggctgagagcagctttcagcattagctctgccaagctgaaggaaaacatctcagcctcagcttgaagcaaggggcattccaccggggtcgctccatgtgccaccccaggctgagaccatggcaagagaatgcagggatggtttgtctgctgccactgggatggaaccagctggaacccactcacatcctacaccagcaagcagatgcactgtgatggatgagggtcaagaacctgcccccagcctgtgtcctggagtgggaggggctttactggagccccagagtcttctagggggagggaaataaagccagctgagcctcacagcaaaagctgatgagctgtctagagaagcctttgtcggggcagtctacgcatactttgacaagcagaaatagagtcctacatcacgcggtgtcacgagggacccctctgcaccatataayacctggaaatgctgtctccaaagacattgacctataaggtcaggtgaaatccttcatttgacctgcctttt

SEQ ID NO: 712466 - DNA, 2121 bp, Homo sapiens
tcccaggtgattctgtagttgcagcaggtgtttggaaaaatggaaccaatttctttaacaaagaagaagactaattttccaagagttgagggacttgcttaatgccacccaagacagagccatgcttagaggctgggcacctcaactcaagtggggtcccttccctctaggcagggctgcagctcctaaagtagttccggagacttctgggaagttttgtgccctctcttgcactcccccccccgcccccaccaagcccaaaagacacatccacagaagaactggtttatttggcagaatataatcttcttatcctctctgatagctctcctcccacctcattctccagagctcccacatacagaggtctgatccccctcctccaggtgagtgatctccatgggcaattggacaaagcagaatggcctacgctctggcacagctgatgggttaacatgtaacatttattgagcatctagtacgtgccaggcactttcccatccatttgaatgtcatatcaacattctgagaactacaaattattatttcaatttaccaaatgaacaracaggctcagagaagtgaagaaactcaatcaagatcacaaagctcagaattacagagattcaagcccaggtattttttttttttttttgagatggagtcttgctctgtcgcccaggctggagtgcagtgatgtgatatcccctcactgtaacgtctgcctctcaggttcaagtgagtctcctgcctcagtctcccgagtagctgtgactacaggcgtacaccatcacacccagctaatttttgtatatttagtagagatggggtttcgccatcttggccaggctggtcttgaactcctgacctcaagtgaaccacctaccttggcttcccaaagtgctgggattacaggtgtgagccactgtgcctggcctcaagccagggcttttgggcttcaaagccatattaatcatcatcatacggggtccccataactctcccatcacatccaaagaatttcagctattctcacctagtttagaaactaacccactctccgggttaaaaaaaaataaagtctgtgagtgtctttttcaggtgaaagtaagatccagggatattatttaatactttataaaatttcctaaaatattgaggtttgaaggaaataaactatacagcaaacttagtgcacaaatcatcacttttctctggtggatctcaaagaacttttaaatcagagaattcttaactgggagtagaccttggtgaggtcggcattagtgttaatgaagtctttcatgttcttgacatccgagacattttcccgaggatggaggtcaagtcctggcatttgtaatcagttgataaaagacatgtgtgcacagccacatgggaaatttatgaatattatcaaataacgatgtagggtataattaaggttgagctattaagtactaattaattaagctgtcatattttaatcaaggaattgattgtttctgtatagagctctgatggttccgcatctttgcaaagctctggaaccctgatttgcaaagattaacaaattaaaaagccacactttagctattacgtcctctgcaagaggcagtgagcttttctgcttcctggagagtgtggattcaacaaatttctgattctttccaaaagccaaaaaggtaggtgagcgctcttggataggcccagacccaaaggttgtacttagggtggtcattattcagatttttttaaaaaataattttttgagtacctactctgtgcttgaaaatacgttatcttgctttatcgtcaaagcaacccactttacagaagaggaaactgaggtttaaagagggattgaaaccttctcactgtcctgtaagtgaggccaaatgtcttcaggggaggagcagtgggtttgagtttgttttctctgagactgcaaggactgagctctctttgcttttgatggtaccattgtagctttttaatttttatttatttatttatttatttttgaggcagagtctcactctgtcgccaggctggagtgtagtggcgcgatcttggctcactgcaacctccgcctcctgggttccagcaattctcctgcct

SEQ ID NO: 712467 - DNA, 823 bp, Homo sapiens
gattttcaggcattctgattcttacctgacccctcttaaacatgcttcttttccccttgaaactgttgacattctcagctgcctcgcagcccctccctccaaacacacctgaacaagtctctttttctctgggcatgggatcccccactgagctcttttgacccccatgctcactgccaagtttgttgtttaatacacccatcctggccagtcataggtttctttcttgatgccaactccaactcctcctgtatccaattaatctacctctggccactcatttctagaggccattttcaccctcccatcctgaggcatctgtattagtctgttctcatgctgctaataaagacatacccgaaactgggtaatttataaaggaaagaggtttaatggactcacagttccacatggctggggagacctcacaatcatggmagaaggtgaatgaggagcaaaggtacaccttacatggcagcaggcaaggaagcatgtgcaggggaactgccctttataaaaccatcagatctcgtgagactactgactatcatgagaacagcatgggaaaaactcgcccccatgattcaattacctcccattgggtccctcccatgacatgtggggattatgggagctacaattcaaatgagatttgggtggggacacagccaaaccataccagcatctatagccagagacggaaggtccacttgtctggtcctattttctaaatgattccttctcttctaaagcccacttgcgtattttatgtttgttttccctctatttctacaaatgtcctcatctaaaagctctttagggg

SEQ ID NO: 712468 - DNA, 823 bp, Homo sapiens
gattttcaggcattctgattcttacctgacccctcttaaacatgcttcttttccccttgaaactgttgacattctcagctgcctcgcagcccctccctccaaacacacctgaacaagtctctttttctctgggcatgggatcccccactgagctcttttgacccccatgctcactgccaagtttgttgtttaatacacccatcctggccagtcataggtttctttcttgatgccaactccaactcctcctgtatccaattaatctacctctggccactcatttctagaggccattttcaccctcccatcctgaggcatctgtattagtctgttctcatgctgctaataaagacatacccgaaactgggtaatttataaaggaaagaggtttaatggactcacagttccacatggctggggagacctcacaatcatggaagaaggtgaatgaggagcaaaggtacaccttacatggcagcaggcaaggaagcatgtgcaggggaactgccctttataaaaccatcagatctcgtgagactaytgactatcatgagaacagcatgggaaaaactcgcccccatgattcaattacctcccattgggtccctcccatgacatgtggggattatgggagctacaattcaaatgagatttgggtggggacacagccaaaccataccagcatctatagccagagacggaaggtccacttgtctggtcctattttctaaatgattccttctcttctaaagcccacttgcgtattttatgtttgttttccctctatttctacaaatgtcctcatctaaaagctctttagggg

SEQ ID NO: 712469 - DNA, 642 bp, Homo sapiens
tgagtatggtggcggtcacctgtaacccaagctacttgggagtctgaagcagtagaatcgcttaaacccaggaggtggaggttgcagtgagccgagtcacgccactgcactccagcctgggtgacagagcaagactccatctcaaaaaaaaaaaaaaaaaaaagcaaaaaaggagttatgccttaaggrttttaatatagcattgtgccacttggagtatgatacaacaaaccaagtatattaggcattcttgaatgctagatgaatgataccgtttagtgtatagaaaaactgattcagtgtacagtttaaagattgaaattttagaataaaaattaagatccacacttcatgagaaaatttgaccaccacattgaagtgatagtttgcatgtctggttttaggtcctttgtaacaaactctacttaaaaaaaaaaaagaaaagaaaagaaaagaaaagaaagaaaggaattagggagtgcttagtgatattcttcttggctgagttaaagcagtttactagactcagcttgatctttgcctgttactgctgtctagacgccttccattcattgtattacggatttggttcaagatgtccaacttcctcttttctcacaatagagaatgtaacataacaga

SEQ ID NO: 712470 - DNA, 644 bp, Homo sapiens
gaaataatttaattttacagaaatctttgttagatgtacttattggcccatcttacaggtgaaaaaagtaaagcactgattgattcatttgcctaaggtttcacctctagagtgaggcaaaaccaggatgagactccttattctcggtctccagagaccatgcttttaaccacaattttattatagtcaaaatgtgaatatttttattattaaagaacactttacagcagcatgtatggagtattcttgccaaaaatattaaacatgaatttgatcaaacctctagatccaatttcaaatttacaggaaatacagaggatagaggaatgtgttaaggaaccacagggatgctgtcagcaaaatccatactatgggaaagtggatacataaggaatctggtttcttcaacaaataaattgcgagagagagagagagagagagagagaggagtggaagcctataarttaaaagagacttaagaagcacatatcaaccaataacaacaacaacacatgcactttatctggacctctatccaagaaaaaaaaacattaaaattaagacattatgagaataaatttaagttctatacattttgtaaataatatcataaagagagtacatgtctaatgttgtcattgcaa

SEQ ID NO: 712471 - DNA, 644 bp, Homo sapiens
gaaataatttaattttacagaaatctttgttagatgtacttattggcccatcttacaggtgaaaaaagtaaagcactgattgattcatttgcctaaggtttcacctctagagtgaggcaaaaccaggatgagactccttattctcggtctccagagaccatgcttttaaccacaattttattatagtcaaaatgtgaatatttttattattaaagaacactttacagcagcatgtatggagtattcttgccaaaaatattaaacatgaatttgatcaaacctctagatccaatttcaaatttacaggaaatacagaggatagaggaatgtgttaaggaaccacagggatgctgtcagcaaaatccatactatgggaaagtggatacataaggaatctggtttcttcaacaaataaattgcgagagagagagagagagagagagagaggagtggaagcctataaattaaaagagacttaaraagcacatatcaaccaataacaacaacaacacatgcactttatctggacctctatccaagaaaaaaaaacattaaaattaagacattatgagaataaatttaagttctatacattttgtaaataatatcataaagagagtacatgtctaatgttgtcattgcaa

SEQ ID NO: 712472 - DNA, 1626 bp, Homo sapiens
tggacatatggctcagctttgcagtatgtttttcatgacaccacagtactttctgcatttatataactctcatagattttctttattcttttaaaaacatgattctccacagtgaggaggaggaaagagttttttttttttttcttttttgagaaggtaaaactgattaatcaccattctttctgatcatgacaacacataatcagtcaattgctggccttaagaatataaatttcagaccatggaatatttcttaaaattgtagaagtttaagatttttaaaaacattggttgctatggttgtattttttaattttggaaggattagcaattttttctttaaaaaattaaaatttgtatctctgatgctattagaactgggtgtaggctagatactgaagacagtttgtgggtctcacagtggtggtatagttgcctcctaaaggaagactgtaacagagaagtgctacacatcctgtcactttgcaagaaccagctcagatcctgtggaaccccaaatgacactcttggaatgtggctttataaactatgacaataaaataaagaattattaaaartaatgatacaaagaagacacacagccttggctctgtctggaaacatataaaatggtatctcctcaagttttgaaggaacagtgtgctcttttgaaagacataagggcatgtaagtggctttacttaaccttttaaatgaaaactttttatcaactgcagagaacaagacattctattttgcttttctttttttgagacagaaaaaacatttcccattaattcaagagtaggaggaattcacactattttcattctctgcaactttgccttttagcagtttgttgtgattatctttacatactcctaagggtagtcacccagcctgggactaacagtttaccccagcatgaggttcaggatggaatgcatacaggacagaatgtcagtgtgcttcctggactcttgatcacctgagtttctggttgtagaacaagtatcctgaaatcacaagctgtgttggcattctggaaatgctagagagagcactatggcttgtttcaaaattgatagcagtataaccagctgggatctgaacagaatcccactcactgcagcctgggctgggctgactcagctgaaactgcattttctgggtctctggtgctatcagaaacaggaggtactcatctctagtgcaatgggcaaaacatgtcacctgaagtccagaggtctgagttaaagtctcaacacaattgttaatagcaggatgcaaatgggtaagcaacgtaatccatccgggtctcagtttcatcacctgtgaataaacctgaggtttattaatgatcctaacctcaaagaattgttaagaagatcaaattacaatctgtaatgtgatataacatagtgtctaaaagcacagatttttgaagccaaatccttatttattgagtaaacaaatatttattgacacctactatgttccaggcattctgctggtttatagcatagtggaggagacaggaagtaaacatttaaacagcaatgagcagtatcattccaaaatttgtgagggctgtatagaaaagagcaaggtttggtgagagaatat

SEQ ID NO: 712473 - DNA, 627 bp, Homo sapiens
tgaacaatgagaacacatggacacaggtaggggaacgtcacacactggggcctgttcgggggtggtgggtaagaggaggcatagcattaggagaaatacataatgtagatgacggcttgatgagtgcagcaaaccaccatggcacatgtatacctatgtaacaaacctacatgttctgcacatgtatcccagaacttaaagtatgatcaaaaaaattgactaaaaaaaatttttagactacaaaagacttttaatatgaaaaaaggaggaaagtgggaatttgtatattatttgtataatgaagaaaaaarctagaaagctgcaaacatgtctataaaaatgatacatatgcatcttcaatagtaccccataattcaacttctattattatctccattttacaaataggaaaattatatcttagtgaagtgttaagataataaaggacagagctagcttttaatcatagatagtgggactccaaaacgatttcccttaagataaagtgactttaattcagggccttacaaacagagatatgtgatacgaataaatgttaagactagccaaaggggcaagcaacttttaaaatgttgcatacaataagatacacttaccatgattgtc

SEQ ID NO: 712474 - DNA, 627 bp, Homo sapiens
tgaacaatgagaacacatggacacaggtaggggaacgtcacacactggggcctgttcgggggtggtgggtaagaggaggcatagcattaggagaaatacataatgtagatgacggcttgatgagtgcagcaaaccaccatggcacatgtatacctatgtaacaaacctacatgttctgcacatgtatcccagaacttaaagtatgatcaaaaaaattgactaaaaaaaatttttagactacaaaagacttttaatatgaaaaaaggaggaaagtgggaatttgtatattatttgtataatgaagaaaaaaactagaaagctgcaaacatgtctataaaaatgatacatatgcatcttcaatagtaccccataattcaayttctattattatctccattttacaaataggaaaattatatcttagtgaagtgttaagataataaaggacagagctagcttttaatcatagatagtgggactccaaaacgatttcccttaagataaagtgactttaattcagggccttacaaacagagatatgtgatacgaataaatgttaagactagccaaaggggcaagcaacttttaaaatgttgcatacaataagatacacttaccatgattgtc

SEQ ID NO: 712475 - DNA, 627 bp, Homo sapiens
tgaacaatgagaacacatggacacaggtaggggaacgtcacacactggggcctgttcgggggtggtgggtaagaggaggcatagcattaggagaaatacataatgtagatgacggcttgatgagtgcagcaaaccaccatggcacatgtatacctatgtaacaaacctacatgttctgcacatgtatcccagaacttaaagtatgatcaaaaaaattgactaaaaaaaatttttagactacaaaagacttttaatatgaaaaaaggaggaaagtgggaatttgtatattatttgtataatgaagaaaaaaactagaaagctgcaaacatgtctataaaaatgatacatatgcatcttcaatagtaccccataattcaacttctattattatctccattttacaaataggaaaattatatcttagtgaagtgttaagataataaaggacagagctagcttttaatcatagatagtgggactccaaaacgatttcccttaagataaagtgactttaattcagggccttacaaacagagatatgtgatacgaataaatgttaagactagccaaaggggcaagcaacttttaaaatgttgcatacaataagatacacytaccatgattgtc

SEQ ID NO: 712476 - DNA, 655 bp, Homo sapiens
tgtgtcacatccaaattctacatttttgacctactgtggaaaaaaatgcacttttaaaccatatcaacttgattagagttttccagaaagtctataaatatgatgaattgtggccattatagaattaaataatatgtattcattctgcatttctttgaaaataatcttatagaataacaggtagcatatctattttggttttcwtactttcctccagtaatatatggactcttaaaatttgttggccttgctattcagtgttatatctcacaaagttttccattttctgaaagagagagttgaagtatgaataggtgctggcctaatttcgttcctctttgattgtactggagtacatgcattctttatttcacaatggggaaagcatgtgtgatgattggagtgtactgacaaggaagaaaaattcaagttgtgatttctcttttaaacagagatctgttcaaaaagcagaagagattaatgggtaaggatattagctttctattttccaaggcttagacaatgtttagatattctgttcaaaatgcaaactcttttatataatttctcaacacaaacatacaaacaataggctgcaaaaatgtttctatcactgctagttaatctatcaataaatgcaatatttgcctagtta

SEQ ID NO: 712477 - DNA, 639 bp, Homo sapiens
ggagagatatctggaaacagacaaggcaagagagaggtaactagccaagaccacggtcaagaggaaccaactcttagtctggaatatgttaactggcttcaggtccaaaggggaaatttaagagagaaattcgtgtatgaagaacaaagtcagtatctttgagttaaactaagttcaaaatggaataaagtcaggaaataaatagacgcaaaaagttcaggactaaatgaaatcaaaggcatcactggttattttggcctgagaagctgggaagacagtggtatcatttgttgaaatgaaaaaggcttggtaacgatttggagaggaaaaaaatcaatcctatttggactacctgaaagtttgagataccataaaattatcgtattgstggtttagataaactagcctggagtgcagaggagtttctcagctgaaggctaactttagagtcactggtatattaaagatatttaaaaacatggaactggatagaaccacctagggagagaatgtagacacagaagagaacagggtcaaagacaaagccctggggtactctaacatttacacgtccaatataggatgaacttgagaagtgggactgcccagtcaaagggcatatgcaatttaataattttg

SEQ ID NO: 712478 - DNA, 1882 bp, Homo sapiens
ccgtctactagacttaagatcagtgctgagttgggtctgttttttaaaacaatcaccaacttacagaaaatttggaagtcctgtacaaagaacatatttttctckgatccatttgaaagtaagttgccaacctgatgcttagccccaagtactttagtgtgaatttcctataaacaggactttctcctactgaaccataacacaccatcaaaatgaggaagttgacatgaatcctcagagcctgctatggtttgaatgtatgtgtccctccaaaattcatctgttgaaacctaagacccaatgtgacagttttaagatgtgggaccttttgggaagtgataagtcccgatggctctgcccacatgaatgtattagtgagtgcccttgtaacagggctggagagtactatctacgtaggccctctttgccttttttttttttttttcctttctctcgaggtcaccatgtgaggactcagtgttgtggagccactagaagctgaaaggggcagggaaggaaatctcccctagagcttttggggattacggccctgccaacaccttgagttctgacatctgggctctggaactgtgggagaatcaatttgtcttcagccccgcagtttgtggcaatttgttacagcagctgtaggaaatgaacacaccagccacctagaaaaccaccagttcagatgggtgggtcagattccaactccacctgaagggataattctagttttctccctcctcatattttcaactccgttttctgacaagaaacctggcttctgtgatgcttaatagattgacttctttggtcagtcccccatatgacagcgacctccctgctcctctgccacccttggccctgagggggctccctcccgacctccccactggactcagggcagtgtcctgctctgggcacacacccatatcctctgtctcacctaatggctagacacacattactcggaggggaagggaaggagaagggtagaggaagaccagccctggtttatgcccacccttgctggagcatctcgactctcggtgcactgccctgctcccctgggaggtgctgggtgcccaccgtgccaggctggaatgcgggtgcccctgcaggaggctgagcctgtatgtgatcacacagtgcaggggtcaggcttcgatgtaagagtggcaggagtgcgtgtcaccgtcttaccctcccctcctcagagcgtcccgacgcacctgcaaaacccagtgtatctttctacacatgtggtgtcattggccaggccagggcttggctcctgggagtggtgctgcaggcaaactggggagaattgagatcctttatttcagttaggataaggcatgcatttaaatgtcagaggcatttcctggtggcataatggatatttatcccctattagatagggagcaatctgcactgaagaagccttcagattaaatttcagggatgaaccaagattcatcctgacaggtatatagatcctcaaagaataagtcctcataaaatagcctaaaaatgttccttatggcagttcgatactttgtaaagagcccttattatttgtgcttgataatgtatgacttaaatttaagaactgtttaatacaagcatgtcctttctccctaaagtgattcattcattcattcattcacacagatttttctaaatatctaatattgaccagacactgggctaagcataagctaagtactctgtttttagagagctcagtagggtggggaacacagattgctaagtcagtagtacaatgtttatcgatatgggcacatcaaaagatatgatacttagtgccctggggacacaaggtgggaggttctcctttgcacgggctttcctgcaa

SEQ ID NO: 712479 - DNA, 1882 bp, Homo sapiens
ccgtctactagacttaagatcagtgctgagttgggtctgttttttaaaacaatcaccaacttacagaaaatttggaagtcctgtacaaagaacatatttttctctgatccatttgaaagtaagttgccaacctgatgcttagccccaagtactttagtgtgaatttcctataaacaggactttctcctactgaaccataacacaccatcaaaatgaggaagttgacatgaatcctcagagcctgctatggtttgaatgtatgtgtccctccaaaattcatctgttgaaacctaaracccaatgtgacagttttaagatgtgggaccttttgggaagtgataagtcccgatggctctgcccacatgaatgtattagtgagtgcccttgtaacagggctggagagtactatctacgtaggccctctttgccttttttttttttttttcctttctctcgaggtcaccatgtgaggactcagtgttgtggagccactagaagctgaaaggggcagggaaggaaatctcccctagagcttttggggattacggccctgccaacaccttgagttctgacatctgggctctggaactgtgggagaatcaatttgtcttcagccccgcagtttgtggcaatttgttacagcagctgtaggaaatgaacacaccagccacctagaaaaccaccagttcagatgggtgggtcagattccaactccacctgaagggataattctagttttctccctcctcatattttcaactccgttttctgacaagaaacctggcttctgtgatgcttaatagattgacttctttggtcagtcccccatatgacagcgacctccctgctcctctgccacccttggccctgagggggctccctcccgacctccccactggactcagggcagtgtcctgctctgggcacacacccatatcctctgtctcacctaatggctagacacacattactcggaggggaagggaaggagaagggtagaggaagaccagccctggtttatgcccacccttgctggagcatctcgactctcggtgcactgccctgctcccctgggaggtgctgggtgcccaccgtgccaggctggaatgcgggtgcccctgcaggaggctgagcctgtatgtgatcacacagtgcaggggtcaggcttcgatgtaagagtggcaggagtgcgtgtcaccgtcttaccctcccctcctcagagcgtcccgacgcacctgcaaaacccagtgtatctttctacacatgtggtgtcattggccaggccagggcttggctcctgggagtggtgctgcaggcaaactggggagaattgagatcctttatttcagttaggataaggcatgcatttaaatgtcagaggcatttcctggtggcataatggatatttatcccctattagatagggagcaatctgcactgaagaagccttcagattaaatttcagggatgaaccaagattcatcctgacaggtatatagatcctcaaagaataagtcctcataaaatagcctaaaaatgttccttatggcagttcgatactttgtaaagagcccttattatttgtgcttgataatgtatgacttaaatttaagaactgtttaatacaagcatgtcctttctccctaaagtgattcattcattcattcattcacacagatttttctaaatatctaatattgaccagacactgggctaagcataagctaagtactctgtttttagagagctcagtagggtggggaacacagattgctaagtcagtagtacaatgtttatcgatatgggcacatcaaaagatatgatacttagtgccctggggacacaaggtgggaggttctcctttgcacgggctttcctgcaa

SEQ ID NO: 712480 - DNA, 570 bp, Homo sapiens
cagtggaggctagggtttactttccccagcatcagaaatctgtggtttcaaactcactgggttttacttttgttttcttagcttttagataagcctcctttagaaattctagcctgtcttagggaagaggaggaaaaggagaaatgtaaaggaggttttatctatatttggactgtctatcaggagaatgtgtggccctcaggagacaggccaagcccagaggctcctgtgtgcaaaggctaagagccccacagttgaataaacgctccagaaacaccatttgctgacagagcttgttttcttcacgacatttcctttctgctttcttcaagtgctttgtattctgcttatttggatactgctagaaagtgaacacatcagccaggcacagtagctcaygcctgtgatcgatcctagcactttgggaggccaaggtgggcagatcatgaggtcagaagattgagatcatcctggccaacatggtgaaaccccatctctactaaaaatacaaaaattagtggtggcatgcacctgtaatcccagctactcgggaggctgaggcaggagaat

SEQ ID NO: 712481 - DNA, 1120 bp, Homo sapiens
aaaggccttttcgcataccaatgtgcaagcctggccaacttagaccatagagtttcatgacagatcctcctcatgccccagctcctggaggcgctagaggaagtgctgagtggcaagaggaaggctctttggtcctcagagaggacctgaagtcaaaagaaacaaatgctggccaggtgaggtggctcacgcctgtaatcccagcactttgggaggctgaggcgggtggatctcctgaggtcaagagtttgagaccagtctagccaacacagtgagaccccatatctactaaatatacaaaaattagccgggcatggttgtgcatgcctgtagtctcagctactcaggaggctgagacaggagaatcacttgaacctgggaggcaaaggttgcagtgagccaaaatcacaccactgcactccagtctgggtgacagagtgagactctgtcttgaaaaaagaaaaatgctgaaatatacgtgtcttgactgccctctctaagacgatacgctagaagtgatgtacaaaactggaagctaagtcttgaggcctttcagagcacggttgggcactttcttcattttctgtggtacaaagtgaatattttcacttccccatcctttaggaaacccccttcagttttgcgaaggaatgcgggtggacgggttccctgcagcctggatccctgcagagtgatgtggagattctgagagaacccatggactgccactggggtcagagcaaggactctgtagatagggactttgtaacacgaggagagtggccagaatcacagaattcaacaagtcctcctcctgtgataccccaaacattgagagacagcagcgatgggccagtctgcctgtactgttgaaaaaaccagagaagtcccaagatgtgtctggtagacttgaggcctccttctaatccaaagacacacacacattttcttatacccgtgtgacattgtgtggaagaaacagccctggtacggagtttaaatcttwgggatgattgaatatttatcttaaagagtctgtactaactgaaggccgttttaaacttcctgagatgacgatatcaaaactggcatgtttagtgtttttcatactacctagcag

SEQ ID NO: 712482 - DNA, 598 bp, Homo sapiens
taagatactctgacagtttttatggaagttatgattttgaaagataattttcattttttccttaattttctctttctccagtagagcataatatttgagtaagccccaaatctaaaaataaatacctgttttgctgtttctttccattaattttagggtgaatatagctagttaactaaaataattaaatgcatatatcgagagtaaaaaactcacattgaaatttattttatttaaagtatcataaaataaaacactcaaatattggagctatgtaccaaaatgacaagcaattgtataaataaagtagcatttaaatttaatattctcctgctcttaggtattaagtttatttttctcattcattttctcaagtgacaatatgtagacatgaaaatagacatattatcaaaccatactacataatggataattattactttggagatacagtaaaaagatttctcctgtgtctttacatcaactttttttttctgagtgamagtacattttctgttgctaacatttcatttcttgactgtatatctgctgcattttctcctcggttctaaggtattctgtcagtcttatattccca

SEQ ID NO: 712483 - DNA, 555 bp, Homo sapiens
acaaaaattagctgggcgtggctgggcgtggtggctcatgcctgtcatcccagcactttgggaggctgaggcaggtggatcacctgaggtcgggagtttgagaccagcctggccgacgtggtgatacctcgtctctactaaaaaaaatacaaaaaatagccggatgtggtggcaggcgcctgtaatcccagctacttggaacttggaaggctgaggcaggagaactgcttgaacctggcaggtggaggttgcagtgagccgagatcacgtcattgcactccagcctgggcaacagagcaagactctgtctccaagaaaaaaaaattagctgggcgtggtgtcttgggcctgtaaacccagctacttgggaggctgaggcaggagaattgcttaaacccgggaggtggaggttgcagtgagccgagatcacgtcrttgcactccagcctgggcaacagagggagactctaaataaataaataaataaataaatgatttctgatttcctggcccctcccgtaggcatccggagacactggtctggaaggcacccagg

SEQ ID NO: 712484 - DNA, 1148 bp, Homo sapiens
tgtgatcatctaatggcagcctcctttattagctggtgagctccatgagcacagggctgctttctagttttgttcacaatagtaagcactccataaatatttgttaaatattgaatgaattcatctgaggccccaaagtaggcataatgcttcagcatttgcatacagaatgcgccctgaatgtgcaagttggtggaagggaagtctagagctttccttagacacttagcttgtttagggatcctcttgctagccaaaggtagagaacttctattaatcatatatctctggtgttttccatatgctgccagcatagaaatacagccccagaaggactctcagagaccatgagcttcattttataaataagcttgggggaggggatgtttctccaaggttatacctaaacgattcaagaaggtagtccagcatttgaatccatgtcttcaaatctcaactcagtatgctatttactgcatcaaacctgccattacaggaaggtgtgtggggtgtgtgtgtgtgtatacaaatatatacatatatattttcccatctacatcctacctatctttccaaattcaactcaatgtccttgttttatgaaacctaaatccctccaactaaaggttttccttccttcctctgaatgtgtgtgtgtgtgtrtgtgtgtgtgtgtgtgtgtgtgtgtgtgtatgtaagagggggagagagagagagagagagagagagagaaagagaggcagatttggtttatgcctatttcctttataagaacctgagccccttaagaggaaaatcaatgcctaatgcattttatttttctcaatttctagtgcaatgccttgtaatgaaaaatggatttcatctcttgcatcagctgtcaccaatttgaggccacgtgtagattcagtgggaaaaaattctgtaatcaactaatgctgtctacaaaggtatggagtggggcagtgacagtacatatccccatagaaggtgataataaaagggtttcggatgaatgaatgaatgaacaaatacatgaagcttaccagttttccaaatgtgctatatgatcactttatcctgagtggctgagaggagagcagtaagctcactcatcccagcaggatcttcaaactagtcagggaaag

SEQ ID NO: 712485 - DNA, 1148 bp, Homo sapiens
tgtgatcatctaatggcagcctcctttattagctggtgagctccatgagcacagggctgctttctagttttgttcacaatagtaagcactccataaatatttgttaaatattgaatgaattcatctgaggccccaaagtaggcataatgcttcagcatttgcatacagaatgcgccctgaatgtgcaagttggtggaagggaagtctagagctttccttagacacttagcttgtttagggatcctcttgctagccaaaggtagagaacttctattaatcatatatctctggtgttttccatatgctgccagcatagaaatacagccccagaaggactctcagagaccatgagcttcattttataaataagcttgggggaggggatgtttctccaaggttatacctaaacgattcaagaaggtagtccagcatttgaatccatgtcttcaaatctcaactcagtatgctatttactgcatcaaacctgccattacaggaaggtgtgtggggtgtgtgtgtgtgtatacaaatatatacatatatattttcccatctacatcctacctatctttccaaattcaactcaatgtccttgttttatgaaacctaaatccctccaactaaaggttttccttccttcctctgaatgtgtgtgtgtgtgtgtgtgtgtgtgtgtgtgtgtgtgtgtgtgtatgtaagagggggagagagagagagagagagagagagagaaagagrggcagatttggtttatgcctatttcctttataagaacctgagccccttaagaggaaaatcaatgcctaatgcattttatttttctcaatttctagtgcaatgccttgtaatgaaaaatggatttcatctcttgcatcagctgtcaccaatttgaggccacgtgtagattcagtgggaaaaaattctgtaatcaactaatgctgtctacaaaggtatggagtggggcagtgacagtacatatccccatagaaggtgataataaaagggtttcggatgaatgaatgaatgaacaaatacatgaagcttaccagttttccaaatgtgctatatgatcactttatcctgagtggctgagaggagagcagtaagctcactcatcccagcaggatcttcaaactagtcagggaaag

SEQ ID NO: 712486 - DNA, 1099 bp, Homo sapiens
tttttttccagaagatctggaataaaatctgagtttctgaatttctaacaagctcactagtaatgccaatgcgtttggctgaaaaagaatattttatcaaacatctagtaagtgaaagaccctgtgttttacccaatttttctggcctggaaacaaagacaagagtcttcattcttcaaagacaggtatttgtaaagaaaactaagaaagaaaggcagctgccatattaaatgtgatggtttatgcacagctcttctttagctacacaaagatacttaataataaagagaaaaataattaactctatagtgaaataaatatttcagagagctctttaagtaaattgtaaaatcaactgcactaggatcaatttttatgatgtgctgatgcacacagaagaacacatcaccactgctgagatattgcccctcaaaaagtacagtctgaacttaaccatacagaaaaatcagttttatgcagagttcaagatgcagatatcttctatgtwctgtaatttttaataacaatttaaagtagtctttctttagcaccctagagagtgggtatctctcaataattttttttcagaactttctgggtaataaatgctatcctgtttaaataagcattttcttagtcctgtactgcatagagttaatggagaaaacagatgaaacctcaacattacatgttctctatttttactaaggaccccagctttcccccaataggaatcttgaatatccatattttcccatttcaacagcaacaaagggaacatttttaatagtgccgattatgaattcctggtaagaattccacatggcatataagaagccatgatttagagagtgtagagaagactctgggatataggagagaaatattttgcagagacccttgactatcacaagaatttttttaagtagttaaaacaaattcattgggggaaaagaaacacaagtagagaagtgaaggtttgcaaggacttaaatgcatggcactccaggaggcagagtggacacagctcttcatctgacacatgtttagctgaaaaaaagccatttttcctcttttgtcttctttggaaatcctttcc

SEQ ID NO: 712487 - DNA, 1099 bp, Homo sapiens
tttttttccagaagatctggaataaaatctgagtttctgaatttctaacaagctcactagtaatgccaatgcgtttggctgaaaaagaatattttatcaaacatctagtaagtgaaagaccctgtgttttacccaatttttctggcctggaaacaaagacaagagtcttcattcttcaaagacaggtatttgtaaagaaaactaagaaagaaaggcagctgccatattaaatgtgatggtttatgcacagctcttctttagctacacaaagatacttaataataaagagaaaaataattaactctatagtgaaataaatatttcagagagctctttaagtaaattgtaaaatcaactgcactaggatcaatttttatgatgtgctgatgcacacagaagaacacatcaccactgctgagatattgcccctcaaaaagtacagtctgaacttaaccatacagaaaaatcagttttatgcagagttcaagatgcagatatcttctatgtactgtaatttttaataacaatttaaagtagtctttctttagcaccctagagagtgggtatctctcaataattttttttcagaactttctgggtaataaatgctatcctgtttaaataagcattttcttagtcctgtwctgcatagagttaatggagaaaacagatgaaacctcaacattacatgttctctatttttactaaggaccccagctttcccccaataggaatcttgaatatccatattttcccatttcaacagcaacaaagggaacatttttaatagtgccgattatgaattcctggtaagaattccacatggcatataagaagccatgatttagagagtgtagagaagactctgggatataggagagaaatattttgcagagacccttgactatcacaagaatttttttaagtagttaaaacaaattcattgggggaaaagaaacacaagtagagaagtgaaggtttgcaaggacttaaatgcatggcactccaggaggcagagtggacacagctcttcatctgacacatgtttagctgaaaaaaagccatttttcctcttttgtcttctttggaaatcctttcc

SEQ ID NO: 712488 - DNA, 886 bp, Homo sapiens
ttggaagagttggaacaggggtatgaagcagtgctgcatgtgacgagtgtggggaattgcaggcagaccagatcggctgaggtacagggaggaaagaagcacctggagagatctggcctgaattctttaatttgataattaattcagaataaattatttagattgcaggctgagggagggatttaattttgaagtattatacaactgtattaatctgcactcttgcaacagtattactaggtaacatttgttgagcacttactatgtgccaagcttccaactaggtgctttacatgtgttaattcatagaaaatctgggayaccattttataaataagaacactgaggcagagagttaagcatctttccaaagtcaagcaaatgaatagtagcaaaaagatgtaaatcgaagtgcattgactccagcatctgggcttttcatccaaggctacagtaaaaatctaaggagatgatgtggtgtggtggtgaggtctctgatgcctggagctttttcttacaagctctgggacagttatacagtccttaccttagtttcttcatgaggtcaatgagagtagtcccaggggtcctatctcagcaggtagatgggatttggtgaaataacatgaaataacaagatcgcagaacacactcattagggctgctgtaagagttaaggggacatcgcagtcctaatcctcttgcatgacagaagggaaaaatggagacttacagatattaaggggtttgttcaagtacacagttggaattagaatgaagcactcttgtctgtaaaatcaaggactgttgactcaactgcattaaaccagttaaatcagaatgaatggtcatgccaaaaccgggctaaggtatgcttctgaaataa

SEQ ID NO: 712489 - DNA, 635 bp, Homo sapiens
tgtcttagaggtgagaaatccctattgttgggggggttgaacctcacacaaacctccagtagtaagaaaaatattcagaactccccttttctttcttctcagggaaagaaacagtagctccactcctgccggtccctcccctaggggagagggaagcagaggagaaaacagcagcataggtggctggcaaagacaaaggaaagaccagtagaagagaaagaaaccaaaaacagcaagcgcagagccaaacagccaggcaggyaggccaaaggttaagtccctctccccagccctgcggtttgtgaaaaagagggtgggcaccggctccgggaggagagcagaggaggtgaaaaggcgtaattcttgcaatttgcggcaggcatatctgccaagcctctaggctagtgactgcccggggcccagactgcagccacgcaaatcccactcagcccaagaaactaagtgtaaaaagaaaaggaaaaaaaaaaaagtaagaggggaaatcagggggaaaaaaaagaaaaacagcagcgcggggtcgggggcggggcctgtgcggtggcccagccctgcttgcggcaggagcgggagaagtccggagaagaaagggaaacgggatgagagagcggaaaata

SEQ ID NO: 712490 - DNA, 1897 bp, Homo sapiens
attttcctctcacttccttcacccattgattttttttcctaaaatttgcaagaaacttggactctaaagccttaaattttggatttaatttggaaaagaaaagttatttgagccaaacttgctctttgtatgagggttttctttttttaagcaaggaatgtcttagagaagcagacaccttatctattaatatttgcctggacctatagaaggcagaagaatgggatttctcattttggttggttttatgtttgccctgtaacattttataaataatagtctcatggatgtattaaatattgatatggaatactcatacaatcaatattcttctgaagttataattctactttcagaatagtcttcacaggagaaattatatccagtaaaaatcagattctagttaagtgagyttaattggccactacgtgtctcattgtgctgacttttttgagtaggggattctgaaccttttgagaagtcataacatctttgataatgtggtctaatctgtccttatagttttcattataatcataagttctgtgaaagagaggtacagaccatcaggaaagtgcaaaccactgatccttaacaaagaggacataatccttggagggaacgtcaaaaagactttctaaagaaagtgaattcaaggtcaagtctgaaagttgaagagaacttaacaaaaagagggagtatttttcagatagcgattatattcagtaaatcctgatgcagaaaaagaacatgtctacttggaagaacaaaaataagcccagtgtgactacagtatagagaatgggttattggctcaattgggaacagattgagaggtaagcatgtgaagaggtaacttattcattatctgctttcgtttgatggtgcctagtctcttatgttattattaatttatgtgtacaggtacttcattaagtttatatggataactacttcagatttccgaatccaaccttatgtgacgttccttctttttgcaaagtttcattttcaaataatagccatttaagaaaacaggaaaaatgacccatctgacgagagcagaatacaaattatttttaagtgcacacaaaacatttgctaaaatagagcacattgtgttccatttttaaaaaatcaataaatttaaatgtattcaagtcaaaatatcatctcttgaccacaaacaaattaaactagaaatcaataacagaatgatatatagaaaaataccaaatttttgtaaattaaacacatttctaaatgacatgggtcaaagaggcagtcacagggaaattttttttaaatgtttttagttaaatgcaagtgagaataaaatttctgagatgcagctaaagatgtgcatctaggaaaataagttttagtgtcttgttttagaaacctagaaagttttgagtcaataatatgtgtcttaagaaaacaaattaaactcaaagcaagaagaaggaaagaaataataagaacgtaaaccaatgaagttgaaaatagaaaaagagtaaagtcagaatactcaaaagcttgttctttgcaaagattataaaaatcagtaaacatctagccagactaaatgaaaaaaaagtgagaagacacaaattaccaagactaagaatgaaagagtttggatatcaatcactaaggctgacatatattaagtggataataaaaataaataacaacttcattaatacatttgataacctagatgaaatagacgaatccctcaaaagacacaaactaccaaaactcattcaagtaaactaaacctgaatagttttatgtctttaaataaattgactttgtggtttaaaaactttcctgtaaagaaaataccatgcccagtggcttcactgacaaattttaccaacctttaaggaag

SEQ ID NO: 712491 - DNA, 652 bp, Homo sapiens
gatggaatataatacaactcttacaaaacctgagataatgctatatgtatttgtattagtctgttttcacactgctaataaagacatacccgagactgggtaatttataaaggaaagaggttcaatggactcacagttccacatggctggggaggcctcacaatcatggcagaagacgaagaacagcaaagggacatcttaacatggcagcaggcaagagacagcatgtacagggaacttccccttcataaaaccatcacatctcatgagacttgatgtttgtaaaactgcatgggccaatgcatggaaaactcttagcactgcatcttacaaatgctaagacactcaaatttcttttccttttcttcaggtcatgatctaacaacaacacagatcacattgctaaaagaattatctgcagtgggaattttttaaatctcattaataccttcaatctcagagttacctaatgtttctgagtattacaagaaaagcactgtgctaaatttacttaaaaaaaaaaagcactgtaagacatgttacatgaatcccattgtccccaaatwtggcacaaataagacagatcctactctcaagcccttaaggcaaataaactctagcactaaaaagtgtccatgtgtacacacacaca

SEQ ID NO: 712492 - DNA, 3625 bp, Homo sapiens
tcattactgtgtgaacatcacacaatgtacttaggcaaatctagatggtacagcctactccacacctaggccagatattgctcctaggctacaaacccatacagcatgttactatattgaacactgtaggcaactgtaacacaacagtaagcattcatggatctaaacataaaaaaggtagtgtaaaaatactgatattataatcttatgggatccactatcgtatatgctgtccatcattgatcaaagccttgttatgcagaacatgactaatctacatatgaggaaatgcaaagttaaatatgaaaagaatgctcaacaaaatcaaacatgcaaaattaaaccaagatgccatcagattgactaaaaattagtaaaatcggcctggcaagtggatcatgcctgtaatcccagcactttgggtggctgaggtggaaggatcacttgagccccggagtttgaaactggcctgggcaacatagtgaggccccatccctaaaaaagattaaaaattagtaagatcaatgttgttaatttgtagtcctagtgaggaaatggggtaatggttattgatagaaatcactgcaatcttgacttctctgatgacttctgagaatccatctatctgctaagtgtcactatatgtaagaatgtgcactacattaatccttttttcgagacagagtctcgctctgtcactctgtcaccaggctggagtgcagtgacatgatctcagctcactgcaacctctgcctccagtgttccaaagtgattctcttgcctcagcctcctgagtagctgggactacaggtgcacgccaccatgccctgctcatttttgtatttttagtagagacacggtttctccatgttggccaggctggtctccaactcctaacctcctgatctgcccgccttggccttccaaagagctgggattacaggcgtgagacacctcgcccggcctcactacattagtctaatagtaggaaactaccaaccacctgagtactcatacccagcaattggttaagttggggagctgccatatgataccctactatgtccctatttaaaaagatataaaatatcttgattactaaacaaacacaagacactgttctgtctcacatgcatacatttcacccttataggagcccatgaataacagatgaggaaactcagacacagagaggtgaagtacattaatttgttcagaatcaaatagcagattccaacccaggtaacctctctggagtggctagcagctatgctagaatagagtatattttagtgtatttattaagtaagatgacccaagataacaactgggtgaaatataaattgcaaatatattttttgttaaaaactattttttttgagtttcactcgtcgcccaggatggagtgcaatggtgcaatcttgtctcactgcaacccccgctccctgggttcaagcaattctcctgcctcagcctccacagcagctgagattacaggaacacacccccatgcctggctaatttttgtatttttagtagagagggggttttgttatgttggccaggctggtcttgaaatccagagatatgggtatcaattgaacttcgggtttgaagcaaggaaattgatgaggtggccttacttctgtagcatctgagttgttacaagaagcctattacataaacatcagagggtagaaatgatagaaaaagggttttctcttcagctaaagatctaagctccaggaattcaagaayttgaatgaatggtttggctcaatccttccataatacaccgtggtagacaggagagatggaaagaggaagagaggaagggcgagaaagatgatgcaagatgctccactgcttgctgattctgaagatggaaagggccaggaaccaaagaatatacgtggccttttgaaatggaagagagaaggaaagattctgccatcaaagcctccagaaggaattcccctgataacctgacttcagcttgcttaattttggacttctgacctacagaactattttcagccataaatgggttaaatttgtggtaatttgttaaagcaccaataagaaactaatacaaacactagagaatataaaaaaacaatatttttcaaattttttgagaaacagtctgtcatccaggctggagcacagtggtattgacatagagctcactgtaaccttaaactcctaggcttaagggaccttcccaagtagcaaggactacaggtgcaagccaccacacccagctaattttaaaatttcttgtagaggtgggggtctcactgttgcccgggctgatctcaaacttctgggattcaagtaatcttcctgcgttggcctccccaaattttgggattacaggtgtgtgccaccatgcatggccaaaggacaatatattgttttcagaaatgcccttagtaaaattgaatgtagggccaccaactactaatatgaatagaaggttctctatcatctgtgaacccaccgctgagagcagtggtgggtatatatatatatatataaggaggtacttaataaacatcagttatttacctttttctgtatggattttggaaatcaattaaaatgtgtctatcatcacactgagccctatcagaatactttacattctttagaagacagttacaacaaaccagaatttaaaacctcattttaatgagacaattgaccctaggcatcacatgaaacttttatttcccaactgtggaaacattcctgtggaaatacatattcaagtttaaaactcgtaagctcaaaagatctaggatatgtactgtaatgccttactggtatcatctaacttataaacaaagataatccaatgagtgtgggcatttctatttctactgtaaaggcatatcaaataaagaaaaaagtctaataattgcataaaggaatataaaactatttattaaccactgttcaccagtatttacaataaagtaaacaatatacagttggataacattttgattactacaaagttgttcttcctggcttttgctgaaccagtaaagcaaactcaagattgagcctccatgtaatgaattggggtaaagaaaaaacatgcaggtcaataggttaggttacaaaaggttgttcacacatttatgacagcaggtcctaaactgccaacacctctaaccatctgattaggtttctatgagccaagtcttacatattccattcatcatgaccttttagtcaatgtagcaacagggattccaacattttgctaaggaatggcccgctagggaaacttttaaatgttcatttaacttagttttgtttagctagttaaaacacactagcatttgtctagtttcctcatctggatgaggaaacctgctgtgatggcagtgataaaatttttccttttaggaattttgcaaataaaccactgcaattatagacactttaaaattatccaatttaaattgtcctatctagaattacttatttcacttgaaatgtatggtttcaggaaaattttcaatttaacttgaagggattatctcttattttgcttggaataatggcatctcagaaacatgggtttacctgtgatttttttgtttgggtgaat

SEQ ID NO: 712493 - DNA, 1170 bp, Homo sapiens
gttcctcatcttttccttcaatttcatccacttggtctttggggatgtttacactgaagcttatatttcaagactctctagttttctctcaagcatctctaagtcctccatgcggtctgaaggcttgccttgtcatctgtatactctgtctctctgcacttcagtttccttcctctctgacaagaagctgcagcactcacaaggctgaggctctagtagcactaatgtgagccagacctggctgcggaggtgctatgtaagcttctccacactgaattgacaatgagtttctacactgaccttcaagttccaagtttattctgaggcattctgtaagcaaggctcacaaccaatacgtcaaaattttcagttaagggtccaagctaggttttcaaaagtttagacagtaattacataagccacacccaatacttccatgtcacctttcgaagagataaacctcatttgttaatgtgctaacatagctcaacaatgtgagtaaagtacatagaaggacgctgattctatccaggttcaatctaaccatacatttgccaactgttttttaaagttcctttaacagtaaggagtcaaggccgggtgcagtggctcatgcctgtaatcctagcattttgggaggccgaggcgggcagattgtctaagctcagaaattcgagaccagcctgggcaacacggtgaaaccccatctctactaaaatacaaaaaattagccagatgtggcggcatgcacctgtagtcccagctactcgggaggctgaggcaggagaatcgcttgaacctgggaggcggacgttgcagtgagccgagatcgcaccactgcactccagcctgggcaacagagcaagactctgtctcaaaaaaaaaaaaaagtaaggagtcaaaatgtaactctgactttctcactttagagaaattattccctaaggtaaacggcacttaacataaacaagatagatgatgaggagaaattacaacctatttctcttagaaaaaaaaaaaaaaactgacttaagctgagtgctaagccaagcttagtgatggtgctacagctccgcactgatttccctttccagygttttacacattgcttgctccctaataatatttactgaaaatcaagaaaggagtgatgttgatgctgtagagtgt

SEQ ID NO: 712494 - DNA, 2063 bp, Homo sapiens
tccacatggcttcaatcccatctttacctgccaacaggcacatttttatttgtcacagtttgcatcctgattgatccttagaaacacacggtcatcatcaatgtgaagactacggagttagggtaggcctgggagctttatcgtagggtggaagggaaacaaaccagaggataccctcagtgcactaagaccatggttagaggaagcagaagaggtgccagaatctgagggcagcaagaggtgagagtagcacgcaggagagaaggtgcatatgtgcactttgctaacttttatgctcgtcctcatttactcacttccaatgggccaagacaattgacttttaattctctctacccactcccatcttgctctgtctcatggggtagagaagtggcagggaaagtaattctaactcagggagtttacaccacaggaatatgcccatctgatgtcaactgtgaacagaactgcttaccgggaggctctatcgtgaacatgcctggtttagcagaaattctgcttgtgatcttatggttcatttccccaaataatgtcatcaaaaaatataatggataatcactgttgtgtaaatgaactgcaattttaaaaggcataataacagaccttgtgtattccgaccatcaaaaggaatgttcccagccctcctcctatttctcttggaacatcagcaaactgaattgcaagggaagtataataaaaagatctcaagttatcctgcagacatgaagacatgggaagttggctataaaattacatttgggtattttttcttattccctgttcaaactctgtccaaaatttctctatgaaataggaaactttcttcccctttcccgcctctgcactctgcatgtctagaactaactagccttttataaactctcccctttattccccaccccagccctaaatactcagcagcattagaggctcattcttcattgccttcactgttaagaaaaaaaaattgaacccataacaaagagcttcctaccactgccaagataaattgtgatcaatcacaaaaagcagtacataatccaagagaatgagtatcagcagtttcagagaaaaccaagatgtgtaaccaaataaacgcaatatgctcctaaatacctgggaatcaaatttgtaatataaaaggcacaggtgtcttaggagttattgattaaactccaaactgaagttcatatggtatttcaatagcaagaaccacgagctgttttcccttgcttctccttttctttcacttttttctccccccccattcttctctggattgaaaactgagggatagtgttaactaatgatgatgtgaattataatcaaatcacattcactgttggggtatcactagaatatactgattcttttttcccttagacttttaagcatgcaagatgtggtccatatgttcattcctttgttcctttgttctgcatcttgatcataattcatggtcctgcaatctaaagagtatgttacaggctcaacactgggacactcaaagcaagttctgtttaaaagatgtgtggtgggtcaagcctgaataatccaaaggaactccaaagcataaactaaggtcataaatgtttaaggaaacctagccttgagttttcccataggacagrgggaggggaaagagaaatcaaataaattccagctagataagcagtctgagtgagggacaagagtagtgggggaatggggaaaaggagatcataaagccaggaaagagaaaggttcattaaactcgagtttgaaaggaaattgtataagcagttaataaagagatcaaaacacgaggggtatgttcccaggaccctgggcaagtcagcatctggcagctgacttgtatatggtaatgtgaacaaagtagatatagaaaacacagtggcttaagaattccagagagttcagagcggacattttctgtttcagcattactgaaattgtgagagatgcaacatagctaattcttccatttaaaaaaatgaaatatttcctcctggacaatggcagtcaagttataagcattgttc

SEQ ID NO: 712495 - DNA, 606 bp, Homo sapiens
ctgttgttttgagacagggtctcactctgttgcccagtctggtgtgaagtggcatggttactgttcactgcagcctccacctgcmagactcaagtgatcctcccacctcaacctcttaagtagctgggactacagatatgcaccaccacactaaggtaatttttaatttttttttgagatgtggggcctcactgtgttgtccaggctggtctcaaactcctgatctcaagcaatcctcctacctcagcctcccaaagtgctgggactacaggtgtgagccacctaatttggccaagaatattatttcattcccatagaaaaaattggcacacctgatgcccagatcttggctttttaatgtcactctccagtaaaaagaaccagagttgcttggagaaatggctgactccagggctggggcacacaaaaaaaatagataagatgaacctggatcatcttgtagcaccataaaataagaaagtcttcaaaaaactaaaggatggaagcatttcaaagggcacaagccattctaaaagaattcccaatggccaagctagaagaatttgaccaactaagttattgacatgatattagatataatccaaa

SEQ ID NO: 712496 - DNA, 606 bp, Homo sapiens
ctgttgttttgagacagggtctcactctgttgcccagtctggtgtgaagtggcatggttactgttcactgcagcctccacctgcaagactcaagtgatcctcccacctcaacctcttaagtagctgggactacagatatgcaccaccacactaaggtaatttttaatttttttttgagatgtggggcctcactgtgttgtccaggctggtctcaaactcctgatctcaagcaatcctcctacctcagcctcccaaagtgctgggactacaggtgtgagccacctaatttggccaagaatattatttcattcccatagaaaaaattggcacacctgatgcccagatcttggctttttaatgtcactctccagtaaaaagaaccagagttgcttggagaaatggctgactccagggctggggcacacaaaaaaaatagataagatgaacstggatcatcttgtagcaccataaaataagaaagtcttcaaaaaactaaaggatggaagcatttcaaagggcacaagccattctaaaagaattcccaatggccaagctagaagaatttgaccaactaagttattgacatgatattagatataatccaaa

SEQ ID NO: 712497 - DNA, 2377 bp, Homo sapiens
tgggatgcctaatatcaacactaacattgctctgggacaaggggacagtagagaatatttgtctctctattttccccaaactcccctctcccaaatcctgcccaagatactgaaaactggaaatgcttcttattgatcatgtgaccacttagaaaatttggaaacgtaaatgagatcttgttaaatacctaggcatctcaaaaaaaaaaagtgctactggtgcagggagggtattcattaaaagagtccttctaggcttttaaaaccaattagaattttctctgggtttgttatatagaaggagaaggaaatgtgttcaccttctagaaaaataataattctttcagactcttgcctttatggtttatgaaggagatattttctccagctttcttgaggcataaatggcaaataaaaatatatatatttaatgtatgcactgtgattttttgatgcacattgcaaaataattgccacaatcaagttaattaacacatctagcatttcatgtagttaccattttctgtgtgtctttgcgatgagaatgcttagggtctattttcagagaaccaactttcagttaacaaaacgaataaatcctggggatctaatgtacagcatggtaattatagttgataatactgtatggtatacttgaaattttctgaaagatagaagtttatacttacactagagagttccttctgcctttagttattcctaattagacattcaaaactgattaatatatagcttacagtggcgccatctgagcaagaagaaattaggttattaatccttcctctgaagtctccacaatgatattaaattttcaggtagcagatttctggattgattttcttctctcaccacttttttcaaagtctaactatacactttatgactcaggcactaatatcttacttgcaatccaactgcggtttttccttcacctcaacatagtccttggagcactttttaaaagcctttagtctgagacataggcccatttgtaatagtatatgccacattctctgcatctgttcatttcacaaggtaaacttgatgatcaccagctattcttagctcttgacaatataaaaaaaagataatcaaaagtgcaattatttaaattcataaaggtattgatttcttttcactcttgatgcagacttcaaaagattccatggatcaaatatcatcataaccagatataacatgaagcataagaattatatataattgaagtggtttaatttccaatactcaataaaaattcaggaaataaaactagtaaattcattcacatgggctgaagaaaacagaatgcaatatgcccttcctacagttgggcccctctctactcttctgcactctagatttctctcctgccaccctcacctaccccgtcttgcattccaccttctcaaattcgtctctccccttcaattaatctcacccattcctatttaaaggcatacctcattttattgtgctttgtatttttgtgcttcacagagaatgctttttttttttttttaacaaattgaaggtttgtggcaaccctgtaccaagcaagtccataggcaccatttttccaatagcacatgttcgcttcatgtttctgtgccacattttggtaattctcacagtatcttttaaatttttctttctaaaggcaattttataactttattggatgtatttgatgatcagcagttagttctcatccacatcgactgtctgtagacttttgaaagtggtaacaggtacataagtagccaaaggrtagagcttatttggtgaatctttatcctcattacattttctggacaagcacacatggatacaatatgggacatcccttattcctttggcccagacagctttgttgagcctggtatcaatgcacatatctggagttcccatctccttcatggaaaatttccgaatctctttgagtgcctgaggggcacgcttcttgaagcccactccatggatgcacttgtgaatgttgatggtgtattctcaggtcaccaccgcattgatggcagaatggccctttttcttctcaccacctttctttgcgggagccattctgctgggtcccaaatttttcttattattatatctgttagggtgatctgtgatcagtgatctttggtgttactcttttaattgtttgggggaaccacaaactgtgcccatagaagacagcaaatgtaattgataaataatatgtgttctgactgctccacccacctgcctgccgttctttcatctctctccctctccttgggcctccctattccctgagacacaacaacacttaaattaggccaattaattaccttataatggcctctaagtgtttaag

SEQ ID NO: 712498 - DNA, 2377 bp, Homo sapiens
tgggatgcctaatatcaacactaacattgctctgggacaaggggacagtagagaatatttgtctctctattttccccaaactcccctctcccaaatcctgcccaagatactgaaaactggaaatgcttcttattgatcatgtgaccacttagaaaatttggaaacgtaaatgagatcttgttaaatacctaggcatctcaaaaaaaaaaagtgctactggtgcagggagggtattcattaaaagagtccttctaggcttttaaaaccaattagaattttctctgggtttgttatatagaaggagaaggaaatgtgttcaccttctagaaaaataataattctttcagactcttgcctttatggtttatgaaggagatattttctccagctttcttgaggcataaatggcaaataaaaatatatatatttaatgtatgcactgtgattttttgatgcacattgcaaaataattgccacaatcaagttaattaacacatctagcatttcatgtagttaccattttctgtgtgtctttgcgatgagaatgcttagggtctattttcagagaaccaactttcagttaacaaaacgaataaatcctggggatctaatgtacagcatggtaattatagttgataatactgtatggtatacttgaaattttctgaaagatagaagtttatacttacactagagagttccttctgcctttagttattcctaattagacattcaaaactgattaatatatagcttacagtggcgccatctgagcaagaagaaattaggttattaatccttcctctgaagtctccacaatgatattaaattttcaggtagcagatttctggattgattttcttctctcaccacttttttcaaagtctaactatacactttatgactcaggcactaatatcttacttgcaatccaactgcggtttttccttcacctcaacatagtccttggagcactttttaaaagcctttagtctgagacataggcccatttgtaatagtatatgccacattctctgcatctgttcatttcacaaggtaaacttgatgatcaccagctattcttagctcttgacaatataaaaaaaagataatcaaaagtgcaattatttaaattcataaaggtattgatttcttttcactcttgatgcagacttcaaaagattccatggatcaaatatcatcataaccagatataacatgaagcataagaattatatataattgaagtggtttaatttccaatactcaataaaaattcaggaaataaaactagtaaattcattcacatgggctgaagaaaacagaatgcaatatgcccttcctacagttgggcccctctctactcttctgcactctagatttctctcctgccaccctcacctaccccgtcttgcattccaccttctcaaattcgtctctccccttcaattaatctcacccattcctatttaaaggcatacctcattttattgtgctttgtatttttgtgcttcacagagaatgctttttttttttttttaacaaattgaaggtttgtggcaaccctgtaccaagcaagtccataggcaccatttttccaatagcacatgttcgcttcatgtttctgtgccacattttggtaattctcacagtatcttttaaatttttctttctaaaggcaattttataactttattggatgtatttgatgatcagcagttagttctcatccacatcgactgtctgtagacttttgaaagtggtaacaggtacataagtagccaaaggatagagcttatttggtgaatctttatcctcattacattttctggacaagcacacatggatacaatatgggacatcccttattcctttggcccagacagctttgttgagcctggtatcaatgcacatatctggagttcccatctccttcatggaaaatttccgaatctctttgagtgcctgaggggcacgcttcttgaagcccactccatggatgcacttgtgaatgttgatggtgtattctcaggtcaccaccgcattgatggcagaatggccctttttcttctcaccacctttctttgcgggagccattctgctgggtcccaaatttttcttattattatatctgttagggtgatctgtgatcagtgatctttggtgttactcttttaattgtttgggggaaccacaaactgtgcccatagaagacagcaaatgtaattgataaataatatgtgttctgactgctccacscacctgcctgccgttctttcatctctctccctctccttgggcctccctattccctgagacacaacaacacttaaattaggccaattaattaccttataatggcctctaagtgtttaag

SEQ ID NO: 712499 - DNA, 2377 bp, Homo sapiens
tgggatgcctaatatcaacactaacattgctctgggacaaggggacagtagagaatatttgtctctctattttccccaaactcccctctcccaaatcctgcccaagatactgaaaactggaaatgcttcttattgatcatgtgaccacttagaaaatttggaaacgtaaatgagatcttgttaaatacctaggcatctcaaaaaaaaaaagtgctactggtgcagggagggtattcattaaaagagtccttctaggcttttaaaaccaattagaattttctctgggtttgttatatagaaggagaaggaaatgtgttcaccttctagaaaaataataattctttcagactcttgcctttatggtttatgaaggagatattttctccagctttcttgaggcataaatggcaaataaaaatatatatatttaatgtatgcactgtgattttttgatgcacattgcaaaataattgccacaatcaagttaattaacacatctagcatttcatgtagttaccattttctgtgtgtctttgcgatgagaatgcttagggtctattttcagagaaccaactttcagttaacaaaacgaataaatcctggggatctaatgtacagcatggtaattatagttgataatactgtatggtatacttgaaattttctgaaagatagaagtttatacttacactagagagttccttctgcctttagttattcctaattagacattcaaaactgattaatatatagcttacagtggcgccatctgagcaagaagaaattaggttattaatccttcctctgaagtctccacaatgatattaaattttcaggtagcagatttctggattgattttcttctctcaccacttttttcaaagtctaactatacactttatgactcaggcactaatatcttacttgcaatccaactgcggtttttccttcacctcaacatagtccttggagcactttttaaaagcctttagtctgagacataggcccatttgtaatagtatatgccacattctctgcatctgttcatttcacaaggtaaacttgatgatcaccagctattcttagctcttgacaatataaaaaaaagataatcaaaagtgcaattatttaaattcataaaggtattgatttcttttcactcttgatgcagacttcaaaagattccatggatcaaatatcatcataaccagatataacatgaagcataagaattatatataattgaagtggtttaatttccaatactcaataaaaattcaggaaataaaactagtaaattcattcacatgggctgaagaaaacagaatgcaatatgcccttcctacagttgggcccctctctactcttctgcactctagatttctctcctgccaccctcacctaccccgtcttgcattccaccttctcaaattcgtctctccccttcaattaatctcacccattcctatttaaaggcatacctcattttattgtgctttgtatttttgtgcttcacagagaatgctttttttttttttttaacaaattgaaggtttgtggcaaccctgtaccaagcaagtccataggcaccatttttccaatagcacatgttcgcttcatgtttctgtgccacattttggtaattctcacagtatcttttaaatttttctttctaaaggcaattttataactttattggatgtatttgatgatcagcagttagttctcatccacatcgactgtctgtagacttttgaaagtggtaacaggtacataagtagccaaaggatagagcttatttggtgaatctttatcctcattacattttctggacaagcacacatggatacaatatgggacatcccttattcctttggcccagacagctttgttgagcctggtatcaatgcacatatctggagttcccatctccttcatggaaaatttccgaatctctttgagtgcctgaggggcacgcttcttgaagcccactccatggatgcacttgtgaatgttgatggtgtattctcaggtcaccaccgcattgatggcagaatggccctttttcttctcaccacctttctttgcgggagccattctgctgggtcccaaatttttcttattattatatctgttagggtgatctgtgatcagtgatctttggtgttactcttttaattgtttgggggaaccacaaactgtgcccatagaagacagcaaatgtaattgataaataatatgtgttctgactgctccacccacctgcctgccgttctttcatctctctccctctccttggrcctccctattccctgagacacaacaacacttaaattaggccaattaattaccttataatggcctctaagtgtttaag

SEQ ID NO: 712500 - DNA, 670 bp, Homo sapiens
ttttttaagcactcatgtgattagattgggcccacctgcctaacccaggtccttgagtctctccatctcaaggaccttaaccttaatcacatctgccaaggtcacttttgctatgtgagataacatartcacaggttctggaattggagctcagacatctttgggggccatcattctgtcttactatgttgtatgtaattaaaaccttgctctcagctgtctaaaagtttgcctgagcaaatgaattggcaatgtattcaatccaattcactccctaatatcatcatgataaaaaattaactgaaatattttagatagggccaggccaaaaatgaaaattgtctcctacaaaaggaatgatttaacattgtcttttttgaaatggagtcttcctctgtcacccaggctggagtgcaatggagtgatctcaagtgactgcaatctctgcctcctgggttcaagagattctcctgcctcagcctcccaagcagctggtattacaggtgcctgtcaccatgtccagctaatttttgtatttttagtagaaatgggatttcacgttgtccaggctggtctggaactcctgacctcaagtgatccacctgcctcattctcccagagtgctgggattacaggcatgagccaccacacttgacccagacatatttct

SEQ ID NO: 712501 - DNA, 670 bp, Homo sapiens
ttttttaagcactcatgtgattagattgggcccacctgcctaacccaggtccttgagtctctccatctcaaggaccttaaccttaatcacatctgccaaggtcacttttgctatgtgagataacataatcacaggttctggaattggagctcagacatctttgggggccatcattctgtcttacyatgttgtatgtaattaaaaccttgctctcagctgtctaaaagtttgcctgagcaaatgaattggcaatgtattcaatccaattcactccctaatatcatcatgataaaaaattaactgaaatattttagatagggccaggccaaaaatgaaaattgtctcctacaaaaggaatgatttaacattgtcttttttgaaatggagtcttcctctgtcacccaggctggagtgcaatggagtgatctcaagtgactgcaatctctgcctcctgggttcaagagattctcctgcctcagcctcccaagcagctggtattacaggtgcctgtcaccatgtccagctaatttttgtatttttagtagaaatgggatttcacgttgtccaggctggtctggaactcctgacctcaagtgatccacctgcctcattctcccagagtgctgggattacaggcatgagccaccacacttgacccagacatatttct

SEQ ID NO: 712502 - DNA, 670 bp, Homo sapiens
ttttttaagcactcatgtgattagattgggcccacctgcctaacccaggtccttgagtctctccatctcaaggaccttaaccttaatcacatctgccaaggtcacttttgctatgtgagataacataatcacaggttctggaattggagctcagacatctttgggggccatcattctgtcttactatgttgtatgtaattaaaaccttgctctcagctgtctaaaagtttgcctgagcaaatgaattggcaatgtattcaatccaattcactccctaatatcatcatgataaaaaattaactgaaatattttagatagggccaggccaaaaatgaaaattgtctcctacaaaaggaatgatttaacattgtcttttttgaaatggagtctycctctgtcacccaggctggagtgcaatggagtgatctcaagtgactgcaatctctgcctcctgggttcaagagattctcctgcctcagcctcccaagcagctggtattacaggtgcctgtcaccatgtccagctaatttttgtatttttagtagaaatgggatttcacgttgtccaggctggtctggaactcctgacctcaagtgatccacctgcctcattctcccagagtgctgggattacaggcatgagccaccacacttgacccagacatatttct

SEQ ID NO: 712503 - DNA, 670 bp, Homo sapiens
ttttttaagcactcatgtgattagattgggcccacctgcctaacccaggtccttgagtctctccatctcaaggaccttaaccttaatcacatctgccaaggtcacttttgctatgtgagataacataatcacaggttctggaattggagctcagacatctttgggggccatcattctgtcttactatgttgtatgtaattaaaaccttgctctcagctgtctaaaagtttgcctgagcaaatgaattggcaatgtattcaatccaattcactccctaatatcatcatgataaaaaattaactgaaatattttagatagggccaggccaaaaatgaaaattgtctcctacaaaaggaatgatttaacattgtcttttttgaaatggagtcttcctctgtcacccaggctggagtgcaatggagtgatctcaagtgactgcaatctctgcctcctgggttcaagagattctcctgcctcagcstcccaagcagctggtattacaggtgcctgtcaccatgtccagctaatttttgtatttttagtagaaatgggatttcacgttgtccaggctggtctggaactcctgacctcaagtgatccacctgcctcattctcccagagtgctgggattacaggcatgagccaccacacttgacccagacatatttct

SEQ ID NO: 712504 - DNA, 978 bp, Homo sapiens
gctatcatgagctatgattgcacctctgtactgaagcctgggcaacagaataagaccttgtcccccaaaaaaaaaaaaaaaaaaaaaaaaattaaggcttttttaggagagtcaaaatgtgaaagctatgtacaaactcctaaaggaactgccaaaccatagaaagaggcactaaaacaggtcagagaacactaaacaaagtgaagaagggatggaacagagtagaatgaaatattttggaggtaataaaacagaagcccaggaaataagtcttaacaagctgcaatcaccatggaaaagcataacttgggaaaaatgtgtgttgtgcctggaaacactttctgaaacgtggtcaccatcctcagaccaaatgtagctgtcatcccactgatatgaaatcctttcgtactcattggcaccaaagagacacagagacaggttatgagcagactttgcttatacattttgwaatctatattgaatcacaaacaatatctgttcctgtctctccatttcaatcctgatactcattatatatctctggagccataaagccagattcaaatcctgcatccaaactcaacagctgtgtgcccttggataagttgcttaaaatggaaataataatggtgcctgcttcagtgagttgttgttaaagaggacacagttaacatatgcaaagtggttagaacagtgcctggcactattttcattattattaatatcttagagaataagttcactcagtattacaattattaaataataagttgtatccatatttcattaacaattattaagctccctagagcagagcacgttatgtaaagcacaactactttaatgaaaatgaacataaggataatgatttaggaacattgaggctgtttactacttcttaggcaaacataatgtactttatggcatcattcaaagacaagagcaataatttttccactacttagaggtttgcaaatg

SEQ ID NO: 712505 - DNA, 638 bp, Homo sapiens
tatgcagccataaaaaacaatgaaatcatatttttgcaggaacatggatggagctggagcccattatccttagcaaacttatgcaggaatggagaatcaaatactgcatgttcctacttctaagtgggagctaaatgatgagaacatatgggcacatagaggtgaacaaaagacaccgggatttacaggaggagggagaggatcaggaaaattaactaatgagttctaggcttaatatctgggtgacgaaataatctgtacaataaacccctgtgacamaagtttgcctacataacaaacctgcattgtatccctggacttaaaatataagctaaaaaaagatgttgtaaatgctatagtattgataaatacagtacagtactgtaaatgtataaaacaaaaacaaaatagaagagctttaaacatattataacttgcttaatttcatccataacaagaatacaaattaaaaccacattgagacatcatttttcatcaatccgatgaacaaacatttagaaaaattgacaataggctctattaataaggttgtggaaaagtaggcattctcatgtattgtttgtaggagtgaaaaacatggtagaaccacaatggaggtaatttggcaatatcttcaa

SEQ ID NO: 712506 - DNA, 1199 bp, Homo sapiens
aaggagaagccagcctgagtactgagcacagtcctctgtgttcaggtcctatattaaattatactctcagtttcataagggctgaggtctgtcatgtattcttcaggaaaattacggcatcttttatactagggtgtttaaagacaaaatctcagaaaaaaatcacctccccgcctttttcctttggccagcagctgctgaaatgggttgcggattgaacaagttagagaaacgtgatgaaaaacggcctgggaatatttattcaactttgaagaggcctcaggtggaaaccaagatagatgtgtcctatgaataccgcttcctggagttcacgactctgagtgctggtgagtacatggggtgggaatggatgggggcaggtggggtctccagcaggggcctgcaggggatgggggtgcagttggagagctggatggggtgggggctgtgaagaaatgaaaagggcaggcctgtctcaagggggcggcttacagagatccagatttttatgtgaaatctctcactttttaaaaaatagtgtctgggcacagtggttcacgcctgtaatcccagcactttgggaggccgaggcgggtggatcacctgaggtcaggagttcaagaccagcctgaccaacatagtgaaaacctgtctctactaaaaatgcaaaaagttagccaggcgtggtggcgggtgcctgtagtcccagctactcgggaggctgaggcaggagaattgcttgaacccacgaggcggaggttgcagtgagccgagatcacgccactgcactccagcctgggcgagagagcgagactctgtctcaaaaaaaaaaaaaagcaacgaattacagttttaacaaatgaaaatcatgtgtgagccaagcaatacatatggataggctgaatttggcccatgagccaaccagtttgcagactgtttcatagcaagctccrtggagaaggaaggtttgccttctctcctcgtatgaaacttcctctccacccaaattcacctgcctgttgtctgccatctcgcaagagggctcattcatctgggcttggctttgccttggctgagccagagggagtcgggtcacctaccatacaagtgtccaaggactaaggaaacagggaatagcccgagaagactggcaagggatggtcagcatcagcatcagagcatttgctgagcacctgctg

SEQ ID NO: 712507 - DNA, 2155 bp, Homo sapiens
gatttgcttttccaagaaaccataggctgagatgtaattttccatggttcatctaaaaaatttgtaatgcctatttttcttgatcttttgtgcccctttcagttcagatgtaactgagttaattatttgaagaaatgaaccagagcttcctttcttgttatagaacttcttgttccagaaccagagatggtacttattagattctatgctaaagattattccctagaatcgatctgggctgtgagttgcttacagaccaacttgtcttccttttgttcatcctgtgaatgttgtacttaatggatacagcattgacttatttaaaatgattatagttttttagtctattcatttgaaatctcaatggatatttctaaataacctcatatagcctgtttccatgtaacagaacagctggattttagattttagaaccccctctccctcatcctgatttttgttgtttgagacctcacatggtacgtatgacagtgtgtcttgaccaagtcttcttttcaaaggtctggaatcatctgccttagttcctcttaatatgtcttttgtttggggaggaaatgagaacatgagtctagtctctgaccaagtattaaggcaaaaaggttagggttcagaattggtttattcttttgggattagtttgttccagattgaaatcagtttattgttttacattttgaatgtatgcgccacagtaccctacccttggaagggtatgttggaaagaaaaataaaaataagctattgaagtttgcttaccaaatcacagttgcacacctggggaaaaccaaatcctctttcatttttttcacttttaaatttaaggtgaatcatacacagatggttaatggtagcagaaattgcttttaatgctatataagaatcttagaaatttatttaaaacgttgcagcaaatacacagttagaaactggtgagatgcatgtatctcaggagttcagtgtggaagtgcctgctttatgcattttctggacagtcctgctctcacagggacttcaggggcccctctttggtagaacagcctcataagtgggccaggagggctctgctccctcctccaccagtgcagattagctgtgtacatgagccctggacaaggagctgggagccttggtctctaattcccactccccaataccaccagccacctagaagagacagcacgttctgccagcctttagctgcagtaccactcttgttgccttatgcctggctgggccaaggaatcctcttcaatttctgacacccacgtgatttccactctagtgtcatacaggagccctgcctgtgaatggctgtgaagtggtggaatttcctcctggtgaccacttgctgctggctctcctgaatgggtgcagttttgaactgtgctgtatcacagggatgtctatgtggtggtgctttggaaagcagcccctgtgtgcagagatggcagggtgcgctaggaagcctctcctttgacagcaagactacaggccttcacctcagacagccgtttacacccacgctgttttcccagaatttcttttagttgctcagtagtctttctttaatgcatctttaatttccatagattttgccagattgccctctaaaggggttgaacccttttaaagtcttttaaaaattaatttttaattttctaagtgatataggaatatattcttttcatttaaaaatgaaaacaattagggattatggctaaattcacttttgatcaccacccccacacccataccatcaccacccatccccatccccatccacataagccttccccattccccaggggtacctgctattattggtttggtgtatgtcttgcttgttctttttctgtgccctggcggatataaaccaatgggacatagacattactggagtgagagtttgtgtgtgtgtgtgtgtgtgtgtgtgtgtgtgtgtgtgtgtgtgtgtataacatgtaagctgtattgtaccaaacccatcattctataatgatgtgttttacatgatgctacatcttagaggtcttactatgatgtggatmtgtatatattacttgagtagtttccataaaccatttttcatcagtgcctttttgacgttactttcgggaaagaatctggggcttca

SEQ ID NO: 712508 - DNA, 1497 bp, Homo sapiens
tgcatagagtgctgatttaatatcatagatttcaagtactgcaggtaatgaagatacaaaccaggcaacactataccattcaactcattacttggaggaatttataaaaatatgcttagaaggaagtaattcacctataaaaaatttataacatttactgggtcaacagattcctatcatagcaagttgaatctacattcattaacttggttcatttctgaaaataattgtcttagcctcttgcaagctcaagagcacatgagttctcaccattccagagcaactgtgtcttggcagaagcacctgcaggagggggcactgtgcttaaggaggacacagccgggggagagaggttggaattggccttaaacctgaaattctttctcccaggcattgatcgctatttgctcactgtcacagacttagagctgcatgtattttgcctttgatcctgagaaatcctaacaagctgaattaaaagcaagtggtcctaggaagcctccatcactggtgtcctgaacacctgaaagcaaaaaaccaaatagcatgatgggtctccaattcaacagccacagcctggggcaaaaatacaaaagccccatctgcagtaggaatgcggaggacgccttcttcacctttgttcattccacccaggtagggcatttaccggggcaggatgataagccaggcactgcaggtaagtaaagacaaaggaactcctaatgtagactcttggaagcatctctctgttaccttggaaggttacttaacttctctgtgcctcaagtcgctcatgagaaaaatagacattattatagtgatccacctgatatgtttgtgtgagtgagatgcattaactacttggcatatagtactcacaaatactaaacgtaaataaaatatttaacatagacatcagctatcattatcactgtcatcttcatcacgtaatcctatcaaagatgtaattgccgtattgttattatttccacttttccaatgaggaaattaggcagcttattcagaatcacagaggtcgttaggtggctgaagccagtttttgtgttctcaggttttttctactacagccgtctggggaagggggaatggggaatgttagagacagaaactgagagtagaaaaggaacttcacgtgcatgccaggtactttacttgtgttactctatttgattctcacaatacgcacatggtcaggcagtggctggattttaaggttttggaacttgagagtaagcaaggctacttaattttcttgccatggtaacaaaattatatcaaatggctgagaaagacttgagctcagatgtgtctaaaagtaaagattatgcttttctttgacagaaacagagtgaagttgagatgtgactggttaaggcagagttggagtgaagggtcagagctatcctggaaaaaacatgactggctttacactaacttcartcacgctatgggacctttggagagcaccggctcaca

SEQ ID NO: 712509 - DNA, 660 bp, Homo sapiens
tatacttttaattagatgattcaatcacatataaagctattccaggctcccttttgggtgactgtataacctacttctgccttctctgggaactactcattgcagtatcatttgtatcatgaaatattgtcgacctgaccgtgacttactgattaagttggatttctgttggacttccaaaataacctttaataacttactcatatttttttttaggaagtgcaaaatttcactgttttaaacattcaggtctttgtttgctcttgtgtatttttaaaattcatttcgagtatatacaattcaatgaycagataatgttaaattaatagaaagtaggtaaagataatttacaggtagatagtttctgaatgtttaagatgattatgcacaagtgcaaatggtatgagtaaaggctaaaatacgtttcatcattggagaccatgtgttgacctcagcaatgggcaatgaattttttcacctttttcagaatgtcaacagttctccttggacaatagtaaagaagaggcaatttgcatagtggtcaaatctgtaggctgtgaagctggactgaattctatcactagttctgtcacacactatctgtgtgccattgcacaagttgtttacatattccataattccctttctctaaaatgtcta

SEQ ID NO: 712510 - DNA, 637 bp, Homo sapiens
ttaaagcaatgatcaaaaaggacaaaaaaggcaatacataatgataaatgtattagttcaacaagcagattgcaacaaaaacaaaaattgataaataggacccaattaaatgaaaaagtttctttacagcaaaataagttatcaacagattaaacacaaaacctacagaatgggagaaaatatttgtaaactctgcattcaatgagttctaatattcataatctatgggaaacaaattaagaagcaaaaaaaaaacagcctcactaaaaaatgagcaaaggacatgaacagacacttctcaaaagaagacatacaaaaggccaacaagcatatgaaaaaatgctaaacatcactaatcattaaacattaaaatccgtaatttgagcaaggagctcaaagtctttgctgctatgtcttcagcagcttaatatagagctggcacttagttaatatcatttgaatggaattaaattaaatataataaattgatttattaaaatgtttaagtgtaattagccccttaatgggtcacttcatgtataattttataccttgaagggcccactacaactyctatagctctgcaggagttgaagaaggtgactttgcccaaaacctgatactaattttcaaagga

SEQ ID NO: 712511 - DNA, 910 bp, Homo sapiens
tgcttttgcgtcttcgtgcttctcctctagtcccctacagtttaaataattgctggttttggaggtaggttgagaattatctctagttagaactgagatttttttattcatataagacaaaygcacagcattaacaattttcttaatacacattttttgcaagttattgagaaagtggacaaagtaaatgtttaagagacctattctggtagaaggagaaacctggcttcactgagattaggagatgtcaagctttctgagtttgtgtggctccatttctccagatctgtatccccatttagaaagcacatataacaaggagcaggattgagtagtgtaggtgagacataaactcctggtgggaaggaatattttaccccgatgttgtttagaattgatgacacgtggtgataaaaagtagaaatccattttaatcagttttctgattgttttaaaatttattttagacagcggaccctcttattgccggcatccagggtggacagcttcatttcctcctcccatggtacatggtactccacttttgaggcatattgtagggtgtctgtgcttgagggtagagggaaggcaaaaggggaatggagcaggaagagaaggctttactccattgctttgctgtagccttgctactcagaggataatatttggaccagcagcctctgggcatcacctggcctcatccaagatgtactaatcagaagaatcttcattttaacaaggtaacagtcattcttgcatattagggtttgtaaagtactgttctaggatagcacttctcaattttttttagcttagaatcacctggagggtgtaacgcttgttcaaacacatattccagagaatctggttcaataggtggggctgatgaatctgtaccaataagctccag

SEQ ID NO: 712512 - DNA, 910 bp, Homo sapiens
tgcttttgcgtcttcgtgcttctcctctagtcccctacagtttaaataattgctggttttggaggtaggttgagaattatctctagttagaactgagatttttttattcatataagacaaatgcacagcattaacaattttcttaatacacattttttgcaagttattgagaaagtggacaaagtaaatgtttaagagacctattctggtagaaggagaaacctggcttcactgagattaggagatgtcaagctttctgagtttgtgtggctcmatttctccagatctgtatccccatttagaaagcacatataacaaggagcaggattgagtagtgtaggtgagacataaactcctggtgggaaggaatattttaccccgatgttgtttagaattgatgacacgtggtgataaaaagtagaaatccattttaatcagttttctgattgttttaaaatttattttagacagcggaccctcttattgccggcatccagggtggacagcttcatttcctcctcccatggtacatggtactccacttttgaggcatattgtagggtgtctgtgcttgagggtagagggaaggcaaaaggggaatggagcaggaagagaaggctttactccattgctttgctgtagccttgctactcagaggataatatttggaccagcagcctctgggcatcacctggcctcatccaagatgtactaatcagaagaatcttcattttaacaaggtaacagtcattcttgcatattagggtttgtaaagtactgttctaggatagcacttctcaattttttttagcttagaatcacctggagggtgtaacgcttgttcaaacacatattccagagaatctggttcaataggtggggctgatgaatctgtaccaataagctccag

SEQ ID NO: 712513 - DNA, 910 bp, Homo sapiens
tgcttttgcgtcttcgtgcttctcctctagtcccctacagtttaaataattgctggttttggaggtaggttgagaattatctctagttagaactgagatttttttattcatataagacaaatgcacagcattaacaattttcttaatacacattttttgcaagttattgagaaagtggacaaagtaaatgtttaagagacctattctggtagaaggagaaacctggcttcactgagattaggagatgtcaagctttctgagtttgtgtggctccatttctccagatctgtatccccatttagaaagcacatataacaaggagcaggattgagtagtgtaggtgagacataaactcctggtgggaaggaatattttaccccgatgttgtttagaattgatgacacgtggtgataaaaagtagaaatccattttaatcagttttctgattgttttaaaatttattttagacagcggaccctcttattgccggcatccagggtggacagcttcatttcctcctcccatggtacatggtactccacttttgaggcatattgtagggtgtctgtgcttgagggtagagggaaggcaaaaggggaatggagcaggaagagaaggctttactccattgctttgctgtagccttgctactcagaggataatmtttggaccagcagcctctgggcatcacctggcctcatccaagatgtactaatcagaagaatcttcattttaacaaggtaacagtcattcttgcatattagggtttgtaaagtactgttctaggatagcacttctcaattttttttagcttagaatcacctggagggtgtaacgcttgttcaaacacatattccagagaatctggttcaataggtggggctgatgaatctgtaccaataagctccag

SEQ ID NO: 712514 - DNA, 910 bp, Homo sapiens
tgcttttgcgtcttcgtgcttctcctctagtcccctacagtttaaataattgctggttttggaggtaggttgagaattatctctagttagaactgagatttttttattcatataagacaaatgcacagcattaacaattttcttaatacacattttttgcaagttattgagaaagtggacaaagtaaatgtttaagagacctattctggtagaaggagaaacctggcttcactgagattaggagatgtcaagctttctgagtttgtgtggctccatttctccagatctgtatccccatttagaaagcacatataacaaggagcaggattgagtagtgtaggtgagacataaactcctggtgggaaggaatattttaccccgatgttgtttagaattgatgacacgtggtgataaaaagtagaaatccattttaatcagttttctgattgttttaaaatttattttagacagcggaccctcttattgccggcatccagggtggacagcttcatttcctcctcccatggtacatggtactccacttttgaggcatattgtagggtgtctgtgcttgagggtagagggaaggcaaaaggggaatggagcaggaagagaaggctttactccattgctttgctgtagccttgctactcagaggataatatttggaccagcagcctctgggcatcacctggcctcatccaagatgtactaatcagaagaatcttcattttaacaaggtaacagtcattctygcatattagggtttgtaaagtactgttctaggatagcacttctcaattttttttagcttagaatcacctggagggtgtaacgcttgttcaaacacatattccagagaatctggttcaataggtggggctgatgaatctgtaccaataagctccag

SEQ ID NO: 712515 - DNA, 910 bp, Homo sapiens
tgcttttgcgtcttcgtgcttctcctctagtcccctacagtttaaataattgctggttttggaggtaggttgagaattatctctagttagaactgagatttttttattcatataagacaaatgcacagcattaacaattttcttaatacacattttttgcaagttattgagaaagtggacaaagtaaatgtttaagagacctattctggtagaaggagaaacctggcttcactgagattaggagatgtcaagctttctgagtttgtgtggctccatttctccagatctgtatccccatttagaaagcacatataacaaggagcaggattgagtagtgtaggtgagacataaactcctggtgggaaggaatattttaccccgatgttgtttagaattgatgacacgtggtgataaaaagtagaaatccattttaatcagttttctgattgttttaaaatttattttagacagcggaccctcttattgccggcatccagggtggacagcttcatttcctcctcccatggtacatggtactccacttttgaggcatattgtagggtgtctgtgcttgagggtagagggaaggcaaaaggggaatggagcaggaagagaaggctttactccattgctttgctgtagccttgctactcagaggataatatttggaccagcagcctctgggcatcacctggcctcatccaagatgtactaatcagaagaatcttcattttaacaaggtaacagtcattcttgcatattarggtttgtaaagtactgttctaggatagcacttctcaattttttttagcttagaatcacctggagggtgtaacgcttgttcaaacacatattccagagaatctggttcaataggtggggctgatgaatctgtaccaataagctccag

SEQ ID NO: 712516 - DNA, 3031 bp, Homo sapiens
tgcacatggattcccactagccgtttgctgtcaggctaaaaagagtgtttggctagaaataaaaatttctcttgagtatgacaccttccaaggaggaaaggagatgctaaaatgtgggcaatctctcagggtctccaggtggacaggagctggggaagcggagatgtgggctatgccagcaggtggcagtgtgagcacgcagcaagacaaacagagaccgttccccccttccccgcgccgaccccccattcctggggaccaggacctgccgctggttctgcacatcttcaaggtagatttccagcgtcctacctcccacatttcaagtcctggtcgaatgccgtaaaagcttttccactggataatttataggaacatcccttttctctcttcttgccagtggcttattttgaaaggctgagttctttgaataaatgagcaacctacacaatatgaagggaaataaaacgctttatagccgtttgatggcaagtgtttgtctgccttaagcacgccagtggcagaaagataaaataaggacaaggtcgtggttttgatctctgctgagcccaattagctttgttctatagtgtgcccgagggcctcaccttaaataagtttaaccacctggaaatgcttgttttgcatatgggggtcaatgctgaagtactgctcactcaatacctagaaattcactagggttaaaaaaagattagcttcagagtcatgcagacttgagtccaaatccctgctctatcactcactagctgggcagcctcgggtaagttactctcttggaatctttcttcccatccctgtaggttctgtgtgaaggtgatagacaatgtacatgaaatgccaggcacacagcaagtactcaaccaaaggtagctagaaataatctaacatccatttactgttcccatgacaattcacctggattctttgtacaccaaggagaatctggttttgtccttatgttcctttgaaagtacatttaactctttgcttcagtggatcatctagtttagaaccttattccttatctccatgctggtctcaggctgcagagaagggagagagacagaggagtgtttgggatagaaagaacagcttaagtatacattgttctcaaatcactgcttttcatagccaaatagagatgacttttgaatgatcagctgttccccttgtctgcctcagaacaatgggagatagataggtgaaatgacttttccaagagaagatccccaagagtcccttcccttcatcattcacacacatggttatttagatggcacccccaccttgtgattgattccatgctgccccatgaagacctgcacggtgcctctcaaagacctgcacgctgcctcgtgaagacctgcacggtgcctcgtgaagacctgcacgctgccccgtgaagacctgcaagctgccccgtgaagatctgcacggtgccccgtgaagacctggacgccgccccgtgaagacctgcacgccgccccgtgaagacctgcacggtgccccgtgaagacctgcacgctgcctcgtgaagacctgcacggtaccccgtgaagacctgcacgctgccccgtgaagacctgcacgctgcctcgtgaagacctgcacggtgccccgtgaagacctgcacgctgccccgtgaagacctgcacggtgccccgtgaagacctgcacgccgccccgtgaagacctgcacgccgcctcctgaagacctgcacggtgcctcatgaagacctgcatggtgcctgatctccgtgggtggttccaccatcctccaagtttacaagccaggtcctgaggagccacgcttgacatctcatttctctctgtgttttgcccaaatattgtcagttttttctccaaaacgtctctcaaatctgtctcatattttattattatctgtatcagcactcttttgtctgtgttaactgaatttcttctggatttttacagggaccttccatttggtatacctgcattcactctatcccttccttattatcttttccactctgaaattagagtgaagttttagccacgatgctatctgaaggcagggctgttaatgtttttctctgtaagtttaggagcactttacctttactagctatttcttatgctggacatgagttgggggaataggtcttgctatgctggcaacacacagaagaatcactctagtgtcaaaaagctcacattcagctgggtgcggtggctgacgcctgtaatcccagcactttgggaggccaaggcaggtggatcacaaggtcaggagttcaagaccagccgggccaacatggtgaaaccccatctctactaaaaatacaaaaattagccaagtgtagggtgggtgcctgtaatcacagctacttgggrggccaaagcaggagaattgcttgaacccaggaggtggaggttgcagtgagccaagatcacaccactgcactccagccttggtgacagagcaagactccatcttggcgggggggtgttgggaaaaagctcacattcctggagagatttggccatataaataaaatgctacaaaacagtgtatcatattgctgggtacagaaggaggccagcaggcctagctgacttgtaggtagagggaaaagaggccttcaggaggtctgcatggaagcttctccttcatggatatttgtgaagggatctgggctccctgcttggagcaaaggccctgtcatggaatttacagtctagagagaaagaaggtcattaagtaaaaaacgtacaaatacctaaacacataaagaataattacagattgtgattaatactgtgaagggaaagaacaggttacataagcaagaataaaagggccatgattttgtttggggaattggataagggtccccagaggaggtagccttgagccaagccaggagactgaccagggggtgttctgcagaggatcggagtggaagacggcatttccctacagcaggggctggtgcccatgaagtgagaaagagctcagggttca

SEQ ID NO: 712517 - DNA, 911 bp, Homo sapiens
caagagaaaagacgatgtggtagggggactggctttgaaaggggcagaggtttacaggagagtgctggtcagtgagccagagggggttgcaggggacatgtgttggtgcgcacagtctttgcctaggagatgggatctttctcgaggggcagagctactaagtgtttgaaatagagcttatgaaatcagctctgctttgtagaaagagctctcttggaatcctctaaggcacagagggagaagagactggagttctgtggttattgaaatagtccagggacatgaaaaatggtgttttgttttcctaatagttgtcaaccatgatagctatcatttatcaaattcctatcacgtgctgctgctgtaccaaacatgtgacctccgtcacttctaatcttcctccctggattttccatcacagttcctcaaagcagggattggaactggtatgagtgagcacagggggagcagaatgcttcyggcagccactcctccttgcagccatggagcctcccagcacctgcaaagttgtgttttgttgctatttttcaataaagaaactaaaattctttgatgaagtagcttttccaaaggtgacagagctgaacacattgcaaaagtgggattcgaactgtcatatctctcattcccaaattcaagccttttccattatatcaaatagttccttctgtctctagtaaaacccatggtggtgaaatacagtgatttatatgatatttgactgccccatgagaatgtgagcttattgaagaaaatgaccgtgtataattcattgccaccctgtgccccagtgccaagccctgtaagtgtgagtttgttgactaaaagaaactatcaaatgggatggcagtcctcctattaagaatctgaagtcctctttcattccattg

SEQ ID NO: 712518 - DNA, 381 bp, Homo sapiens
tgaatataccaaaacatgatttcttcatagccatggggatcatgggattatgcaaagcaaacattccaggcactgttctaatgttttaaagtattattttatttaatccttactctaatcctgtgagtgaaatttattgccatacccaagtcatctaagttttcttttatgttatattctaggagttttagagttttgaggtttacatttagttttatgatccattttaagttagtttttgtgaaaartttaagatctgttatctagatttgggttttgtttgtttgttttacatgtggatgtccagtttttccagtaccatttgttgaaaagactatttttggccagatgtgatggctcatgcctgtagtcccagcactt

SEQ ID NO: 712519 - DNA, 640 bp, Homo sapiens
tttgttattcaacaaatacttcttgaatataatagtatgccaaccatgtccaggcagagtttagcattgaatraaacagataatatctctgcctttgtggaatttattgtattagtgaatgtaatactagaggcaataatagataaacccagaaatctcagtgagcaagcacaatagaaatttattttttgttcctgtaaagtcaataagcaacaagggtagggggaaatgttcagctcattatatttatttaagcacttgagtttattgaaagctctgctgtcttcaatttgtgacttccaacgtcaccctggtcattgacatcagttgtcagacagtagaaaagacagaatgggagcctgggcattgtacacatcagttttacccatattacattcatcaatattcaatcatgtggctttagccacatataagggagctgcaaaatgtagctcctggctggatagtgacttcccagcagaaactcttcattagagaaggagagcatgaatatttggtgggaagattgacattcctgccacatttacgttctgctgggtgcaggaagacagacattaaacatataagtgagtgcactatgtatcatttcagatgataatagtaaaaataaatcagggga

SEQ ID NO: 712520 - DNA, 599 bp, Homo sapiens
aggcagacataagtttattgagataaacgaatccccatgcaattgcgtacagtcaggaatatagaattgtgtatctcaactctaataccagatgttatatatcacttaataatctctctttattcataatgcgcaatgtggttgttaagtatcgtggtaatgttttggtcccaataaatagaatgggtatatgccagatgaggagatttctagaatagaggtcttcagaaatacaaaacaaaatatttgggggttcagcttaagtagtttcacttccctgtgagatctgtaaagttgatgcagcccccaaatactcatcgtttctaagcaaggtctattctaaattcttttatataaacatatagtctctaaagctagcaagcctcccaaacaatatttcygtgctaaaagaaggactcaatatgtccttttgtgatatgccataatagcctattgtagatttctgtcatctactttgttttatttacctttgtcatttaccttttctgagaagtgtgggtgatataaaggttgaaatgcctgattaagcatcaaaccttagcacaatgtttaatgacagtttcagacaactaaataac

SEQ ID NO: 712521 - DNA, 595 bp, Homo sapiens
ggtcccacttctcaacactgttgcatttggaattaaatttccaatacataaactttgagggacacattcaaatcatagcaatatacaaaataagtaaggaagacagtcaactctgtactactactactaataataataatctgattttatatttatttatttatttatttattttgagacagagtctcgccctgttgcccaggctggagtgcaatggcgcaatcttggctcactgcaacctccgcctcccagcttgaagtgattctcctgcttcagtctcttgagtagctgggattacaggcatgtgccaccatgcctggctaattttttgtatctttagtagagacgggggtttcaccatgttggccaggctggtctcaaactcctgacctcgtgatccacctgccttggtctcccaaagtgctgggattacaggcatgagccaccrcacccagccgataatctgattttaaaaatgagcaaaggaactgaatagacatttctcaaatgaagacaccacaaatcaccaacaagtatatgaaaaaaaatgctcaatatctattaccaccaggaaaacattaaaactacaaagaga

SEQ ID NO: 712522 - DNA, 638 bp, Homo sapiens
aaagctaattatatagttaagtaggacagacaatgctagcatataaactgtttatttgtcttatttatttagggtttacaaacatattatgtctttttctcaaaccttagcatattaaaataaattaaaatacattgtaaaggggattggtacgagcaagacagtaatagcaatacaaggcctcagttaacagtgacaaaagtgaaataaaatgttgcatatgtgcatacccagatatgtatgtaaatactacaaacaggagacactgccttttaggttgcaaacaagctgttttatatactgttataatatataccaattgtcattccaaacatggaaataacttgttcaaatgatgacaaaaaggcactgacaaaggttgacattgagtttggaatgtctcatctaaaatagaccaggtaatcgtattacctaattaagatttycatctaagtgttagaagagcgacagcagcaaaaacaaaatgattgttttttcatgggatgagctccatttctttggtaaaaccactaacacaacagataagtgatatgtaatttatttcaaattaaagcttgatgttttaagaaccaggcaaacaaattacaaacaaaaatatgttgaaataatatattttc

SEQ ID NO: 712523 - DNA, 1862 bp, Homo sapiens
ccaactgatgcccaaggaagaagggctgtgtttattctttgactatctgagcccctcgttcaccattttcagcaacttggtcttttttacaaaaattaattaattaaataaatgaacaaatatcagaaacttgatcttaataacatatatatcttaatatgtgtgacaaaattgatatatattatgtatatgacatataaatcaatatacagcactggttgtgtgaccaattaataagcggaagttgtagcttgattactacattcctcatttcccaccttttgaaacattctggcttctcatcctagttcagaaataagatgcagaatttgcactcacttcagcagcacaggcattagttcttatacatgatagggtggaaatgtgtctctcttgcttctctctgcagaaaatcatctcattccttgtcactttctcattatcataatgccataccaattgttcastctccttctctctcatttacgtatttctttccatttttcaaagcattttcatatacattttattatatgattctccacggtattgaggacaggcatccttagcctcatttgactagtagtaaactaaggtttgatgagattaaattatttactcaaagttacattcattcaaaagtatttgctctgtatctactatgtgccagatactatacaatgaactagaaacatcaaggtggattaaacacagtccatgccctaaaagagggagacagaaaagtaatccggcaattataggatgaagggataaatacaataataggggttaagcagagggcactaaacataaaccttagggatactcctaatccaaacttgggaggtgaagtgagtaagggaaaattcatggggttagtgatatctaaactgagatctgaagtacaagattaaccagaagaaaatgatatcgaggtgggtaaaagtataaacaggaaacagcaatatgcaaaggctcagagagagaagaaatatgcatcggggagctgctttcagcacagtgtataaagtgtgacacggaggcaaggttgccctgtttaggcacacagattgtgcactgcactactccagcagttatcattcacagactaggctgggaatggcatcccccagagttgagcaatgtggcttctctgcaagaagaatgatgggtggggaatgtgaggactctgaacatcatgcatgctgaggtgtttgtaaacaggctgaaggcaatggaaagccattggaggggttgtggcttgattaggcttgtctttcagaagattgttctgcctgtggggtggagaatagatcagaagaaaccaatgcttatcagccttccaatcagtagataaacatgagactggcctggagtgaggtccaggaagatcagagttagggacagattcaagagatttaaagaacgtggattgacaagactcggtaactggcaggatgtgagagatgagagggaaacggagataccaagtgtgagccccagcatttgttcttagatcaacactgggtccagggtggtgtcatttaccgaggaggggggaacactggaggaggaagattattaatttttgttttggacatgctgagtatgaggtgattttgagacatccgagagagaagcaggcagcttggtgggactggaggtcgggagaaacaatgagggtctaagacagagtgttgtcagcatggacctgtgtggaactgatcagagtcattgtggtttcaggacagtgggctcaggggcaccctgtggagtggcggaggaggtgaggaagtggagatcagaaaaaaagagacatttattttgagaagtttggctgtgaaggagaagaaagaggggca

SEQ ID NO: 712524 - DNA, 1392 bp, Homo sapiens
cacaaaaaggtgactatagcagaaaaataatttaattgtacatttaaaaataaaagtaactggattgcttgaaacacaaaggataaatgcttaaggtgagggataccctatgtactctgatgtaattcttatgcattgcatgcctgtgtcaaaatatcttatgtgagccataaatatatatacctactacgtatccaccaaaaataaaaattacaattaaaaaataaacaaaatgtaaatgtgtcaatattgtagaggctgtccaaaagcactatgctacatccaggtgattgtactaatcttgatcttctatgcacaaatacttctcttatttttgtgacagacttcctgataccaaggtaaaaaaaaactcacctaatattttgataatattcaactgctttgagacctggccaaatactttgtagagttttaaaactagaatttaccagtkttaatgttttttcttatatttttctgaaacaagaataaagttccatgtcatatttacatctagaaaagtaattttgagaggtgaataatagaaatcaagtatagttacactccaaataataacactttggtcaatgatggactgcatatagaaatgtggtcccaccaaccaggccaatatggtaaaactccgtttctattaaaaatacaaaaatttcaaataaagtgattagggaaggtgtatgaattttctattttggtgtaacaaattaccacaaatttagcagcttagcccacatttattccatggtctgcatacctgtcctttcatcaatcaagaagttggctaaggtgtattttcatcgggaggattgtctgtggaaaatgtccacttccaagctttctaatgctattggtggaattcatttccttgtggtagtaggactgagagcctgggcttcttattggctgtcagccaaggccattccaagcaactagaggctgccagcagtttcttgtccctggggtttttcataagacccactgaaatcatgacagcttatttaaagttatcaaggaagtgtctctctctctctccattctgctaagtatataaagcaacctagtcaatggagtgttatctcaccaatttttcgtgttttgtcagttagaaaaaagtcacagtttccatccacatacaagggaagggaattatataaaggcatgactcattgggaagcactttagagtgtgttaaccatagaggtccgcattgagaaggtgacatttgaaaatagacatttaagaaacgtaaagtaacccaaacagatatctcagggaaaactctccagacagagagatcattcagaatgaaataataaagaatttgcaagtcatttttgttctgaccactgctcatagtcgcatggtagcacagat

SEQ ID NO: 712525 - DNA, 1392 bp, Homo sapiens
cacaaaaaggtgactatagcagaaaaataatttaattgtacatttaaaaataaaagtaactggattgcttgaaacacaaaggataaatgcttaaggtgagggataccctatgtactctgatgtaattcttatgcattgcatgcctgtgtcaaaatatcttatgtgagccataaatatatatacctactacgtatccaccaaaaataaaaattacaattaaaaaataaacaaaatgtaaatgtgtcaatattgtagaggctgtccaaaagcactatgctacatccaggtgattgtactaatcttgatcttctatgcacaaatacttctcttatttttgtgacagacttcctgataccaaggtaaaaaaaaactcacctaatattttgataatattcaactgctttgagacctggccaaatactttgtagagttttaaaactagaatttaccagtgttaatgttttttcttatatttttctgmaacaagaataaagttccatgtcatatttacatctagaaaagtaattttgagaggtgaataatagaaatcaagtatagttacactccaaataataacactttggtcaatgatggactgcatatagaaatgtggtcccaccaaccaggccaatatggtaaaactccgtttctattaaaaatacaaaaatttcaaataaagtgattagggaaggtgtatgaattttctattttggtgtaacaaattaccacaaatttagcagcttagcccacatttattccatggtctgcatacctgtcctttcatcaatcaagaagttggctaaggtgtattttcatcgggaggattgtctgtggaaaatgtccacttccaagctttctaatgctattggtggaattcatttccttgtggtagtaggactgagagcctgggcttcttattggctgtcagccaaggccattccaagcaactagaggctgccagcagtttcttgtccctggggtttttcataagacccactgaaatcatgacagcttatttaaagttatcaaggaagtgtctctctctctctccattctgctaagtatataaagcaacctagtcaatggagtgttatctcaccaatttttcgtgttttgtcagttagaaaaaagtcacagtttccatccacatacaagggaagggaattatataaaggcatgactcattgggaagcactttagagtgtgttaaccatagaggtccgcattgagaaggtgacatttgaaaatagacatttaagaaacgtaaagtaacccaaacagatatctcagggaaaactctccagacagagagatcattcagaatgaaataataaagaatttgcaagtcatttttgttctgaccactgctcatagtcgcatggtagcacagat

SEQ ID NO: 712526 - DNA, 1394 bp, Homo sapiens
tgcccaagtgaatggttgttaggggaggtggccacaggtttgcagttccatgtttcactggcaggctgtgggtgtctcggtgccgctggccaaatgctggccccctcaagcgacactgcagttcttccaatgctcagtggtggaaaggggcaccaggcagccactggtcccaggtgcggcagctttcagagaagaacccagacttgtgtaagatgagaataacaggcatgctccccaaaggagggagagaaagggggggtatttagactctcctaaactttgttttccccaaaagaatgagcccctctgcctcctagccctgtcttacaccttcctggtggcaaaatgctcacaaatcaaagccacactagggcattgaaggggattacgaggatctggcttcgggaaaggttaaagagctaaataaagaatgagctctccattctgcccactccataccagtcagtgacccgcaggaagggctctcagcggaaacttcccatctccatggtaccaggccttctattgccctactgaattcctcacttaggatcaagggtgaaaattaagcaatgtacttagcaagataagcattcttcactctttcccctgataattgtgttgctcttttcccatgcagctgttgcaggacacaccagtggcctccccaaggagcgtgaaggtgtggcaagatgcttgctcaccacttcccaagacccaggccaatcatggagccctccagtttggggacattcccaccagccacttgctattcaagcttcctcaggagctgctgaaacccaggtattatttagctttcctgccccagcaccagctcagaacctgactctgcgattccacctcagggaagtctgactgccatgacaccatgcagctctctctaatgaaggtggcactaccatttttgtgcaaagaggtgctggcctgcacrggacagggagcgtgattgcctgccatgtgctttcccaacagctggaggcaaacgtgacggacagtgtacttctcagaggctgaaacaatcagctcaggtctggtttagaattgatggtgttctaaaaataaggatgacattttttttctaaagctgctgtttatttccatgataaatcacctttcttttcttgtattctgtagtgaaagtaaaatcattcttttttggtagacgcagtgccagatagatcatttttagagaatacatttggcctttttgcgctaacaagttgcacctcttttggggaggcgggaatgagcagaaatattaattatgtcagaaaaaaattagaaaaacaagatttgtcattttcaggtgatttgaaggagccatagataaaaaggtactgaccttttcttcacggctttcccacagaggcaga

SEQ ID NO: 712527 - DNA, 1394 bp, Homo sapiens
tgcccaagtgaatggttgttaggggaggtggccacaggtttgcagttccatgtttcactggcaggctgtgggtgtctcggtgccgctggccaaatgctggccccctcaagcgacactgcagttcttccaatgctcagtggtggaaaggggcaccaggcagccactggtcccaggtgcggcagctttcagagaagaacccagacttgtgtaagatgagaataacaggcatgctccccaaaggagggagagaaagggggggtatttagactctcctaaactttgttttccccaaaagaatgagcccctctgcctcctagccctgtcttacaccttcctggtggcaaaatgctcacaaatcaaagccacactagggcattgaaggggattacgaggatctggcttcgggaaaggttaaagagctaaataaagaatgagctctccattctgcccactccataccagtcagtgacccgcaggaagggctctcagcggaaacttcccatctccatggtaccaggccttctattgccctactgaattcctcacttaggatcaagggtgaaaattaagcaatgtacttagcaagataagcattcttcactctttcccctgataattgtgttgctcttttcccatgcagctgttgcaggacacaccagtggcctccccaaggagcgtgaaggtgtggcaagatgcttgctcaccacttcccaagacccaggccaatcatggagccctccagtttggggacattcccaccagccacttgctattcaagcttcctcaggagctgctgaaacccaggtattatttagctttcctgccccagcaccagctcagaacctgactctgcgattccacctcagggaagtctgactgccatgacaccatgcagctctctctaatgaaggtggcactaccatttttgtgcaaagaggtgctggcctgcacaggacagggagcgtgattgcctgccatgtgctttcccaacagctggaggcaaacgtgacggacagtgtacttctcagaggctgaaacaatcagctcaggtctggtttagaattgatggtgttctaaaaataaggatgacattttttttytaaagctgctgtttatttccatgataaatcacctttcttttcttgtattctgtagtgaaagtaaaatcattcttttttggtagacgcagtgccagatagatcatttttagagaatacatttggcctttttgcgctaacaagttgcacctcttttggggaggcgggaatgagcagaaatattaattatgtcagaaaaaaattagaaaaacaagatttgtcattttcaggtgatttgaaggagccatagataaaaaggtactgaccttttcttcacggctttcccacagaggcaga

SEQ ID NO: 712528 - DNA, 998 bp, Homo sapiens
gagtgcaagtgtcataatcatagcttactgcagcctcgaactcctgggctcaagcaattctcccacctcagcctccagagtagctaggactacaggcatatgccaccacacctggctaaatattttgttttttttttgtagagacagggtcttgctgtgttgccaggctggttttgaactttgggcctcaagcaattctcctacaatggcttcccaaagcactgggattctagacatgagcaaccatatctggccatacactgagtccttaatatctgagaatttatgagggaagagggaaaaagacagcatggcaaattaaacctcctaatatcccttgtagtaaaaaagcttacatagagccaactaggttcattctgctcacaccatttttatttttaagaaacatatgacattccttctcatatctttacacagttccagatatatatayacacacacacacacacacacacacacacacacacacacacacaccctctgtcataatgtttagttagaggggtcagcccttgtagaagtgtacagagaatattcagtcatccaccatgtatttattgatttccaactcccaggcctgtactgggccctcttcaaaggggaagaattcacagattagcagatgacatatgcatgaaataaataccacacagaatgggggtataatgatggaattagtaaatttgctatgggggccactaacttttttggggtagaggagggaactcaggaagtctttaaagaagaaaagaaacttgagtgaggtcttcaaggatgagaaggagtccttcaggtggtcaaggagtaggtgagaatgtctggtacagaaaaaagtacataaaagagttactaaatagcacagttgtcagtacagttaagttagtgttgggcggagggacccaagagatgaacctggagaaacagatctgggattcttgctgagggacgggcctcactgatcacacaagggttgattt

SEQ ID NO: 712529 - DNA, 634 bp, Homo sapiens
gtagatgcagttttgccatgttggccaggctggtcttgaactcctggcctcaagtgatcagctcacctcggcctcccaaagtgctggaattataggtgtgagccactgctcatggcctccagctaagtttttgaagccctattcctccctctcctgccagctctacaactgctgcctttaccttagaagaaggaagaaggaagaagagaaggaaaaggaggaggagaaggggaaggagaaggagaaggagaaaaaagaagaagaaaagaagaagaagaagaagaagaagaagaagaagaagaagaagaagaagaagaagaagaagaagaagaagaagaagaaatagcagtagtacagcttttctgacctttagaaagaaatatacctcatttcactctgttattctttctggttaatgtcttacttttccctttcattgcaaagtcagtgttctcagattgcatgtggtttactgcctcacygttctttctcccttttcttctctgccatgagtcacctgctgtgacactttagtgacccttaagatacttcagtaaagaccagtgggttggcaaatccagcaaatcccccccccgctttttttttttctgagagagagtctcactctgttgcc

SEQ ID NO: 712530 - DNA, 600 bp, Homo sapiens
gcatagtctagagtgtcaagtgcctgggactgagcacctggaggcactcaatatatttcttcatgttggtagagcatccggagtccaggagagagcacgtgagggtgaggatgtattggtaattggctatatcagtttctagaaagattcgtccgaaggggatgagaactgactgccttcctagtgccatggatgaatctggcccactgaccaggcagcactaacaagcaatggggaaactgagtcatttttatggacgtgtctagtctccagtatgttatatgttcctggggcacttgataaaccccttcctcttttccttctctgcyattttgttctgttcctcagagtagtgggagagcgctctgcctgaacacttgatcgtgtgttgtggaccattccctgctgagtaatgacgtgcatcttttcgtgaacttgctgatcacttctgtatcttcttttctggagtgtctgttcaaattttttgctgatttttctttacttgaagacagagagaaacagggagattaagagagaccaaattttcctcccagtgtatgacttccttaataatttgatgatagcgtatcttgacgagca

SEQ ID NO: 712531 - DNA, 2554 bp, Homo sapiens
agccttttgtcctagtcacatgtttgactgtaatttgttctctgataatttcatcaaagaggtcttaaaaacaacattcacagatttttgttgcatatttaaaactttgtggcctgtttatttaaatgccagttttgtgggatataaaatctgagggttatacttatttatgtaagcatgttgtagcttgtcttcacctggacctctatttaatggtaattatattttggaacaatgcatgataggccaactggtctgcttccaatggagttggaggggtgagactttataaactttgttgaagaaaatccctgagaaaagagattgccagtgatacttgttttgttctttatatattcatatgtttttaacttttaatgaatatatattattttagtaattaaaaaaacagaagaactttaattttgtttgagcaataaagctctcttttaaccagatataataatacaattctggttaatattgagattagcaaaaagccagaagatgaatgggacttgggttctaaagtttcacacaagtcagtgtataattgaaagtataatcacaatactgagctaaagataatatactcaaccgagatattgctgattttaaacatagtagctcagcagcagttttgaaagaaagaggagtaggagagactgaaagaaaaaaaaagagattaaaagacatttaaaagtaactgaaagaaaatataggagttatatagggaaaaggagtcctgaagcatattttgtatttgactgctgaggatcctgagctatttggaaacaatattcaatgagacaagattgcatatgaggttaacacctatttcttctacactaacctgccttatccctgcccattatttaagtcagagtttctcarcctgatggagttctttattcttggcactattgacattttgggccagataatccatgtgggagtcaggggctgggggctgtcctgtgcattgtaagatgtctaaacagtacaagatgccaatatatgtcctcagttgtgaccaccaaaaatgtctctgggcacttccaaatgtcctccaaggggtgaaattgctctcagtccttattccaattatggcctccatgaatcaggctcagttattacttactagagtttgccaaaagttccccttttcttcattgatattagtttctaatttcagataatattcttaagtaagcaattagttatcacactatttttatgcctttttcctttgtattactagcttcagtattttcagtgaatatctttctatatagtacagtgtgctggtgtttgaagagcatatcaaatcagtggtccctttcccaagagcatcagccctagtttgatgaaagataagtgacaaaatgaatagaagtctggctagaccaaatatagagaaatgacagtaagatgataaaagatttagaaacgtaactcatcattttatcatattatatatatatatcttttgtactctatattttttcatgctgtgttacaaaatgttagagaagtctactgctttattcacttccaggtgatgagaagtcaagtcaaaaatcaggacttataacgtcaatctgtgcctttgggttcctagaagagaagcaacatagcattgaagatcgaagaaggtcaccataaggaaaaattcccaaagcaaaaaacaagctttgtgtaccaccattccatcctgtgcatctgagatacactgggtctggcacaaattacctcctcaattaataaataatatatctgtaaataaatagtaactctaggaatagttataccatttgtttctatatattcattcccaatgttgacaaggatctaattcacttaaaatttagtccatattacattatcaaatttaaaaaagaagactaaagattaatatacccaatgcattcttgcccttcaatgaaaagattccctagttttgaaattaaaaactaataaatttaagtaaaaacataacctataaaatcaaatgttctaatctacctcttacattctgaagcttggagagtgagtttttagtgcttgagaataggaaatcagtccctaataattctctaagggatcatgggaaccaatacgtctaggtctgtcaatgggaaagaactctgaattaagcactaacaaaaacagcactctaccaatttaagtttaacatgagaggcagaattagcaattatggaaaacatacaaaagtggcaaaggagatgatagtttagaaaaaaattacacggctagatgtctaccaatcccagtcaacctagaagctttctccccaaggctgctttcactctgaaggatgtaagtagggactggctacaaaaattgctagttgcctggaggcttcatctggaatgacatgaatctcatgtatcagccaaattatactctgctttgaattcataaaaattgttttcataatgtgataaaattttgagttctgtctccaaactgttgaatagacaccacctgaaatataaactgaaatacctttataaggtatttcagtttataa

SEQ ID NO: 712532 - DNA, 2165 bp, Homo sapiens
tataggtgagaatcaggagattaacatagtaaggaggttagtgttctaagatgactcctatccaggcttctgtctctccttccaatcaacattttctctgatagcaaagatggataatgataattatatatttgcttaaagtatgttatgcacataagtgctttatatgtaatatatttaatatgtataacactctatataaatgtactattcttatccacattttacacttgagaaaactgaggcaaagggaagtgaagtaacttgcctaaagtcataaagttagtaaatgctgaagctgaaatttgaaagtagaccagttagggttccaggcatctttttcacaacttctctcccccaccttccatcgcagctactctactcctgtggctggatctttctttatggcaccccaattaattcaattgctaacttttaagcttaacacacaagactctgtaatctagacttgccttcttgtcagcctcatctcctgacactttcctatgtggattgtgtgctgaatcatactcaacttgctggcactccccaaagaggatggtgtaatgatttttaccttcacatattctatttgctaggcctggaaagttcttcctgccctgtctattcttttgtgcccacaccctgcaatcctcatcatcatcaggttaactctaactcatctatcagaattccactcagtgacaacgtttgaaaaggcagtcctgtctctcctgggcttccttcctgagccccttcacagagaactgtcacagtttacatgtggacctcctccacttgattgagaatacttgccaaatcaaataatgactgaatgaatgatcagtatcacatcacttgttattacatccccactgtaaatttaatttgagaaaagttggcacagactctatgctgtgatgatcttgctagttgcagctatagtctttgtctctaaatagtgtatataattaaaaaaaacttttcatgattagaagaaaaggagtcttttgattattgtagaaggtttaaggctttcaaatgagaaacatatttggtggctttgatgccatcagacccaggatatgcatagtagttaggaaaatagatcctgaagactcattgcgtgggttcaaataccaactctgccaatcactagatctataaccttgggcaagttacttactctttctgtgcttcagtttcctcatttctgaagtgggaatagtagtgatggactactttataagatcattgtgggagttaaatgagctatatgtaaaacatctagaatcaaacttggcatatagtaagtacaatgtgttttctgtttacctaaacattttttcagcccttatgattttgccaactggtgatgactgagcgcaatttgactttgctggtataggacgccgattatttaaagattttaggaatgtgaaacatattctccaattgaaggactttgcacgataaggaagcaattgtttaaattcaattctttttgtggtggcaggtgacagtaatcccagctacttgggaggctgaggcaggagaatcacttgaacccaggaggcggagattgcagtgggccgagatcacgctgttgcactccagcctgggtgacacagtgacacttcctctccaaaaaataatagtaattaaaaaataaaataaagaataagttcagttctttttatgagaaatttatctatctaatctttctatctacctatgatttatttaaggatatgtcagttatgtgtgttctggagaaagaataccacaattataccagtcctttyacggaaaattatattgggcaatttgcctctttaatctttagtgctgctctgtaaaaaggagataataaaaattattatattgttgtgaggatggaattaaataacatatgcagagtttagcacacgattctgcacatggtaaaatgctcagtaaatgttagctactattaatgatatttctttaatggagattggcagatattatagctattatctcagaaataaaattgtatatgtttttaatattttctagtagttacattatatagcttttatataataactaaatacaccaaattacaaattatgcttactagagagattccacttgatagattctaattaaaaggaaacacctca

SEQ ID NO: 712533 - DNA, 819 bp, Homo sapiens
gaaaactgataatagagtagattttacacgtttacaccataaaaaataagtatgtgaggtgatgggcatgtttatttacttgatttaataatttcacaatgcctgcatatgtcaaaacatcacgtcataccaccataatatatgaaatagaatatgtttttctagtaagtgtgatgcctctgtttctcttttttttttggaacaaaacaataaacacctttattacatgggtgaagacaaaacaaggatttatttgcccttccgggccttgattttcctaagatagaactccaactctttgccctctagcacatacccatctgctcrgccacactgtcctggccttgaagcaatgcatgcaagaagcttgccctgctggaactgctcccccaggagactgctgattttggcattctttttcctttcatgatatttcttctgaatttttttagatcgctttttgttcaaaatctcttcttcctcaggagtcagcttggctcccttcttgcagcccaggggcggcgcatagtgggactcgtaccactgtcggtacagtgtgctgtcaatgagcacaatgcaattcttcaccagggtcttgggacgaaccagctcgttattagatgcattgtagacaacatcgatgatcgttgttttatgagcacaacattctgagccccaggagaaattcctcacgtccagcctcagggcacagtatttcttgttacctccccacacacggactgtgtggatgcggcgggggccagtcttggtgttggcagctgggtgccccaactcatacttccgcttcttgtggtaggg

SEQ ID NO: 712534 - DNA, 1061 bp, Homo sapiens
tggataacattctctgaatgacttgatagaaccaagtgcaacatggattacaaagcttggaacacaaaataaaatcttgtcttatttcatattttgtctatagctgrttctagataaaaaaaaattctagacagggagacatctactaatttttaactactgcaatggaagaaatgtatcaacattctctgattttctgtttgtaatccaaggtattgtcaccaaacattggggatgaatatgagtgtagagcagggaaaatggatctaacaatatcttagcaaatcttttattttcttatgtatctatggttgttgaaaagtccagaagcaacacaactgtggtttctcttattactttgtcctgtaaaagggtcatggtgggcttttgtgcatgcctccacgatatgggtcatggctcttggtctcttgtcttggtgattggtgtcttttaatcattgtcctactcatccccagtctgatgcttccctaaatcttaaagattgagactgtttcttcttacctcatttttacaaacttcccaatctctgtaacctgggatagtaaagacaaaaaatatgagctttttcaatccttcctaaatgatttgtttcctaatatatttattcacagtaactactaaactttgtacaacatagcaatttgttgtttacaaaacattcttccttcgatttgataaattattgagcttctgttaatgcaagtaaatattgtgttgtggatacaaagatgagtaagatatttcctcatcttgagagatctagttttttttttatggtgcacatagggcattacatttgatttttagaacaatcttgggagatattattaattctgcattaaattgaataatcaaagaacaaaattcagagaggtttatttctttgcctgagagtactccattggtaatggtggagctaggcattcgatctagatactccattccagaacttttgtccttagaggacattattctgtgtattaaaagaaatggaaagattagcacttccaccctcatgtccaggtcattgtgtttctttc

SEQ ID NO: 712535 - DNA, 1061 bp, Homo sapiens
tggataacattctctgaatgacttgatagaaccaagtgcaacatggattacaaagcttggaacacaaaataaaatcttgtcttatttcatattttgtctatagctgattctagataaaaaaaaattctagacagggagacatctactaatttttaactactgcaatggaagaaatgtatcaacattctctgattttctgtttgtaatccaaggtaytgtcaccaaacattggggatgaatatgagtgtagagcagggaaaatggatctaacaatatcttagcaaatcttttattttcttatgtatctatggttgttgaaaagtccagaagcaacacaactgtggtttctcttattactttgtcctgtaaaagggtcatggtgggcttttgtgcatgcctccacgatatgggtcatggctcttggtctcttgtcttggtgattggtgtcttttaatcattgtcctactcatccccagtctgatgcttccctaaatcttaaagattgagactgtttcttcttacctcatttttacaaacttcccaatctctgtaacctgggatagtaaagacaaaaaatatgagctttttcaatccttcctaaatgatttgtttcctaatatatttattcacagtaactactaaactttgtacaacatagcaatttgttgtttacaaaacattcttccttcgatttgataaattattgagcttctgttaatgcaagtaaatattgtgttgtggatacaaagatgagtaagatatttcctcatcttgagagatctagttttttttttatggtgcacatagggcattacatttgatttttagaacaatcttgggagatattattaattctgcattaaattgaataatcaaagaacaaaattcagagaggtttatttctttgcctgagagtactccattggtaatggtggagctaggcattcgatctagatactccattccagaacttttgtccttagaggacattattctgtgtattaaaagaaatggaaagattagcacttccaccctcatgtccaggtcattgtgtttctttc

SEQ ID NO: 712536 - DNA, 1061 bp, Homo sapiens
tggataacattctctgaatgacttgatagaaccaagtgcaacatggattacaaagcttggaacacaaaataaaatcttgtcttatttcatattttgtctatagctgattctagataaaaaaaaattctagacagggagacatctactaatttttaactactgcaatggaagaaatgtatcaacattctctgattttctgtttgtaatccaaggtattgtcaccaaacattggggatgaatatgagtgtagagcagggaaaatrgatctaacaatatcttagcaaatcttttattttcttatgtatctatggttgttgaaaagtccagaagcaacacaactgtggtttctcttattactttgtcctgtaaaagggtcatggtgggcttttgtgcatgcctccacgatatgggtcatggctcttggtctcttgtcttggtgattggtgtcttttaatcattgtcctactcatccccagtctgatgcttccctaaatcttaaagattgagactgtttcttcttacctcatttttacaaacttcccaatctctgtaacctgggatagtaaagacaaaaaatatgagctttttcaatccttcctaaatgatttgtttcctaatatatttattcacagtaactactaaactttgtacaacatagcaatttgttgtttacaaaacattcttccttcgatttgataaattattgagcttctgttaatgcaagtaaatattgtgttgtggatacaaagatgagtaagatatttcctcatcttgagagatctagttttttttttatggtgcacatagggcattacatttgatttttagaacaatcttgggagatattattaattctgcattaaattgaataatcaaagaacaaaattcagagaggtttatttctttgcctgagagtactccattggtaatggtggagctaggcattcgatctagatactccattccagaacttttgtccttagaggacattattctgtgtattaaaagaaatggaaagattagcacttccaccctcatgtccaggtcattgtgtttctttc

SEQ ID NO: 712537 - DNA, 1061 bp, Homo sapiens
tggataacattctctgaatgacttgatagaaccaagtgcaacatggattacaaagcttggaacacaaaataaaatcttgtcttatttcatattttgtctatagctgattctagataaaaaaaaattctagacagggagacatctactaatttttaactactgcaatggaagaaatgtatcaacattctctgattttctgtttgtaatccaaggtattgtcaccaaacattggggatgaatatgagtgtagagcagggaaaatgkatctaacaatatcttagcaaatcttttattttcttatgtatctatggttgttgaaaagtccagaagcaacacaactgtggtttctcttattactttgtcctgtaaaagggtcatggtgggcttttgtgcatgcctccacgatatgggtcatggctcttggtctcttgtcttggtgattggtgtcttttaatcattgtcctactcatccccagtctgatgcttccctaaatcttaaagattgagactgtttcttcttacctcatttttacaaacttcccaatctctgtaacctgggatagtaaagacaaaaaatatgagctttttcaatccttcctaaatgatttgtttcctaatatatttattcacagtaactactaaactttgtacaacatagcaatttgttgtttacaaaacattcttccttcgatttgataaattattgagcttctgttaatgcaagtaaatattgtgttgtggatacaaagatgagtaagatatttcctcatcttgagagatctagttttttttttatggtgcacatagggcattacatttgatttttagaacaatcttgggagatattattaattctgcattaaattgaataatcaaagaacaaaattcagagaggtttatttctttgcctgagagtactccattggtaatggtggagctaggcattcgatctagatactccattccagaacttttgtccttagaggacattattctgtgtattaaaagaaatggaaagattagcacttccaccctcatgtccaggtcattgtgtttctttc

SEQ ID NO: 712538 - DNA, 1061 bp, Homo sapiens
tggataacattctctgaatgacttgatagaaccaagtgcaacatggattacaaagcttggaacacaaaataaaatcttgtcttatttcatattttgtctatagctgattctagataaaaaaaaattctagacagggagacatctactaatttttaactactgcaatggaagaaatgtatcaacattctctgattttctgtttgtaatccaaggtattgtcaccaaacattggggatgaatatgagtgtagagcagggaaaatggatctaacaatatcttagcaaatcttttattttcttatgtatctatggttgttgaaaagtccagaagcaacacaactstggtttctcttattactttgtcctgtaaaagggtcatggtgggcttttgtgcatgcctccacgatatgggtcatggctcttggtctcttgtcttggtgattggtgtcttttaatcattgtcctactcatccccagtctgatgcttccctaaatcttaaagattgagactgtttcttcttacctcatttttacaaacttcccaatctctgtaacctgggatagtaaagacaaaaaatatgagctttttcaatccttcctaaatgatttgtttcctaatatatttattcacagtaactactaaactttgtacaacatagcaatttgttgtttacaaaacattcttccttcgatttgataaattattgagcttctgttaatgcaagtaaatattgtgttgtggatacaaagatgagtaagatatttcctcatcttgagagatctagttttttttttatggtgcacatagggcattacatttgatttttagaacaatcttgggagatattattaattctgcattaaattgaataatcaaagaacaaaattcagagaggtttatttctttgcctgagagtactccattggtaatggtggagctaggcattcgatctagatactccattccagaacttttgtccttagaggacattattctgtgtattaaaagaaatggaaagattagcacttccaccctcatgtccaggtcattgtgtttctttc

SEQ ID NO: 712539 - DNA, 1061 bp, Homo sapiens
tggataacattctctgaatgacttgatagaaccaagtgcaacatggattacaaagcttggaacacaaaataaaatcttgtcttatttcatattttgtctatagctgattctagataaaaaaaaattctagacagggagacatctactaatttttaactactgcaatggaagaaatgtatcaacattctctgattttctgtttgtaatccaaggtattgtcaccaaacattggggatgaatatgagtgtagagcagggaaaatggatctaacaatatcttagcaaatcttttattttcttatgtatctatggttgttgaaaagtccagaagcaacacaactgtggtttctcttattactttgtcctgtaaaagggtcatggtgggcttttgtgcatgcctccacgatatgggtcatggctcttggtctcttgtcttggtgattggtgtcttttaatcattgtcctactcatccccagtctgatgcttccctaaatcttaaagattgagactgtttcttcttacctcatttttacaaacttcccaatytctgtaacctgggatagtaaagacaaaaaatatgagctttttcaatccttcctaaatgatttgtttcctaatatatttattcacagtaactactaaactttgtacaacatagcaatttgttgtttacaaaacattcttccttcgatttgataaattattgagcttctgttaatgcaagtaaatattgtgttgtggatacaaagatgagtaagatatttcctcatcttgagagatctagttttttttttatggtgcacatagggcattacatttgatttttagaacaatcttgggagatattattaattctgcattaaattgaataatcaaagaacaaaattcagagaggtttatttctttgcctgagagtactccattggtaatggtggagctaggcattcgatctagatactccattccagaacttttgtccttagaggacattattctgtgtattaaaagaaatggaaagattagcacttccaccctcatgtccaggtcattgtgtttctttc

SEQ ID NO: 712540 - DNA, 1606 bp, Homo sapiens
agttgccaggtaagccaagtcaccaagtgaagagcaagacctcctggccccttccaaattgaaggcagccaggtgtggcaaaaagagcatggactttggcatcaaacccttctttgaattttcactcttccacttgctgcagtttcttttaaccaccttgaatttcagttttctcaccagtaaacagggagtgataatatccacctctcgaaaaccctgtgagggttagagacaaacttttcgaagtgctaatgaataaactatctctaagtatggtaattagtatgagatttattattaattccttgtcctatgtttgtaaaaagcacataaagaaagcttgaaccatttgcaccaaggtacaatataaaacaactaaacatataagctactgattttacagtttccttttctcatttgtgccatagcaaaatgtagttcattttattctgtgtcattcaataattatggcaaaatcatggcaaccattgctaataatctcttagaaatgctattcaacaaatagttctcaagtggcttcaagactcaacactttgtgctggtttctaaatatgatgaatcctgcattttatttggttctcaagggttatttgtaaccctctattgtcagcaagataaggattaccctctctcaggagaacagagactttttctttttaaccttttaaagaactacttctaggaccattgagagataaagacatttgttgctataccactataaccttattcaactctcagtatcccagagtgatgaatagcacacagagtaaatgagcatcttgtaaaatacttagaagcaataagtggaagttaatttgtgtaatgtgtatatttaattatttgaaattttagaataacactaaaccaattattgtaagaagtagcaaagaataaagaaggggcaaattaatgaaagaaggggacaaataattaactttatttttgcttgtcatgaagtgaatatattctaatattcccatgacctgaagcttaccacagacagtatgtttggtttgggcatagtgtaattttagaatgtaagatttcttgtattgtggtaattttagaatgcaagctttctcaaggctgggactgtccagtcttgcagatgctttaagctctcattaatcaaggcttattctttgattatcccaatacttgtgccatgccaaccttgtggtggactatcaccatgattatcattaatccttattaccaaarggatcaggttagacatccttttcatcccccacctgcccgaattccatccttgacctgctgaagaaaaacaatgaagataggaagctctagtaggcaggtttgtaatacccaggcaatatatcatattagcagtaatagaaactcctgtcttgcctctcccacaaactacttggaaaggcatttctgctgtacatctctttggagagcagtggtgatctaaagaaatgcttcctcttgaaagaaccctttttattcacagtggaatactcttgaattttgcagatcatcaaacatacaaaaaaaggtttttttttttaatagttgaggaaataagcctaaagaaaatgtgtacctaatccta

SEQ ID NO: 712541 - DNA, 1606 bp, Homo sapiens
agttgccaggtaagccaagtcaccaagtgaagagcaagacctcctggccccttccaaattgaaggcagccaggtgtggcaaaaagagcatggactttggcatcaaacccttctttgaattttcactcttccacttgctgcagtttcttttaaccaccttgaatttcagttttctcaccagtaaacagggagtgataatatccacctctcgaaaaccctgtgagggttagagacaaacttttcgaagtgctaatgaataaactatctctaagtatggtaattagtatgagatttattattaattccttgtcctatgtttgtaaaaagcacataaagaaagcttgaaccatttgcaccaaggtacaatataaaacaactaaacatataagctactgattttacagtttccttttctcatttgtgccatagcaaaatgtagttcattttattctgtgtcattcaataattatggcaaaatcatggcaaccattgctaataatctcttagaaatgctattcaacaaatagttctcaagtggcttcaagactcaacactttgtgctggtttctaaatatgatgaatcctgcattttatttggttctcaagggttatttgtaaccctctattgtcagcaagataaggattaccctctctcaggagaacagagactttttctttttaaccttttaaagaactacttctaggaccattgagagataaagacatttgttgctataccactataaccttattcaactctcagtatcccagagtgatgaatagcacacagagtaaatgagcatcttgtaaaatacttagaagcaataagtggaagttaatttgtgtaatgtgtatatttaattatttgaaattttagaataacactaaaccaattattgtaagaagtagcaaagaataaagaaggggcaaattaatgaaagaaggggacaaataattaactttatttttgcttgtcatgaagtgaatatattctaatattcccatgacctgaagcttaccacagacagtatgtttggtttgggcatagtgtaattttagaatgtaagatttcttgtattgtggtaattttagaatgcaagctttctcaaggctgggactgtccagtcttgcagatgctttaagctctcattaatcaaggcttattctttgattatcccaatacttgtgccatgccaaccttgtggtggactatcaccatgattatcattaatccttattaccaaaaggatcaggttagacatccttttcatcccccacctgcccgaattccatccttgacctgctgaagaaaaacaatgaagataggaagctctagtaggcaggtttgtaatacccaggcaatatatcatattagcagtaatagaaactcctgtcttgcctctcccacaaactacttggaaaggcatttctgctgtacatctctttggagagcagtggtgatctaaagaaatgcttcctcttgaaagaaccctttttattcacagtggaatacycttgaattttgcagatcatcaaacatacaaaaaaaggtttttttttttaatagttgaggaaataagcctaaagaaaatgtgtacctaatccta

SEQ ID NO: 712542 - DNA, 622 bp, Homo sapiens
tgtgaagcacctggcaagactaatgttctgagggacacccttgaagtgttggttcattggcacctgctggggcagcccaggtgatcttccagagatcagacagagatcttgggcagggcagattacagcagaccctgctgccttctgatctccctggaggaatgggaggaaggctttcctcctcccaatgccaagccaaccaaccttcagcattctgaattctggggctccagaccccaggtgctgggggatagagattgatggcctggttgtatttcaaggttgttcctgaataaaacctccattcaggtatttatttgggaagaagagagaagagccagtgctgggagttgggattgcgcctttggccacamtgaggaggaaaaatcgctgcaatcaaagtgaggaggagtgcttagaatttccacgggcagcaaggtccaaggcccactcccacgtggccccccacaccgcgggatggctgctgtgatcccaggaaatgggtgttgacctcacagcttgacagcattggtgaaaagtccttgtctttcagctaaccctgacagcaaaggaccagccatttagttttgaaatggaccttgaggaattcggagtgaacacc

SEQ ID NO: 712543 - DNA, 1227 bp, Homo sapiens
ggttttataaggggcttttccaaccttcacttggcacttctccttgctgccaccatgtgaagaaggatatgtttgcttctcattccgccatgattataagttcctgaggcctccccagccatgctgaactttgtcaattaaacctctttcctttataaattactcagtctcaggtatgtccttattggcagcaagagaacggactaatacagtagtgttggtgggctatgtacttaaatgtgttttgtggtggcaggtaccagttttttgtttccatgtttaacacttccttaaggatcttttgtaaggcaggtccgatggtaatgaattcccttaggctttgcttgtctgaaaaggattttatttcctcttcacttacaaaacttgtttgtctggatatgaaactcttggttggaatttcttttttttaaggatgttaaccttgaggtgacagtgtagggagagatgttcaaatcaagcagtggcttgaagcttctgttaaactagccagacttccaaaggcccatgcgcagttcttattttctgtttccaaatttctaataattagatttagaaatgctcagtggccattcaaattaaacacacacaaagcaaaatccttcaatcctttagatgttgtttagaaacttttaggaatagtttcaggcttatttgccaggccttacccacaggtaggaattgtctaagggtgtggtagagtggtctggagtcttggagcctcaggggccagacttaattgggagggatgtttcccatggtgtgacccaagaagaaaatttgaagctgtggtcagggtaaggagagataggcasatgtatcaagcgtataactcaagaacacacattggaggacagaagaatttctgagaaggtaaatgggcagtgaagtagagagaatgggtcagttggtttagattctagcttaaaaaaaaaaaggaatttgttgggagcatttcttttgggagtgtccaaactgctctgggttggggtggcccagctgcttagccacactgtgctggggtagacccaaatttcattacttcagttatcaactttgcctgtgaccacatgctgacaaagtgctggtcagttcctgactcatttgtttgccttgtatgatctccagagtcatgggtgataatcatgacttttaataaagaacaaagccctgatgtagattgctttttaggaagacacctagagtcaa

SEQ ID NO: 712544 - DNA, 1227 bp, Homo sapiens
ggttttataaggggcttttccaaccttcacttggcacttctccttgctgccaccatgtgaagaaggatatgtttgcttctcattccgccatgattataagttcctgaggcctccccagccatgctgaactttgtcaattaaacctctttcctttataaattactcagtctcaggtatgtccttattggcagcaagagaacggactaatacagtagtgttggtgggctatgtacttaaatgtgttttgtggtggcaggtaccagttttttgtttccatgtttaacacttccttaaggatcttttgtaaggcaggtccgatggtaatgaattcccttaggctttgcttgtctgaaaaggattttatttcctcttcacttacaaaacttgtttgtctggatatgaaactcttggttggaatttcttttttttaaggatgttaaccttgaggtgacagtgtagggagagatgttcaaatcaagcagtggcttgaagcttctgttaaactagccagacttccaaaggcccatgcgcagttcttattttctgtttccaaatttctaataattagatttagaaatgctcagtggccattcaaattaaacacacacaaagcaaaatccttcaatcctttagatgttgtttagaaacttttaggaatagtttcaggcttatttgccaggccttacccacaggtaggaattgtctaagggtgtggtagagtggtctggagtcttggagcctcaggggccagacttaattgggagggatgtttcccatggtgtgacccaagaagaaaatttgaagctgtggtcagggtaaggagagataggcagatgtatcaagcrtataactcaagaacacacattggaggacagaagaatttctgagaaggtaaatgggcagtgaagtagagagaatgggtcagttggtttagattctagcttaaaaaaaaaaaggaatttgttgggagcatttcttttgggagtgtccaaactgctctgggttggggtggcccagctgcttagccacactgtgctggggtagacccaaatttcattacttcagttatcaactttgcctgtgaccacatgctgacaaagtgctggtcagttcctgactcatttgtttgccttgtatgatctccagagtcatgggtgataatcatgacttttaataaagaacaaagccctgatgtagattgctttttaggaagacacctagagtcaa

SEQ ID NO: 712545 - DNA, 2180 bp, Homo sapiens
ggaattataatatgtattgctaaggtaaataagtgaaagctattttactttccagcatgagttctctcctttacttcctgttctgttatacatgaagtagtgctcaagtgttgtattagattcttggtgtagaataattgtgttgtctatctaaatcagtattaagaaagtatattaaaattatctttttcatgttatatactcctcaaaacacacacgcgtgcacgcgcgcgcgcgcrcacacacacacacacacactctctctctctctctctctctctctatgtgaaatgcactactttaccaccaggtggtgcatgtagaccaaataggaaaaggaaattaaatctactcaactggattatagtttatgtgatttctctttgtatctgtccctttagggaacagaatgaagagcacagaatagttcagatgtacccagttactcttcatatgccaaatgttgaatgttccacatttattaaagcagagggggacagactctttgatcattgcatctgttgaaagctagaaagctgaaaacatcctatcatgtattctctaaaaggaggaagagaaggaggaaagaaaatataatgttattgtgttctgaatcacactccgctagtttgggaggtaacaataatgagcaggctcagaattcctaggacttagatattgcttctaaagaaataaaagttatcaatagtaagtttacagtgtaaagatattcaagagctactaaatccatttgttccatactgaacctacagtttttaaaccaagaaatcagtaagtgagaagtccacatttgctaactaagtgctaaatacttaaatgaaagaaatggatagtttgttagcaaagagtgcttagtgcctccttaatatctgctacataggattaactgtaaaatgggaaacaaaagaataaaattgtgatctatgaaagtgcattagatgctattacactctgtaatttggaaatatgatccaagtaatattaatgaacagattaatatcaacaagggaactgtatcaatggtttaaattctttgattatcatttttattggagaattattaattcaggatgggcccacaattcattaggaccacagctataatggagaaccaaacttagatttcactgtgcccttattatgcttatgcttctaaatgaattctccaggaactaagaataactttaggcaactgtagatggggtaaccctctggatgttttaagttatacattggcaaccgtttgttgctcttgttttaatagacctatagtgatagattaagcacaggaatactttgaactattgtcttttttttgttatttgtagattgaattttcttttttaacacaccattgctggcttcaaagaattaactggcccagcatggtggctcacgcctgtaatcccagcactttgggaggccgaggcggatggatcacaaagtcaggagatcgagaccatcctggctaacacagtgaaaccccgtctctactaaaaatacaaaaaaattagccgggcatggtagcgggcgcctgtagtcccagctactcgggaggctgaggcaggaaaatggtgtgaacctgggaagcagagcttgcagtgagcagagatcgcacaactgcactccagcctaggtgacaaagcgagactccatctgaaaaagaaaaacaaaactttgcctcgttcataatcatgtataatataatcagtagaagggaacataattaaatattttcattacttttcattcttacatcttattctgttccatatcctgtcagttttcattcttccccaaaacatagataattctttttattagtttcttgtgtatcttttcagagtttcgctatgcttgtacaggcaaactggatacatatgtttgtgtgtatatgtatatacacatacatattattttttacttttaccctttttatacaaaaggtagcacgtcatatgcatttttttgtatttttttttaacagaaaaatcttcctatctcattatttaggaagcttctcacatttttgtttttgttatagctacagggtattccaccgaatgggtatatcacagtgtatttgagcagcctcctattgaggaacatttaattttcttcagtacttttctattaccaaagaaatgctgtaatgaata

SEQ ID NO: 712546 - DNA, 2180 bp, Homo sapiens
ggaattataatatgtattgctaaggtaaataagtgaaagctattttactttccagcatgagttctctcctttacttcctgttctgttatacatgaagtagtgctcaagtgttgtattagattcttggtgtagaataattgtgttgtctatctaaatcagtattaagaaagtatattaaaattatctttttcatgttatatactcctcaaaacacacacgcgtgcacgcgcgcgcgcgcgcacacacacacacacacwctctctctctctctctctctctctctatgtgaaatgcactactttaccaccaggtggtgcatgtagaccaaataggaaaaggaaattaaatctactcaactggattatagtttatgtgatttctctttgtatctgtccctttagggaacagaatgaagagcacagaatagttcagatgtacccagttactcttcatatgccaaatgttgaatgttccacatttattaaagcagagggggacagactctttgatcattgcatctgttgaaagctagaaagctgaaaacatcctatcatgtattctctaaaaggaggaagagaaggaggaaagaaaatataatgttattgtgttctgaatcacactccgctagtttgggaggtaacaataatgagcaggctcagaattcctaggacttagatattgcttctaaagaaataaaagttatcaatagtaagtttacagtgtaaagatattcaagagctactaaatccatttgttccatactgaacctacagtttttaaaccaagaaatcagtaagtgagaagtccacatttgctaactaagtgctaaatacttaaatgaaagaaatggatagtttgttagcaaagagtgcttagtgcctccttaatatctgctacataggattaactgtaaaatgggaaacaaaagaataaaattgtgatctatgaaagtgcattagatgctattacactctgtaatttggaaatatgatccaagtaatattaatgaacagattaatatcaacaagggaactgtatcaatggtttaaattctttgattatcatttttattggagaattattaattcaggatgggcccacaattcattaggaccacagctataatggagaaccaaacttagatttcactgtgcccttattatgcttatgcttctaaatgaattctccaggaactaagaataactttaggcaactgtagatggggtaaccctctggatgttttaagttatacattggcaaccgtttgttgctcttgttttaatagacctatagtgatagattaagcacaggaatactttgaactattgtcttttttttgttatttgtagattgaattttcttttttaacacaccattgctggcttcaaagaattaactggcccagcatggtggctcacgcctgtaatcccagcactttgggaggccgaggcggatggatcacaaagtcaggagatcgagaccatcctggctaacacagtgaaaccccgtctctactaaaaatacaaaaaaattagccgggcatggtagcgggcgcctgtagtcccagctactcgggaggctgaggcaggaaaatggtgtgaacctgggaagcagagcttgcagtgagcagagatcgcacaactgcactccagcctaggtgacaaagcgagactccatctgaaaaagaaaaacaaaactttgcctcgttcataatcatgtataatataatcagtagaagggaacataattaaatattttcattacttttcattcttacatcttattctgttccatatcctgtcagttttcattcttccccaaaacatagataattctttttattagtttcttgtgtatcttttcagagtttcgctatgcttgtacaggcaaactggatacatatgtttgtgtgtatatgtatatacacatacatattattttttacttttaccctttttatacaaaaggtagcacgtcatatgcatttttttgtatttttttttaacagaaaaatcttcctatctcattatttaggaagcttctcacatttttgtttttgttatagctacagggtattccaccgaatgggtatatcacagtgtatttgagcagcctcctattgaggaacatttaattttcttcagtacttttctattaccaaagaaatgctgtaatgaata

SEQ ID NO: 712547 - DNA, 598 bp, Homo sapiens
gtaatgggggagacgttaagaccatgtttctaagaaagaattatggtagttaaaattttggaaacaaatgtgagaatttgtatacattgttgttacatcggtggctataataataagccctattttttttatttctataagtgataaatctttaaatacaggtagtaattgaatatttttattcaaattggtaacttgagttttatgacttagtgtagtttgagaacttgatcgtcatgacatttgttagataattcacattattttacctaatttaaawatttcttcttcaagtgggttcatataatggcatttgtggtttttaataaataatattgaagaatatcataggtgacattctcaatcattctgcatattttgagattgcttgagttaaaaccaaaaatcttgtattcaagatggaaataggtattttgatttattttcaaattagagatttaaaggatatagttatctagaaattagaaatttcacagatgaaaccaatatatatatatttttttgagacggagtttcgcctttgttgcccatgctagagtgcaatggtgtgaacttggctcactgcaacttccgcatc

SEQ ID NO: 712548 - DNA, 593 bp, Homo sapiens
ctttaatcaactaaaatgtgctctatgcccactctattagtgaaaatgctcttcctaaaatcaccaatgaccgtctggtcttcagaagcaaaaggtaatttttaatgccttcaatttttttttaaatttaatttctggaatacatgtgcaggatgtgcaggtttgttacataggtaaaagtgtgccatggtggtttgctgcacctatcaacccaccacctaggtattaagcccagcacacattagctgtttttcctgatactctccctctctttatccccaccccccacaacaggccccagtgtgtgttttacccctctctgagtctatgagttcacattgttcagctcccacttataagtgagaacatgcagcgtttggttttctgttcctgcattagtttgctgaggataatggcttccagctccatccatgtccctgcaaaggacattatcscattcctttttatggctgcatagtattccatggtgtatgtgtaccacattttatccagtctatcgttgatgggcatttgggttgattctatgtctttgctattgtgaatagcgctgcaatgaacatacacgtgcatgt

SEQ ID NO: 712549 - DNA, 986 bp, Homo sapiens
tgagtgtttactagaagtcctcaaaacaagagtccaaattggatgttcctaatgtccaggtgtctgtcctccatgtggtgcttctgtacctctgtcctgctcaagtacttcatcatgttgtgcaaccggggtccagaagagaaaagaaagcatgaaggagcatctgtgcctaatataagctttggcccagaagtggcacatgtcagttctttaattttattgctgaaattttagattccaattgtgtgctcaggaagaagggtgaatatactttttggcacagtttgctgcctctgagacacacacacacgtacacatgtacacacacacacatattacattggcaaaattttcttaggaatgaatacaacggcttactaaggggacttgagtaagtaatctagagtccaaattctacttcttcttacttggggcagagagagtggtgctcatctaacctttcacaatttctccatattttgcagactccgtgaggttacagatggtcttgttccagccaatggctgtaagaagatgatccatgatataaatgtcagcagattctctagtgctatggagtctgaggtggtcacatgttccagaacccgaagcttccagacgggggagcttctatcagccaaggtctcttagtgaccacatgtgggcaatgagggacaggtggtttgaggggtaaagaatatttttgagtattaggatacatataatcaaggagttatctgttaacacagyagaacatagcctattatattacatgtcattcgtatttttctagtttcctcctctataaaatataataataatacaaataccagatcacagggtccttgtgaagatgaaattacctaatgcacataaaacacaaattacattgcctgcttggaatatgataattacttaatacattgttaattatttatatcattttagaagttagaaaaatgttaatggggcatctttaagtcata

SEQ ID NO: 712550 - DNA, 620 bp, Homo sapiens
ggtagtggctaatgatgctacaaaacaccgtaaaatacacatgacagctttttactacaaaaacatattcagcctcaaatgtcaattgtattaaggttgagaaatcttgttctagaaactactataataaaaatacttaaaaatatagcttctcaagcaacatagcaattttactttcttaaggtaactttccaaggtggttagggataagcagacatttcttgagctcatccaaggacctaatagagcaaaaatgtctctgtcattatctgtacttgattttcatctctaggagcaggaggatcaattcagtcgttgacattttccaacctactgtgcagggaaargggaattcagagaaaacatcgtcttcttaaagaggagcactggaagtcacagatatcaattttgtttatatcatctcagcctgcacttcataatatgatcacatctaagtgaaagggaacctggacaataatgttctataactgagtcatcatgggccccattaaaactgttactgaaaggaagaataacaaagggtgaagttaagacaatatcaaaaagaagaacctatgacaatttcacaataccccagtagatccatggagaaaatgctt

SEQ ID NO: 712551 - DNA, 620 bp, Homo sapiens
ggtagtggctaatgatgctacaaaacaccgtaaaatacacatgacagctttttactacaaaaacatattcagcctcaaatgtcaattgtattaaggttgagaaatcttgttctagaaactactataataaaaatacttaaaaatatagcttctcaagcaacatagcaattttactttcttaaggtaactttccaaggtggttagggataagcagacatttcttgagctcatccaaggacctaatagagcaaaaatgtctctgtcattatctgtacttgattttcatctctaggagcaggaggatcaattcagtcgttgacattttccaacctactgtgcagggaaaggggaattcagagaaaacatcgtcttcttaaagaggagcactggaagtcacagatatcaattttgtttatatcatctcagcctgcacttcataatatgatcacatctaagtgaaagggaacctggacaataatgttctataaytgagtcatcatgggccccattaaaactgttactgaaaggaagaataacaaagggtgaagttaagacaatatcaaaaagaagaacctatgacaatttcacaataccccagtagatccatggagaaaatgctt

SEQ ID NO: 712552 - DNA, 655 bp, Homo sapiens
acccatggatatggaaggccaattgtagatctctctggcttggaaggctcctctccactcacttttatatttgaagggttatttgaactcctcctcctccttcaagacgcaactcagtcctccgctctcatcagggaagcctcacagtcctttccccagcatgcatatatgcatgccacacacaccagaaacagtcagggttggggctcctccttgatgctctcaaaacctccatgttaactctttgtcttggcacttgttacacttcctatcgtggcgtgattatttctctgctttcttcattggtttagaagttccttgagagttgggactgcatcttaccctcaatgttcaatacagagcctgatatataattaaatgagtattctgattcactacaaacatgctctttattaggaatttcaagatgctatgaagaaaagtatttggatttcacacaacctctagaaatataaaaattatgaatgaataaacaaataaataaacaccagaacctaaatagttcctcttgtaagtgagttagaccaccattaggtctaaagatatagagatctagacacaatgtggaataaacagtgcagagcatggactaaatttcagcccccawtcaccaccttcccctggagcccttgtg

SEQ ID NO: 712553 - DNA, 582 bp, Homo sapiens
tctcatatcataagccttattgtttcccctatacaggctggatttgtgactctaggggcttggagctggaagctggccatgttctcacactcctcctcctctaatacacgagggacatggtccaagggaaccagaactgagaatgaggacttgacagaaggaatatgcttgtggccaagacacacttgctctattagagagctggaggggcaattatactgaatcccagctggagttgccaactcacctggagacaggcttagggagccaggaaggaaccctactgtttgttatcaaaggtggttgatttagagacccagaggtggyagctgtgtgatttggccttttggtctttttattccttttcatctaggaataaaaagtttggcagatactactatatattccacttattttgtcttcagcatatcttacaagctactaaattactctctatataatatgtctcatgaatcctttccatattcacatggcagtttatttacttaccatctatacataatattttatttcatcctggtttgttttcctgttttctgtagtagaattgcattttctcaa

SEQ ID NO: 712554 - DNA, 582 bp, Homo sapiens
tctcatatcataagccttattgtttcccctatacaggctggatttgtgactctaggggcttggagctggaagctggccatgttctcacactcctcctcctctaatacacgagggacatggtccaagggaaccagaactgagaatgaggacttgacagaaggaatatgcttgtggccaagacacacttgctctattagagagctggaggggcaattatactgaatcccagctggagttgccaactcacctggagacaggcttagggagccaggaaggaaccctactgtttgttatcaaaggtggttgatttagagacccagaggtggcagctgtgtgatttggccttttggtctttttattccttttcatctaggaataaaaagtttggcagatactactatatattccacttattttgtcttcagcatatcttacaagctactaaattactctctatataatatgtctcatgaatcctttccatattcacatggcagtttatttacttaccatctatacataatattttatttcatcctggtttgttttcctgttttctgtagtagaaytgcattttctcaa

SEQ ID NO: 712555 - DNA, 621 bp, Homo sapiens
tttaagtttttatctgtagagcagtgaaggggaacggtaatcttgtaacagggtctatgtaatttggaggcaataggcaaacaactatgaggaatggatcacagagcatctaacataatgattaatgctgggtgtgctgcaagcttgctttattttcatttctccccgtcccttcttccctgattgaatttataaagtttacaggagcagtttcactcatggtaactatatcttggttttgaattagactgtcagtatagacaggaaatacggcactgctcacagttgatgcttcataaatattttgggggaaaaagttcttacacattactcctcctgatctccgaaatttgagtttgaaataacttaagtaaaacctttgaacattgttatttaccagctgcaaaagtttaaaatatgaaatttacctcagtacaacccctcttgaatgatttaattttatactttaaaagctacatttcatmctatctgttttttggcaaaaagtaattgaagccaactattcttttctttttcataatcccacatgtacagttcttaattaagcacaattaaaatcagctttttctgtcttattttgtattctcattccatatgcta

SEQ ID NO: 712556 - DNA, 1292 bp, Homo sapiens
cttcttccatatactagaggtttggtctaggtcaagggtttggtctaggtcaggggtgtggcttaggtcaggcctgctgctcccctttcttggtgctacagcctagaagatgggagctcagtctcaaatccatctccctgactgattaaaactaggggtttatacatcagggaagaaatgtaacaatgtgtaaaaaaacaggaactagggaggggcaaaggaagcaatcataatgaatgaggggttgtcatctggtgctgtgatccattgagtttcagttctttgatactttttccagaggcctgaaggttgtttcctgaggaaggaactcagataaaacaaatataaatttcaagctttaagatcaggagggtcaatttctatgtttatcaaaaagaaccatctttgggactattggattggtttcaaaaacaacctaaacttctatcaatacataaaaggataaacaaattgtggtatatccatacaatggagtgtgactcagcaataaaaaggaactattgatatgcacaatgacatggatgaacctcaagatattaatgctgaatgaagcaagtcagttctacaaataaataagcaagcaagcaaacacagactacacattgtattatccaattttataagattctagaaaataaaagcaaatactgtatatagtaacataaagcagaacagtgattgcatggggatgataggattacaggggtagtgggaggaagggtttacaaaggggcacaagaaacttttggaagtgatggatatagtcatcttgattgtggtgatggtttcagaggggtacatatgtcaaaattcatcaaatttacactttaaacgtgaaatttactgtatgtcagttatacttcaataaagctgtttcaaaaagctataatgagatatagttcacctcagactggcatatatactgcatgtattattacgtattatatatgtgtgtatatatatatatatatatatawaaaaaactgcgtggcaagtttgtaaagaaaaaacactcatattgttgctggaaatgtaaataggtacaacttcaatggagggctaattgataatatcaaaatattggaatttaaaatctagatatacttgcaggtgtataaaatgaggaatggtttgagatatttgtaagagaaagagatgagaagccatctgaatgtccatcactgggacattggtcaaatacattaaagctaaacaatggaatatttttttaaacagggtaacactgttttaatatggaatgcaccgagata

SEQ ID NO: 712557 - DNA, 660 bp, Homo sapiens
atacatacatacatacctgttttaaaatagagaatgttttaacacagaatatattaccataacagcaagacttatgaccttccttgggtttgaagtatgaaatactaacacagaagtgtaaaaatggaaagaaaaacatttatttgaatgctaatatatatattaaatatatattaawtatatatattaaaatacatatttttacttattaagtactgttgcaaaaataaatatttgtcaattaaaattaaaacgcttacagtaaaaattctcaaagctattaaaatatatttaatgtcaaataggtaattaattttctttttttttattatactttaaattttagggtacatgtgcacaacgtgcaggttagttatatatgtttacatgtgccatgttggtgtgctgcacccatcaactcgtcatttaacattaggtgtatctcctaatgctatccctccccactcccccaccctaaaacaggtcccgatgtgtgctgttccccttcctgtgtccatgtgttctcattgttcaattcccacctatgagtgagaacatgcgatgtttgttttttttgtccttgcgatagtttgctgagaatgatggtttccagcttcatccatgtccctacaaaggacatgaactcatcattttttatgg

SEQ ID NO: 712558 - DNA, 660 bp, Homo sapiens
atacatacatacatacctgttttaaaatagagaatgttttaacacagaatatattaccataacagcaagacttatgaccttccttgggtttgaagtatgaaatactaacacagaagtgtaaaaatggaaagaaaaacatttatttgaatgctaatatatatattaaatatatattaaatatatatattaaaatacatatttttacttattaagtactgttgcaaaaataaatatttgtcaattaaaattaaaacgcttacagtaaaaattctcaaagctattaaaatatatttaatgtcaaataggtaattaattttctttttttttattatactttaarttttagggtacatgtgcacaacgtgcaggttagttatatatgtttacatgtgccatgttggtgtgctgcacccatcaactcgtcatttaacattaggtgtatctcctaatgctatccctccccactcccccaccctaaaacaggtcccgatgtgtgctgttccccttcctgtgtccatgtgttctcattgttcaattcccacctatgagtgagaacatgcgatgtttgttttttttgtccttgcgatagtttgctgagaatgatggtttccagcttcatccatgtccctacaaaggacatgaactcatcattttttatgg

SEQ ID NO: 712559 - DNA, 660 bp, Homo sapiens
atacatacatacatacctgttttaaaatagagaatgttttaacacagaatatattaccataacagcaagacttatgaccttccttgggtttgaagtatgaaatactaacacagaagtgtaaaaatggaaagaaaaacatttatttgaatgctaatatatatattaaatatatattaaatatatatattaaaatacatatttttacttattaagtactgttgcaaaaataaatatttgtcaattaaaattaaaacgcttacagtaaaaattctcaaagctattaaaatatatttaatgtcaaataggtaattaattttctttttttttattatactttaaattttagggtacatgtgcacaacgtgcaggttagttatatatgtttacatgtgccatgttggtgtgctgcacccatcaactcgtcatttaacattaggtgtatctcctaatgctatccctccccactcccccaccctaaaacaggtccygatgtgtgctgttccccttcctgtgtccatgtgttctcattgttcaattcccacctatgagtgagaacatgcgatgtttgttttttttgtccttgcgatagtttgctgagaatgatggtttccagcttcatccatgtccctacaaaggacatgaactcatcattttttatgg

SEQ ID NO: 712560 - DNA, 660 bp, Homo sapiens
atacatacatacatacctgttttaaaatagagaatgttttaacacagaatatattaccataacagcaagacttatgaccttccttgggtttgaagtatgaaatactaacacagaagtgtaaaaatggaaagaaaaacatttatttgaatgctaatatatatattaaatatatattaaatatatatattaaaatacatatttttacttattaagtactgttgcaaaaataaatatttgtcaattaaaattaaaacgcttacagtaaaaattctcaaagctattaaaatatatttaatgtcaaataggtaattaattttctttttttttattatactttaaattttagggtacatgtgcacaacgtgcaggttagttatatatgtttacatgtgccatgttggtgtgctgcacccatcaactcgtcatttaacattaggtgtatctcctaatgctatccctccccactcccccaccctaaaacaggtcccgatgtgtgctgttccccttcctgtgtccatgtgttctcattgttcaattcccacctatgagtgagaacatgcgatgtttgttttttttgtccttgcgatagtttgctgagaatgatggtttcyagcttcatccatgtccctacaaaggacatgaactcatcattttttatgg

SEQ ID NO: 712561 - DNA, 606 bp, Homo sapiens
tgctgggatgtgacttgggattattgaaagcttctcatgtgattctaatgtggtaaccaaggttgagaatgcttgctctgaagtacagattcttctttaaacaccatttgattttatcatttaattgaatcataatttgtgagcattatatttgttgactgataacttgttttatctgtccctctcagaagaatgtagrctctgtcaaggcacaaaccatttctatcttattcgcttttgtatcctcggagcctggtatagtgctggataaatgaaaataagtaatattgtttgtctttgaaaacagttcattaccaaggagaagtacaggcttcagttttcctaggcagcatttagcacttttactggaatagtaatttacttaaaatgtgagggtgatagcaatttctgtggataagtgaccacataagagagtcaagtggaggaggagatggggaggaagagaaagaacaggtcagtggcgtggagctgtgctcctgaggggagcgttctttacatgaggaattttcagaatgataagttggcttttctttggcttaaaatgacattttaaacttcaatctaatttttgattcaaacttaaag

SEQ ID NO: 712562 - DNA, 943 bp, Homo sapiens
tggaatttaaaaataaaaacacaataccattactctagtaccaaaaaagagagaaacacttagatataaatctatcaaaatatgtgtaaggcctgtatgaggaaaactacaaacctcaaatgaaggaaataaaagaagactgaaataaataaataaataaataaattaattaatagatatcccataaccatggatagttagactcaatattgtcaaactgtcatttctttccaacttgatgtatagattcaaagcaatctcaaaacaaattccaataatttagtttgtggatattgacaaattacttctaaggtttatatgaaatgacaaaagacccagaatagccaacacaatattgtaggagaaaaacaaaattggaagactgacacaaaagtaaacatacttttataatatgattcagcaatatgatccagtttttacctgacatcaaggctgactataaagctacagtawtcaagatatagaatagaattgacaaaagaatagacaaatagatctatggaacagaatagagagcctagaaatagacccacgtaagtatagtaaacttctttgacaacagaacaaaggtaatgtaatggagtaaagatagtcttttcagcagattgtggtgttcttctcaaacatacatggcacaatctccaggacaggtcacctgttggggcacaaaacaagccttaaatttaagaagactggaattgtatcgaatatattttctgattatcatggtttgaaactagaaatcaataacaggaggaatttcaaaaaattcacaaatgggtggaaattaaacaacactctcctgaacaatcagtgcatcaatgaagaatttaaaggggaaataaaaaacatcttaagacaaacaaaaatggaaacacaacataccaaaagcttatgaaatacagcaaaagcagtaagatca

SEQ ID NO: 712563 - DNA, 943 bp, Homo sapiens
tggaatttaaaaataaaaacacaataccattactctagtaccaaaaaagagagaaacacttagatataaatctatcaaaatatgtgtaaggcctgtatgaggaaaactacaaacctcaaatgaaggaaataaaagaagactgaaataaataaataaataaataaattaattaatagatatcccataaccatggatagttagactcaatattgtcaaactgtcatttctttccaacttgatgtatagattcaaagcaatctcaaaacaaattccaataatttagtttgtggatattgacaaattacttctaaggtttatatgaaatgacaaaagacccagaatagccaacacaatattgtaggagaaaaacaaaattggaagactgacacaaaagtaaacatacttttataatatgattcagcaatatgatccagtttttacctgacatcaaggctgactataaagctacagtattcaagatatagaatagaattgacaaaagaatagacaaatagatctatggaacagaatagagagcctagaaataracccacgtaagtatagtaaacttctttgacaacagaacaaaggtaatgtaatggagtaaagatagtcttttcagcagattgtggtgttcttctcaaacatacatggcacaatctccaggacaggtcacctgttggggcacaaaacaagccttaaatttaagaagactggaattgtatcgaatatattttctgattatcatggtttgaaactagaaatcaataacaggaggaatttcaaaaaattcacaaatgggtggaaattaaacaacactctcctgaacaatcagtgcatcaatgaagaatttaaaggggaaataaaaaacatcttaagacaaacaaaaatggaaacacaacataccaaaagcttatgaaatacagcaaaagcagtaagatca

SEQ ID NO: 712564 - DNA, 943 bp, Homo sapiens
tggaatttaaaaataaaaacacaataccattactctagtaccaaaaaagagagaaacacttagatataaatctatcaaaatatgtgtaaggcctgtatgaggaaaactacaaacctcaaatgaaggaaataaaagaagactgaaataaataaataaataaataaattaattaatagatatcccataaccatggatagttagactcaatattgtcaaactgtcatttctttccaacttgatgtatagattcaaagcaatctcaaaacaaattccaataatttagtttgtggatattgacaaattacttctaaggtttatatgaaatgacaaaagacccagaatagccaacacaatattgtaggagaaaaacaaaattggaagactgacacaaaagtaaacatacttttataatatgattcagcaatatgatccagtttttacctgacatcaaggctgactataaagctacagtattcaagatatagaatagaattgacaaaagaatagacaaatagatctatggaacagaatagagagcctagaaatagacccacgtaagtatagtaaacttctttgacaacagaacaaaggtaatgtaatggagtaaagatagtcttttcagcarattgtggtgttcttctcaaacatacatggcacaatctccaggacaggtcacctgttggggcacaaaacaagccttaaatttaagaagactggaattgtatcgaatatattttctgattatcatggtttgaaactagaaatcaataacaggaggaatttcaaaaaattcacaaatgggtggaaattaaacaacactctcctgaacaatcagtgcatcaatgaagaatttaaaggggaaataaaaaacatcttaagacaaacaaaaatggaaacacaacataccaaaagcttatgaaatacagcaaaagcagtaagatca

SEQ ID NO: 712565 - DNA, 943 bp, Homo sapiens
tggaatttaaaaataaaaacacaataccattactctagtaccaaaaaagagagaaacacttagatataaatctatcaaaatatgtgtaaggcctgtatgaggaaaactacaaacctcaaatgaaggaaataaaagaagactgaaataaataaataaataaataaattaattaatagatatcccataaccatggatagttagactcaatattgtcaaactgtcatttctttccaacttgatgtatagattcaaagcaatctcaaaacaaattccaataatttagtttgtggatattgacaaattacttctaaggtttatatgaaatgacaaaagacccagaatagccaacacaatattgtaggagaaaaacaaaattggaagactgacacaaaagtaaacatacttttataatatgattcagcaatatgatccagtttttacctgacatcaaggctgactataaagctacagtattcaagatatagaatagaattgacaaaagaatagacaaatagatctatggaacagaatagagagcctagaaatagacccacgtaagtatagtaaacttctttgacaacagaacaaaggtaatgtaatggagtaaagatagtcttttcagcagattgtggygttcttctcaaacatacatggcacaatctccaggacaggtcacctgttggggcacaaaacaagccttaaatttaagaagactggaattgtatcgaatatattttctgattatcatggtttgaaactagaaatcaataacaggaggaatttcaaaaaattcacaaatgggtggaaattaaacaacactctcctgaacaatcagtgcatcaatgaagaatttaaaggggaaataaaaaacatcttaagacaaacaaaaatggaaacacaacataccaaaagcttatgaaatacagcaaaagcagtaagatca

SEQ ID NO: 712566 - DNA, 943 bp, Homo sapiens
tggaatttaaaaataaaaacacaataccattactctagtaccaaaaaagagagaaacacttagatataaatctatcaaaatatgtgtaaggcctgtatgaggaaaactacaaacctcaaatgaaggaaataaaagaagactgaaataaataaataaataaataaattaattaatagatatcccataaccatggatagttagactcaatattgtcaaactgtcatttctttccaacttgatgtatagattcaaagcaatctcaaaacaaattccaataatttagtttgtggatattgacaaattacttctaaggtttatatgaaatgacaaaagacccagaatagccaacacaatattgtaggagaaaaacaaaattggaagactgacacaaaagtaaacatacttttataatatgattcagcaatatgatccagtttttacctgacatcaaggctgactataaagctacagtattcaagatatagaatagaattgacaaaagaatagacaaatagatctatggaacagaatagagagcctagaaatagacccacgtaagtatagtaaacttctttgacaacagaacaaaggtaatgtaatggagtaaagatagtcttttcagcagattgtggtgttcttctcaaacatacatggcacaatctccaggacaggtcacytgttggggcacaaaacaagccttaaatttaagaagactggaattgtatcgaatatattttctgattatcatggtttgaaactagaaatcaataacaggaggaatttcaaaaaattcacaaatgggtggaaattaaacaacactctcctgaacaatcagtgcatcaatgaagaatttaaaggggaaataaaaaacatcttaagacaaacaaaaatggaaacacaacataccaaaagcttatgaaatacagcaaaagcagtaagatca

SEQ ID NO: 712567 - DNA, 1464 bp, Homo sapiens
ctgagtgtggtggtggatgcctgtagtcccatctactcgggaggctgaggcaggaaaatcgcttgaacctggaggcagaggttgcagtgagctgagattgtgccactgcattccagcctggtgacagagcaagactccatctcaaaaaaaaaaaaaaatactcttggtaaaatattcaaatagtactaaaagaaacacagtgaacagttaagtcttcttccaacttctgtcccctaaaatcctctcccaggggcagcaggtracattagtttctcatgtagcctttcaggggtacattacgcatatacaaatgatgcatatatagggactctctctttttaaaacacaaatttagcatactttacacattgttctgcatattctttttcaactttaacatatatcacagatagtgtgacttatcattacatgcctcattattttaaaggcatgtatttaattttatggatagacatactttacataatcagttccatactgatgggcatttaagttgtctccaatcttttgctattacaagcactcattaaataaatatcctgggacatacttctctgtgcatttgtgaatgtatctgtgggatacatcacaaagatagaattgctgggctatgcgtgtgtgcatttgtaatattaagagatacggcaaaatgtcttgtggaaaaattatatcaacttacattctcaaaactgaaggataagtttgctgtttcccacatctctaccaatagggtctagtatctttctcaaaatcttttacctatgtgggggataaaaaaagtaatctcttgtcattgttttattttgaaatacagttattatgagaatagttgtccatctcttcatgtgtttcatatcactgttaaagttaacagtgatggccataagattatgtcttgcagacctccaactacaaggggcacaactgaccaagagtcctagttgctgtcctctgctccctgcccattactgagcatggcagagatattaggcaggcccattcctgagagacacaagactcctcagagggttacattggctcaagggtcctcaacaacctcgcagaagtttccttagactgtacccttggtctgaaatgcttttactcaatgttccttccctctctctttcacttagggtcagatttgcatcgtggtctaagaaccttcccagcctttaacagattcctccccatttcctctcaattccccttgcacatttaatcccctattggcatctatttctcactagacccagactaacaacacattagctgttctttgctcatcattttattgtcccattgcatgtttccttgttgatttataggcattcctaatataataatgattgggaccttttctgtcacatgtgttgcaattatctttccttagtcggtttaaatctttggcttactttgtgatgtccttcccatttagaaaca

SEQ ID NO: 712568 - DNA, 1464 bp, Homo sapiens
ctgagtgtggtggtggatgcctgtagtcccatctactcgggaggctgaggcaggaaaatcgcttgaacctggaggcagaggttgcagtgagctgagattgtgccactgcattccagcctggtgacagagcaagactccatctcaaaaaaaaaaaaaaatactcttggtaaaatattcaaatagtactaaaagaaacacagtgaacagttaagtcttcttccaacttctgtcccctaaaatcctctcccaggggcagcaggtaacattagtttctcatgtagcctttcaggggtacaytacgcatatacaaatgatgcatatatagggactctctctttttaaaacacaaatttagcatactttacacattgttctgcatattctttttcaactttaacatatatcacagatagtgtgacttatcattacatgcctcattattttaaaggcatgtatttaattttatggatagacatactttacataatcagttccatactgatgggcatttaagttgtctccaatcttttgctattacaagcactcattaaataaatatcctgggacatacttctctgtgcatttgtgaatgtatctgtgggatacatcacaaagatagaattgctgggctatgcgtgtgtgcatttgtaatattaagagatacggcaaaatgtcttgtggaaaaattatatcaacttacattctcaaaactgaaggataagtttgctgtttcccacatctctaccaatagggtctagtatctttctcaaaatcttttacctatgtgggggataaaaaaagtaatctcttgtcattgttttattttgaaatacagttattatgagaatagttgtccatctcttcatgtgtttcatatcactgttaaagttaacagtgatggccataagattatgtcttgcagacctccaactacaaggggcacaactgaccaagagtcctagttgctgtcctctgctccctgcccattactgagcatggcagagatattaggcaggcccattcctgagagacacaagactcctcagagggttacattggctcaagggtcctcaacaacctcgcagaagtttccttagactgtacccttggtctgaaatgcttttactcaatgttccttccctctctctttcacttagggtcagatttgcatcgtggtctaagaaccttcccagcctttaacagattcctccccatttcctctcaattccccttgcacatttaatcccctattggcatctatttctcactagacccagactaacaacacattagctgttctttgctcatcattttattgtcccattgcatgtttccttgttgatttataggcattcctaatataataatgattgggaccttttctgtcacatgtgttgcaattatctttccttagtcggtttaaatctttggcttactttgtgatgtccttcccatttagaaaca

SEQ ID NO: 712569 - DNA, 1124 bp, Homo sapiens
cagaattctagagtctggcattgtggccacgctgtcaacacttctgtcgtggccactgagcacttccggcagtgcagtcacattgagaagccaccagcaggccgtgtagttattcctggggcctgataccacaacctcatggccactttaataacagcaaaggaatcaagcaacgtctttagtcagttatttcatcagtagcactcttctggaaaatcaagatgccactctcctctttccctgtggccacaagtgtctgtagcaattagggaaacatagaaatggacccctgcccttaagccgttttactgccagaggtttggaggtggggtggagggaggtgtgggaacctcacttatctaatgtcattctcaaccctatcttccagctcatccagacaggaaagggggaagccatccgcatcaggtccatcctgcgctccctggtccccacagaagacctggttgggatcatcagcatccccttgaaactgccctccctcaacaaaggtaaggggagtgactgcaggctgcagcagcagtctcccagcagccactggctcggggcaggactctgtccccagcacagtggcccccaggccctgacttgcagggcgggctgcacagggcaagtgtctcactctttttcctgtgatgagttttctcctctaggctctagccagctgctctcttgtcttctcaagaagcaatctcaaaacaataaatcgactcctgattcctagcatttgcccatttctgtggtataaactttctcaccatgaccaatttcaagccaccaatgtaatgtcactgaacacagagttgggaagaraatggacatggcacaccattagattgtattcccaaccacacaaatacaactgatgcaaaaaacctcaagagtatagttcatagtgaaataatttggaagtaatgacttcaatctgctctcttgtctgtgtcaggacaattgtaccctgtgtcccacagggtacagacagaccttgctgtcctcctatgagcatgccaaccctctgagggaggctgatggaatgggacaagcgaaagctctcaccacggcctcccttctcgttttcccctgggtcccccagcttgtgtaggcag

SEQ ID NO: 712570 - DNA, 622 bp, Homo sapiens
tgagtttacaagttcgtgttgagaagtcagatggtttgtttcaaggaagcccaaattatattgaaaaaatctacacaaacctattaacaaaaagggatttttttcctctttgctgattcctcatcctggttctgccacttactggtttgtaacctagagcaatmtgtttaatgtgcctgtgttccagttttttcatcagtaaaaggggtaggacctatgccatagggtggtagtaaagattgagaggttggatacaggcatacctcattttattgcagttggtattattgtgcttcacagatgctgtgtgttttacaaatcgaaggtttgtggtaaccctgcatcaagcaagtctatctgtgccgttttaccaacagcatttactcacttggtgtctctgtcacattttgatgattctcacaatatttccaacttttcactattatatctattatggtgatctgtgatcagtgatcttcgatgttactattgtaattgttttggggtgccatgaactatgcccttgtaagacagcaaacttaatgttgcatgtgttctcaccattccaccaactgttcctccatctccctccttctcctcaggccttcctattccctgagac

SEQ ID NO: 712571 - DNA, 622 bp, Homo sapiens
tgagtttacaagttcgtgttgagaagtcagatggtttgtttcaaggaagcccaaattatattgaaaaaatctacacaaacctattaacaaaaagggatttttttcctctttgctgattcctcatcctggttctgccacttactggtttgtaacctagagcaatatgtttaatgtgcctgtgttccagttttttcatcagtaaaaggggtaggacctatgccatagggtggtagtaaagattgagaggttggatacaggcatacctcattttattgcagttggtattattgtgcttcacagatgctgtgtgttttacaaatcgaaggtttgtggtaaccctgcatcaagcaagtctatctgtgccgttttaccaacagcatttactcacttggtgtctctgtcacattttgatgattctcacaatatttccaacttttcactattatatctattatggtgatctgtgatcagtgatcttcratgttactattgtaattgttttggggtgccatgaactatgcccttgtaagacagcaaacttaatgttgcatgtgttctcaccattccaccaactgttcctccatctccctccttctcctcaggccttcctattccctgagac

SEQ ID NO: 712572 - DNA, 648 bp, Homo sapiens
agacctggtatctctgcacttcttcacagggtccctggctcctgtcagagcaaagaggtcatagagatgcaggattatcatgtacccttcccaaacaccgagtttagcttcactgactgaagtctgagaaatactaagctctactcatttgtttttaggaatcaatcagtgatttctactggtattattcagggaaggacatcattgatgaatctggacagcacaatttttccaaagctctggcagtcaccaagcagattttcaattctcttacagaatacatccaggtatgtgctacagagtgcatggttgaaaacaaagagaacattgttgatatgcctgtattctatattccctacagaatacttgattgtacacagtgcactatccatccagccctaatgctgacaatttttattttctctaaataggaagcaatagtacctgcattccacaagcagctatagtttggggtccccccactggacctgtttataatgttcacactttatttgcatttatctagytacattttgctttccctcttaaactaaaaatttttcatggaaagaaaatgtcttactcaaaactctttatatctagaaaaatgtctggcatatatctgttcagtaagcatggagagtggag

SEQ ID NO: 712573 - DNA, 666 bp, Homo sapiens
cagctcaaagacgctctgggcagagaagtgactggrccttcacaaggtactcaatggaggccaacctgcaatcaggagggtgatgcctgatcctaaccagtgagtactgggatggtcaggagcactcaaatctgtgttagctcaggtacatcagaaagtggagcctgaggcaagggttaagtgcagacccttcactcaggggctgcaagcccagggcaatgacagtgtagagaaaatgggaagggagacagggaccaatgtgatatgcagggtcaaaatgctggccatctccttgcaacaagcaacagagcacagcctgaagtgcagcagacagggcttcctagcactcaggacttctctagaaagcttgcaaggcttgcacagcacaaagccatccacaagagaaagaggagggaaaacgtatcctcttaggtcccctccagactctcatttaccactggctaagtgtcccccataagaaggtaactccccggcattctcaggttgcattggcatggtcctttagcagtcacacagaaatcccagtcccaggggtcaatatgtgacatcttagctgagtccagggcataagaggcaactcagtgtaggtggagccaagagtcccaaacagacctgagaggcatgcaagtctgtgtccaatccagg

SEQ ID NO: 712574 - DNA, 666 bp, Homo sapiens
cagctcaaagacgctctgggcagagaagtgactggaccttcayaaggtactcaatggaggccaacctgcaatcaggagggtgatgcctgatcctaaccagtgagtactgggatggtcaggagcactcaaatctgtgttagctcaggtacatcagaaagtggagcctgaggcaagggttaagtgcagacccttcactcaggggctgcaagcccagggcaatgacagtgtagagaaaatgggaagggagacagggaccaatgtgatatgcagggtcaaaatgctggccatctccttgcaacaagcaacagagcacagcctgaagtgcagcagacagggcttcctagcactcaggacttctctagaaagcttgcaaggcttgcacagcacaaagccatccacaagagaaagaggagggaaaacgtatcctcttaggtcccctccagactctcatttaccactggctaagtgtcccccataagaaggtaactccccggcattctcaggttgcattggcatggtcctttagcagtcacacagaaatcccagtcccaggggtcaatatgtgacatcttagctgagtccagggcataagaggcaactcagtgtaggtggagccaagagtcccaaacagacctgagaggcatgcaagtctgtgtccaatccagg

SEQ ID NO: 712575 - DNA, 666 bp, Homo sapiens
cagctcaaagacgctctgggcagagaagtgactggaccttcacaaggtactcaatggaggccaacctgcaatcaggagggtgatgcctgatcctaaccagtgagtactgggatggtcaggagcactcaaatctgtgttagctcaggtacatcagaaagtggagcctgaggcaagggttaagtgcagacccttcactcaggggctgcaagcccagggcaatgacagtgtagagaaaatgggaagggagacagggaccaatgtgatatgcagggtcaaaatgctggccatctccttgcaacaagcaacagagcacagcctgaagtgcagcagacagggcttcctagcactcaggacttctctagaaagcttgcaaggcttgcacagcacaaagccatccacaagagaaagaggagggaaaacgtatcctcttaggtcccctccagactctcatttaccactggctaagtgtcccccataagaaggtaactcccckgcattctcaggttgcattggcatggtcctttagcagtcacacagaaatcccagtcccaggggtcaatatgtgacatcttagctgagtccagggcataagaggcaactcagtgtaggtggagccaagagtcccaaacagacctgagaggcatgcaagtctgtgtccaatccagg

SEQ ID NO: 712576 - DNA, 666 bp, Homo sapiens
cagctcaaagacgctctgggcagagaagtgactggaccttcacaaggtactcaatggaggccaacctgcaatcaggagggtgatgcctgatcctaaccagtgagtactgggatggtcaggagcactcaaatctgtgttagctcaggtacatcagaaagtggagcctgaggcaagggttaagtgcagacccttcactcaggggctgcaagcccagggcaatgacagtgtagagaaaatgggaagggagacagggaccaatgtgatatgcagggtcaaaatgctggccatctccttgcaacaagcaacagagcacagcctgaagtgcagcagacagggcttcctagcactcaggacttctctagaaagcttgcaaggcttgcacagcacaaagccatccacaagagaaagaggagggaaaacgtatcctcttaggtcccctccagactctcatttaccactggctaagtgtcccccataagaaggtaactccccggcattctcaggttgcattggcrtggtcctttagcagtcacacagaaatcccagtcccaggggtcaatatgtgacatcttagctgagtccagggcataagaggcaactcagtgtaggtggagccaagagtcccaaacagacctgagaggcatgcaagtctgtgtccaatccagg

SEQ ID NO: 712577 - DNA, 610 bp, Homo sapiens
ctgacaacacatgggatggtttgactgctcctgtcagtggaggatgtggaagaaaacacagggattgctgaaccactgcagaaaggagagcagtggtgctgggaaatccaacagacagcaagccagagactggcattggagatgtactgaggccagtccctgagaaggcttcaaccccaggatgaagggtgtggggctgagaccccagcatggccaccttccaccacccatagcttctggacrggggagctgcatggcactgtgtacaggtacaagagtgagagagcatgcatgcagaagtgttcagaaggcaaggcaaatgcagtgcctgcatttagtacctagaaaatgctggctggtgtgacaggaagttctcctgtatacaagggaaaactgtacaacacccctcaagtgtgaagaagcaatcatgagcctgaatttgcaggcggtctgctgttagtttacaggatcacccaaccaaaaagcagcattggtctcaggaaactagggagaagggatgttagcctactcccattacttcctccaggctcctcaagcttggtcccgataaaaacaatagtattttcctttaatataggcagttgttgct

SEQ ID NO: 712578 - DNA, 954 bp, Homo sapiens
agaaagctaaatcaagtttataaaaagctatatcttgaaaaattaaacatttcagggccattattcactgtctccatgcagagggctagctatgaatataagtagcataaacagaaaacccactaaataagcatattagttatacctttctgaaggctcttcaaaaacatcctcataatcattatgtgggaaattccgaagagaaagttttaccttctctgaattaactttattttcaaaaacctacagacataagaaaggaaacaaattatagcactggttttagaaaaatatggtttaaaacgtgatttctatagctacttaagaagagcaaaaagatctgcaataatggaattataaccacaatcacatagtataatgtctgctcctagaaaatcacttaattgtatatctccctattaaatatcttccaatctgtcaaaacagtgtagagtactatgtaaacagaagttatttatattgaattgctcaagtgatttttcaaaactaaatttttaaaaagcttcatttgagaaaaaatagatttattacttcagcccagaagagattttcttataagtgtttaccatgttttgtttactgtgamtataaaattcctgccactaaatttatctttactttagtacttgcaccatctaatctactaattctaagtatttctccacattccactgcccaattttgcaccgggcagtggacttcagtcttgataactcgcagtgccagtgccccagccaccacatacacgtttccttccttccttgtctaatactgtcttgccatacttggccttctattttctcaagaacatcttttgaatcagctgatcaaatctcattcacacacagaaataactttgggactattattgaaattaagtaatatgaattttttaatttaaattggaaataagtgatgtatttatatattaag

SEQ ID NO: 712579 - DNA, 1388 bp, Homo sapiens
aaaagtggttaagatggtaaattgtatgttatctatattttaccacaatatttttttaaaaaacaataattcctggaattcatctagccattaaaaataatgatcgttcagacttggtagcaacatggataaaaaggcttatgatagtgtgaagttttattaaagtggagcaaaaaatactacatataactgtaattgtttaaaacaaatccgtagaaatagcgaggaaaactggcaggaaatacatcaaagtgctaataaaggatgtgtcaggtggtacatgcttcccctagcctcccttttctatattttaaaaagtttatatgggtaaaactttcataataaattgtttctaatatttaaaaatgtttaaaacaaagcagattccttcctggccatagaggttttgtcacatagcttcacgtccctagtagacactgagagaaatttatactgaagagttattggtttttcatttttttcaacactttatatcgtttattaatgcagtatacattagatctaaaatctgcagtttctaagcacaccaygtttagatctttcagattgttctgcagttttaggttatttctacagaggtacctttaagtgaatgaataataccttctataattcctgaaaatatagtacagagtgaaatgatttaaatataatttaggcacatattgattatgaaaatagattatttctcaatacaatacttctctgtcttggtaaaaataataaagcaaagaaaataattcatttctgaagttgctttcctttacttgtaaaggtctgatctcctcccactatgcatatgtaccctttactgttaaggaaagctttgcatatgtacatatggaagaataagctacataaatactaaagatatgtcattcccccaaaggagacacaggtggctttcaatgattccttgcctcatgttgatgagtctgtagaattcagaacccatttggacacagctaatatccctgcacttggggtagaaataaggacaccaggtcattggtagggaggtacaggcccttcctctgctgctgcagaaagataatgactcaagaaaattgggctaaaatttgtttaaaaaaaaaacaaaaaatataagtaaaagaatcacaggtgctgactgattggtattacatcttggacgagccaaatgcctttatttttactttatatatattttttggtggccgtaatcaaatgtgtgtttaaaattcctcattcccaggccaggcacagtggctcatgcctgtaatctcagcactttgggaggccaagacaggctgatcacgaggtcaggagatcgagaccatcctggctaacacggtgaaaccccgtctctactaaaaatacaaaaaaat

SEQ ID NO: 712580 - DNA, 3415 bp, Homo sapiens
gatagtcatgaaatttatctttttttataactaagtttaatttatattctaatcactaactggcagtaacttaatcacagtcatttcggtgtctctctacatattttccctgagttagtggctacattctttgggacttatatagtgacatattatgaatgatatagatagaaatctgggcatttttaaaatcatctctgtaatattactttgcaagcagctagtatgtttgtgttcccaggtagtcttctgtcttggcttcatgcacatccaccttgtcttgaaaacaaggcatctacagtttcactggctctctgtgccgaggccacactgctctctgccacacagaaaagtatttctgctgctccctgagcactgcagtgaaacatggagattctggaggaatgctgmaggcccattttcctagacatcctacacatacatttctgtaggtattatatgctctggtgcagagaaattgagaagcctttcatttcctaagatctccccgaaaaagaatgcacaagatcactccactctcatagttcaccaagcccatttaggggtggaggatgttttacctctcctggactttgtagttaatagtggagaatagaagaaaagactaatagctctttttccccttctctcttctccccactactcctcaatctggaatattctttgtattgtcagtggggcaagggaaaaacctggctcttatttatcttgtatttttctaaatattttgtacaatatttggaccatgatgtttgtaactcatttttcaaaaaactgattgtctgttttctgcggtaacaaaactgccttgatccattggatgccttgtggtctaactgctggaaatgagggcagatcacaaggcaacttggacacactagaggagagagaggaatgcataatttactattagaactatcattctgctaaacgtgtatatatcacaggaaatagtcgtccatccttctatacttgtggctcttactagaaacatagctgatattcttagaaatgttataaaattgagaggaaatattatcatattagaaagttttcacacaaatacagattatctttccattcaggacagcttagttatacaacacaagtatactcatgctgggtaaagctgaattcactgaatatgcaccactacaaaaatataaactggaatgaagacatcagcttatgtctattttatttatcagctaatattatcttgataaatatgaaagaacaactcatagatgttctgtgtgtactaaaaaatgcttaggatgggtgaagagtctgtataaggaaacatttacatgtatattttcattaataaatactttaaatttaaatcttagtcttaaaaattcacctttctttactaagaagccagagaatattccttcttatctctgattttatttccaattttgaatgacatacattatttctcgaaggaagaaatacactaaagtaagtgattttaagttatttatggtcagttgctctagtttatattttatgcatacccagaaagggtatccacaatgagcactcaacctatgtgaaatggagccaagaatatagagacatgatgaaaaaggaagagaatccaggtgttgtttgaaattaatcagaaatttacaaaaacattaagaacactctttagatgggtataacatcctagactattctagttctaacatgaggagtctcaagctccatcaaacttatcacaatcatctatctctaactctattcagcaaagaagagcaataaattggggacacttctcacctggaagtgtcaagataagtcaaaatcagaataaacagaggtgtgtagagatgaagaactcttggaaaacactcagacaaatccaaatgacaaagctaacaaacaaaacttatatcccagaacactgtctcaaacaagactggtatcttttttgtagaacaaatgtttatttaacaactacaaagcagtgatttattttcatcagagtatttaccgtctcacgtatagctttgcacgtataaatctattgttttgtagcctgacagctctcagtgattctcaatggatgtgtgtatctgtgtgtgtgcatgtttggtggcatgtacacaccaagttgttgtgactctaggaactctccgtgcatctcttctacctaattctggcccaccaggttgtcgttcattgtccagtgaggtgtttttttttttctttaatggccaaaatgataattatctaagaaacgaaacattatgatttatatatattaaattaaccagtatgaaaaacaaaaaaagtttaagtatcctaagccttatttttttaagaaaaacccaactctaaattgtatgtaagactaaaattaggccaggcgcggtggctcacgcctgtaatcccagcactttgggaggccaaggggggcggatcatgaggtcaggagatcaagaccatcctggctaacacggtgaaaccccatctctactaaaaatacaaaaaattagccgggcgatgtggcaggcacctgtagtcccagctactagggaggctgaggcaggggaatggtgtgaacccaggaggtagagcttgcagtgagccaagatcacgccactgcactccagcctgggcgacagagcaagactctgtctcaaaaaaaaaaaaagacaaaaattagccacatttttttctcctcatcaaagaggataatagattaggctcaatgtgcatacttgaaacattgttaaacaaactctttaataccacgttaccctttctaagcattaaagggaattttccactgatcatcactcatgagttaatgatattctgcatgctacagctattaaattgcattttaggtagcctgtaccagagatgtccgacttgttcacccttcacatccaactccctcatctaattggcccactgagaaaacacttcttttaacccttatcttttttttccattccctgcataatgctaatggatataaatctgcctgacagcagttctgtaaaagtatacaacttgtccctaaagtgtacagccttttattggttgtctccctttgtgccagaatgacacaaattgccttctgacaaaagcaggatcaattaaactgataacagtagacttattatgtgagaacagtgagaggtaccttcaccataatgccagagttcattatacacatcctgtgactccacaaaggaacaaagacacatatcccctattaaaagcacttgctgctagtagttggctatgtagagaaagaacttaggggaatgcaccatatattctctttgaaagcaaaaatgctgatacctcactgagctgaggccaatgacagcagcctgagtaaggatagagaaaaggcagaataatacag

SEQ ID NO: 712581 - DNA, 598 bp, Homo sapiens
ggagtttcactgttgttgcccaggctggagtacaatggtgtgatctcagctcactgcaacctctgcctcccgggttcaygtgattctcctgccttggcctcccaggtagctgggattacaggcatgcaccactgcacccagctaattttgtattttattttattttttgttagtagggatggggtttcaccatgttggtcaggctggtcttgaactcctgacctcaggtcatctgcctatcttggcctccaaaagtgttaggattacaggtgtgacccaccacactcagtcaatcaaaattctagactgattcctacaaaaggaaatgaaaattctttaaagatctcaatcccagtcaaagtaaaagagaggaaagtaatataaagcaacaagaggtaatgtccttattgtcaaaaaattatacagttcgggcaaacttcatggaaagtgatagttggaaacttaaaatgctacattgtgatattttacacctgtatccaattttcataaaaattcagaaacagaagcaaattaaacttgtaagtatgatcctccctaattgaatacaatcattccaacagcattatgaccagagttg

SEQ ID NO: 712582 - DNA, 1483 bp, Homo sapiens
ataagatagagaattgtgaaaaataaaaaatgcaatagtagaattaaaatacatatccaatataatctaaatattgcaaggaattgcaaattcaaaattttttttatcattcactcttttctcttcatgaacatagcctgtttctctttctaatttcctaattaccttaattagcatttttataaactttgcagctcttaccattgtagggagattttttggttttgagaagatgctttcgtaggctgcagtaatgcaatgaaatactaaattgggagtatatgccaacacattaaaaaacctcaaataatgtttttcttgtcagtgcagagatcattttcattagtgtttaataagtaagggcataaaagacaaaaaaaattgtatgctttacttaaaaattcaacttcctaagacagaggttaacatcattttctaaatccttatctaaaccacaattctactgttcatcaaaaataacatttatccacacagagttctaactttcttatggtttcttcattcacaaatctaatctctacttatatcctctgccgtttgtttacaatttttaatctgaaatttctttagtttttctttcttttttcaacatctgtcaccaacactttggttcaaatcgctatgatttcatatacagaatactgaattaatgccctgtcttctctttttagccaatgtacccattaatctttctaaagcactaatgagattaatttttatcaaacatgtgagattgctcctaaataataggttttgtaccatcattcccaaacaaaccttcaagcctcttatgcttctcatgaaatgaatccccatggataagcttgcttggactatgtataggtccacaaaagttagcaacaatcctattccattcttgaatgatataagagaagctgctcagagcacatttcttatatttgccatacaaacataygcaagtgtcacagacacatatttggcatctctgttctctaaaacatacgtcaaattttacctttttcatgatgcctctttgagtcttcccaggtggaattaatcttatttactttgaagtccatggtacataatttctctattcctatgccatttattaaatgctaccttgcattgatatacaaaacatgaattgccttctttcttaaatattattgcagtttttccacggagaggatgctttttatgcatatattgatagaaggccgtcttgcttccatgtgaatatgctaatgctatggagatttctacaaagcatttgctgttcttggtgctagatctcaggcagctgtcccaagaagtaagagccaagttgctgactttggtcatttgcactcaactccatccccactacattttaagagctgagttcaaagaacatttcctgctgacctacagtaacaatgggaccatggaagctttatgtgcttcactgcaatatcctacttcaaggatgctgttgaca

SEQ ID NO: 712583 - DNA, 637 bp, Homo sapiens
gaattatattcatgtgatgaactcaatgattacccagttgcagtgaggagggagtattgactgtaaataagcttttggggatgataaatcttaataattgtgaccatggtacataggaatatgctttcatcaaaactcactgtacttgaaaataggtacatttttactgtacgttagcattttttaatggaatcactaggaaacctagcatgaaaatgtgaattttcagatttcttctcagttttgtttacaatagtataaagacaaaccattttaagttaaattatgttagaatcacaatggaatcatttggagacagtaacaagttaatcacaaagaaaatagattgcattggttcagcagtggcttaggagggaggtttacatcacccagtcctttctcctcctgttagcatttctcccaactatgtcacaggtagaggcatttgattatagaggcaaagttcatgtttaaagtggtattgataagttatgcaacaaaatggcacatatagtttatcttttttgtcttcctatttwgacatagtttttcatatttacacaaattcagtacacagtgaattttagcttatgtttcataatttacattactgaatgtatatgttatatttcatgca

SEQ ID NO: 712584 - DNA, 538 bp, Homo sapiens
cctcatccttcaatatagcttttacctgaaattcagttttggagagagttcctggaaacttgcccagatcaataaagttgatcctctatttgtcatttatctatctgtttgtcctgttaatctcagatggaaaggagaggtaagattcagtatctccctgcaaaagacagatatactgactggggccttgagtataaagataagagctgccacagcggagcaaggcaccatgatggaagatgagagctcctggtctctgcagctggaattcaggaacagatgaggtaggtagatatctgattaccaggaaaactttgcaaatcagacaaagctctaagacataggctttttaggcaggagcagatggaattattttagctaccactttttttttatttcagtctttcttttcttattatgtctcygcctgcaagagctttgacattgcccggaagtagctaaggtttatgtggttagagcaatgcgactcaaaatgtggactgacaatatcaataaggcctgaaagcttgctagaaat

SEQ ID NO: 712585 - DNA, 588 bp, Homo sapiens
atatgtaattgaactaaatagtaatccttgagaacttttggtaattttaaggagctacagttgagcatgctttcctcaggaaagttccagatttgtttcttcctctcattaagaggcactacacacctagaactacttcaatgtcatwtcttggttagggtttccccaaagggtggtggtgaggtagataataaaaattagagtccctggtttatctgacagcggtcctatagtgacaaagcttagggtatgggaataaaggaagaggaagaaaatgagaataatggttttctacccagaggcacagcaaagaaagacaggggctttttggtttcattatgtggactttttctagctcccctctaactgaaggtgtaacattttcaatgatcatggttttacttggtaagttcctgatcggtttctcttttcctcactagcctccatttatttaagccctcgtaccccaatatgcatgtggccattactctcaggtgatagttaaatgtcttccataattctcatgcccatcatgtgtcagtttggtctcttttgtgcttaacctataccatcctaggttttcattta

SEQ ID NO: 712586 - DNA, 626 bp, Homo sapiens
atattttttttcatattaagactttgaaatccaatatgtattttgcatttatgactcatctgaattcagactagccatattccagaatgctctatagccacatgtggctggtggctaacatttgggacagggcaagcctagagcacctctgaaagcaaggatcacttctagcccccattctctttactccttggtttctgagccttttttccagacacagggagtgcaagtgtgaatcctcccaaacagtgcagccctcagggaatcagagaacctagagcagatgccaggttatctctttagcccaggagtaaatcttccctgatgagaaggaaattgggccacaagatgtttaaaacaggccatctcctttccccggaacaaagagcaccagacaacttcctaccactagggggcactggggaccacgtcatcttcagacttggattctgaccacagccggcttcagcaccttctctctctcacactgctcctcaccccttgccatgctgtggtggtcctcccaggggtcagcaaagcaggacctgtccccttttaaaaggaaacgaaggctgctgcttgtcatgaggctctcgtgatgcctgyttgcctgcaggttgtgaatg

SEQ ID NO: 712587 - DNA, 1394 bp, Homo sapiens
tgtcyctacaaaaaaaatacagaaattagccaggcatggtggcttgtaccctgtgttcccagctacactggaggctgaggtgggaggattgcttgagcctaggaggcagaggttgcagtgaactgagatagccccactgcactccagcctgggtgacagtgacaaagtgagactctgtctcaaacaaacaaacaaaccccaaaccaaaaaaccactatgtcagtgagaaaaatctgcagaaataactaaaaatattgtgatacctaaattctgaaggtatcctgagggaaacacaattggattgtaactggaaccaagacagcatatgtaataaatgacttgacagagtgcctcatggattcaatgagagtcagttattactgacttacgttgcaagtatactgttttcttgccgggatctgtgagctccttgaaggtaaggaccatgttatcctgctcatagatacatactcaactcctagcatagtgcttggtgttcaatagttctaaatatttgttcaaatgtttattaagaaaagttcaaatgtgtggaaaataaaacaatcctagacaccaagctgcatttagcaaacttataaaggtctgaccctgattttagccactcattcccttgaacatgagtggcttttttaaaaaaaattttaaatagcttgaagatattacatgctttaaaaatgttagaatactatcaaaaggtagaaaattaaaagtacttttccttctctggctctgaacactcaatttgattccccagaggtaacctttgttaagtttcttgcacctcttttcagaagttttccatgcatttaagcatatgtgagtgagatctcaaattaatataatcttaagcagacacaaattaaatgtctgtttaatgtttatattttttacctaacaatcagactgatatattttattggatacagaattttgtttttttgtttgtttttttgtttgtttttttaagacagagtctcactctgtcacccaggttggagcgcagtggcgcaatcttggctcactgtaagatccaccttctgggtcatgccattctcctgcctcagcctccccagtagctgggactacaggcacccaccaccacacctggctaatttttttgttttgtatttttagtacagatggggtttcactgtgttagccagggtggtctcaatcttctaacctcgtgatccacccgcctcagcctcccaaagtgctggggttacaggcgtgagccaccgtgcccagccacagagcttgtttttaatgatttcatgacagtccattgtctagaggtcgcatgattgatttaaccagtttcttatttatgggtatttactttttaaatttttttcataaatggttttgatgga

SEQ ID NO: 712588 - DNA, 628 bp, Homo sapiens
gcttttctccaactatcaacatttttaatggataatccacaaaaatgagtaattatctagtagttgaatgcagactctatttctaatattttaatatatatatataaaacagtgrttgctttgtttttcaatgttttaacacattcgtgcagtttaaaaatgtatttttttaaatgcagtgtagatctttctcccacacctgccccacctgtcctgtccctttctatcctaaggtaacaacatttattcatttcttgtgtatgcttccagggttttattatgcaagtacaaatatatatgtttccttcttttttttttttttcttccaagtcagggtctcattctgttgccctggctagaatgcagtggtgcaaacatggctcacagccgcctcaacctcccaggctcaagcaatcctcctgcctcagccttttgagtagctgggaccacaggtatgtgccaccacacctggctactctcactttggccttctaaagtgctgggattacaggcctgagctaccatgcctgacctgtttcctccttccttacaccaaaaggagtataccctacatacctttatgcaccttacttttttaacaagaatttttataaattttccacatcat

SEQ ID NO: 712589 - DNA, 937 bp, Homo sapiens
agaacacattgtgcaatgaattatagtggagacagtgagtataagtaacatttaagagaggttttgaccaagaaggaaaagaaagaagggaaagctaaaggaacagtgttcactgcggagggaacagcatgtgtaaaagtcctgaagtgggaaggcacatagcgggtttgagactaagaattgctwaagtttggctatttaaaccatgttaaccattttggttttcattccatctcttatgggaagccactgatataatttaaaactatgagtgacatgagattgtgctttttaaagatcacttgggttacataatggaaaatgcattggaggaaggcaggaatggatgtggggaaatgttatgtggctattacattgaatcaaatgagagatgacagtagcttaaattaagattatagccatggggatagtgatggtgatggtgatgatgatggtgatgatgacagtagtggtgatggtagtgatgatgatggcagtagtggtgattgcagctagcactttggaaagcaataatatgcatcatcatattgacttctcaaaagaacccaataaagcacaaactattattatttccacttcatatataaggaaactaagcacagagaatttaagcaaattgccagtaaggggggaagcctatttttaaacctaggcaatgcccttccaaagcctgcactcttaaccaccgtgatcaatggagagaagtgattataatccatagaattgaggagatgaaaggcttttgtaatgacaggagattcacgaatgaggaagagggaggtgtgaagaatggcagccctggtctgggtggtcagggtcccattgcctaagatgagaaacactggaggagaaatccactgcagagtggggagttcacatgcccagttttggacctgtggagtacaattgagacaca

SEQ ID NO: 712590 - DNA, 937 bp, Homo sapiens
agaacacattgtgcaatgaattatagtggagacagtgagtataagtaacatttaagagaggttttgaccaagaaggaaaagaaagaagggaaagctaaaggaacagtgttcactgcggagggaacagcatgtgtaaaagtcctgaagtgggaaggcacatagcgggtttgagactaagaattgctaaagtttggctatttaaaccatgttaaccattttggttttcattccatctcttatgggaagccactgatataatttaaamctatgagtgacatgagattgtgctttttaaagatcacttgggttacataatggaaaatgcattggaggaaggcaggaatggatgtggggaaatgttatgtggctattacattgaatcaaatgagagatgacagtagcttaaattaagattatagccatggggatagtgatggtgatggtgatgatgatggtgatgatgacagtagtggtgatggtagtgatgatgatggcagtagtggtgattgcagctagcactttggaaagcaataatatgcatcatcatattgacttctcaaaagaacccaataaagcacaaactattattatttccacttcatatataaggaaactaagcacagagaatttaagcaaattgccagtaaggggggaagcctatttttaaacctaggcaatgcccttccaaagcctgcactcttaaccaccgtgatcaatggagagaagtgattataatccatagaattgaggagatgaaaggcttttgtaatgacaggagattcacgaatgaggaagagggaggtgtgaagaatggcagccctggtctgggtggtcagggtcccattgcctaagatgagaaacactggaggagaaatccactgcagagtggggagttcacatgcccagttttggacctgtggagtacaattgagacaca

SEQ ID NO: 712591 - DNA, 937 bp, Homo sapiens
agaacacattgtgcaatgaattatagtggagacagtgagtataagtaacatttaagagaggttttgaccaagaaggaaaagaaagaagggaaagctaaaggaacagtgttcactgcggagggaacagcatgtgtaaaagtcctgaagtgggaaggcacatagcgggtttgagactaagaattgctaaagtttggctatttaaaccatgttaaccattttggttttcattccatctcttatgggaagccactgatataatttaaaactatgagtgacatgagattgtgctttttaaagatcacttgggttacataatggaaaatgcattggaggaaggcaggaatggatgtggggaaatgttatgtggctattacattgaatcaaatgagagatgacagtagcttaaattaagattatagccatggggatagtgatggtgatggtgatgatgatggtgatgrtgacagtagtggtgatggtagtgatgatgatggcagtagtggtgattgcagctagcactttggaaagcaataatatgcatcatcatattgacttctcaaaagaacccaataaagcacaaactattattatttccacttcatatataaggaaactaagcacagagaatttaagcaaattgccagtaaggggggaagcctatttttaaacctaggcaatgcccttccaaagcctgcactcttaaccaccgtgatcaatggagagaagtgattataatccatagaattgaggagatgaaaggcttttgtaatgacaggagattcacgaatgaggaagagggaggtgtgaagaatggcagccctggtctgggtggtcagggtcccattgcctaagatgagaaacactggaggagaaatccactgcagagtggggagttcacatgcccagttttggacctgtggagtacaattgagacaca

SEQ ID NO: 712592 - DNA, 611 bp, Homo sapiens
ccagtggctgtggagaagggcaaggtgccctgtgtgtctcctggaggtgatctaaattgagcagaaacctagcctggttgggtagacggattccaggcgtgggcattgcttgctcttatcagcctgtagagggacggaaggaccaccaagtgctgggaaggagagagctattctccccgtggcattgtggcagaatacttggaagtgaccctttttgccccatgggagtagaaattatatttggttgcttgttatgatcttttctgtatggtttttcctcttcagttttagaagttaacacttttttaaaaactctcctctttgtttccttttctactttttcctcttcctcctttctttttttaaaattagtttttagagatggggtctcrctctgtcccccaggctggagtatagtggtgccatcatagctcactgcagcctcgaactcctggcctcaagcgatgctccctccttggcctcccaatgcactgggattacaggtgtaagccaccacacctggcctttcttccttttttctctcctcctcctaatattcttagattccactatctgcacctgtgtaatagtttctaaatctataaaatcta

SEQ ID NO: 712593 - DNA, 1412 bp, Homo sapiens
tggctttttcttctcagagaatcacactggcaagtggtaaagtgagatgtccagggtaccattctaagcaagcatcttcactcatctgcaagctttaattgaaagtcacaaatctcaactgagaaagccatctagtcacatacacacattttaaagctgccgagcaccaccttccagaaaccaaagtgtcagatctgagtttcccaatagctcttcctgggctggagtcatctattacacaaaacgaactcattatttccttacatatgggcaccgtcaatctattttccgacctttcatcctcaacatccccatatccctttgaagtcaaagcatcagtcatttttgtcaggtgtaaaacacatacaccgcacgtgcacggggatgctctgatgttcacaatgtgtaaaaacttgaacgtttagagatcgcttaaatccctggtgttgcataaagggccttgataaaaaacataaatatttgcaaggttgcctttccatatttgtcgctttggggacggagggttcctaagtcagaaatggaatgctagcaacactctatcacctcacacaacccctatgccggggccaagggaggcggctggcaggcctggagcgcgggcaggcgcctgctcccggaggagagacagcgcgggctggcgctccgcgacccctcacctctcttgtccaggagccacatgaacgcgaagcagggcaggaagccgatgggcccccacagcacgagcagcgcgatgtcccagctggagaagccgtaggcctggcgcgccgagttctggatgggaccccaggtgttccagaccaggccctgaacgaacgccagcagcgagaagagcagcagcaccagccagcggcgcccgtatacccgcccgggacccgggaccgccgcgggcagcgccgccgccgccgcctcccggcttctccaggaggcccccagcccaggcccgagcccgggccccagcagcggctgcctctcctcttcgctgctccagcgagagcccatggcgacgcgtcgcccgcgaagccactgccgggcgcagtccgggtcaccgccgactagcccagcgcagaatagtcckgagcagcaggaggcggaggctgctgtggtcgccctcggcctccggaccgcgcctggtgcgcctgcgcggcccgagccgggccggcggggaggcggggaggcggggcaggcggcataggaggctggggtccgccctcccctccgcgggtggcgaggaaacaccggcgagaggaaaggagccaggtcccagacggagggcaggtagcgctgaaaaggcagggaccagcgcggctgagtcggggagagggaaactcccagagaggctgtattcgaggaggttgggcaaggaaccctggggtgtttggaggaagtgtcca

SEQ ID NO: 712594 - DNA, 1306 bp, Homo sapiens
gaagaggccatactaactggaattcttttcgtctttaggttggtgggacaagtgatgttgaagtgaatgaaaagaaagacagagttacagatgcccttaatgctacaagagctgctgttgaagaaggcattgttttgggagggggttgtgccctccttcgatgcattccagccttggactcattgactccagctaatgaagatcaaaaaattggtaaaaagttaccttttaaatgagtttgtggcctgattttagtttttcttagaataataatgttgcagtcccctaaatggaatagcacattcatttcctgaataacagaagtagaatagtgctaatgtcagagctaaacatgcatcacatctttttcagaggaaatgatttgatctgtagtaggattgggatttccctacatcaatatcctcacaacttataaatgtgttacaatatttacaaatgaaagtattaaaattttgctgaaatttctctgtaggtatagaaattattaaaagaacactcaaaattccagcaatgaccattgctaagaatgcaggtgttgaaggatctttgatagttgagaaaattatgcaaagttcctcagaagttggttatgatgctatggctggagattttgtgaatatggtggaaaaaggaatcattgacccaacaaaggtaaatggttgaacactttctaaaaattcttttgttgttcattttgttaatgtatcctcacatcccaaatctttgattttgtcaccagaaaaatagtctaatagcagtagcaacagcaatagctcttgtgcccatcaacaattctcatgtacatttccagcacctagatatttaatactccactaaaaggaagcaggatcccttgagtagcagttgagtccatgcctggaggcaggaaaaaatcaggatggatctggaacaccctgttcctgcctggcagtaagaataytttccaagatacgcagaacagggttttgttttgttttgaagacagagtcgctgtgtcgcccaggctggagtgcaggcagtgacaacctccacctcctgggttcaagcgattctcctgcctcaggctcctgagtagctgggattacaggcatgcaccaccatgcctggctaatttttgtatttttagtagagacggggtctcatcatgttggccaggctggtcttgaactcctaacctcaagtcatctacctgcctcagcctcccaaagtgctggattacaggtgtgagccaccatgcccagacagaaattttcaataagtcttgctcatattttactaagggaaa

SEQ ID NO: 712595 - DNA, 649 bp, Homo sapiens
taagtctgtcagccccacaatgtaagaacttacaacttagttactaacaaaagatctcatatagcatcatcacctcagatacaaagacccattttatgttaaagagatacaacaggccggcgcagtggctcaygcctataatcccagcactttgtgaggctgaggcgggtgtatcacctgaggtcaggagtttgagaccagcctgaccaacatggagaaacctcgtctctactaaaaatacaaaaattagctaggcatggtggtgcatgcctgtaatctcagctactcaggaggctgagacaggagaatcacctgaatccaggaggcggaggttgtggtgagtcaagatcgcaccattgcactccagcctgggcaacaagagcgaaactctgtctaaaaaaataataaaataaaagagatataacaagtgcacaactgtggcaactactcatctcaccacatattgcattaactgccacagtctaacacaatggtagaatgacctattaaaggttcagtgcgtcctccagataagcaaaaacactctagggtcaaagtactaaaacaatggccaacgtatggggtgttgtacccaatggctggaacacacagggcctaaaccaagtggtattaagtaggaatagcccct

SEQ ID NO: 712596 - DNA, 649 bp, Homo sapiens
taagtctgtcagccccacaatgtaagaacttacaacttagttactaacaaaagatctcatatagcatcatcacctcagatacaaagacccattttatgttaaagagatacaacaggccggcgcagtggctcacgcctataatyccagcactttgtgaggctgaggcgggtgtatcacctgaggtcaggagtttgagaccagcctgaccaacatggagaaacctcgtctctactaaaaatacaaaaattagctaggcatggtggtgcatgcctgtaatctcagctactcaggaggctgagacaggagaatcacctgaatccaggaggcggaggttgtggtgagtcaagatcgcaccattgcactccagcctgggcaacaagagcgaaactctgtctaaaaaaataataaaataaaagagatataacaagtgcacaactgtggcaactactcatctcaccacatattgcattaactgccacagtctaacacaatggtagaatgacctattaaaggttcagtgcgtcctccagataagcaaaaacactctagggtcaaagtactaaaacaatggccaacgtatggggtgttgtacccaatggctggaacacacagggcctaaaccaagtggtattaagtaggaatagcccct

SEQ ID NO: 712597 - DNA, 649 bp, Homo sapiens
taagtctgtcagccccacaatgtaagaacttacaacttagttactaacaaaagatctcatatagcatcatcacctcagatacaaagacccattttatgttaaagagatacaacaggccggcgcagtggctcacgcctataatcccagcactttgtgaggctgaggcgggtgtatcacctgaggtcaggagtttgagaccagcctgaccaacatggagaaaccycgtctctactaaaaatacaaaaattagctaggcatggtggtgcatgcctgtaatctcagctactcaggaggctgagacaggagaatcacctgaatccaggaggcggaggttgtggtgagtcaagatcgcaccattgcactccagcctgggcaacaagagcgaaactctgtctaaaaaaataataaaataaaagagatataacaagtgcacaactgtggcaactactcatctcaccacatattgcattaactgccacagtctaacacaatggtagaatgacctattaaaggttcagtgcgtcctccagataagcaaaaacactctagggtcaaagtactaaaacaatggccaacgtatggggtgttgtacccaatggctggaacacacagggcctaaaccaagtggtattaagtaggaatagcccct

SEQ ID NO: 712598 - DNA, 649 bp, Homo sapiens
taagtctgtcagccccacaatgtaagaacttacaacttagttactaacaaaagatctcatatagcatcatcacctcagatacaaagacccattttatgttaaagagatacaacaggccggcgcagtggctcacgcctataatcccagcactttgtgaggctgaggcgggtgtatcacctgaggtcaggagtttgagaccagcctgaccaacatggagaaacctcgtctctactaaaaatacaaaaattagctaggcatggtggtgcatgcctgtaatctcagctactcaggaggctgagacaggagaatcacctgaatccaggaggcggaggttgtggtgagtcaagatcgcaccattgcactccagcctgggcaacmagagcgaaactctgtctaaaaaaataataaaataaaagagatataacaagtgcacaactgtggcaactactcatctcaccacatattgcattaactgccacagtctaacacaatggtagaatgacctattaaaggttcagtgcgtcctccagataagcaaaaacactctagggtcaaagtactaaaacaatggccaacgtatggggtgttgtacccaatggctggaacacacagggcctaaaccaagtggtattaagtaggaatagcccct

SEQ ID NO: 712599 - DNA, 610 bp, Homo sapiens
tagatgtatttcacatatataaaaatttgtgaaaaaaagaccacatatatatgcctatcagaaattccatatacaggcattaccccaaaaaaaggcaacattatttttttgttgttggtaagattcagtgataaaaaaaaattttaaagaaaggaattactacaaaagtcaaaatagcagttcatttggagaggagggcataaatatttgaggcaaagaaaaagagctcctgtagtcttagcactgttctattactgaactatgttggtggttacacaggtgtacgatctaaaataaaccctcaaaatgtgtatttttgtgttttccactttgttacattcttaaacagttaatgtaaaaaatatgttacacatcaacattattacacatctaataataatattatgaatagaaggctgaggatactgtcaaaggaatggctattttccccttcccaggcctgttcttttggtttgtttgttttctttgaggttttagatcttattcsatttagttaatttcaaaatccctctattagataatttttcattacattcttcttttcatctttagtcttaggtgaattcatagtataatacatgtaattttt

SEQ ID NO: 712600 - DNA, 641 bp, Homo sapiens
gtacctagagcaggctaaccatacataaacggagctggggtttaccaagaatctctgctgcgggtcaggccgctcttcccagagctggaaaaataccgctagggcccaagatggcgggagactcgggccctgttcccaccccctcgtaatcccgcaggggccccagggmgcatgtgcgggcttgaaggccgaatgcggcgggggaggcctgcagctgcgcaaagcgtcccgcctggcgctgtccctggcttcctgagggcggaagctgtgtgcggcctggtaagggtggtgcccactgggagttcttgaagctggcattaggctccaggtgggcagcctcacagccttgtctctcagggccaggccatggagagactctggacgggctaatgtggtggagaggatgtagcttgtcatatgggtgtgacacattggggtggtatcaccccacttcctggctgtgcaagggttggagttcatgcagacagatctatcttgcaactaccaggatagaaactcaggagtccccagtgaattagtgaaagaaatgtctatttattgagcaccagttaatcagatatttaagttattgcatttaattctatttctctattttggagaatcttgaactgggtccgtga

SEQ ID NO: 712601 - DNA, 641 bp, Homo sapiens
gtacctagagcaggctaaccatacataaacggagctggggtttaccaagaatctctgctgcgggtcaggccgctcttcccagagctggaaaaataccgctagggcccaagatggcgggagactcgggccctgttcccaccccctcgtaatcccgcaggggccccagggagcatgtgcgggcttgaaggccgaatgcggcgggggaggcctgcagctgcgcaaagcgtcccgcctggcgctgtccctggcttcctgagggcggaagctgtgtgcggcctggtaagggtggtgcccactgggagttcttgaagctggcattaggctccaggtgggcagcctcacagccttgtctctcagggmcaggccatggagagactctggacgggctaatgtggtggagaggatgtagcttgtcatatgggtgtgacacattggggtggtatcaccccacttcctggctgtgcaagggttggagttcatgcagacagatctatcttgcaactaccaggatagaaactcaggagtccccagtgaattagtgaaagaaatgtctatttattgagcaccagttaatcagatatttaagttattgcatttaattctatttctctattttggagaatcttgaactgggtccgtga

SEQ ID NO: 712602 - DNA, 2096 bp, Homo sapiens
atcctggaaaatggggtatagctgaatggtgcagattcattcattcatattcagcaaattatgttctaagcacctacttcagtatgtgaacagcactaaactcagaatattggtctgctggggtcctttattagcttccatgattccctgaacttggccaagacccttctggtcggctgcagataggcacaatggatagttttgcttctagataatgtaactgggacattcagcattatctatcgccttgaaattcctctagtcaggtggctttctaatgggtacccagagccctatgactacccagattgatggtgcacccaacaggactttgcatttatgagctgataagtcacagtcactagctgagattaatctgtgtgacaccagaatgtgtctctatctaaaggaaaagggatgaagggtgatatctttggtcacaagtaatgtatttccatgtagtctttgacaaaggatctaagtggattttgtaattgaagaaaaatctatgcactaatctttacagcatttccgtgagtgtacgcaagtcagctcaacaattcaacatttgctctgtggggttgtgctagaccctgtcaggggataactactgctggctggggcccagttcagggaagacttgccaaagaccwtcaggaaaagagggaagctgagtcttaggtttcttcctttagagatggtgacagtcctctcaccacctccaagcatctcacaatgtttccctgcctccaagtcatcaaattcatttttgattcctacttcataaaaattacattctcccagcactttgggaggccaaggcgggcagatcatgaggtcaggagttcaagaccagcctgatcaacatggtgaaacaccgtctctactaaaaatacaaaaattagctgggcatagtggcactcacctgttatctcagttacttgggaggctaaggcaggagaatcgcttaaacccgggaggcagaggttgcagtgagccgagattgtaccactacactccagcctgggtgacagagggagactccatctcaaataaataaattaaaaaaaaaaatatatatatatatgtatatattctctatggatgctgaccattggaccctggtttcatctgcacgtaacagagtaagcttggacttgtgcttgtaaattaaagctcgacacctccttttggcttctctatacctgaatattcttactcactctccttaatgtgaatatgcatggaagcaggaccatttcctcaaacactagcagcagcgaaccctgtggaaagtcagtccacatagaataattcaaataaagtgttcagagaaatggggtttcagagcaattactttttccagacctttcacaaatcagtggtgtaggtatgaccagccttgagttgagacctctgtaatatccatctttaataacattaatatgctgtggatgagcaactgatcactggagggagtttagctgcccataggagttcatggctaatgacaatatctgaataaggacaggtgtggagcccaggtgcaggaagcaggcgaaggtctttctgtgagtctcctctgagggaactgggtctttatacatagttactgtttcagaattgatccttctggaatcatcagtcttcaccagtagcttgttacatctggggttatctcataattcaaacaaagctgacaagttgtaacaatgagcacacactgacttctgcaacaggcgctgtccacttcccatccgcactctaccggcttgctcctggccgcctcccactcgccttcctgggtggtcccccagcagttatacctacctggttgtcgccccctctatcctaccacaattgctcactagcggtttcctgcgtacacagcttgtctccctaaccagagtggaggtgccttggggacacagccaggctcagacattcactcagctcatcatagtgccatcccatcaataaccccttctgagtgatcctgggttagtaaaccgagtgtccctgaaattccactaccgctgattccctccagctgggcagaggcatcgagcgctggctgaagcttccggtgggaaatg

SEQ ID NO: 712603 - DNA, 774 bp, Homo sapiens
gatggatgacagagttaagggtataatttgtgcctgtgaagcgagaagggaacaacgtgtgtagaggtaagatgcatatataacacttaagggttataataaagatgtgcacaccatggttcagaaaagagcaaaatctactgccattggtcagagagaaaagaaggcttcttggaagagacaggaaagagctgaggctcaggggatagttctggattggaattccacacagcatatgcctggygaaaggagagatccaacctgacaggaattctcccataaaatcatggggcataaggtgataaaagttgtacatgccagtatgttaggtaaaagtgaatggaattatttactacaggtaatggagaaaaaaagttaaattccagtagcatgaaacatgttagcatttgtgtttcggggaaggttaatccaatatctcccattccagaattgactggagaaggatacatcaagagagcagagaataacttggaagatgttgctagggtggtgggtggtagcaataggagcgcaatggtgctttgaagaaattcacatgatgattggttacacttaagaaatgagtcagtgaagcaagtcaaggccagctacaggaatgcagaaaccaggcaagtgctgcagccaacgaaatggatggaaaagtcgttcttattaaaatctgcttgaaaaaagatatttaggaaagatgccatgaaatcttgttttgcatggccaggtaggctaatggacaatagggactcaacgaacagcaaa

SEQ ID NO: 712604 - DNA, 774 bp, Homo sapiens
gatggatgacagagttaagggtataatttgtgcctgtgaagcgagaagggaacaacgtgtgtagaggtaagatgcatatataacacttaagggttataataaagatgtgcacaccatggttcagaaaagagcaaaatctactgccattggtcagagagaaaagaaggcttcttggaagagacaggaaagagctgaggctcaggggatagttctggattggaattccacacagcatatgcctggtgaaaggaragatccaacctgacaggaattctcccataaaatcatggggcataaggtgataaaagttgtacatgccagtatgttaggtaaaagtgaatggaattatttactacaggtaatggagaaaaaaagttaaattccagtagcatgaaacatgttagcatttgtgtttcggggaaggttaatccaatatctcccattccagaattgactggagaaggatacatcaagagagcagagaataacttggaagatgttgctagggtggtgggtggtagcaataggagcgcaatggtgctttgaagaaattcacatgatgattggttacacttaagaaatgagtcagtgaagcaagtcaaggccagctacaggaatgcagaaaccaggcaagtgctgcagccaacgaaatggatggaaaagtcgttcttattaaaatctgcttgaaaaaagatatttaggaaagatgccatgaaatcttgttttgcatggccaggtaggctaatggacaatagggactcaacgaacagcaaa

SEQ ID NO: 712605 - DNA, 1822 bp, Homo sapiens
taaaatcatcatttcctgcctgaagtctctacttgtgcagctgccttgctctgtgagcatgggtttccttagttttcttcattctctcagctcctggaaagccgtggatggtgaaggaggatattaggacctctcaggtgctttagcttcaccatgctggacatttatagttcaagtgagagaatgctttagtccactaacctagaaatgtttgtaatttatgtataaactacccttgagacactgtcatgttgttctcatgccatataggacaaaggaattgacaagggagcttgcagattttcctagactatgctttgaggagcaaagatcaagcatgcctcacactagagtttcctcatacacttgagggtatgcaccacacctacctcctttctactgcctgagggtcacccctggctgggaatatactccttctaactcatgtttctccctttctgtctccagcctctgctaatgagaaatggaagaactgtttttcctgtctggtaggaacttcttatcctccatcctcaatacactatggcttatagtaaaactctgtgatcagagttcaacatggttagttttgatatagaaatagggaatttgtagtaataataataaaatctcagaatctttttctttagctacaaattctgacctttaatattattgtttcactatatactcattaattttagtctttgagactcagagtctggcattgaccttcttcctttaggcagagcccctcctctccatcctaggagacacttgacctgcacaatggagggtataaagggaaaaaactttcaaaaaaatgatcaatgcctctctttaacctattgatcacattattgtcttgacatgttttattttttcttcttccttttttttctgctggtttggtgctgcctgatggtcatttagatcttgttgtttatgttggtcttgctaattcatgattttttaaatcaaagaaattagtcatagacaaaggcatgtacttaagttgagtcaatgagcttcaaaatggtatcttttacacacaatttcaagtttatgcattcagtaagcatttattgagtaccagctatatgcctgacattgtatcattgtctggggatattaagttggaatgacatggatttttgccttaaaacccagtttagtaaaggaaatagatagaaaaataagtacaaggcagattgatagcatataactgagtatgcaaaagagtatcaaaaaagaggctgagcgtggtggctcacacctgtaatcccagcactttgggaggctgaggcgggcagatcacctgaggttaggaatttgagaccagcctggccaacatggtgaaatcctgtgtctactaaaaatacaaaaattagccaggagtggtggtgcatgcctgtagtcccagctactcaggaggctgaggcaggagaatcacttgaaccctggaggtggaggttgcagtgagctgagattgcgccattgcactccagcctgggtgacaagagcaaaactctgtctcaaaaataaataaataaaaaagaatattgagaaagaaatcgccagttctcttgggtagttgcagagcatgtcagggttcccactgagttgraagttggagaacagcttgctaggcaggcagaagaggagcagcacaagcaaaggcattgaagcaaacctggtgtgttatctaaaatcacctctgtgtttggggcattggaagttcgaaggattggcagaatataagactgtcaaagtaaacaggtccagatcaacaaaggctttgaatgtcttgataaagagcttg

SEQ ID NO: 712606 - DNA, 1150 bp, Homo sapiens
tttttaaaatcagcttataatactcaatactctacataagtattctgggtcgcactatgagaatctatttgattctctgaactcaagcatccaacacatgaatgcccagttatgtataattctgaaattcatccaccagcaattttaggaaccccacttacaacaactgtaacataaacccattaaaatgcaatgaacaagattttcacctacttgtaacttccttgtgaactttatgaaacctcacaccattgagggacctaaatatagctgtgcttcactgkaaactgaagtacaaaaccgatttgtgcgtttactgaaatatattgtccaattggcttgccttataaaattggacacatgttcccagaagaaaagttacagtgtgaaaatacaattttgaaatcacatttaagaatgcaataaatatttatcatgcaccttacagttgaataaatggaagttacttagggtgtgtaataatacacgatacaaataaatatgaaaatgaaaaaatgatatttaacccccaggggttgggattttagagcactcgacatagcctacaaggtggatcttaaaacagagtttttaagaaacagaaaagtagtatctctttactatttgaaccaggtcctctcgacaatataagctaaaagacactggccagttcctgatatcacttaatagtctattcatttaactaagggtattttttatggttccttggtactttaaagggtatttgctatattattttcctttttgctggaaaaatggctttttccatggtaaaaatccaggagtggcctctggacataaggggtaacaatgatcattaaaagtcccagttcccagtcgggcacagtggctcacacctgtaatcccagcactttgggaggccgaggtgggcagatcacgaggtcaggagatcaagaacaacctggccaacatggtgaaaccctgtctctaccaaaactacaaaacttagctgggcatggtggtgcacgcctgtggtcccagctactcaggaggctgaggcaggagaactgcttgaacctgggaggcggaggttgcaatgagccgagatcatgccactgcactccagcctggtgatggggggagactccatttcaaaaaaaaaaaaaaa

SEQ ID NO: 712607 - DNA, 1150 bp, Homo sapiens
tttttaaaatcagcttataatactcaatactctacataagtattctgggtcgcactatgagaatctatttgattctctgaactcaagcatccaacacatgaatgcccagttatgtataattctgaaattcatccaccagcaattttaggaaccccacttacaacaactgtaacataaacccattaaaatgcaatgaacaagattttcacctacttgtaacttccttgtgaactttatgaaacctcacaccattgagggacctaaatatagctgtgcttcactggaaactgaagtacaaaaccgatttgtgygtttactgaaatatattgtccaattggcttgccttataaaattggacacatgttcccagaagaaaagttacagtgtgaaaatacaattttgaaatcacatttaagaatgcaataaatatttatcatgcaccttacagttgaataaatggaagttacttagggtgtgtaataatacacgatacaaataaatatgaaaatgaaaaaatgatatttaacccccaggggttgggattttagagcactcgacatagcctacaaggtggatcttaaaacagagtttttaagaaacagaaaagtagtatctctttactatttgaaccaggtcctctcgacaatataagctaaaagacactggccagttcctgatatcacttaatagtctattcatttaactaagggtattttttatggttccttggtactttaaagggtatttgctatattattttcctttttgctggaaaaatggctttttccatggtaaaaatccaggagtggcctctggacataaggggtaacaatgatcattaaaagtcccagttcccagtcgggcacagtggctcacacctgtaatcccagcactttgggaggccgaggtgggcagatcacgaggtcaggagatcaagaacaacctggccaacatggtgaaaccctgtctctaccaaaactacaaaacttagctgggcatggtggtgcacgcctgtggtcccagctactcaggaggctgaggcaggagaactgcttgaacctgggaggcggaggttgcaatgagccgagatcatgccactgcactccagcctggtgatggggggagactccatttcaaaaaaaaaaaaaaa

SEQ ID NO: 712608 - DNA, 571 bp, Homo sapiens
ggaagagaagataaagcaacaggaaaactagataaatttattaaataaaaatgctaaagaatactatgcagtcattaaaagatgaggttggcctatgtgcattaatatgtaatattcatcaatatatcattatatgatcaaagatagttgcagaaagcagtgcagagtatgattccacttacatgaaatatgtgtgtatacatacatgcayatatggaagaattaaatattttcaggtgcaccattctccatcctgcttcctgctcaagatgtttacctgaatggatatatccatgggctcccctgccttgtggtttttggttgaattcatccaatgggaggcctggcagatatgaaagctggaggaaagtgaggtggagcccttcattcccctggcctccttcctattttgctgcaggttggctgtatccctttaaaagccacagcatttgtcaagcacctctccagattctgggaaccactctttctcctggcccctacatacccagaagttgtagaggctcccaactgatacagttcagggtcactgcacaatcccttgttcctgtcc

SEQ ID NO: 712609 - DNA, 571 bp, Homo sapiens
ggaagagaagataaagcaacaggaaaactagataaatttattaaataaaaatgctaaagaatactatgcagtcattaaaagatgaggttggcctatgtgcattaatatgtaatattcatcaatatatcattatatgatcaaagatagttgcagaaagcagtgcagagtatgattccacttacatgaaatatgtgtgtatacatacatgcacatatggaagaattaaatattttcaggtgcaccattctccatcctgcttcctgctcaagakgtttacctgaatggatatatccatgggctcccctgccttgtggtttttggttgaattcatccaatgggaggcctggcagatatgaaagctggaggaaagtgaggtggagcccttcattcccctggcctccttcctattttgctgcaggttggctgtatccctttaaaagccacagcatttgtcaagcacctctccagattctgggaaccactctttctcctggcccctacatacccagaagttgtagaggctcccaactgatacagttcagggtcactgcacaatcccttgttcctgtcc

SEQ ID NO: 712610 - DNA, 964 bp, Homo sapiens
tgatgttttccattgagatttttaaaaaggaagaatttcaaaatgctcctttcaaatattgggtgcgggtactgacatgctctgtatattaacggatgtaccttcttataaaaagttatatgtccctgggctcctaccctccagggtatttactctttagtcccatttttaagggattgcagctgtgaatgtttggggtccattgaagagattcagagagcaacagacagagctcatatctggagaaaaatttcctacaaatgttagatctcctgaaatggcctcttctcgttaccttcaagatctgctctgatttccttgtcatgtgctgaagtcactgtaaatatgcactggctcacacccaagtttttcatctccacatttcctttcttttcttttttcttttttttgagacacgatgtgcttttaatctagaagttttcgaatctaggccccttctcctacctggataggaatgctacccaggatcccacctgggtgactgacactttatgattgctttgaactataaaaataccgatgatattgtttcttccacctgaaatgtttcttttctcccctccatcttatctggcatgatcacactcaaataggatgttctttatgaggactttcccagcccctcagaagaattagagttctctgctgtgctctagaacacttggctgtcgtctctctattagacgtcattaggttgtgctggaaatgaaacaggcctgcctccccttcagaccagaagctcttggaaggtggaagactatctcatatccctatctgctttgcaatggcctgacattatgactaggactaagtaggtgctcaataaatatctcttactttaataaatagatgaataagtgaattaattgggsccttttacaacacaaacaaaatttgtggacctgggaaaactatgtcacttactttaaccttagtttaacca

SEQ ID NO: 712611 - DNA, 617 bp, Homo sapiens
aacctcgagaatgttagctggagaatccatacagaaattcacatatttatcttgctgtgacagaacatgctgtgataccgctttcttgtttttacagattattattattaagcagtatcataataaataaacgctttggtaatatttaatttcaacatgaaatcaatacttttagtcattcatttcaggttgtcttttcatccatatgatgtattttgaaaaattgtattttgaaagtatacaaatttggaagaaaaaaattgaaaataaaaaccatttatgaataggaaataaccttaaaaatctgtctgttaaacagcaaatatatgggtataacaagttatcagtagttatgtaaatccaataagctatggcctacaagaattggtagatggggctgtcacattttgcaaatatacagaaagcccatttaaatttggaattcagataaacacggatttgtttttagaatatctcatgtaataagtatatattgtataatgtttgggatatgcttatacaaaaatgtygtgtgttatctatcagaaactgaaatttaactatgttctctcttttgtctggcaaccttatttaagacaggagactcactggaattc

SEQ ID NO: 712612 - DNA, 617 bp, Homo sapiens
aacctcgagaatgttagctggagaatccatacagaaattcacatatttatcttgctgtgacagaacatgctgtgataccgctttcttgtttttacagattattattattaagcagtatcataataaataaacgctttggtaatatttaatttcaacatgaaatcaatacttttagtcattcatttcaggttgtcttttcatccatatgatgtattttgaaaaattgtattttgaaagtatacaaatttggaagaaaaaaattgaaaataaaaaccatttatgaataggaaataaccttaaaaatctgtctgttaaacagcaaatatatgggtataacaagttatcagtagttatgtaaatccaataagctatggcctacaagaattggtagatggggctgtcacattttgcaaatatacagaaagcccatttaaatttggaattcagataaacacggatttgtttttagaatatctcatgtaataagtatatattgtataatgtttgggatatgcttatacaaaaatgttgtgtgttatctatcagaaactgaaatttaactatgttctctcttttrtctggcaaccttatttaagacaggagactcactggaattc

SEQ ID NO: 712613 - DNA, 645 bp, Homo sapiens
tcttttcttttgtttttgagatggagtcttgctctgtcgcccggagtgagactccaytggcttcaatctccgccttccggattcaagtgattctcctgcctctgcctcccgagtagctgggattgtgggtgcccattgtcatgcccggctaatttttgtatttttaggagaggcaacgtttcaccatgttgaccaggctgcacggggtccatttttgtgctcaccgttattcctacagcctcacagaatcctggacacaaagaaagacttaacagggttcattcattcctgaaccaaagcggctgaacgatgtcaacaggaccagagaggctacaggaacgccatattttcttctacatctctttttttaaaaatcttatttcaatggagtcaaactcaataaggtgaattaaaggaaaaagagctgacccaaacaaacaagcaaacagaaaccttttctgtcctgtaatgtttaggcgcagataagaagtgcaaatagagagtttaaaaagctaataaagtgttttgtttgaaaaaaaatatgtgttgctacaacttggagaaaagactgtctgctgcaaatattaatataattcactgtccttttttccaaattctactcgaaataaaatattcagttttttt

SEQ ID NO: 712614 - DNA, 874 bp, Homo sapiens
tttccatatgctttgaagatattcctgcctctaccgctcgtttgcaaagccatgtggcatgtgtgtgcgtgyggctgcctgggtttcttgtcattgccactgagaaactgcccatctgaagggccagagggccatcagagtcaggctctgcctacagccctggctgctgtctcaactttaaaatatatatatattttaaagtgacaaaggaaatgagtggatgaagaaaaagtaacaaaataaaaatcacactaatcttaatgaattaaggcttcaagttacatagacactgcaagaaagtataaatcaccctgtctatgcaagagtaaaaccagtattaagctaaatcatgtcttccaaaaatatatgtgaaagtcttaaccccagaaactcaaaatgcaaccttatttggaaactaagtcatgttacagatgtaattagttaagttaaaatgaagtcatcctggagtgaggtgggctcctaatacaatagaacaagtgtctttataaaaagaagaaaatgtgaaggcaggtgtccacagagtgaagactatgtgaagacagctatgtggggatagaagctgagatatgagttgtgtatcacaagccaagggaaggctggggctaccagtagctggaagagacaaggaaggagattcccttagaggcttcagagggattatgaccctgccagtgccctgacttgacttctagcctccaacgctgtgagaggagccattcctcttattttatgctacccaggatgtagtactttgttagggcagcccttaggaaactaatgcaatgagagttccagcagagtacaatagcctctatgtaaatagtggtaaaacgtatcctcgttaataaaatta

SEQ ID NO: 712615 - DNA, 924 bp, Homo sapiens
ctcttaatttattgctcaatatcaaatctgtaattgtatttgcatggcatcttccatctaaagattccgagaagctgccagacacagaggcccacgcctataattccagcactttgggaggccaaggtgaaaaggtcacttgagcccaggagttcaagaccaatctgggcaacatagcaagactatctacaaaacttttaaaaaatgaaccagtcatgatggtccatgcctgtagtcccagctacttgggaggctgaggcaggaggattgcttgagtctgggagtttgaggctgcagtgagctatgatcacattactgcactccggcctgggtgacagggtgaaatccyctctataaaacaacaaatacaaattccaataagcttaataaaatgaatgcatcaatatcatcttgctgaagagtcattttgaataactgaaaacattttgtctttatttggtgtagctgaggttctgtctttcaatacaaacacagatgaaataggcatacttgtaagaaaatgggaaatttgttttagggagtggcagattaatcatgttgctactgtagtcttgtatctgcagacataattcttcatgtaatttattgaaacctcactctgtgtgattttcaaaacacaattatgttttatttatgtggaacttgactacatatttacttcttaaaatgagacgttccacattttacatatatgaaagtccttttcaagttatctacattaacatttcatttgtcatttaaggaaactgaagcacagagagattaaatgacttttaatcatttaaaaagtcacttttaagtgattgcacagcaagagatcggcaaagccacaaatattgccactacccattatagaaacaattgacatttttataaagcaggatgagtcaccaaagagtttca

SEQ ID NO: 712616 - DNA, 924 bp, Homo sapiens
ctcttaatttattgctcaatatcaaatctgtaattgtatttgcatggcatcttccatctaaagattccgagaagctgccagacacagaggcccacgcctataattccagcactttgggaggccaaggtgaaaaggtcacttgagcccaggagttcaagaccaatctgggcaacatagcaagactatctacaaaacttttaaaaaatgaaccagtcatgatggtccatgcctgtagtcccagctacttgggaggctgaggcaggaggattgcttgagtctgggagtttgaggctgcagtgagctatgatcacattactgcactccggcctgggtgacagggtgaaatcctctctataaaacaacraatacaaattccaataagcttaataaaatgaatgcatcaatatcatcttgctgaagagtcattttgaataactgaaaacattttgtctttatttggtgtagctgaggttctgtctttcaatacaaacacagatgaaataggcatacttgtaagaaaatgggaaatttgttttagggagtggcagattaatcatgttgctactgtagtcttgtatctgcagacataattcttcatgtaatttattgaaacctcactctgtgtgattttcaaaacacaattatgttttatttatgtggaacttgactacatatttacttcttaaaatgagacgttccacattttacatatatgaaagtccttttcaagttatctacattaacatttcatttgtcatttaaggaaactgaagcacagagagattaaatgacttttaatcatttaaaaagtcacttttaagtgattgcacagcaagagatcggcaaagccacaaatattgccactacccattatagaaacaattgacatttttataaagcaggatgagtcaccaaagagtttca

SEQ ID NO: 712617 - DNA, 924 bp, Homo sapiens
ctcttaatttattgctcaatatcaaatctgtaattgtatttgcatggcatcttccatctaaagattccgagaagctgccagacacagaggcccacgcctataattccagcactttgggaggccaaggtgaaaaggtcacttgagcccaggagttcaagaccaatctgggcaacatagcaagactatctacaaaacttttaaaaaatgaaccagtcatgatggtccatgcctgtagtcccagctacttgggaggctgaggcaggaggattgcttgagtctgggagtttgaggctgcagtgagctatgatcacattactgcactccggcctgggtgacagggtgaaatcctctctataaaacaacaaatacaaattccaataagcttaataaaatgaatgcatcaatatcatcttgctgaagagtcattttgaataactgaaaacattttgtctttatttggtgtagctgaggttctgtctttcaatacaaacacagatgaaataggcatacttgtaagaaaatgggaaatttgttttagggagtggcagattaatcatgttgctactgtagtcttgtatytgcagacataattcttcatgtaatttattgaaacctcactctgtgtgattttcaaaacacaattatgttttatttatgtggaacttgactacatatttacttcttaaaatgagacgttccacattttacatatatgaaagtccttttcaagttatctacattaacatttcatttgtcatttaaggaaactgaagcacagagagattaaatgacttttaatcatttaaaaagtcacttttaagtgattgcacagcaagagatcggcaaagccacaaatattgccactacccattatagaaacaattgacatttttataaagcaggatgagtcaccaaagagtttca

SEQ ID NO: 712618 - DNA, 1420 bp, Homo sapiens
gctctactaatattttttctttgtttgtaaggcacacaaggtgtatttaagatcatgtaaaattttcttatacttagaaaaccatagtaattttattactgaatgttttagaagkcatgacaaaaacagagaatgtttaaatatggtcatgtaatttgtaatgttctaatttggttgtggccattatatgggaaaatcaattattttaaaataagaaataccattattcttaaaaatctattgagattcatcatatagaaatttagagaaattctacttttagttctagaaatattatgattttttaaataataaatatatgtttcctgagctatctcttttttctcattacaagtgttgcaaggggctacaccttgacctaacgtctttacgtgggtacttgcgcttactttgtagccttcatcagggtttgcttctattacttaaggccttctattacttaaggcatgccatcttactggtaaacttctacattgatcttctattcgttgttaaaaaaacataaaatattagtcaatcatcacttgctctattcttatccatttctaggacatgcatccaccacggctgtttcaggcatttctatttaaagtgctgtgaatgtctcctgaactcttaccattggttcctttagaatatatacttctttgtgttgaatgcggctgatgatggttataaaatgagtgccttctctcatgtctgtctttgtttttttttttttttagacttttttgtctttagaaatgtgaatctattagttacttccccattactctgaaggatgctagtatcagaattggtactcatttctaatcgtctgattctcctaaggccaactcaattcacatgttaaccactttatatttctttattgtgcttagtgaaagaaagcttatcaaaactaaaacaaaagaaagaatcgtatacttattagtataaggtttcatctattttctttattcaaaagaaaaaattaaaaacctaaacaatttctccatgattctaacattttctctaaaaattataacattactcttcacagaattccaccatacacttgtttacaaagattaccaaacattttccctgcttagctaataactccagaagatttatctttttcactatgctttttttgtttgatcacggaagagtttatgactgtccttcataatgagagcataacatatctcagtgtcaaatgcacttaattttatcttgtatgtaatataaacaattcactatctgtagcactttaggtgaacgctggattagttgaaatagcagcacatatactacaactattatttacccatttattttgccacctatatggcaagagtttttaggaaagattgttacagaatatagaagacagaatatgtgtgtgtgtgtgtgt

SEQ ID NO: 712619 - DNA, 1420 bp, Homo sapiens
gctctactaatattttttctttgtttgtaaggcacacaaggtgtatttaagatcatgtaaaattttcttatacttagaaaaccatagtaattttattactgaatgttttagaaggcatgacaaaaacagagaatgtttmaatatggtcatgtaatttgtaatgttctaatttggttgtggccattatatgggaaaatcaattattttaaaataagaaataccattattcttaaaaatctattgagattcatcatatagaaatttagagaaattctacttttagttctagaaatattatgattttttaaataataaatatatgtttcctgagctatctcttttttctcattacaagtgttgcaaggggctacaccttgacctaacgtctttacgtgggtacttgcgcttactttgtagccttcatcagggtttgcttctattacttaaggccttctattacttaaggcatgccatcttactggtaaacttctacattgatcttctattcgttgttaaaaaaacataaaatattagtcaatcatcacttgctctattcttatccatttctaggacatgcatccaccacggctgtttcaggcatttctatttaaagtgctgtgaatgtctcctgaactcttaccattggttcctttagaatatatacttctttgtgttgaatgcggctgatgatggttataaaatgagtgccttctctcatgtctgtctttgtttttttttttttttagacttttttgtctttagaaatgtgaatctattagttacttccccattactctgaaggatgctagtatcagaattggtactcatttctaatcgtctgattctcctaaggccaactcaattcacatgttaaccactttatatttctttattgtgcttagtgaaagaaagcttatcaaaactaaaacaaaagaaagaatcgtatacttattagtataaggtttcatctattttctttattcaaaagaaaaaattaaaaacctaaacaatttctccatgattctaacattttctctaaaaattataacattactcttcacagaattccaccatacacttgtttacaaagattaccaaacattttccctgcttagctaataactccagaagatttatctttttcactatgctttttttgtttgatcacggaagagtttatgactgtccttcataatgagagcataacatatctcagtgtcaaatgcacttaattttatcttgtatgtaatataaacaattcactatctgtagcactttaggtgaacgctggattagttgaaatagcagcacatatactacaactattatttacccatttattttgccacctatatggcaagagtttttaggaaagattgttacagaatatagaagacagaatatgtgtgtgtgtgtgtgt

SEQ ID NO: 712620 - DNA, 1420 bp, Homo sapiens
gctctactaatattttttctttgtttgtaaggcacacaaggtgtatttaagatcatgtaaaattttcttatacttagaaaaccatagtaattttattactgaatgttttagaaggcatgacaaaaacagagaatgtttaaatatggtcatgtaatttgtaatgttctaatttggttgtggccattatatgggaaaatcaattattttaaaataagaaataccattattcttaaaaatctattgagattcatcatatagaaatttagagaaattctacttttagttctagaaatattatgattttttaaataataaatatatgtttcctgagctatctcttttttctcattacaagtgttgcaagkggctacaccttgacctaacgtctttacgtgggtacttgcgcttactttgtagccttcatcagggtttgcttctattacttaaggccttctattacttaaggcatgccatcttactggtaaacttctacattgatcttctattcgttgttaaaaaaacataaaatattagtcaatcatcacttgctctattcttatccatttctaggacatgcatccaccacggctgtttcaggcatttctatttaaagtgctgtgaatgtctcctgaactcttaccattggttcctttagaatatatacttctttgtgttgaatgcggctgatgatggttataaaatgagtgccttctctcatgtctgtctttgtttttttttttttttagacttttttgtctttagaaatgtgaatctattagttacttccccattactctgaaggatgctagtatcagaattggtactcatttctaatcgtctgattctcctaaggccaactcaattcacatgttaaccactttatatttctttattgtgcttagtgaaagaaagcttatcaaaactaaaacaaaagaaagaatcgtatacttattagtataaggtttcatctattttctttattcaaaagaaaaaattaaaaacctaaacaatttctccatgattctaacattttctctaaaaattataacattactcttcacagaattccaccatacacttgtttacaaagattaccaaacattttccctgcttagctaataactccagaagatttatctttttcactatgctttttttgtttgatcacggaagagtttatgactgtccttcataatgagagcataacatatctcagtgtcaaatgcacttaattttatcttgtatgtaatataaacaattcactatctgtagcactttaggtgaacgctggattagttgaaatagcagcacatatactacaactattatttacccatttattttgccacctatatggcaagagtttttaggaaagattgttacagaatatagaagacagaatatgtgtgtgtgtgtgtgt

SEQ ID NO: 712621 - DNA, 1420 bp, Homo sapiens
gctctactaatattttttctttgtttgtaaggcacacaaggtgtatttaagatcatgtaaaattttcttatacttagaaaaccatagtaattttattactgaatgttttagaaggcatgacaaaaacagagaatgtttaaatatggtcatgtaatttgtaatgttctaatttggttgtggccattatatgggaaaatcaattattttaaaataagaaataccattattcttaaaaatctattgagattcatcatatagaaatttagagaaattctacttttagttctagaaatattatgattttttaaataataaatatatgtttcctgagctatctcttttttctcattacaagtgttgcaaggrgctacaccttgacctaacgtctttacgtgggtacttgcgcttactttgtagccttcatcagggtttgcttctattacttaaggccttctattacttaaggcatgccatcttactggtaaacttctacattgatcttctattcgttgttaaaaaaacataaaatattagtcaatcatcacttgctctattcttatccatttctaggacatgcatccaccacggctgtttcaggcatttctatttaaagtgctgtgaatgtctcctgaactcttaccattggttcctttagaatatatacttctttgtgttgaatgcggctgatgatggttataaaatgagtgccttctctcatgtctgtctttgtttttttttttttttagacttttttgtctttagaaatgtgaatctattagttacttccccattactctgaaggatgctagtatcagaattggtactcatttctaatcgtctgattctcctaaggccaactcaattcacatgttaaccactttatatttctttattgtgcttagtgaaagaaagcttatcaaaactaaaacaaaagaaagaatcgtatacttattagtataaggtttcatctattttctttattcaaaagaaaaaattaaaaacctaaacaatttctccatgattctaacattttctctaaaaattataacattactcttcacagaattccaccatacacttgtttacaaagattaccaaacattttccctgcttagctaataactccagaagatttatctttttcactatgctttttttgtttgatcacggaagagtttatgactgtccttcataatgagagcataacatatctcagtgtcaaatgcacttaattttatcttgtatgtaatataaacaattcactatctgtagcactttaggtgaacgctggattagttgaaatagcagcacatatactacaactattatttacccatttattttgccacctatatggcaagagtttttaggaaagattgttacagaatatagaagacagaatatgtgtgtgtgtgtgtgt

SEQ ID NO: 712622 - DNA, 1420 bp, Homo sapiens
gctctactaatattttttctttgtttgtaaggcacacaaggtgtatttaagatcatgtaaaattttcttatacttagaaaaccatagtaattttattactgaatgttttagaaggcatgacaaaaacagagaatgtttaaatatggtcatgtaatttgtaatgttctaatttggttgtggccattatatgggaaaatcaattattttaaaataagaaataccattattcttaaaaatctattgagattcatcatatagaaatttagagaaattctacttttagttctagaaatattatgattttttaaataataaatatatgtttcctgagctatctcttttttctcattacaagtgttgcaaggggctacaccttgacctaacgtctttacgtgggtacttgcgcttactttgtagccttcatcagggtttgcttctattacttaaggccttctattacttaaggcatgccatcttactggtaaacttctacattgatcttctattcgttgttaaaaaaacataaaatattagtcaatcatcacttgctctattcttatccatttctaggacatgcatccaccacggctgtttcaggcatttctatttaaagtgctgtgaatgtctcctgaactcttaccattggttcctttagaatatatacttctttgtgttgaatgcggctgatgatggttataaaatgastgccttctctcatgtctgtctttgtttttttttttttttagacttttttgtctttagaaatgtgaatctattagttacttccccattactctgaaggatgctagtatcagaattggtactcatttctaatcgtctgattctcctaaggccaactcaattcacatgttaaccactttatatttctttattgtgcttagtgaaagaaagcttatcaaaactaaaacaaaagaaagaatcgtatacttattagtataaggtttcatctattttctttattcaaaagaaaaaattaaaaacctaaacaatttctccatgattctaacattttctctaaaaattataacattactcttcacagaattccaccatacacttgtttacaaagattaccaaacattttccctgcttagctaataactccagaagatttatctttttcactatgctttttttgtttgatcacggaagagtttatgactgtccttcataatgagagcataacatatctcagtgtcaaatgcacttaattttatcttgtatgtaatataaacaattcactatctgtagcactttaggtgaacgctggattagttgaaatagcagcacatatactacaactattatttacccatttattttgccacctatatggcaagagtttttaggaaagattgttacagaatatagaagacagaatatgtgtgtgtgtgtgtgt

SEQ ID NO: 712623 - DNA, 804 bp, Homo sapiens
agatactggggaaactatgactttgaccagcatataccctttgaatagaataggagaaaaaataaaagactacagtaaatttaactggtctcaaaactattgattttgtaatagagtttttaaatttttcaaagaccaaagtcattacttcagaaataatgaaccatcaatattccaccaaacagcttctagcagatataaaaggagatgtaattggaaggaaatcaacttcagctactccagtgaaaactttgcataaatatgttgttaaaaatggtcttggtggttatggacctgtagtttatgttgctttcatggagtacactatggatttattaatggaactacaggtctatggtaactataagttaagtatttaggtgaatatataaattgtcattattttaaatacagaaaaatttgtaaatattctaaataatgaaacaatttaatttacaatatatgtacaaggtttagcaagcaacaaaactccagattaaagcaaaaatacagtagtgatttttaaaaatagtacaatggtaaaagtaagatatgtgtgtatctgaaagtttagaaaattgtataagccagtcaggacatttcttatgggaatgcagcaagactgaagagcttctgcacagcaaaagaarctgccatcagagtgaacaggcaacctacagcatgggagaaaatttttgcaatctactcatctgacaaagagctaatatccagaatctacaaagaacttaaacaaatttacaagaaaaaaaacaaacaaccccatcaaaaagtgggcaaaggata

SEQ ID NO: 712624 - DNA, 804 bp, Homo sapiens
agatactggggaaactatgactttgaccagcatataccctttgaatagaataggagaaaaaataaaagactacagtaaatttaactggtctcaaaactattgattttgtaatagagtttttaaatttttcaaagaccaaagtcattacttcagaaataatgaaccatcaatattccaccaaacagcttctagcagatataaaaggagatgtaattggaaggaaatcaacttcagctactccagtgaaaactttgcataaatatgttgttaaaaatggtcttggtggttatggacctgtagtttatgttgctttcatggagtacactatggatttattaatggaactacaggtctatggtaactataagttaagtatttaggtgaatatataaattgtcattattttaaatacagaaaaatttgtaaatattctaaataatgaaacaatttaatttacaatatatgtacaaggtttagcaagcaacaaaactccagattaaagcaaaaatacagtagtgatttttaaaaatagtacaatggtaaaagtaagatatgtgtgtatctgaaagtttagaaaattgtataagccagtcaggacatttcttatgggaatgcagcaagactgaagagcttctgcacagcaaaagaagcygccatcagagtgaacaggcaacctacagcatgggagaaaatttttgcaatctactcatctgacaaagagctaatatccagaatctacaaagaacttaaacaaatttacaagaaaaaaaacaaacaaccccatcaaaaagtgggcaaaggata

SEQ ID NO: 712625 - DNA, 804 bp, Homo sapiens
agatactggggaaactatgactttgaccagcatataccctttgaatagaataggagaaaaaataaaagactacagtaaatttaactggtctcaaaactattgattttgtaatagagtttttaaatttttcaaagaccaaagtcattacttcagaaataatgaaccatcaatattccaccaaacagcttctagcagatataaaaggagatgtaattggaaggaaatcaacttcagctactccagtgaaaactttgcataaatatgttgttaaaaatggtcttggtggttatggacctgtagtttatgttgctttcatggagtacactatggatttattaatggaactacaggtctatggtaactataagttaagtatttaggtgaatatataaattgtcattattttaaatacagaaaaatttgtaaatattctaaataatgaaacaatttaatttacaatatatgtacaaggtttagcaagcaacaaaactccagattaaagcaaaaatacagtagtgatttttaaaaatagtacaatggtaaaagtaagatatgtgtgtatctgaaagtttagaaaattgtataagccagtcaggacatttcttatgggaatgcagcaagactgaagagcttctgcacagcaaaagaagctgccatcagagtgaacaggcaacctacagcatgggagaaaatttttgcaatctactcatctgacaaagagctaatatccagaatctacaaagaacttaaacaaatttacaagaaaaraaacaaacaaccccatcaaaaagtgggcaaaggata

SEQ ID NO: 712626 - DNA, 662 bp, Homo sapiens
aaatgcataaaatcattttgtaaaaatgcaaaatgccctgtggtttaatgatgactaagcacaaaagaaaaacaaagctgaaaawgcatagctatcttttaatcttcatgagaattagcttgctcaatgatttcaaacgtgttaatcatgcctcagaccgcctgggcttgatactgttttatataggaagtttatgctgggttttggttttgtttttgagacagagtctccctctgtcacccaggctggagtgcagtggtgctatctcggctcactgcaactttcaccccctgggttcaagcaagtctcctgcctcagcctcctgagtagctgagattacagttgtgtgccaccatgcctgtatttttagtagagatgaggtttcaccatgttggccaggctgcttttgaactcctgacttcaagtgatcctcccacctcagcctcccaaagttctggaattacaggtgtgagccaccacgcctggcctatgctgtttatagaaaagtaaactgtgacatagaagcaatttttcttaaaagaagcctgtgatttagcagtagagctggcgaaaggcctgcaagacctggcttctggctggactagcagcctaaaggtagcttccacttgctttagactgagaccttcttctgctacatactc

SEQ ID NO: 712627 - DNA, 662 bp, Homo sapiens
aaatgcataaaatcattttgtaaaaatgcaaaatgccctgtggtttaatgatgactaagcacaaaagaaaaacaaagctgaaaatgcatagctatcttttaatcttcatgagaattagcttgctcaatgatttcaaacgtgttaatcatgcctcagaccgcctgggcttgatactgttttatataggaagtttatgctgggttttggttttgtttttgagacagagtctccctctgtcacccaggctggagtgcagtggtgctatctcggctcactgcaactttcaccccctgggttcaagcaagtctcctgcctcagcctcctgagtagctgagattacagttgtgtgccaccatgcctgtatttttagtagagatgaggtttcaccatgttggccaggctgcttttgaactcctgacttcaagtgatcctcccacctcagcctcccaaagttctggaattacaggtgtgagccaccacgcctggcctatgctgtttatagaaaagtaaactgtgacatagaagcaatttttctwaaaagaagcctgtgatttagcagtagagctggcgaaaggcctgcaagacctggcttctggctggactagcagcctaaaggtagcttccacttgctttagactgagaccttcttctgctacatactc

SEQ ID NO: 712628 - DNA, 3040 bp, Homo sapiens
tactaattcacactcccaccaacagtgtataagggttcccccttttctgcatccttgtcagcatttgttattttttgttgttttcacaatagccgttctaacaggggtgaggtgatatttcattgtggttttgatttgcatctctctgatgattaatgatgttgagaattttttcatatatatatttgtggtcatttgtctgtctttggagatattaatatgtctatttggatcatttgcccatgtaattccaattggttggcacctgcaaagccatttctaagatcctctcatgactgtgggtggatggaaggatgaacacttgggtggctaaagcaaacgtggacttttgttgttcttgtgagggctggtggggcagaatgcttttatacagccatgaagtagcagggaaaaaagctctgagatcctccagtgtgtagggaatattctctgcttttctcatgctctgtaccaatcaaacctgggctcttgttccttaatgtactgtcattagctttgcctttctcttatcccatagtcctgtactatagtgagaaaaagacatagaaaagactgcacagctcttcgtagcttacaaatcattttcataattgtcatcatgtttaaacatcactatgacactgctacgtaggcataattgcacctgttttatggtgaataaactgacaatcaaggttaagggacataccaaggtcacgcaggagatgaagctggggcttaagaggcctctgtcaagctcatggttgtttcattcttctgggctgcctctgggttaaaactttttaaaaagtaaattctgaaatagttagaatggattatggtaggagagagtgcagaatgagtttgcagtgaagcatcttagagggacaacacaatagtaaacctcctcttccttctcatatcttataatcaaggattaagaagctccttgccttcttgttaagaaattgatcgcattagggtcatctctatattaatggcagaaattgagtcaatatgttgatcttgggcccctgaaaacaagggttctttgggtccagggatagaattcaggcagtccatgggcctggatgaagaaaaaaattcctgtttttgatttcttgaacttctagcatttctctcagttatgaatttagactccaaaccatggcaattattagctcttcctataagtatgtcaccaatataaatacaatatattttcctatcacataattttaaatatagtaatgcactgcataaaaattccagttaactacagactgcttatgcaacagtggtcccataagattatatatgtttactgtacattttctatgtctggatacacaaatgccttctgttgtgtgacaatttcttacagtattcagtacagtaacttgctgcagcctaggaacaatagtctaaactatacatccagttgtgtagtaggctatatcatcataggtttgtgtaagtacactttgtggatatttgcacagtgacaaaaytgcctaatgacacatttctcaggatgtaccctgatgtactcaggatggtgcttcaccatcaagcaatgcacaactgtaccttgaaactatcctttgcactcatcacaacttcaaaatacggtagctggatcttattatttaatatgttaagaaacacacatatgttattttataatgaagttttaagagtcattttgataattgtatttccatataattatttttctatttcaattgtctatttcaaatagaatcttatgtattctattttatgcctttaaaaacattactctgagaggggtacaggtgtcactctgctaccacatgggtccacagtgcaaataaaagttttaaaaacttgctctaaaaagacattcactgaaaatcttaaattattccctaggaacaaaattttcaaaacttttttttttttaaggaagagagatgttagggcaacaattccttaatttcatcatctcttccatttatttacttgattgaatgaattcttgacagatagcacatgtgcaataaacattcatagaaatgatgtccctttttattcttggcaaaattagcgttgtgctgaaaacaaaatgagtttggttcatgggacatttcctgaaaggaatgacagtttaagacagaataaagtggaaagggaaggaatatctatgtggaggaattagccaacgataagatcttaccttgaagaagaccttctgcattgagtctgaaaacaacatttgtgtttatgtgaaaatccatgccctgacctaactctctgtgtcctgtcagcctaggtaatcaaattatgcatgaaataatttcataattttattttcaactgacaagcactacattatacattcaatctgttcacatgagataatatatttcttgcagtaacatctgttaatatatgcttgttctcaaaaaacgattatattacaaatcttaatctaggtacagaaatgaaagggtccaggcatttgattaatatatattgattaatcctatatagcaggagaagctcaggaattgtctgataaaactctcccaacagtctagttgagtctttcattttgctgctagaaatcattttgcttggtttgctgctgcttcttacatggatccacactgggcagactcttgagaggtggaaaaataagttagatgactattaagggcagtttgcagagcatgtttagaaaccgcacaagaatggggagaaagagtgtttggttgctccccctggagcttatatttttacaatgctaaactctgaggttcaggaagcagaccatatttttcatgtccccatgaattttcctgactaatctatctccctagaatgctcttcttgtccctatttactctctgcaacttaagatctgctaatactaagtcatcagtttcttgtaaaattttcacctgacccctactcttgttccagattgggttacctactcctctgtactgctaaaatcccctgtcctccttccatgggcaggcactgctctcatgtc

SEQ ID NO: 712629 - DNA, 616 bp, Homo sapiens
aagcataaataagaggcagtgtgagcattctccaagtaatcattccaagttggtgagttcatactccacctagacctcatggcctcgccactctcagtcaaactggtttttgtggttgtcaaagtccaacatggcaaatttcccactgatactaagtgagttgaaaactcaagttacagttgattttgccctagggaattttaccaagaacagctttacagcagtggagagttgaaacgtgtgtgtgtgtgtgtgtgwgtgagagagagagagagagagagacagaacgagtgagcatatgtgttagaaagacagacacccaaaaaaatgtcagatttggtttggctacacttcttgctcttctggcccaggtggacagttgaccttccttccccctacctgttcatagtctctgactggctttgatgcgggagaactgaagtccaaataagcatgaccctagcctctaatacaaacaccgtgcttcagatttcctccccagaaagggagttgagattctaactagctgagtcatctagtgacaactcccttcattgtgttatgttacaaaaacatagttgttcactatgggaacccggatgggaaatccattcca

SEQ ID NO: 712630 - DNA, 616 bp, Homo sapiens
aagcataaataagaggcagtgtgagcattctccaagtaatcattccaagttggtgagttcatactccacctagacctcatggcctcgccactctcagtcaaactggtttttgtggttgtcaaagtccaacatggcaaatttcccactgatactaagtgagttgaaaactcaagttacagttgattttgccctagggaattttaccaagaacagctttacagcagtggagagttgaaacgtgtgtgtgtgtgtgtgtgtgwgagagagagagagagagagagacagaacgagtgagcatatgtgttagaaagacagacacccaaaaaaatgtcagatttggtttggctacacttcttgctcttctggcccaggtggacagttgaccttccttccccctacctgttcatagtctctgactggctttgatgcgggagaactgaagtccaaataagcatgaccctagcctctaatacaaacaccgtgcttcagatttcctccccagaaagggagttgagattctaactagctgagtcatctagtgacaactcccttcattgtgttatgttacaaaaacatagttgttcactatgggaacccggatgggaaatccattcca

SEQ ID NO: 712631 - DNA, 616 bp, Homo sapiens
aagcataaataagaggcagtgtgagcattctccaagtaatcattccaagttggtgagttcatactccacctagacctcatggcctcgccactctcagtcaaactggtttttgtggttgtcaaagtccaacatggcaaatttcccactgatactaagtgagttgaaaactcaagttacagttgattttgccctagggaattttaccaagaacagctttacagcagtggagagttgaaacgtgtgtgtgtgtgtgtgtgtgtgagagagagagagagagagagacagaacgagtgagcatatgtgttagaaagacagacacccaaaaaaatgtcagatttggtttggctacacttcttgctcttctggcccaggtggacagttgaccttccttccccctacctgttcatagtctctgactggctttgatgygggagaactgaagtccaaataagcatgaccctagcctctaatacaaacaccgtgcttcagatttcctccccagaaagggagttgagattctaactagctgagtcatctagtgacaactcccttcattgtgttatgttacaaaaacatagttgttcactatgggaacccggatgggaaatccattcca

SEQ ID NO: 712632 - DNA, 616 bp, Homo sapiens
aagcataaataagaggcagtgtgagcattctccaagtaatcattccaagttggtgagttcatactccacctagacctcatggcctcgccactctcagtcaaactggtttttgtggttgtcaaagtccaacatggcaaatttcccactgatactaagtgagttgaaaactcaagttacagttgattttgccctagggaattttaccaagaacagctttacagcagtggagagttgaaacgtgtgtgtgtgtgtgtgtgtgtgagagagagagagagagagagacagaacgagtgagcatatgtgttagaaagacagacacccaaaaaaatgtcagatttggtttggctacacttcttgctcttctggcccaggtggacagttgaccttccttccccctacctgttcatagtctctgactggctttgatgcgggagaactgaagtccaaataagcatgaccctagcctctaatacaaacaccrtgcttcagatttcctccccagaaagggagttgagattctaactagctgagtcatctagtgacaactcccttcattgtgttatgttacaaaaacatagttgttcactatgggaacccggatgggaaatccattcca

SEQ ID NO: 712633 - DNA, 731 bp, Homo sapiens
attcattcgtgttccctgggataagatcttggttctgtctcctccttgctctccacagaaacaccccctgccatatcagccaggtcagagctgcagcaggctccagcaactgtttgaaagtcttgagcattgtcagatctcggaggagatcaaaagaaacagtcaagccgtatggagaggggaggaggccagagagaactgacctgccacattctttcagacctccaagctggcaggagactgcattccctgaacaccactcctaaacctcctggatacagcagtctccaccctgggcccagaggcttctctgggggaaagaggcaaagacacgccaggtgaaaagctctgatttggatcaatcttcctcccagcttgagatgctaagatgtcactttgcaacacagtgacttcaacttctgaaacctcagcattatttaatatagaattacatatatcaccctggtttagggcttgcagaggaaatacatattcattatgtttaagacattcttaagattatcttccttccccttcagaaagttttatggttttttttttctttttaaggacttagcctcttgyttccagctttagttttatttttgcttttctttccacaattaggttcaggaaagaaaaatacatcaaggctctgtcccatcctgtggagctggaaaatttccttagaaagagtctcgaaaggaggaaaacaatgtttttttactgaa

SEQ ID NO: 712634 - DNA, 1317 bp, Homo sapiens
ggagctagtattagccactatgcaaccttgagggatgcagagatacataagatgcagctcctgctctcaaggtgcctacagtgcaatggtgaagtctcatacacaagaatcctctttcattatgcatggatcctttcatctaagatgcattgagcatcttgaagttaaaagttacagtagttccccattttctcaggagaayatgttccaagaccttcactggatgctgcatatatgaaaccgcatatagtatcaaacctgattgccatcagtcagaacatattcctattcatttcttgcatccacaaatttaatgcctttccatctcaactaagcacttatgcactgtggccataacttttgcagtttgaggtgtgacagcaaaactagcataaatttattttttcttcttcacaacttcaggaatagaagattcactcttaccttagatcttaacaacctcagcatacattttttttttcttaagtggagagcttttaccctttcacttaaagtaagcactttatggctgctctttggctattgagactgtcagcatcactgctcttatgctttgggactattattaagtaaaataagtatttcttgaacacaagcactgcaatactgtgacagttgatctgataactgagatagcctctaagtgactcatgggcaggcagagtatacagcttggttatgctggacaaaggaacaattcatgtctctgagcaggatggagagggacagtgtgagattttctccatgttactcaaaatagcatgcaatttaaaactcatgaattgtttatttctggaattttccatttaatattttctgactatctatctgtttggtaaccaatttctcatggtattcctcaagtttcccaacctttctcacatcacggaacatgcagaaaatgacaatattttaatggtacactgggtaagtaggtgaagccattaatagttgcctcccaaaagcctccagctggcagatcccacaaaccaaacctttgcctctgccctagtgctgaagagaaacatattgtggccacttgtaaaccattcatggcacatatatgagccacaagataccatttaggaagtatagcaacgtaggacttaaaaaataggtagttttttatttatagggaatattgtgtttcctccccatgtgactttagtttttttggttgtttttatcagtacaaggattactgcataacacttctgaggggaaggaaatagtgaatttgaaacagcagcctagtatactttttagaaggctagaatcacagagaagtttgatttc

SEQ ID NO: 712635 - DNA, 1317 bp, Homo sapiens
ggagctagtattagccactatgcaaccttgagggatgcagagatacataagatgcagctcctgctctcaaggtgcctacagtgcaatggtgaagtctcatacacaagaatcctctttcattatgcatggatcctttcatctaagatgcattgagcatcttgaagttaaaagttacagtagttccccattttctcaggagaatatgttccaagaccttcactggatgctgcatatatgaaaccgcatatagtatcaaacctgattgccatcagtcagaacatattcctattcatttcttgcatccacaaatttaaygcctttccatctcaactaagcacttatgcactgtggccataacttttgcagtttgaggtgtgacagcaaaactagcataaatttattttttcttcttcacaacttcaggaatagaagattcactcttaccttagatcttaacaacctcagcatacattttttttttcttaagtggagagcttttaccctttcacttaaagtaagcactttatggctgctctttggctattgagactgtcagcatcactgctcttatgctttgggactattattaagtaaaataagtatttcttgaacacaagcactgcaatactgtgacagttgatctgataactgagatagcctctaagtgactcatgggcaggcagagtatacagcttggttatgctggacaaaggaacaattcatgtctctgagcaggatggagagggacagtgtgagattttctccatgttactcaaaatagcatgcaatttaaaactcatgaattgtttatttctggaattttccatttaatattttctgactatctatctgtttggtaaccaatttctcatggtattcctcaagtttcccaacctttctcacatcacggaacatgcagaaaatgacaatattttaatggtacactgggtaagtaggtgaagccattaatagttgcctcccaaaagcctccagctggcagatcccacaaaccaaacctttgcctctgccctagtgctgaagagaaacatattgtggccacttgtaaaccattcatggcacatatatgagccacaagataccatttaggaagtatagcaacgtaggacttaaaaaataggtagttttttatttatagggaatattgtgtttcctccccatgtgactttagtttttttggttgtttttatcagtacaaggattactgcataacacttctgaggggaaggaaatagtgaatttgaaacagcagcctagtatactttttagaaggctagaatcacagagaagtttgatttc

SEQ ID NO: 712636 - DNA, 1219 bp, Homo sapiens
ttttttcccccatgccagtttggtatttgagagtctgagtgggggattctcagtttggggcctgggccacttgcattgatgtgctgaggtgcaagattcttctgccagcttccgcattacttgggctttactgcactccacctgtgattgcagggccctggtgaagaggatgacaacagtagaatacaccactgttaagacacacaaggaagtagaggtggaaaaacactttatggagagtcagagacctgggtttaagttcttgccaagctctgtgaacttgagctctgtgtcattttatctctctgagtgtgttacaaatgagaaaactaacattgaaagagatgaagtgacttgcttaatggaggagaaagggccagtgcacccttgggaggttaraaagagaataacagatgaaattctgtatttttggttagacgatgggaggaggagccatcggtcctcctttgctctactatgaaaggcttcctacagaaggtgtatctgtgtgctgagctgtccaggatggtcttgatttagaaaattcaaataatacattaatatgtggatatgttaatatataatatatatatatacagatattattgaagtttatagttttggtttttatttttaataaagatagttcattaaataatggttaaatgtgatttaataattattatttttaaagacagagtctcgctgtcactcaggctggagtgcagtggtgcaatcacaactcaatgcagcctcgacctcctgaggctatatttaaaaaaaattttttttttgtggagacggggttttgtcatgttgcctacgctggtctggaattcctgggctcaagctgtcttcctgccctggccttccaaaatgctcagattacaggtgtgagccaaaaagcccttgccgtgatttagatagatttggtagatttcatttaaataaatctaccagaaagataaatatccaacttaggaagctgaggtgggagaattactgaacctaggaatttgagtccagctcaggcaacatagcaagacccctacctcttaaaaaaagaagaaagataaatattctttgtcaggccatgaagtttaattttggatctggaaataagttatgataaatgtgcagagaaagtgtattgtactcataactcctcacatagcaaacatggggtggatgatattctcaaccactaagaagcagctca

SEQ ID NO: 712637 - DNA, 1219 bp, Homo sapiens
ttttttcccccatgccagtttggtatttgagagtctgagtgggggattctcagtttggggcctgggccacttgcattgatgtgctgaggtgcaagattcttctgccagcttccgcattacttgggctttactgcactccacctgtgattgcagggccctggtgaagaggatgacaacagtagaatacaccactgttaagacacacaaggaagtagaggtggaaaaacactttatggagagtcagagacctgggtttaagttcttgccaagctctgtgaacttgagctctgtgtcattttatctctctgagtgtgttacaaatgagaaaactaacattgaaagagatgaagtgacttgcttaatggaggagaaagggccagtgcacccttgggaggttaaaaagagaataacagatgaaattctgtatttttggttagacgatgggaggaggagccatcggtcctcctttgctctactatgaaaggcttcctacagaaggtgtatctgtgtgctgagctgtccaggatggtcttgatttagaaaattcaaataatacattaatatgtggatatgttaatatataatatatatatatacagatattattgaagtttatagttttggtttttatttttaataaagatagttcattaaataatggttaaatgtgatttaataattattatttttaaagacagagtctcgctgtcactcaggctggagtgcagtggtgcaatcacaactcaatgcagcctcgacctcctgaggctatatttaaaaaaaattttttttttgtggagacggggttttgtcatgttgcctacgctggtctggaattcctgggctcaagctgtcttcctgccctggccttccaaaatgctcagattacaggtgtgagccaaaaagcccttgccgtgatttagatagatttggtagatttcatttaaataaatctaccagaaagataaatatccaacttaggaagctgaggtgggagaattactgaacctaggaatttgagtccagctcaggcaacatagcaagacccctacctcttaaaaaaagaagaaagataaatattctttgtcagrccatgaagtttaattttggatctggaaataagttatgataaatgtgcagagaaagtgtattgtactcataactcctcacatagcaaacatggggtggatgatattctcaaccactaagaagcagctca

SEQ ID NO: 712638 - DNA, 1935 bp, Homo sapiens
tgcaaatggcaggacacccttctttttttaaggtggaataatattgctttgtgtatgtgtgtgtatatatatatatatatatacacacactacaatttttgatccagtcatccatcaatggacacttaggttgtttccctctcttggttatctgggtatatatctgatggaaataaaatcagtatctcaaagagatatctgcactcccatgctcatggcagcattattcacaatagctaggatatggacaatggatttttaaccactccaggcaaccacttcatgtttggatacctaacagaagcaaccagagagctggttaaaaatagaaaatcttgggctccaaaaaaaaaaaaaaaaaaaaaaaacccactgaatcaaaatctccaggagtggggcctaggaatcacaattttttaaagttccttgggtggttccagtgcagccagtcatttggaaatcactaagtcacctcacttgcttgcacatgaggaatgaaaacagtgctgttgttacaaaaccaaaacaaggcagtgattctcccttaaaaagaaaaagatgctcatctgtaatgctttagcatttgtttacagataattaaatgtggaggaaaagaaggttaggacctgagaaaatcatgtgttaaaaactaaaagtggaagggcccactataaattagagcactacaaaattatcacctgtatcaatagaaaaatatagttcaatataagaacatccaaagaaatacagtattacatgaaatggcttcccatctgtagtagctttaacataacagaattaagacaacaaatctgctgaggggaaaatatcatgtaggtcaattttattcattcgaatctaacagactagaaatttgaagaaattttaacaagcatttactttcctatcgtatgtcaagaaaggccttgttcataaatacaagataggaaagactttcagaagatagttaaaactcaagaggactgttctgaaatgtcttgatcactttggaagtaaccatttctctaacattttgtaataaaatgccaagtatttttaactagtcattaaaactgttccgggaatttctattgtagactttgatatytaattcaagtggctgcataaatttggaagctacaaaatcaattttccataaaatatcatttgggcttcactaatccaaactggcctccttcctaattaggttgaattcatgggattttattgtaatgcactgccaaatcaaattgttaaaactgggaactttgtgctattttggattatcataacatcctttccctccattagcagggatggccagaggttgctaatacaataaatgtttaatggatggcaacactgtcccttgcccccagaaatagagatacagacataaaaataccctcagatctgtttgtatccatgctttctgccttctctcttgcttgtggcaaacagtgaattttcccaatataaagagacatgccaatcgacttactcaagccaaaggtaaacagaaaagaagtgagaagaaagggatgaaaaaacactgcggcagctctgggagacatagtcttctgtgccaagagaccatcacctcctataaatgtccccagtcctttaacatttgaaatagaaaggtgcagtggaaatgcaggcttctggaagggcaccaatagagcccatgtagcccggaatggactctgcccttaactagaaactgggagtcagtgagaaaatagaacctcggttctaaaaatagcccacttattttcatttctggtttcaataccttcactgcacctttgttttaaaggcattacaggagttctgacattttctttccatttctgaatcaacagagaagaaattcagctacatggtaagagagttaatattctaccttctcgcacacttaacacagacataccc

SEQ ID NO: 712639 - DNA, 833 bp, Homo sapiens
tcttctatattcaaacagctcctatcatctgagctatcaaaaatccaaccagcgtcagggagacattcaggaagaaaggactctcataaagaagccactcataatcaaacttggagaaattgatttagaattcaagtctctatattcccagtcttgagacttttccactgcacagtatttagtcatatgaactgtgtggcattcccagtttatctttgttactcttttagaatccaggaacccaggttgaaactaagcaaggttgtcccaatgaatttctctttttctacttgtcaaagtcaaataaaaaatatagagacaaatctctaaacaaaacattttgtttgggaaaactgaattgcaatttggggcatacacagactgcggtggtcttcagtatgtcacaagaacaaagagaaggaaggttggggctctattaaaaaagaaatgttatgtattcttttgaaagaaaactcattggcactagtgaagttttttgaagtgggcaagctctgrttggtaagtggtggggcagcaggtaacaccagtctgagagtcacagcagttcatttcagcagctactaggttaaacctgttcttaaaatcatagtattttggcagttggcttacagtatcacccctgggcaggcatttgtgtcctgagtcctttttctcctccagtctctcaactctaatttagttgggtttgacaagataactccaattcatataatcagtttttacatactcaataccataaacttgtgtaagcaacatagctcatttcagttccccaggactcattcaaggataaacttcagaacagttgccgg

SEQ ID NO: 712640 - DNA, 3186 bp, Homo sapiens
tttaccgggatattttatcagaaatgaattttgaattcccttaagataatttggttttctcctttgaccctaagagattgtttatattaataaatttcctaagatcagaaagttagaatgaatgcttaaaacagcacactgtgggtgaagccactataatgtgtgcttccaaataaaacacgtaaatagatattccttaattttttaactctttggttttattttattgactaaacacttggttctgacttgctttctcacccatattccaacaacttattctagtctactgtaatcccagttataaaactgtcactgacatcatctgttgcaaaaaaattatttacaactggatccatcatcaactcagtctacactaccagctttgaattccaaagcaattccacaccacaatccacatctgtattctcaaatccactttgatacagtttcccaagtccactttgatacagttacctctttagaaagatattagaatgacaaattttctggaaacaggttttcttcggggctggggctggaaggacattaaattaaaaagatggacctggcttaagacagaaaagacattcagtgcatgaatgtaaaaacatcactaaacttgacttacaaaattgttaattatgtatttgacagtgaattatcacaaacagctgggactaaagaatacaaacccacacagggagtggagaaaagtacactcaaattcatacaaacactatcaaagaggatgtttaaactcagcttctgcagtaacaacgtcttcacttacacaatgggttactcactgccaccaaaattcacaaaccaactattcccaggtttctaagtgcaggctctaaattggacattcttctccccatttagaaagttacgccataaggtttgtggccactagagagaaagaaccaggccaggatctaaaagaatgtgcgcacaaaggctgtgaaaagaaaagccgtcactttgcgaagtttggtcttaatttttttccagactatatgtaaatactctcaatgccttgggagacagctccaaagaagtttcctgagcctgacatcccatttcctttcaaacacacgctcaagccctccccacattttttgccaggagtttgctcccctgggaccccctcccttaacccacagggaggagcccctgtcagaaacacttgcatggagttgtcgagaaaaatccccccccaaagtcaatgacaaggcaaaagcccagaccagacattttggggcagacgtggctgcctggctttgaacactgggggaaaaacttttggcaaaaaaaaaaaaaaaaaaaaaaaaaaactcaactaaactaaacaaaaaaactaacctcactctttagggacatgttcagcctttctgcatcagaaaagacacaggctctccctacacttgatacaaagcccgcagggttccctctccacaaggcacatatcagggaaaaaaagaaaatctgatcttttttttaatccccagcacattttagcatataactcaggtgagagtctgagagttgcaagcttagataaaatattaaaatatttctctaaacgctaaactttctaataagtctgagagtttattaggaaagccatccctgatactcaatcttggctaacttaagatggtaaatttcaaagtccaaaggttagagccttcaaggaaaaaaagaaaaaagagataacacaacactcttttctttttagatgggatgatgagacatcctcgtctgcctccaagtatttttagaaaatgctgagaacaaccagattgtaatttaagcctctctgaaaagtaaggacctccaatggacagcccaatacctttccctaatcatctttccaaagatttccacatcatagacaaaagtttaagaggctgatatccctctgactctatctcaaattctctctgtggaaaggcactagagtaaccaagctcccaggggatggtaccaagctgactcttctctgggatgctgtctgctatgcaatgtagaagagcagaagtataaaggttgccagaagcacagccaacgtctgggaatattaggagccaacaaaataatagggaaaggatccatacaaggacagaacacattatggcatccaacactgattttaaaaataaccaaacaaacaaaatcatcatcccaggcagcctaagagcaatgtgtccagatgccagaataagggaatcaattgggggggggtcaatggaaacagctttaccctccagaagaccatggcgaaaaccacatcaatgccagtcataggagatcactctattttgaaaaatataaaactgtttcattgcaaatctatggaaacaatgtcacaggggccaagagctgtcacttcgagtcaaagaaggcccacttcactgtggcgctgatggccagtgatgtcaaggcgaattacaccccgactcaccaagagagaaatcaaagtcaggagaggaacattcagctggagacacacccacaggagtttggaaagcaacactccgtccaagctgtgctaatccatcacaggctcacacaaaggacgtgagggtatttcccccccatcaaaaatggaaaggaccaataataagatcacactaagggagatttggggagttgatcttatggccaaagcactctattcctggcaacatgttgggtggcggggcrgggggggtgcagtgaggttcactgcctggacattagaaggggagtcatgagcagaaactgcaaaagatagagaaactgcaaaagaagctggggttcttttctccaggtggctgcagtgaggtcccacaagctacctgagtagagcagcaggggaggtagaagggatataggacttagggtgaggagtacgaggtcttgggcatgttaaaaactctctgggccatagttcagtgataatcaatgagaagattctgtggaaacatgggatcacagctagaaatttccttcctaagaagaagtcagcaggaaagtcacaaggtaaaggcaagttcaggcctggctctggggcaggagaagaaaggagcagatctcacacagattccaaataagtcacagccattgatagccatgaatgtgaaccaaacatgagggacgaggagggaagcaggccccaagtaaacagaccatgtttat

SEQ ID NO: 712641 - DNA, 2176 bp, Homo sapiens
tattagatataattgaactccacatccaacagagaattcacatgctttttaagcactagagcactaaattggcctaaaaggaactgtaataaatgtcacagaatcaataacatgtagactaaaattagaagtgaataataaggttgaaaagcacatgactcttataatttgctggctctgctatccctcctgatctctcttacctgctcctccctcctggattgctggatggctctgggaaactggaaatttttactctacacagcarttcagttctccagcatttcctctcaaactcagctcccaaaacaactgtcctcattgagaacccatccatgtgcccagaagaaacaaaagggtcatcttctgatttaccaggatctgccttcctaagcagattttatttatttttatttttatttatttattgttttgagacggagtcttgctctgtcatccaggctgcagagcagtggcacaatcttcgctcactgcaacctctgcctcctgggttcaagcgattctcctgcctctgcctcccaagtagatgggattacaggcatccgccaccgggctaatttttttgtatttttagtagagatggggttttgccatgctggccaggctggtcacgaactcctgacctcaagtgatctgcctgcctcaaccttccaaactgctgggattataggcatgagccaccatgcccagccctaagaagattttaatggcaacttacacactagtaagcaatatctattgaccttcctttcccacttccatgaaaaggaaataaatcagctaaaaacactgtggtaattcccacctcctctttctcttccctgctccacctttcgggcatgttttgttgtttttgttcctttcttaagtcaacaaatatttcttgagcacctgctgtgtgccgggcacagtggtggaagctgaagatgtggaggtcagccaggcaggtgtggttcctgctctcatggagcttacagtctagcagggggagagacacaaacacaaattatcacacaaacgagtgtaacattgcccctgtggatagtgatgagagcctgtggtaaggagattttactattaaagacagttattcaatgatagttgttaaagcatggcaaggcagactttattcaagaccatcacaataggcatagggaccactacagtgggattctgcaatgggggaaagagactgggctcaattctgaatacagcttgggcaagtgggaatttatcgctaagaagcagggtaggatcagtggatggtaaatgactgagaacgaacattgaggataagggatcattctggctaaaccaaccttacaggattcttgctaaagtcagtccaggtgattagctatcacctgggggatagcggaggatgagaaacccaatcagatatcaagggtgattgtgatcagctgtccaagggaggtgttcttgctcaaccgacttagcaagactccttgctaaaactagattttacaaggaagtgcacaggtgggcctaggagaaggttcaggaggctgactaaagtttagtcaagcaaggaatctttgtcactgtctggccagggagcccagagaaggctggactgctagagggatgctggggtgatgtcagtggtggggcaggagttaccttggcaaagaggagggaagagtgtgctgggaggaggcaacagcaggtgcaaagcccttgtggtggaaaggagcaagtcaaatgtgaaggactgaaaggaagcagtctgcctgggtcattgtgaggctgggagaggctgcagaggtgggccagcaccaggccacgcatggcctggcagatcaggctggggacagctgccctgattctaagagctgtgaaaaaccattacgattattttgtttttgtttttgtttttatttgtgttgttaaatataacatgaatttagaaaatcatatcaagcaaatgtaccatttaatgaattactataaagtaaacatcacagatgggaggaaactaaggagacacgatgactaaatgcagtgtgggatcctggattggatcttggaacagaaaaaaaattaatgggaaaactggttagatctgaataaagtctgtcgtctagttaattgtattgtaccaaatgttggtttcttagtttggaccaaaaaaaaa

SEQ ID NO: 712642 - DNA, 2176 bp, Homo sapiens
tattagatataattgaactccacatccaacagagaattcacatgctttttaagcactagagcactaaattggcctaaaaggaactgtaataaatgtcacagaatcaataacatgtagactaaaattagaagtgaataataaggttgaaaagcacatgactcttataatttgctggctctgctatccctcctgatctctcttacctgctcctccctcctggattgctggatggctctgggaaactggaaatttttactctacacagcaattcagttctccagcatttcctctcaaactcagctcccaaaacaactgtcctcattgagaacccatccatgtgcccagmagaaacaaaagggtcatcttctgatttaccaggatctgccttcctaagcagattttatttatttttatttttatttatttattgttttgagacggagtcttgctctgtcatccaggctgcagagcagtggcacaatcttcgctcactgcaacctctgcctcctgggttcaagcgattctcctgcctctgcctcccaagtagatgggattacaggcatccgccaccgggctaatttttttgtatttttagtagagatggggttttgccatgctggccaggctggtcacgaactcctgacctcaagtgatctgcctgcctcaaccttccaaactgctgggattataggcatgagccaccatgcccagccctaagaagattttaatggcaacttacacactagtaagcaatatctattgaccttcctttcccacttccatgaaaaggaaataaatcagctaaaaacactgtggtaattcccacctcctctttctcttccctgctccacctttcgggcatgttttgttgtttttgttcctttcttaagtcaacaaatatttcttgagcacctgctgtgtgccgggcacagtggtggaagctgaagatgtggaggtcagccaggcaggtgtggttcctgctctcatggagcttacagtctagcagggggagagacacaaacacaaattatcacacaaacgagtgtaacattgcccctgtggatagtgatgagagcctgtggtaaggagattttactattaaagacagttattcaatgatagttgttaaagcatggcaaggcagactttattcaagaccatcacaataggcatagggaccactacagtgggattctgcaatgggggaaagagactgggctcaattctgaatacagcttgggcaagtgggaatttatcgctaagaagcagggtaggatcagtggatggtaaatgactgagaacgaacattgaggataagggatcattctggctaaaccaaccttacaggattcttgctaaagtcagtccaggtgattagctatcacctgggggatagcggaggatgagaaacccaatcagatatcaagggtgattgtgatcagctgtccaagggaggtgttcttgctcaaccgacttagcaagactccttgctaaaactagattttacaaggaagtgcacaggtgggcctaggagaaggttcaggaggctgactaaagtttagtcaagcaaggaatctttgtcactgtctggccagggagcccagagaaggctggactgctagagggatgctggggtgatgtcagtggtggggcaggagttaccttggcaaagaggagggaagagtgtgctgggaggaggcaacagcaggtgcaaagcccttgtggtggaaaggagcaagtcaaatgtgaaggactgaaaggaagcagtctgcctgggtcattgtgaggctgggagaggctgcagaggtgggccagcaccaggccacgcatggcctggcagatcaggctggggacagctgccctgattctaagagctgtgaaaaaccattacgattattttgtttttgtttttgtttttatttgtgttgttaaatataacatgaatttagaaaatcatatcaagcaaatgtaccatttaatgaattactataaagtaaacatcacagatgggaggaaactaaggagacacgatgactaaatgcagtgtgggatcctggattggatcttggaacagaaaaaaaattaatgggaaaactggttagatctgaataaagtctgtcgtctagttaattgtattgtaccaaatgttggtttcttagtttggaccaaaaaaaaa

SEQ ID NO: 712643 - DNA, 2176 bp, Homo sapiens
tattagatataattgaactccacatccaacagagaattcacatgctttttaagcactagagcactaaattggcctaaaaggaactgtaataaatgtcacagaatcaataacatgtagactaaaattagaagtgaataataaggttgaaaagcacatgactcttataatttgctggctctgctatccctcctgatctctcttacctgctcctccctcctggattgctggatggctctgggaaactggaaatttttactctacacagcaattcagttctccagcatttcctctcaaactcagctcccaaaacaactgtcctcattgagaacccatccatgtgcccagaagaaacaaaagggtcatcttctgatttaccaggatctgccttcctaagcagattttatttatttttatttttatttatttattgttttgagacrgagtcttgctctgtcatccaggctgcagagcagtggcacaatcttcgctcactgcaacctctgcctcctgggttcaagcgattctcctgcctctgcctcccaagtagatgggattacaggcatccgccaccgggctaatttttttgtatttttagtagagatggggttttgccatgctggccaggctggtcacgaactcctgacctcaagtgatctgcctgcctcaaccttccaaactgctgggattataggcatgagccaccatgcccagccctaagaagattttaatggcaacttacacactagtaagcaatatctattgaccttcctttcccacttccatgaaaaggaaataaatcagctaaaaacactgtggtaattcccacctcctctttctcttccctgctccacctttcgggcatgttttgttgtttttgttcctttcttaagtcaacaaatatttcttgagcacctgctgtgtgccgggcacagtggtggaagctgaagatgtggaggtcagccaggcaggtgtggttcctgctctcatggagcttacagtctagcagggggagagacacaaacacaaattatcacacaaacgagtgtaacattgcccctgtggatagtgatgagagcctgtggtaaggagattttactattaaagacagttattcaatgatagttgttaaagcatggcaaggcagactttattcaagaccatcacaataggcatagggaccactacagtgggattctgcaatgggggaaagagactgggctcaattctgaatacagcttgggcaagtgggaatttatcgctaagaagcagggtaggatcagtggatggtaaatgactgagaacgaacattgaggataagggatcattctggctaaaccaaccttacaggattcttgctaaagtcagtccaggtgattagctatcacctgggggatagcggaggatgagaaacccaatcagatatcaagggtgattgtgatcagctgtccaagggaggtgttcttgctcaaccgacttagcaagactccttgctaaaactagattttacaaggaagtgcacaggtgggcctaggagaaggttcaggaggctgactaaagtttagtcaagcaaggaatctttgtcactgtctggccagggagcccagagaaggctggactgctagagggatgctggggtgatgtcagtggtggggcaggagttaccttggcaaagaggagggaagagtgtgctgggaggaggcaacagcaggtgcaaagcccttgtggtggaaaggagcaagtcaaatgtgaaggactgaaaggaagcagtctgcctgggtcattgtgaggctgggagaggctgcagaggtgggccagcaccaggccacgcatggcctggcagatcaggctggggacagctgccctgattctaagagctgtgaaaaaccattacgattattttgtttttgtttttgtttttatttgtgttgttaaatataacatgaatttagaaaatcatatcaagcaaatgtaccatttaatgaattactataaagtaaacatcacagatgggaggaaactaaggagacacgatgactaaatgcagtgtgggatcctggattggatcttggaacagaaaaaaaattaatgggaaaactggttagatctgaataaagtctgtcgtctagttaattgtattgtaccaaatgttggtttcttagtttggaccaaaaaaaaa

SEQ ID NO: 712644 - DNA, 656 bp, Homo sapiens
ctgtgccaggcacagagcaagaagaaagtcaatggttattataaaaattaaaacagaagtgataatccaatggggaagagggattatttccagatctgggaaaaattaagctggatccatacccaataccttgcactaaaaaaaatctaaatggaggaaatatttaaatgtaaaaaggtaaacccacaaaaatttagaaaaaaatggggaagttattttatgacttcacagtgaggaagttctttccaagtatcatataagatgtggggccaggcacagtggctcatgcctgtaatcccagcagtttgggaggctgaggcaggaggatcacttgagcccaggagttcaagatcagcctgggtaacattgtgagattccatctctacaaaataaatgttttaaattagtcgagtatggtagcgcatgcctgtggtccctgctactcgggaggctgagacaggcattgtgagattccatctctacaaaaaaaaatgttttaaattagttgagtatggtagcgcatgcctgtggtccctgctactcaggaagctaaggaggagtgcttaagcctggaacattgaggctgcagtgagccgtgatcgcaccacygcactccagcatgagtgacagagaacctgtctcaaaaaagaaaaaaa

SEQ ID NO: 712645 - DNA, 529 bp, Homo sapiens; identical to SEQ ID NO: 712253

SEQ ID NO: 712646 - DNA, 529 bp, Homo sapiens; identical to SEQ ID NO: 712254

SEQ ID NO: 712647 - DNA, 529 bp, Homo sapiens; identical to SEQ ID NO: 712255

SEQ ID NO: 712648 - DNA, 529 bp, Homo sapiens; identical to SEQ ID NO: 712256

SEQ ID NO: 712649 - DNA, 1028 bp, Homo sapiens
cctatttatataaaatgtccagaataggcaagtccacagagaaagaaaatacattcactgttgacagggcctggagggaatgaggagtgactgcttaatgtgttcaggccttctttttggagtaataataattgcaatgatcgtaacctttaatccactcaacaaataagaccacccatgagctagwtgttgtgctgcatgctcaggataaaatgtcaaggacagtactatctatacagtctctgctctcagggatcttactatttagtctgcacatccacgtacctaagcttcatcatcagcccagcctgctattgtgactcaattaacgttacactctaccatgaccagagttgtactggcccaagatgttggttgaggttgctactgacacttaaatatttttacatgtgaatgtatgtctatatttatacactatattttatactgtgttagtttgctaagacaacagaaatttactgtctcatagttctgcaggctagatgaccaaggtgccagcagggccatgctccctctgaaggtataggggagggcctgcttttaggtcttgctcctaggttctggtagttcttaggcttgggcagcataccttcaatcttcacaccatgttatccgtgtgtgtgtgtgtgtgtgtgtgtgtgtgtgtgtgtgtacacgtttctcctttttataaggacaccagtcatattggattacggcccaccctactccagtatcacctaatcttaaccaattgcatatgcaatgaccctatttccaaataaggtcactggggaggtactaaggattaagacttcagcatgtgaattttggagagacacaattcaacccataagacacacaaatgtgcacatacgcgggtacggtgtttacaaaactgaccttaatattatctctaagagatcaaaaaggcaatttatttttgttcctgtgctgcagaaaagacggctgaggctcatagaagttaagggattaggggactccaaggtcttgaggctcctagtggg

SEQ ID NO: 712650 - DNA, 636 bp, Homo sapiens
tagtctttataaagctgaaccatgaacttgaagaaaagatgcacaggtgagaaaaatcattctttaaatgctttcagtagaagcggaaaaaaaaattcgagttattgctattttatatgactcatagcaacttagtttacactgtggaggacagtatagctccctacttcaatcttaggtcaaatttctacccagaaaatgtcttgaacttgtcttcacccttccatttctactgccaatactcataaagtccttaaattagttcttatttcaataggttctaagtgtcgtaactagtctgtctctagcgtcttattcttccgatcttttctcaaactcgtaatcaaagttatctttcttatgtctattaccttgattgtgttgatagttttacaggtatgtgcatatgtccaaactcagcaattgtatgtgtagtttattatrtatcaactatacctcaataaagttgttttcttaaaaagcaaagttatctttctacaacacatatccaatcacatccctctcctcgaaaaccttcagttgaagacatgtagtccagacttctcagcatgacatacaaggtccttccagcctcagctcccacaggcctgcatattagaaaaggcatcaatcatg

SEQ ID NO: 712651 - DNA, 1095 bp, Homo sapiens
  misc_feature 651, 652, 653, 654, 655, 656, 657, 658, 659, 660, 661, 662,663, 664, 665, 666, 667, 668, 669, 670, 671, 672, 673, 674,675, 676, 677, 678, 679, 680, 681, 682, 683, 684, 685, 686,687, 688, 689, 690, 691, 692, 693, 694, 695, 696, 697: n = A,T,C or G
  misc_feature 698, 699, 700, 701, 702, 703, 704, 705, 706, 707, 708, 709,710, 711, 712, 713, 714, 715, 716, 717, 718, 719, 720, 721,722, 723, 724, 725, 726, 727, 728, 729, 730, 731, 732, 733,734, 735, 736, 737, 738, 739, 740, 741, 742, 743, 744: n = A,T,C or G
  misc_feature 745, 746, 747, 748, 749, 750: n = A,T,C or G
tcacaaatctggctgggaaaactgttttgtgacctactagatctctctgactttcattcccaaactcctcactgtgatttctcagtttttttcagaactgccttagctgtctcttgactaccttatcagaataagaaattaattttcaaaattctcagttctcttgtccaggtttctagatgcttctcaactcaaatagaatcacagatgtttctgtgtgtggtaatgcccattcttggttcatgagagtcagaatgatacataataatgtaccagtgtcttggacttgtaaagtcttatgagataatagtatagcattttggatgaatgtagtaagtaaaccaaagttctgaaaagttaaatgctactattgatgtttattttggttgagtattgtgctaaggagtgaatatggatgagctccttacgtccaacaaagtcctgsgtagcattttttatacatatttaaatatgaattcactgaaacttcagcaggtttaaatacttcaaaagggaaatttaataattagtgagtcaaggttcaaaatgcagtggttctgtgcaagagcattggctgtacaaagaacttggtgtataggaaaagactactttctcactgtaatcctaagcaaattgtttaccttctaattnnnnnnnnnnnnnnnnnnnnnnnnnnnnnnnnnnnnnnnnnnnnnnnnnnnnnnnnnnnnnnnnnnnnnnnnnnnnnnnnnnnnnnnnnnnnnnnnnnnntctatgaccactttttgtagactcatttgtttgttacctaatcatcatgaataaaatgtggctaaattgttcttaagaaagttttctgtttaaaatctttaaaaaataattattaatgttttgttacagaatgcttaagtataaagactctagatataaaaccgctaatccatagaaaatatatacctatcttaaatataaaactttaagattttaatatcttccaataaatacctaagcagttcatgaaatcatacttgaaaacaatatgaatttaagaacatgatatttccttaaatcagttacaatgatgtaaccatctatttaaataaataaaaccaaaat

SEQ ID NO: 712652 - DNA, 1095 bp, Homo sapiens
  misc_feature 651, 652, 653, 654, 655, 656, 657, 658, 659, 660, 661, 662,663, 664, 665, 666, 667, 668, 669, 670, 671, 672, 673, 674,675, 676, 677, 678, 679, 680, 681, 682, 683, 684, 685, 686,687, 688, 689, 690, 691, 692, 693, 694, 695, 696, 697: n = A,T,C or G
  misc_feature 698, 699, 700, 701, 702, 703, 704, 705, 706, 707, 708, 709,710, 711, 712, 713, 714, 715, 716, 717, 718, 719, 720, 721,722, 723, 724, 725, 726, 727, 728, 729, 730, 731, 732, 733,734, 735, 736, 737, 738, 739, 740, 741, 742, 743, 744: n = A,T,C or G
  misc_feature 745, 746, 747, 748, 749, 750: n = A,T,C or G
tcacaaatctggctgggaaaactgttttgtgacctactagatctctctgactttcattcccaaactcctcactgtgatttctcagtttttttcagaactgccttagctgtctcttgactaccttatcagaataagaaattaattttcaaaattctcagttctcttgtccaggtttctagatgcttctcaactcaaatagaatcacagatgtttctgtgtgtggtaatgcccattcttggttcatgagagtcagaatgatacataataatgtaccagtgtcttggacttgtaaagtcttatgagataatagtatagcattttggatgaatgtagtaagtaaaccaaagttctgaaaagttaaatgctactattgatgtttattttggttgagtattgtgctaaggagtgaatatggatgagctccttacgtccaacaaagtcctgcgtagcattttttatacatatttaaatatgaattcrctgaaacttcagcaggtttaaatacttcaaaagggaaatttaataattagtgagtcaaggttcaaaatgcagtggttctgtgcaagagcattggctgtacaaagaacttggtgtataggaaaagactactttctcactgtaatcctaagcaaattgtttaccttctaattnnnnnnnnnnnnnnnnnnnnnnnnnnnnnnnnnnnnnnnnnnnnnnnnnnnnnnnnnnnnnnnnnnnnnnnnnnnnnnnnnnnnnnnnnnnnnnnnnnnntctatgaccactttttgtagactcatttgtttgttacctaatcatcatgaataaaatgtggctaaattgttcttaagaaagttttctgtttaaaatctttaaaaaataattattaatgttttgttacagaatgcttaagtataaagactctagatataaaaccgctaatccatagaaaatatatacctatcttaaatataaaactttaagattttaatatcttccaataaatacctaagcagttcatgaaatcatacttgaaaacaatatgaatttaagaacatgatatttccttaaatcagttacaatgatgtaaccatctatttaaataaataaaaccaaaat

SEQ ID NO: 712653 - DNA, 1208 bp, Homo sapiens
gatctgtcgtttcagagtgactttccttaaacagagattaaaacagaggggactgacttgtgataccagctcagcaacttcaaagtggcaaactgggccactttacctattacataaataatatggggaatacatgacagaaatgagggatttttaagggaaaaaaataacatgattcgatctgccttcaaaagacttttccggtagttaaacttcaaatgtacataggatactggacaaagttcaaatgaatttaaaatagtgtaggtggtttttttwaaaaagactcattatataaataaaaataaattttaaaaagttttgagtgtctacttcgtttaacacatcgtactgaacaccgggaatggaaagagatgttacaataatgacaaagacatggttcccaaccttaaaaagcttatgtgctgtgggagaaatgggcatgtataaataactatgttgcttattacaaggacaggaaataaacagtaattggtggtataggctgagcacagagacaaaatggctattctgatgagggaaattagggaaggaacattgttttgcccaatgaaatgatttgaatggacactttaaaatgttattgagcatagatgataaaacatttattaaacgaataaaagctcaaaagtgaaatgttataagcaaacatcaaatatcctgaatctctagaattttattgttgaatatgccttagctattacaagtggtctttattcttggtgacttagggattcccaagaaatttgcaatcactcctgacaactcaaagtagtaataagttaacctcaagagaacaatcttgtttaaaaataaatttaagtgtattttttaattattatttaagttctgggatacatgtgcagaacgtgcaggtttgttacataggtatacatgtgccatggtggcttgctgcaccttccaacccgtcatctaggttttaagccctgcatgcattagttatttgtcctaatgttctccctccccttgccctccaccccctgacaggccccggtgtgtgatgtttccctccctgtgtccatgtgttctcattgttcaactcccacagttgaacaactcccacatactcaatgagaatatgtggtgtttggttttttgttctgtgttattttgctgagaatgatggcttccggcttcatccatgtccctgcaaaagacatgaactc

SEQ ID NO: 712654 - DNA, 663 bp, Homo sapiens
cttcctcccaggcacacagctggacacatttcccaaaatctctctaggtgggccatgtgacggagttctgtccaaaggaacatgggcggaagagatatgcaccacttccaggcctgacccagaaacattttccacacagacttttccttcttttcctatgtgctctttcaacaaagagggctctatggactgagagaaaggcagagccccaagaggaaggagcctgggtcgcagaaagactaggtggaaagctgtccactgaccacaaacatccacatgggacatcatawgagagagaaataaacctgggaatagttacttaacttctttgggtcctagtctctgggcaaagaggaaaagctcaataaatatcagctgacattatattaggaaataaagtttacttctccttaatttctttttcttaggcaaggcggagcaccgggggtgagtgggattggtgaaaagcactaaatgacatttgcctattacaaaatgctaattggtacatttaaataagatgacattgtgacaataactcacagattaaagacattttcttctggatcccagacattagattttaagactgatttcttgctaaaaacactcaaatctagttaaaatgtgaaatataaacagaatgtggtacccacttctttc

SEQ ID NO: 712655 - DNA, 666 bp, Homo sapiens
tttgctggatggtgttggcccagagccagcagctttagggctgcctgcggaaggtccccacaactgaggtttattattattatttagtttgctggtgagacacacacagagtctgcacagcatctggctgcggggtggattatgrttagccaagggttcctttttatggatgactgcggtagtgaagttgcagacttacctccagcctcctcaatttctgatgggaggcctgagtctgacaaatagtcccgtgtcctcagtccccatcactctagccccgttggaagctggccattgcttctaggcaccagcccgaaagagaggaagactaatacttttcaggctgcccagccatagcctgtagaacaggggccaggggagggcacaagagagaattctaaccaccagcccactgatgtccacctctgatggccagtggagatgagtgagcatccagggctgcaggaccttcttgtgtgtgtgcttggccccactacccctttcttctttgtaaggggctcaacacagcaccatacacaacttcaaaacttgatagggtaatttttatcttaaaagaaatcctgagaagtaaaggttctgagctttgtagagaaagtaaataaagtgtaacattctgaccctcagagctaaaggggttgttataga

SEQ ID NO: 712656 - DNA, 666 bp, Homo sapiens
tttgctggatggtgttggcccagagccagcagctttagggctgcctgcggaaggtccccacaactgaggtttattattattatttagtttgctggtgagacacacacagagtctgcacagcatctggctgcggggtggattatggttagccaagggttcctttttatggatgactgcggtagtgaagttgcagacttacctccagcctcctcaatttctgatgggaggcctgagtctgacaaatagtcccgtgtcctcagtccccatcactctagcccygttggaagctggccattgcttctaggcaccagcccgaaagagaggaagactaatacttttcaggctgcccagccatagcctgtagaacaggggccaggggagggcacaagagagaattctaaccaccagcccactgatgtccacctctgatggccagtggagatgagtgagcatccagggctgcaggaccttcttgtgtgtgtgcttggccccactacccctttcttctttgtaaggggctcaacacagcaccatacacaacttcaaaacttgatagggtaatttttatcttaaaagaaatcctgagaagtaaaggttctgagctttgtagagaaagtaaataaagtgtaacattctgaccctcagagctaaaggggttgttataga

SEQ ID NO: 712657 - DNA, 1767 bp, Homo sapiens
gcatggaattgaggagagagctcaaactatggtcagccttctgtatcctcgggttctgggtccttggatttaaccaactgtgcatcaaaaatatttggaaaaagtaaaacaataaaaaaacacaaaaatttaaaaatactttatatcagctatttacaaagcatttatgttgtattaggtattatagcaatctagagatgatttaaagtatacggaaggatgtgcataggttatatgcaaatactatgccacattatatcaggaacttgagcatctgtgaattttggtatctctggggtcctggaaccagtatcttgaggttactaagcgacgactgtattcaatttcttctttggttattagtttattctttaatgtatttttgttgttgttttgtctttttgtttttgcctcttcaagtcaacgtcggaaacttagttgttctagactacccattagctcaaagctaccagtaatcagactaccactgcaatctaagcaaccgattttttttttacccatcagactggcaaaaattaagataagatctaktgatgttgaagctgtggggagtttttcctgagcatgttaattatgacagccctttttactaggcacctagacgattcatcaaaatgaaataaaatacccatgcacttgaagaagttacctggttatttccttatctgggtgctggttatgtgaggtctacagttgatgaaaacttattaagctttatatttctaataggtacaattttctgtatgtgtaatatatttgaaaagtttttaaaatgttttttgccacagcccgcagctgtgtataatgctattcgcttaacagtggaaaacatggcaatgacctgaatctccctggctcccgggatcctacccccttaagttaacgaaaataaaagtaaaagaaataacttccactgtctttcgtaatgccttaaatccgtcctcagttaaaccggcggttggcgctggttttttccagggcaggattctgggagacggaggagcagacgccagcatttcgcccccggcacctccagcgggctgcggtccgctcccggcctcactcgagcaggtcccgccccgccagaggccgttagtccaagtcacgtgatcgtcgactcagctgacctggcgggaccggaaaaagaaattcccgggccctggcttcctcgcgcgatgtatgaggcaccaggggtgaagcgggcatgggctgctggagcgggaatgagggggcgccagtggctccggaaacgggttgaggttgtctgcactggccgctccgcaaacacagtgtgtgcgggcgtcagggcagcaggtctggtagagaaaagtccaccgccatccctctcccgaatggggcgggtaagacagagcaggccggccggcttagagttccctgcttccctggcggaaggaagggcccctgactcctggggcaggaactagggcttgtctggagctgggagtcctttcaggtcttctctagctccaaaaggacctcccaaggacacccccttccccagccctgctgtgggacttggacaggaaagtgctagaatcaggctcactcttgcacactgttaggaagccactccgctcttttcagatccagaaagtagtagttttggggctgatacttatccatccattcatccaatccatccatccataggttcaaagtgcctagtctataccatgaattgtactaggcactgggaggacttgagctgccgcgggaaggggaaat

SEQ ID NO: 712658 - DNA, 1916 bp, Homo sapiens
ggctccccaggaatgaatgcatttcccatagctgggagagtatcatctggaggttagggaaagatgagtctggacaagtaaaggccaaatcttcctgactgttggatcaccacaatcaagataacgaatatatccaccggcccccaaaatttccttgtgttaggggctrttttaggaagtatgatcaagaagggctggcctgccagggtggagtggctcacgcctgtaatcccagcactttgagaggccaaagtgtgcagatgacctgaggtcaggagttcgagattagcatggccaacacagtgaaaccctgtctttaccaaaaatacaaaaaagttgggtgtggtgacgcatgcctgtagtcccagctacttgggaggctgaggcaggagaattgcttgaacccgggaggtggaggttgcagtgagccgagattgtgccattgcactccagcctgggcaacagagcgagactccgtctttaaaaaaaaaaaaaaaaagaagggctggtctgatgaggtgtcacttgagcagagagtggaatgaaataaaggatagcaagccacatagagagtgcagcggaagcaaggctggtgtccctgagctgcagcagggaagctggagtggctggagttgtgtgggtatggggaagaagggagagagttcactcgtctctgtgaggcccaggactttgttttatcccatgctgtacccccagcacttagagtgggagctagcacagagaaggtgctcaattgatgtttgctgagcagatgaatgcctggagtagacctcagagcagggtttggtggcagggtgggtcaggtagagtttactcaacagcctggtgataggggagaacaagtggccagagggtatccatctatgtcggggaccaggggtccctgctgggcagcagtgtgggagacacagggatcctggccacacctcagtcttctttccagcctgattacctgcctccctcccttgcagaggtttcggttctgtggtgatctggactgtcctgaccgggtcctggcagagatcagcacgctggccaagatggttgagtgcacagggtctacactgggtggaggaggggtgttgggctggggattgtggctgtagaggatggtgaggtttctctggggctagggcctcagtgctctcagcctgtgctaccatgctttgtgaccttgatcagtggctggcctgctttgagccagtccccaggaagaaggggtgaggtttgccagcctggctgatgtaaggacttcctttccagtcctctgtgaagttgcagctgctctgcagccaggtactaaaggagctgctgggacagggaattgatgtgagtacaagatccagcaccccattgtcccatgaccttatgaccaccactgccctgaaactctgcactaggcccggggagacgggtgagccagcctctcaacctctctgggtacctcccttccttctttccagcctgtctgttccttattgcaggatccaggctgggggtgaggggctggtgagcagggacctggcaccccctgaaggtctcctttccccatagtataagaagatcctgaaactcacagctgatgccaagtttggtgagcaccccgctgagttcacaggccccaggcaaccctgggacctcggcctggtgcctggtacagagcccgccccccacccccccgccaacacacacatcccagcagtatccttaacctgccttccctagtggaggagcatgagggaaagaaagacattgacagtcccaccttcctgtcctctgccagctcctggtggagcagtagcagtgcctatggctccaggaggcctgggggctttgagctgaagttaatagggcaacagggaggtggctgggcccacagtgacaccccctgtccc

SEQ ID NO: 712659 - DNA, 718 bp, Homo sapiens
tttgggaggctgaggcaggagaatcacttgaggtcaggagtttgagaccagcctggccaacgtggcraaacctcacccctactaaaattacaacaacaacaacaaaaaattagccaggcatggtggcgcatgcctgtaatcccagctactcaggaggctgaggcacgagaatcgcttgagcccacgtggtggaggctgcagtgagctgagattgcaccactgcactccagcctgggccacagagtgacactgtctcaaaacaaaacaaaaaagcctccttagattcaaactggattctggcctgggttccactggtcaccattcaactactgttcatctctaagtctctgtttctgtgacttcaaaaggaagttagcattttccttgcagaggtgctgaggattgaatgagagaatacctggaaagcattaggcatgtagcacacttagcagatggtggttggctccctctgcttttccaccagtctgtggcctacagtttaaatggtgggaagaaggacatgagatttgaggctggggaaggaggtatggggttctaggcaagggaggaagcctcttaggcctggagcaagggaccagggtcctgggcaggtgacagagccccacggtgccctcgctaccctattaatgggcccagaatctggaagccagccgccatgtgccctcatgcccagggtcttcctgcaggtggagctgaa

SEQ ID NO: 712660 - DNA, 718 bp, Homo sapiens
tttgggaggctgaggcaggagaatcacttgaggtcaggagtttgagaccagcctggccaacgtggcgaaacctcacccctactaaaattacaacaacaacaacaaaaaattagccaggcatggtggcgcatgcctgtaatcccagctactcaggaggctgaggcacgagaatcgcttgagcccacgtggtggaggctgcagtgagctgagattgcaccrctgcactccagcctgggccacagagtgacactgtctcaaaacaaaacaaaaaagcctccttagattcaaactggattctggcctgggttccactggtcaccattcaactactgttcatctctaagtctctgtttctgtgacttcaaaaggaagttagcattttccttgcagaggtgctgaggattgaatgagagaatacctggaaagcattaggcatgtagcacacttagcagatggtggttggctccctctgcttttccaccagtctgtggcctacagtttaaatggtgggaagaaggacatgagatttgaggctggggaaggaggtatggggttctaggcaagggaggaagcctcttaggcctggagcaagggaccagggtcctgggcaggtgacagagccccacggtgccctcgctaccctattaatgggcccagaatctggaagccagccgccatgtgccctcatgcccagggtcttcctgcaggtggagctgaa

SEQ ID NO: 712661 - DNA, 568 bp, Homo sapiens
  misc_feature 556: n = A,T,C or G
aaatgtgtgagtgcacgagagtgaagggatccatagctgtcatcagagttttaaaccagtaaggaatgaaaaaaaaagtctaagaacggttgccctggaggctataaacagtttctgatactcttggaaaatagtattgaaagggctgamagttttagtgtttgctgactcttcctctcgtggtctccctgatattatatccttcttccttggtaaacttgttcccatcacaccttcacccagtcagcctcgcccaggctagaaaatggcagctcttggcaagcccccccaccgctggctggtgcacctgggtgaagacaccgcagctcttggtaggggggatgggggggcggggagtgcaaaaggccaggacccaagttcaagtcctgtgccatagagtcctacatcccatcaacagtgccccactgtgtggtgtttcataagggagcagccccacctccaggaacttcactcacagctgctcacaaaaattacagtcaactttaccacatttactagctgactgatttacagtcaactttaccacatttactanctgactgatttt

SEQ ID NO: 712662 - DNA, 611 bp, Homo sapiens
agggggcagcatcgcaccctaggaacttcactcagagctgctcacaataattacagtcaacatttgccacatttactagctgactgcatttttgttttgttttgttttgttttgttttggttgttataagcagtgatccattttagaaaatgaaaaataatgaggaaactcagtatataaaacagacataggtctaactgctrtagttcaaggggaaggaagaagaggtgagagagggggccagaggcctgcccagcacccaaggagctcagcttggaaacccagacctcagagcactcggttctgcagacacattgggggtgcagccagtgacaggagagtggggcgccagcagcattaggaaccacccagagacttcaggcaagaggctcctgagatgtcatttgcactggaaggccctgttggcaacagtgtgggggacacataaggggggtgtccaggaagatgtgacagcggctcctgcaagaggggacaagagccggcacagtgcagtggccttcagacactggggagcaagacaggagagatcagagagaccatgaccacctcctgctgaccacctggatgtgagggatgagggggcagagggc

SEQ ID NO: 712663 - DNA, 1486 bp, Homo sapiens
acaaggttggtgggagtgttaatgaaatttggtacgggtggctaggattatgaagctaggaaaaatgagcatctcagatgtcctctgaacgtgtgtcttgatggggataaagagaaaatggtaaacaagtcaaagaaaattaattcctaaaataattgtagtactagtaatggggatatgggccacaaagattcaagaggttcaagcgatgttattgaatagcaccggcacaatttggctaagtctggagcctagacgacaggatagtgaagctgttttttaaaactgcaaaaataggagcaatacagaacctcagggaaggaagggaaacgagctatttaccagatgacgttatctggtatgaaagttagttaagacatctaagcctcacactcttagatttgtgggatatgcagaaagcaactgacaataaacaggggcctggaacctgagagagatgtcaaccaagaagtaaaatctgtaatgatctttgcagttgttatatgacattgccaggaaagaagaagagaaaacaaggccaaagacagcacctgagatacatacattgcattagtcagggcctagagggacagaactaataatatgtatatatctccttgaggaacaaggagagccagtctgagtcccaaaaccaaagaacatggagtctaatgtttgagggtaggaagcatccagcacgggagaaagatgtaggctaggaggctagggccagtctctccttttcacgtttttctgccagctttatatttgctggcagctgattagacagtgcccacccaattaagagtgggtctgcctttcccagcccactgacttaaatgttaatctcctttggcaacaccctcacagacacacccaggatcaatactttctatccttcaacccaatcaagttgacactcaataatattaaccatcacaaacacttagaagacaggaagagcaaacaagaaggaactaggaaaggaatggttagagagctagggagtgggagcaggagtatgagtatgtaaaaggccactttttatgagccagatactgccaacatgcaaaaaccaaaagaaaagtaccccatgccttgcaggaaggtcacttccaaagtcatatcttacccacagcaccagcaaaatcctaagaagtcacaaataagagctagctccacaaatgactcagtaacaaagtwtaaacaggtatgtgggaggttattatgttaaaaaaaattttccgaaatattattagtaatagcaccccataagggaagaagggcactattaaataaactcccattaaatttgagagcaggtaaaagaaaaaaagactttatgagggtctcataaaagcagtataagaagctgaaaagagcaataaagcaggaagcaaacctaaataaaattttgccctggttctgtcactattatcagatgcgtgatccaggcatgtcacaaacccagctgagtctccaataa

SEQ ID NO: 712664 - DNA, 677 bp, Homo sapiens
tgggactgggygccatggagcagggagcgacacttgttggggagcctccggcggcacaggagcccacggagggggtgggaggctcaggcatggcgggcttgcaggtcccgagcgctgctccacgggaaggcagctaaggcccagcgagaaatcgagtgcagcgccagtgggctggcactgcggggggacccagtacaacctccacagccactggcctgggtgctaagcccctcattgcccgtggctggcagggccggctggctgctccgagtgcggggcctgccaagcccacgcccacccggaactccagctggcccgcaagcacggcgcgcagccccagttcccgctcgcccctctccctccacacctccctgcaagctgagggagccagctctggccttggccagcccagaaaggggctcccacagtgcagcagtgggctgaagggttcctcaagtgccactaaagtgggagcccaggcagaggaggcgccaagagcgagcaagggctctgaggactgccagcacgctgtcgcctctcgcttggatagagttcctacatttttatcagaattgcaggcaacatacctcttctacatgcttttcatggtgggggaggaggaaacaaaggagggagcataaaactactttttgaagtgaagaacgacatttccctgc

SEQ ID NO: 712665 - DNA, 1353 bp, Homo sapiens
gaattccttaaattgataaaaggtatctttaagaaacctatagcagatgtccttttaaaaacagaaacatactaggcaggattgcattacattagaaataaatataaagatgcattctacaagtttattattcaacactgttctacaggtccaatctaatttaataagacaagaaaaaggaggaaaagggtataactattggaaataaaaagatgacaggcactatttgcatatgatgtgactgttttacaggtatgtgtgtgttataaacatatataacaaatattcaagaaaattaaaaaattcaaacaactaataaaagaattcaatgaggaagctagctacagaaataaatagcattcaaaaaaatgtaataaaaagacatctttcccaaaagcaacaaaaatatgtccaaggattaaactaatacacgatgtatttaaaaattataaaattgtattgaaggatttaaagaacatctgaataaatggggaatccatgttcctggataagaagccttaagattataaagatgtcaattatcgagataatataactgctctagaaagtaaatgcaatcccagtctaaatcataacacagcatgttttatggaatcggaaaagctgattctagagttcgtccagaaaagaaaatatactaaaaagccagggtaacctgaaaggcaaaccaaacacttgtcctacaaaatatcaaaaacatattataaagctaaagtagttaaaagtgtggccctgactcaatgatagacaataaatcaataacacaaaacagaccgtccagaaatacgctagaagaaaaattaataggtggcatttcaagtcaagggagagaggatgaagaatttaataagtgatattgggccaacagccagacatctgagaaacaacaaacatgaaattggaaatctacctcaaattatayacaaaattaatactaaatagattaaaaagctaattctaatactataagttttaaacatatgttgttgtttctacttgcgtgagtctattccctcttcttctgataacagtactctaacttctctttagtgaatacctttgctttcattgtatgaagtcttcatagacctatcaatcaaggttccccccttcatcaggctaagggggtggaattggagggtggtcacataaaagaagtaaagccagtgagactcttctgggatttgaatcttgaagggaatgatgcaaggaaaaaaaagttgagtgaatttaccccagatttcccagatccctgaacaagctctgtttctagtccatttccaaagccagggttcttgagtttttcctttctttcaatgagctatcacctca

SEQ ID NO: 712666 - DNA, 642 bp, Homo sapiens
tttaaaactggcaggcatgcaaagtaataacagcatccatttactgaatacttataatgcagtaagcgctaaactaaatatgtgacaagttatttatttgatcttcacatatgaagtagcttctattatctgcattttcagatcaggaaactaacttacacaggcaaagtaatttgcccaaggctgtcctactagtaaacagaagaggtaagattcaaagccaacctgyctagggcccatctgagttctttgaaattgtattaatcatattcttattaatcacaacataacaatctctagtaagcagtactaggaagaccttactctattcctttccattaataacagacctgatcatatactttttaacaaagaatatcccaatttgtagtttaaaaaaacggtgactaaatatgacagactcttcaatctgtgacatcagttctccattacaccagaggttgaacaggtaaaattacaaataaaatgttcaaagccaaaatggatatacttgacatgatatttaaaagcagtctgaaaatttttcaaggtatttctttttttttttttttttttttttttgagacggagtctcgctctgtcacccaggctggagtgcagtggtgccatctcggctcactg

SEQ ID NO: 712667 - DNA, 642 bp, Homo sapiens
tttaaaactggcaggcatgcaaagtaataacagcatccatttactgaatacttataatgcagtaagcgctaaactaaatatgtgacaagttatttatttgatcttcacatatgaagtagcttctattatctgcattttcagatcaggaaactaacttacacaggcaaagtaatttgcccaaggctgtcctactagtaaacagaagaggtaagattcaaagccaacctgcctrgggcccatctgagttctttgaaattgtattaatcatattcttattaatcacaacataacaatctctagtaagcagtactaggaagaccttactctattcctttccattaataacagacctgatcatatactttttaacaaagaatatcccaatttgtagtttaaaaaaacggtgactaaatatgacagactcttcaatctgtgacatcagttctccattacaccagaggttgaacaggtaaaattacaaataaaatgttcaaagccaaaatggatatacttgacatgatatttaaaagcagtctgaaaatttttcaaggtatttctttttttttttttttttttttttttgagacggagtctcgctctgtcacccaggctggagtgcagtggtgccatctcggctcactg

SEQ ID NO: 712668 - DNA, 836 bp, Homo sapiens
acataaaggcaactgtacttctttaacaaatgtgtcttcttctaagtgggcagtgtcagcacttgttccctagacgggttcacagctagtacaacacacagagtcccccattcaaaacttcagcacctcttctccagcccctattctctccactcaatgtcttaaccatgggcattaaggaacacaacatgtgaaatatacaggcaatttgctggtctgagtttgtgtgacaccttcaggtttcagaaattaaactgccaccctcagggtcagagaccagaattctcaaaagtactacaattcattcgagaaggcaaggcatggtagacactacctttgtcttcaaacaataatctaattttttctttccaaatccctacaaagactctttatatgatcaatgaccatctatctatccggcagctttctgtatcaaagggaataacttaacctaaattcattatagtttcatgtgccaagtgcacagtaatggctaaaatcaaagtcattgagatgatgaagccccatccaaacttasgtcagttaccctccattttaacactgaaaaacagtatttatcagtaccatcaatatatttgcttctaaacactttttcctcaaagggacttttcaatcatcaaactatagctggcattaaatccaaaagaatattcaactatagcaagtaatatttccctggaaagctattaattattcagcattccttagctgcctacaagcagatagatacccaggttgttctttgttggaaacactcactcagcgcccctgcccccagcttggagaggaatacaggctgacccactaccattgca

SEQ ID NO: 712669 - DNA, 836 bp, Homo sapiens
acataaaggcaactgtacttctttaacaaatgtgtcttcttctaagtgggcagtgtcagcacttgttccctagacgggttcacagctagtacaacacacagagtcccccattcaaaacttcagcacctcttctccagcccctattctctccactcaatgtcttaaccatgggcattaaggaacacaacatgtgaaatatacaggcaatttgctggtctgagtttgtgtgacaccttcaggtttcagaaattaaactgccaccctcagggtcagagaccagaattctcaaaagtactacaattcattcgagaaggcaaggcatggtagacactacctttgtcttcaaacaataatctaattttttctttccaaatccctacaaagactctttatatgatcaatgaccatctatctatccggcagctttctgtatcaaagggaataacttaacctaaattcattatagtttcatgtgccaagtgcacagtaatggctaaaatcaaagtcattgagatgatgaagccccatccaaacttacgtcagttaccctccattttaacactgaaaaacagtatttatcagtaccatcaatatatttgcttctaaacactttttcctcaaagggacttttcaatcatcaaactatagctggcattaaatccaaaagaatattcaactatagcaagyaatatttccctggaaagctattaattattcagcattccttagctgcctacaagcagatagatacccaggttgttctttgttggaaacactcactcagcgcccctgcccccagcttggagaggaatacaggctgacccactaccattgca

SEQ ID NO: 712670 - DNA, 836 bp, Homo sapiens
acataaaggcaactgtacttctttaacaaatgtgtcttcttctaagtgggcagtgtcagcacttgttccctagacgggttcacagctagtacaacacacagagtcccccattcaaaacttcagcacctcttctccagcccctattctctccactcaatgtcttaaccatgggcattaaggaacacaacatgtgaaatatacaggcaatttgctggtctgagtttgtgtgacaccttcaggtttcagaaattaaactgccaccctcagggtcagagaccagaattctcaaaagtactacaattcattcgagaaggcaaggcatggtagacactacctttgtcttcaaacaataatctaattttttctttccaaatccctacaaagactctttatatgatcaatgaccatctatctatccggcagctttctgtatcaaagggaataacttaacctaaattcattatagtttcatgtgccaagtgcacagtaatggctaaaatcaaagtcattgagatgatgaagccccatccaaacttacgtcagttaccctccattttaacactgaaaaacagtatttatcagtaccatcaatatatttgcttctaaacactttttcctcaaagggacttttcaatcatcaaactatagctggcattaaatccaaaagaatattcaactatagcaagtaatatttccctggaaagctattaattattcagcattccttagctgcctacaagcagatagayacccaggttgttctttgttggaaacactcactcagcgcccctgcccccagcttggagaggaatacaggctgacccactaccattgca

SEQ ID NO: 712671 - DNA, 836 bp, Homo sapiens
acataaaggcaactgtacttctttaacaaatgtgtcttcttctaagtgggcagtgtcagcacttgttccctagacgggttcacagctagtacaacacacagagtcccccattcaaaacttcagcacctcttctccagcccctattctctccactcaatgtcttaaccatgggcattaaggaacacaacatgtgaaatatacaggcaatttgctggtctgagtttgtgtgacaccttcaggtttcagaaattaaactgccaccctcagggtcagagaccagaattctcaaaagtactacaattcattcgagaaggcaaggcatggtagacactacctttgtcttcaaacaataatctaattttttctttccaaatccctacaaagactctttatatgatcaatgaccatctatctatccggcagctttctgtatcaaagggaataacttaacctaaattcattatagtttcatgtgccaagtgcacagtaatggctaaaatcaaagtcattgagatgatgaagccccatccaaacttacgtcagttaccctccattttaacactgaaaaacagtatttatcagtaccatcaatatatttgcttctaaacactttttcctcaaagggacttttcaatcatcaaactatagctggcattaaatccaaaagaatattcaactatagcaagtaatatttccctggaaagctattaattattcagcattccttagctgcctacaagcagatagatacycaggttgttctttgttggaaacactcactcagcgcccctgcccccagcttggagaggaatacaggctgacccactaccattgca

SEQ ID NO: 712672 - DNA, 837 bp, Homo sapiens
tattaatagtaccctctttcagtgtttggtgaactgctttggatggtgaattatgtgtttaccctaccttcctctgaggattggaattggggcaagagaaatgggaaatgggcygtgacataggtgactcgttggtgtagtttacagcaagcaggtattatttttatgagggaaattgaggaagatggccctgatacattatgtagtggttcactgcggagccaccattgcatggtctttatcaggggagaagttaccttttttcttttcgtcaggtgtatgagtatctccgttttacttaaataagtcttcagtcaaatcattgacgatgttttcattgtctgagaaaagtgggtagcattggccctaacatgctttttcaaatacctagtggggatgtttgcatttctttctttcttttttttttttttttgagacagagtctcactctgttgccctggctggagtgcagtggtgcgatctcagctcactgcaagcctcacgtcctgggttcaagccattctcctgcttcagtctcccgagtagctgggactacaggtgcccgccaccacgaccagctaattttttgtatttttagtagagacggagtttcactgtgttagccaggatggtctcggtctcctgatctcgtgatccgcccaccttggcctcccaaagtgctgggattacaggcttgagccaccgagtctggcctctatctttttctttaatttggttccaaggtagttggattgaagttcttttttttttttctttttttttttttatttgagacagagtttcactgtattgcccaggctggagtacagtggtgca

SEQ ID NO: 712673 - DNA, 837 bp, Homo sapiens
tattaatagtaccctctttcagtgtttggtgaactgctttggatggtgaattatgtgtttaccctaccttcctctgaggattggaattggggcaagagaaatgggaaatgggctgtgacataggtgactcgttggtgtagtttacagcaagcaggtattatttttatgagggaaattgaggaagatggccctgatacattatgtagtggttcactgcggagccaccattgcatggtctttatcaggggagaagttaccttttttcttttcgtcaggtgtatgagtatctccgttttacttaaataagtcttcagtcaaatcattgacgatgttttcrttgtctgagaaaagtgggtagcattggccctaacatgctttttcaaatacctagtggggatgtttgcatttctttctttcttttttttttttttttgagacagagtctcactctgttgccctggctggagtgcagtggtgcgatctcagctcactgcaagcctcacgtcctgggttcaagccattctcctgcttcagtctcccgagtagctgggactacaggtgcccgccaccacgaccagctaattttttgtatttttagtagagacggagtttcactgtgttagccaggatggtctcggtctcctgatctcgtgatccgcccaccttggcctcccaaagtgctgggattacaggcttgagccaccgagtctggcctctatctttttctttaatttggttccaaggtagttggattgaagttcttttttttttttctttttttttttttatttgagacagagtttcactgtattgcccaggctggagtacagtggtgca

SEQ ID NO: 712674 - DNA, 920 bp, Homo sapiens
tcctgcctcagcctcccaagtagctgggattacagatgtgtaccaccatacccagctaatttttgtatttttagtagagatggggtttcgccatgttggccaggctggtctcaaactcctggtctcaagtgatccactcgcctcaggctcccaaatggttgtctgtttttatctctcatccatttctacctctgcttttctgaaattagctagttattactgagtcttaatattttttttttgtttcaaggtaagactggtgatatggaacttttaatactacctcttctcatatttatatttataggaaaaacttggaatgaatgtttactgcataaagtatagtttgtattattcawgttgagtggatcatggtgtaattcctttttatttgccctctgctaaaaaaataatttctaagatgttacttgataacttgtccaagaaaagtttacttaaaagtttgacagattaaagcctgtatgcatctggaagtttggtgttttgggttaactgagcatagaatgtttcagtggctgtcattcttttgaatttgaaggatgtaactttgaaataccattttgttgcccatcctaactaaaacaagcaaaagcaaatcgatatagacaaggttgtgtgatgtagggggagttacagctaaggaaaaaggaagtattggacatctgttgggtatcctattgccctttaaaaaagttaactcatttttttcgctagaattgcattttacttgaccttgaaaaaaggacaatccaaataacttaatactattacctggccatacttcactatctctcattccagtttttttttttttttttggttcagcatattgtctggcttcctggaaagcaaactcagagatgattaccatataggacattggttagggaatgcttttg

SEQ ID NO: 712675 - DNA, 750 bp, Homo sapiens
ggaggtgaaaattattgggaggagaggaggggtcttggaggctagctacaattggctagattaggatagatactccttgaaactccaaagttacactaaatatagtattcggagtaaaagaagaaagatatcttaaatgagcctattttattaattgtttatcatcatatgtatgcacagcagcaaataaatgtattataaacatatccccattccggtcaggtgcgggggctcatgcctataatcccagcactttgggaggccgaggtgggcagattacctgaggtcaggagttcragaccagcctgaccaacatggtgaaaccccatctctactaaaaatacaaaaaattagctgggcttggtggtgggcatctgtaatcccagctactcgggaggctgaggcaggagaatcacttgaactgcgaaggttgcagtgagctgagatcgcgccactgcactccagcctgggcacgacagagcgagactctgtctcaaacaaaaaacaaaaacaaaaacaaatccctattccttcaaagaggtgaatctaggtgagacaccaagatgtgcacaagaataattagagggtaattagggtaatgaactgattcttttttttttaatatattttaccatttttttttttttaagatagggagaggatcttgctgggttgcccaggctggtctcaaactcctggcctccagggatcctcctgtctcagcctcccaaaatggtaggattataggca

SEQ ID NO: 712676 - DNA, 567 bp, Homo sapiens
agctgagagccatcaaggcacaagtgatcattgaaatcctggatgtgaatatgattattcagggggccctggggccctgggaaacaccaacatgtagggggcaagtggagaacaagaagtccaaaaatatgagggaggaggaagtcagggaaatgaaagaagaatggagagagtattgctactgaaatcaaaaggaagagagaacgtcaagaaagagtgtttaatgggccgggcgcggtggctcacgcctgtaatcccagcactttgggaggccaaggcaggaggatcacgaggtcaggagattgaggccaycctggctaacacggtgaaacccagtctctactaaaaatacaaaaaaattagctgggcgtggtagccggcgcctgtagttccagctactcgggaggctgaggcagaatggtgtgaacccaggaggcggagcatgcagtgagctgagatcgtgccactgcactccagcctgtgtgacagagcaagactccgtctctaaataaataaataaataaataaattaaaaataaaaacacacacacaaataaaaaaataaaa

SEQ ID NO: 712677 - DNA, 567 bp, Homo sapiens
agctgagagccatcaaggcacaagtgatcattgaaatcctggatgtgaatatgattattcagggggccctggggccctgggaaacaccaacatgtagggggcaagtggagaacaagaagtccaaaaatatgagggaggaggaagtcagggaaatgaaagaagaatggagagagtattgctactgaaatcaaaaggaagagagaacgtcaagaaagagtgtttaatgggccgggcgcggtggctcacgcctgtaatcccagcactttgggaggccaaggcaggaggatcacgaggtcaggagattgaggccatcctggctaacacggtgaaacccagtctctactaaaaatacaaaaaaattagctgggcgtggtagccggcgcctgtagttccagctmctcgggaggctgaggcagaatggtgtgaacccaggaggcggagcatgcagtgagctgagatcgtgccactgcactccagcctgtgtgacagagcaagactccgtctctaaataaataaataaataaataaattaaaaataaaaacacacacacaaataaaaaaataaaa

SEQ ID NO: 712678 - DNA, 725 bp, Homo sapiens
gttggtaatactaatatttgtgtcatgttatcaaaaacatttcccaagactcatggttgcagtgttatcaataatagatttatctgttacatcaaagttttggtgtaataaacttatcaccatttccactagttttccccacactcactgtcagcctggacaaaaggtgctttgtaaagagtgtcccattcgaaatagttccttcaggtgcacaggccaattgctggtgccaggctttgtgcccagtcttctctgctgagttcagagctctcccatcaagactctgcccaaggagagccttccacactccaagaaccatgcrataagggaaaatgaagtttaggttacgacacagggaactgcatttacgataccgcctgctcccagatactgccatctggcatgtataattacctttcggaaaccacggggtcacattctagcagcctccttcgtggtcttgggaatcctgagcgttgagattaggatccctgatcactctgggcagggatgcactctagcctaagaagtctatttttccctcagcttaatcctgagggtctccaaagttccaaactggtggaggagaaggatttttcccaggaacattctcccctttaacaaataattaggcctctctcacaatcttaaatttcaaataggccctgaatctccaagcaatgctgacatcctttttttaaagtatatgagcgcacacacacaca

SEQ ID NO: 712679 - DNA, 783 bp, Homo sapiens
gaaactctagggtcctcggataagcattactgtcagggggtactattttcctggaacttctgttctgttatccttggacagcatggtcttctgtatagcccttcaggtacacagaagtatacactagaggttaggagtctctggagcatctraaactccctctgagggacaagagcaccaacaggatttgctccatcacacagatcatctctttgactatatcttcttcatctggttggtcaaaagggtgtctctgcattcattcattcaacagatagttatttatttatattggaagtatggcagggatacagagagaagtacacaataaataaatatataatataatgcaaaatgatgacatgcgttactaaaagaaaataaagtagtgtgggggaggttaaaaaatggcccccaaagattttacatttgaatccctggaaccagcacatgttaccttatttggaaagagggttcttggctgttgtggaaacaataagttaaggattttgagatgagattgttctggattatctgagtaagtcctaaatgccatcacaagtgtttttgtaagagagagacagagggggatttcacagacagaacaagagaaggcaacatgaagacagaaacagatattagagtgataaggccagaggctggaagacaagtaatggattttcctccagagcctctggagggagcatagccctgccgacaccttgatttaatttgatttgatatgtattttgtgtatcattattattattattaattattatt

SEQ ID NO: 712680 - DNA, 783 bp, Homo sapiens
gaaactctagggtcctcggataagcattactgtcagggggtactattttcctggaacttctgttctgttatccttggacagcatggtcttctgtatagcccttcaggtacacagaagtatacactagaggttaggagtctctggagcatctaaaactccctctgagggacaagagcaccaacaggatttgctccatcacacagatcatctctttgactatatcttcttcatctggttggtcaaaagggtgtctctgcattcattcattcaacagatagttatttatttatattggaagtatggcagggatacagagagaartacacaataaataaatatataatataatgcaaaatgatgacatgcgttactaaaagaaaataaagtagtgtgggggaggttaaaaaatggcccccaaagattttacatttgaatccctggaaccagcacatgttaccttatttggaaagagggttcttggctgttgtggaaacaataagttaaggattttgagatgagattgttctggattatctgagtaagtcctaaatgccatcacaagtgtttttgtaagagagagacagagggggatttcacagacagaacaagagaaggcaacatgaagacagaaacagatattagagtgataaggccagaggctggaagacaagtaatggattttcctccagagcctctggagggagcatagccctgccgacaccttgatttaatttgatttgatatgtattttgtgtatcattattattattattaattattatt

SEQ ID NO: 712681 - DNA, 654 bp, Homo sapiens
atgtaatatatttatgttgttttgaggattcgggtacaaataataatcgtaataacttttattccagaaaaccaaaaataaaaatgtaaatatatatttttatatacaacatttttactgcttataagtattagaactagaactagaaaaaatcatatcaaacattaaataaatttatttaagataatttttttggaggacaaagaaaaaacattacttcaaggagaacaacaagcarcataaatgtagttgagagcccttcatttgcacaggtttttttccaaggaagacctgagagaggccctaaaaatgtgtttatgaggccatatgttcttttcatattttcaaaaataagttacttcaactacaattggttaagacctttgtctcattccaattctacttaccctcattcacaaatctgtatgtggttttaaagtttcttgggaattttgtgactcaaaggggaaactgagttggtgatatatttagtttgggtttagggagataaattcatacaaatcaaatccacttggtgaatttgactattgttcatcatcccagtgtaaaaatcattttcatgtatattctcatcgctcacagtgaccactcacccattatcattacaaggccagaggttgtattgtgatatga

SEQ ID NO: 712682 - DNA, 654 bp, Homo sapiens
atgtaatatatttatgttgttttgaggattcgggtacaaataataatcgtaataacttttattccagaaaaccaaaaataaaaatgtaaatatatatttttatatacaacatttttactgcttataagtattagaactagaactagaaaaaatcatatcaaacattaaataaatttatttaagataatttttttggaggacaaagaaaaaacattacttcaaggagaacaacaagcaacataaatgtagttgagagcccttcatttgcacaggtttttttccaaggaagacctgagagaggccctaaaaatgtgtttatgaggccatatgttcttttcatattttcaaaaataagttacttcaactacaattggttaagacctttgtctcattccaattctacttaccctcattcacaaatctgtatgtggttttaaagtttcttgggaattttgtgactcaaaggggaaacygagttggtgatatatttagtttgggtttagggagataaattcatacaaatcaaatccacttggtgaatttgactattgttcatcatcccagtgtaaaaatcattttcatgtatattctcatcgctcacagtgaccactcacccattatcattacaaggccagaggttgtattgtgatatga

SEQ ID NO: 712683 - DNA, 2005 bp, Homo sapiens
tgacatctaatatagtttatagcagtgctttcaagtacatacacaatgcaagacacttttgtaattttaaacattctcatagctacattataaaaagtaaaaaggaaagaagtgaaatttcaataatacacttatttaaacgaatatattcaatgtattatcattcaacatgcaatcaatataaaaattattagtaagatatttcacacacttttttatgtggtaagtcttggaaatgcaatgtgtatttcaaacgtaaggcacatctcagctctcagttcagactagccatatgtccagagctccacagcagcatgtggctaatgactatcctgatgggtggtgtggctctatagggatgggtttctttaaataaactgaaatttgggctttaccaggaaccgacttgtatggcccagggccaaatcaggtagagtctatgcaggtcacaaaataggcacctttccctttattaaatcaaatttcattatttaaggagaactgagaactgtttgtaaatgctctcctggaggtgggtaaagatctaaaatcttttaagaatccaattttagatacacaaatctgcttatgtttctggggtaatggtctggaaatggaaaaaaaagcgttgtaacacaggtcagggcgagaagtgagaagactggagggagtggaaattagaagaggaagaccatgggtagctatgtaagtcatggcaactgctgagagcttctgcaaatagtatgtcttcgagttacattagcttgagtgttctcaaccttgcaagggatgaaaaaataatcttatcaaaacctgatatgctgtggagatactccaccctaaagtgggaggaccatatttgcccactctgtaggtgtgtgctgtgcatagcgactttcttccaaagagcatcaaaaggaaagagggaaagcagctttacagaaaacaaacctgatgaacatgtactcagccgggtgatcaaggtcaacatcaacagccagaaatcattttgctagcatgaacccttgatatgacgcaataatggaaatggcattttaccacaatggtcttcctcttgaaaacccataaccccagtctaataatgataaaagcaatctgacaaatttcaatagagggacattctacaatatactgcaccagtacccctcaaagctgtcaaggtcatcaaaaacaagacatgtctgagaaactgtcacaaccaagaagaccctaaggagacatgacgagaaaatgtgatgtggtgtccatcctgaatgaatccgggaacagatttttaaaaagaaaaaataaaaaggtaaaaactaaggaaatctgaataaagtgtgcattgcagttaataatgtattaatattggttcattaatcataacaaatgtatcatactaatacgagatgtcaataataggagaaaatctattggggtattgtatatggaatcttctactatctgctcaacttttctgttaagtctaaaactattcttaaaaataaagtctactggtaaaatatctttttaaaaaagtatgatatgcatgatgcacatcttaccaaaagtgaaaatacttcttcaaacatcttaactttccatagcatcctcaatacctggccaaattccagggttacctcaagacattgatgaactgtcactcttgatctctgcatagggccatttcagatggatggattccgaaaattttctgctgatcagaggccagcttcctactgcttttaggacagctgctgtgagctctagtatttactgtgaagaaggtaccaaaaggtcagttccaggagccccagctggtgcagaagccacctgacaagaagtggaggccaggagtctgctcccaagacygcctaggctgaaaagtatggagaggacagcaaacacacctggctccacaaccagcatgcaggtgaagctcagctgtgaatagaactttctggagattctacaactttaaagtcaacactccttttcccat

SEQ ID NO: 712684 - DNA, 2005 bp, Homo sapiens
tgacatctaatatagtttatagcagtgctttcaagtacatacacaatgcaagacacttttgtaattttaaacattctcatagctacattataaaaagtaaaaaggaaagaagtgaaatttcaataatacacttatttaaacgaatatattcaatgtattatcattcaacatgcaatcaatataaaaattattagtaagatatttcacacacttttttatgtggtaagtcttggaaatgcaatgtgtatttcaaacgtaaggcacatctcagctctcagttcagactagccatatgtccagagctccacagcagcatgtggctaatgactatcctgatgggtggtgtggctctatagggatgggtttctttaaataaactgaaatttgggctttaccaggaaccgacttgtatggcccagggccaaatcaggtagagtctatgcaggtcacaaaataggcacctttccctttattaaatcaaatttcattatttaaggagaactgagaactgtttgtaaatgctctcctggaggtgggtaaagatctaaaatcttttaagaatccaattttagatacacaaatctgcttatgtttctggggtaatggtctggaaatggaaaaaaaagcgttgtaacacaggtcagggcgagaagtgagaagactggagggagtggaaattagaagaggaagaccatgggtagctatgtaagtcatggcaactgctgagagcttctgcaaatagtatgtcttcgagttacattagcttgagtgttctcaaccttgcaagggatgaaaaaataatcttatcaaaacctgatatgctgtggagatactccaccctaaagtgggaggaccatatttgcccactctgtaggtgtgtgctgtgcatagcgactttcttccaaagagcatcaaaaggaaagagggaaagcagctttacagaaaacaaacctgatgaacatgtactcagccgggtgatcaaggtcaacatcaacagccagaaatcattttgctagcatgaacccttgatatgacgcaataatggaaatggcattttaccacaatggtcttcctcttgaaaacccataaccccagtctaataatgataaaagcaatctgacaaatttcaatagagggacattctacaatatactgcaccagtacccctcaaagctgtcaaggtcatcaaaaacaagacatgtctgagaaactgtcacaaccaagaagaccctaaggagacatgacgagaaaatgtgatgtggtgtccatcctgaatgaatccgggaacagatttttaaaaagaaaaaataaaaaggtaaaaactaaggaaatctgaataaagtgtgcattgcagttaataatgtattaatattggttcattaatcataacaaatgtatcatactaatacgagatgtcaataataggagaaaatctattggggtattgtatatggaatcttctactatctgctcaacttttctgttaagtctaaaactattcttaaaaataaagtctactggtaaaatatctttttaaaaaagtatgatatgcatgatgcacatcttaccaaaagtgaaaatacttcttcaaacatcttaactttccatagcatcctcaatacctggccaaattccagggttacctcaagacattgatgaactgtcactcttgatctctgcatagggccatttcagatggatggattccgaaaattttctgctgatcagaggccagcttcctactgcttttaggacagctgctgtgagctctagtatttactgtgaagaaggtaccaaaaggtcagttccaggagccccagctggtgcagaagccacctgacaagaagtggaggccaggagtctgctcccaagaccgcctaggctgaaaagtatggagaggacagcaaamacacctggctccacaaccagcatgcaggtgaagctcagctgtgaatagaactttctggagattctacaactttaaagtcaacactccttttcccat

SEQ ID NO: 712685 - DNA, 1421 bp, Homo sapiens
tcctgtgccttgccagtgctcacacagctaatgggtgcagaacaggaagcagaccaggcatcctggctccagcaagccactcaacagctctgctgttattccatgcttactttcccctacctccctccccaaatttactttcatctacaaaataacataayaataatgacaacaacaacaacaaaagaaaaatggaaataaatgcctaatgatgccattgtcctctggcagccatgaaggtgcttggactccaggctcttcccatccagtgggctacaggactcttagccacattcaccatggaggcctctgtcagctataaattatatgtctacaaaattcacaaggagcatatgagcaatacttgggaagttgcttttggaaaaagcgtgaacctctgaaaggtgcactgaggcatcccccagaaatagcattatgtcccctttaaaagctaaaaaaaatcactccttctaatattgttatgttcttatctgactgtggaggagaatcaatgacaggaaagagagaaaatagagtatttaaagtcccctgtgacattttccaaaggactctgaagagcaagtattataaaggaagaggagaaatgatattattggcaacattgagttttggaagtgctttggattaggtcttcaagatttatgggggaaaaatggtttaaatgaaagtgctatgagctgacccttctgtataaagtcctagactaaagataaattaattagtttcaaagtctatccatttagttacaatgtaagtagtataatatatagtataactttagtgtaaatatagtataagtagtatatgagggttttttaaaactgtaagagagagatatatatattgtctgtagagcttcataaacatgagtgtaagatctagttgatgaaggtgtttcacttacattttgccatggtgttaagtacaactatcatcttaccttcctcttaccactctttggtaatacttagatgacttcaataaaacacacttataaacacaacccagattccacccactgatgaaaatgaagtttccttcaccctaacaatgaaatggaaagctttacaaaaacagctgaatatgatcaggactggaaatacattttcagaataagttcttattttcatcataacagcaatgacttgaaaatagccattttaaaatggaaaatgtattaatgtctaaatttatatctctggagccataaaaacagtatatcttttcataatattgtggtttgtagtccacacaataatgatgttaaggtcgcaccataaactacattgaaaatcaataccataaaccttgataatttaatttactcaacagatagatgtatttttaaaggattaatcacaaaattttttgtacatcaaaagtgtgacatttttagtgcc

SEQ ID NO: 712686 - DNA, 1133 bp, Homo sapiens
tggcctttaacatgttcgaagagctcgataatgataattgtgggtattttatgcctcagtgaatggtagtggttattatgaagctacaagaaaagtcattcactttaaacataccagaaatttgagttagatacaataggaaaatattacaattatttttaggtaagaaaccacccttatttagaaaaacatctagatgggtgcttttagtattatgaaagccaaagtattctgaatgtaatccaggagaatagaatgctctgaataatacagaaatacatctaagagtttccttcaggcaactggaataggaggaggtttttgtgaagatgaacaagaccctgggagtagagagggctcacctatcatgcaaagaacagaggccagataagaatatgggtcagtgatatatccttcaacacagagaaaataagaaaacaaatcctgataatgaaaacgataagttgttctgtgttcagtgctgtgctatgcacccctctgttatcaaatttttaatcctaattattttaaattctaaaatgttagtagaaggagactcccatcaacaatcttattttagcggtgttatggggaatcatgtataagaagtcagtgttcagctcaggacaaacagctcagttttcaataacgcatgttcagatcaggcaacatagagaagcagaagccagatggggaatgatttagcagaaatatgagacaaatttctttctctccaaatacactaaaagaaggggaatggtgtgtttgttcatgtgtttgtttttgaagggggrtaaggcagagggagttgttgattcctgacctcgcatgtattctgttacagagattagacctatctagagagtaggtgttattattttaaatgattcatcttatgatgatgatgatgatgatgactgctttcatttttatcatttccagatgatctaccttattttggaattaagaaacacttgaagattattctcagaaatgccataagggatatttaaaaatcttggagcacacaagaagtacaagaggaatgaaaatgtcatgtcttaattttccaaaaaagagaatattttagtttttagtatataaaggcagattaacaaaccttcacacaaatc

SEQ ID NO: 712687 - DNA, 597 bp, Homo sapiens
agtaattactcttctcaatttaattgaagtgttatatgtgaggcactaagagcttggaaacagacccacctgatgaattaagttcactaggaacaaagcagatagttgcattcaccagtcaaaagagcagctgttgggaggtggggagggaagtaatgggaataattaacatctcttgctccaataattacattggaaggatgggtttcaaatatccattaatttaagtggtctttattccatcattaagcaaactgcttatttggcaccaacttttgcatgcgtttagcacaaatagaccatgttgtgcatgtatgccattgggaacaactcttaggagaagctttgggagctatttgcatctgtgcctcttgtgcctgatgttttaaccagggatgggctgattacagggcaaggtcttaagggcactgctacttttctggaragcagaaattaagttgttcacctcttgcagctgaagcctcaaggtctatttattcaagggtgatctgtccctgagaaaattgctttgtagcatttaaactcatataagccttacatgttcaacttaacaattcataaataaaatgccatatt

SEQ ID NO: 712688 - DNA, 597 bp, Homo sapiens
agtaattactcttctcaatttaattgaagtgttatatgtgaggcactaagagcttggaaacagacccacctgatgaattaagttcactaggaacaaagcagatagttgcattcaccagtcaaaagagcagctgttgggaggtggggagggaagtaatgggaataattaacatctcttgctccaataattacattggaaggatgggtttcaaatatccattaatttaagtggtctttattccatcattaagcaaactgcttatttggcaccaacttttgcatgcgtttagcacaaatagaccatgttgtgcatgtatgccattgggaacaactcttaggagaagctttgggagctatttgcatctgtgcctcttgtgcctgatgttttaaccagggatgggctgattacagggcaaggtcttaagggcactgctacttttctggagagcagaaattaagttgttcacctcttgcagctgaarcctcaaggtctatttattcaagggtgatctgtccctgagaaaattgctttgtagcatttaaactcatataagccttacatgttcaacttaacaattcataaataaaatgccatatt

SEQ ID NO: 712689 - DNA, 1142 bp, Homo sapiens
accctgtttgggttggaaagattaccaatgtgttgatgtctgtgcacccattgttgtgtgtggaaagatggtggattcaggtaagacaactatcagagatccaattaacaggtaaccagaacatccagaaactcgcaaccttttttgcttctactttacatttcagaggcgtgaagtggttgattctatccttggtttcagttttaaaatggccctacatgctatttcgtaaattatttttccacatttatcatttcaacaagatgtgctgtgggargatccttcctgcatatgctgtctattcatgctgatttttgtgttgcagttctgaccttctcatttatctaatgtgcagctgtcaagggcctatcatgacttaaaatgtgtaaccctatgttggcttttggagccaacagatttgaagtaaagttatccctaaagaaaatttggcttccccaattttaaattggtgaaataatgaaacttagtgaccaaaatatgtaaatttaagcattaaaggggaagaaataaagagatgaacagaaaaaagaaagaaagagagaaagaaagaaaggaaggaaggaaggaaagaaaagaaagaaaaaagaaaaggaaagaaagaaagagagaggagagaagaggaaaggaaaggagaggaaaggaaaggaaaagaagagaagaaagaaaatatactgaatataatgtttggatattgtgagtcccttagaaaaggtgttaataatcagtaaaggagagaagagttccagggagaaaggtacagacaccttttcatagcaaaggtcaattattcaataaggaaacatttaggatgatgtctatgtgccaagcactgcgagagttatcagaatgtctcatttcctcaaagtttctactattattccaatagaaaaacaacagtacaagatacaggatggagaaggtgagttgaacggttttttaattcaacacaggaatttttggtccactgtccaactaaatgtaaggaattagattagctttatgtcgttctaatttttcttgagagctcgtatcaacaaacacttgctggatggtttctatgaggcaggaactctgctatgttctggaatgagcatatggagttatacaaatatgtacaagac

SEQ ID NO: 712690 - DNA, 1142 bp, Homo sapiens
accctgtttgggttggaaagattaccaatgtgttgatgtctgtgcacccattgttgtgtgtggaaagatggtggattcaggtaagacaactatcagagatccaattaacaggtaaccagaacatccagaaactcgcaaccttttttgcttctactttacatttcagaggcgtgaagtggttgattctatccttggtttcagttttaaaatggccctacatgctatttcgtaaattatttttccacatttatcatttcaacaagatgtgctgtgggaagatccttcctgcatatgctgtctattcatgctgatttttgtgttgcagttctgaccttctcatttatctaatgtgcagctgtcaagggcctatcatgacttaaaatgtgtaaccctatgttggcttttggagccaacagatttgaagtaaagttatccctaaagaaaatttggcttccccaattttaaattggtgaaataatgaaacttagtgaccaaaatatgtaaatttaagcattaaaggggaagaaataaagagatgaacagaaaaaagaaagaaagagagaaagaaagaaaggaaggaaggaaggaaagaaaagaaagaaaaaagaaaaggaaagaaagaaagagagaggagagaagaggaaaggaaaggagaggaaaggaaaggaaaagaagagaagaaagaaaatatactgaatataatgtttggatattgtgagtcccttagaaaaggtgttaataatcagtaaaggagagaagagttccagggagaaaggtacagacaccttttcatagcaaaggtcaattattcaataaggaaacatttaggatgatgtctatgtgccaagcactgcgagagttatcagaatgtctcatttcctcaaagtttctactattattccaatagaaaaacaacagtacaagatacaggatggagaaggtgagttgaayggttttttaattcaacacaggaatttttggtccactgtccaactaaatgtaaggaattagattagctttatgtcgttctaatttttcttgagagctcgtatcaacaaacacttgctggatggtttctatgaggcaggaactctgctatgttctggaatgagcatatggagttatacaaatatgtacaagac

SEQ ID NO: 712691 - DNA, 917 bp, Homo sapiens
tgtgcatgtgtgtgtgtgtataagcatgcacacacttgaccatgacaagtargggctgttgatacagagttcagcctacagtgtaaatcgggggtataagaaaaccaggagacgcttgctccattagtttcctagggcttccacatcaaagcaccaaaaaataggtgacttgaaacagcagcactttatttcctcacaatgctgaaagctagaattccaaaataaaggtgttagcagaccccccactctctctgggataagcctttctgtgtcttctagcttctggtgttttctggtagtccctggtgttgcttggctgtgtatgtgtcactccctcacagggccatcttccccctatgtctaactggctctatgtcaaaatgtccccttcctataacaacaccagccacatcagaataggacccacaccaattacctcatattatttttaattttttttaattgttaatatttgtaggaacagagtaggtgaatatatcgatggggtacatgagatgttttgatacagacatgcaatgcacaataatcacatcatggagaatatggtatccatcccctcaagcatttctcctttgagttaccaaccatccaatcatattcttttagttatttttaaatgtacaattaagttatgatttactaagtcactttatggtgctgtcaacgagtaggtcttatttattctttgtaactatttttgtacccattaaccatccccacctccccctacacctccacctactccccaactatccttcctagcctctggtaactatccttctactctctatgccaatcaccttattttagattgattacatctagaagagccacttttccaaataaggtcacatgctgatttacttgggatcaggacttcagcatatttttttggt

SEQ ID NO: 712692 - DNA, 917 bp, Homo sapiens
tgtgcatgtgtgtgtgtgtataagcatgcacacacttgaccatgacaagtaagggctgttgatacagagttcagcctacagtgtaaatcgggggtataagaaaaccaggagacgcttgctcyattagtttcctagggcttccacatcaaagcaccaaaaaataggtgacttgaaacagcagcactttatttcctcacaatgctgaaagctagaattccaaaataaaggtgttagcagaccccccactctctctgggataagcctttctgtgtcttctagcttctggtgttttctggtagtccctggtgttgcttggctgtgtatgtgtcactccctcacagggccatcttccccctatgtctaactggctctatgtcaaaatgtccccttcctataacaacaccagccacatcagaataggacccacaccaattacctcatattatttttaattttttttaattgttaatatttgtaggaacagagtaggtgaatatatcgatggggtacatgagatgttttgatacagacatgcaatgcacaataatcacatcatggagaatatggtatccatcccctcaagcatttctcctttgagttaccaaccatccaatcatattcttttagttatttttaaatgtacaattaagttatgatttactaagtcactttatggtgctgtcaacgagtaggtcttatttattctttgtaactatttttgtacccattaaccatccccacctccccctacacctccacctactccccaactatccttcctagcctctggtaactatccttctactctctatgccaatcaccttattttagattgattacatctagaagagccacttttccaaataaggtcacatgctgatttacttgggatcaggacttcagcatatttttttggt

SEQ ID NO: 712693 - DNA, 657 bp, Homo sapiens
tatttactaactatatcttgtctatcctttcttttgttccaataacaagtcatatttctttacacatagaaactgataacattacaaacacaaacttgcaagcttacgtagaattgaagccaggaaaaaacctggaggacagctatatgtcttttagagaattgcttttcagtagcattcaaaatacatagttcacataccaaataacaagtaaatgtaatgctttccaagatggaacatgaggtytcagtctattttaagaggaagaaaagattggaaaatatcccagaaatgtcattgtgtgagcaggttgaacaatccactagcataaaagaatttttttaaaagaagtcacatacacatttatgacatttagggaagatggtagaataaaaattgtcagatttccttagggaaaacattcaaatgaaactcctaaactataactgaatatcacagtttcatccattctgtttggaatcatgggaccagaaggaatgacaggcactcatctggccatcttcctacctttagtcaattcccattactaaagttgcctaagattagtaaataatcaatcccagtttaaatgcctgcagaggaacaaactctaaaaattctttatttaccagttcaacaaccaatgtgcaagttgaa

SEQ ID NO: 712694 - DNA, 2389 bp, Homo sapiens
caaattaagagctgaaagaaaattttctaactctaaaaaccaattttgatctattgtaggagttcttttcattacagattacatgatcaatgcttctttaaaatgaggcaaaaggaaaagtttaacaacaagctagagtaggacttgtcattcttgaaggtaatccttataagaataatggaagtaagtagaggtactctatgctagacactatgggatttataaggataaataagactagtttctgctgctgatttaagagaacgtactatgataaacaataaaagtttgtggaaaacaaatttactggaaaaaaacaagagcaattcacatccattcaggaaggcaaaaatttttaatatttaatgtaggtgctgtttcttgaaggatgaaaatgatttcaatagataaggatgaaggttagggcattctaagcagaactaataagatgccaacaaagatggaagcaaaaaattatgcactgtgccaagaaatcctgtacggccagtctataaactgtacrttggaaagacatattagagaaagagtgggtcaggatcagataggacatgaaaatttgaactttatttggcatttctgcaagcagaaaagtacatggtatatttttgatgatgcagggtgcagcatggagaatacatttgagaagaaagacatttgtggcagggaaaggagttagaaggcctttacaatatttctaacgagggtgaatgaagtttaacctatggttgcagatcaaagcataaatttatgatgcactgtgaggtagaagccaatagaactttgaggaagaaaaaaaacttttatctgacaaatgcaagcccctttaaattatcaggcccagaaagacatttaatacttaggtagtcacatctcactccgccttaagctaaataacaacctcttgaaaccacttgatctgtgggctctagactaactgatgccaagtacatataaaatgccatgcatcctccagttcaacaacatatagccaatcactaatcaatgttatttctgcaaaccaatgagaatccttgatgaacaacttttgtaatccctcctctcctgatttgtccctttttcttttaaaacaagcctttcttccccaaggccccttggaattgtatcccaggctgcagtctcaacctttgcgcttgaataaactttatttaaactacattctgactcatttattttagattgacagcttgacaatggattgggtattggaggtgtagtaggagtaaatagtccaggttttcaaatctagatgcagatttccaggggcaaaataaaagcattctttttccctttcaaagtaatataatagtaaattgtatgtttcttcctccaactgtctttttcaaaatcctactattcatgccctacattatctcggggaaatacaaaattttgaggaaagtaaatggctttctatcactgattgcatcaaaaagctactgaataaaacataatcttattttttgattttcataggaattttatgctcatttcatcttaaatctcttgaactgaaactttgctgtcttttctcaatttttatgtccttgtttttccatgcgcatattaaattgcttgattgcaagaactctcatctgattataacaacacaaagttgaatgcaacatattaaaaattgcagagtgccctggtcataactctactctagatttcccctaaattggatgtgcaaacactgttttcaagcagccaggataacatgggatgaagtcacaggcctagtggactgccactattcagataacaataacaatgatgtagctagagttcacatcatacttgattcagttaatcaatcaatccatcactatgctagtcctcataatcagtaagagagaattttgaaaaaccatttttaccttccaggaactttctgtccctttgagatgagaagaaaaacagtcttactgtttcagataagaatttgattaaacaccacagtaagtggttcaaactttgttaaatagctatttagaaaagaaaccgtgtacactgattggagaaaagggagaaatcttcatgtagaaggaaagacatagttggttcttgaaagatcagtctgcttaggaccagcagagaaaagagaaaaaagcacaagagcattgaagggacacaaattcgcagcactgacttgagcccagtatacacacaaaacagaaccaatgctgatttggatgaaaagaaggcaactattaagaaagagaaggataaaagattgcccaaacagaaggactttatcgtggaagtcttgttagacacaattctatgggtgaggaaagttattgaaattaatgactaagaaagtaagataatccaagtggaattttta

SEQ ID NO: 712695 - DNA, 898 bp, Homo sapiens
actgtgctcctctgctagaactttaaaataatgaggctggtttttcttaaaaagaagacaacacacccagccaggcatggtggctcacacctgtaatcccagcactttgggaggcctaggcgggtggatcacgaggtcaggagatcgagaccatcctggctaacatggtgaaaccccatctctactaaaaatacaaaatattagccgggcgtggtggcgggcgcctgtagtcccagctacttgggaggctgaggcaggagaatggtgtgaacccaggaggcagagcttgcagtgagccaagatcgcrcccctgcactccagcctgggggacagagtgagactccatctcaaaaaaaaaaaaaaaaaaaaaaagaagacaacacacctatctctgtttgcatcctcaatgttgtggtcatttttatgaggctgtacacttttttcccaatgatactgccatctttccaaacattagaattccttgagaataatcaaagcctggcattcctattttaatgtactaaatgacagcaaattctaatcacttaaagctagatttgatttttttatgctctaaatatcatttgcagccaactgtgacacataatgtaagtgattaaggtatataagtaagttcaagagtgaagcataatcataaaataattgtgatggttttcttctattttcctatttctatatgaaaatcccaaacacgaagtctgaacatgactggataattggaataaatgaccaatttgaagtaaatatatattcagtgttctagtcagttcattaaatatacattatatgttccagtccgttcattaaaagaaaaaaatcagtctcatttactttgttataaagtctccatatttcactagtgtttcatatttttaat

SEQ ID NO: 712696 - DNA, 1162 bp, Homo sapiens
ccgcttactgttctaccaggccagcatttatttcacttctttctgacatgccgaagtgtatggctgaccgagctgttgctttccctgttggcacttcaaggaccaccgaccaaatggcaaatgcctggtccccaagccagtattgtctgaatgacctgcagtctccaggaaccatggcccagctggtccaatcagcctgccctgttccaaggaaacacattatacctctgtacacgtctcctcattctttaaaacttattcccaacgtaacatctcctggcttttccatactgtccctaaagggtcagttgatccctgcctcaagtattagggactggctgtaagaacctccactacagcagttagcacagtcccaaactgtcagggtcccatcctgaaagggcatggggaaaggtggctgggactatattttatctattttttttttaactgctacaacagtcactgcaagaaaaatagcccaaaatacaggtggggtgttcacaatagatgtttattatatgaatggctacatctcacgattttccaaatgaacatttttctaaaccacaaaagtaaattttaataggtgaatcaaggttttgtgtggaacttataaacttatgaaataaaagtaatcctttaaaattacatgggtagatatttttgtaagccagccagctctcatggtctccatgtaccgtcttgtctacgtggcaccygtgtgttgggagctcctgcagactgagctgctgggtgagcatgccacactcccctgcctcaccaccttctcaaccagcaccaacaacagcttcaggtctgctaatgtcactgacgatcaagacctttctaaagaagtagtgacagactctgatgctaataaattattaatgagttctgatgatccaatcagaagatctgtcatttctagcttatactccattcccttgaaatctgacaagtggattgatacatgactgcatttgcaaatgactgttttaaaaagttctaccccaatgacttttttttttttttttttaaagaaaacggagttaccatgggtttgagaagttttcttatgtaagataaacctcctaggtttggaacaggaacaccccgatggtgtctgtcttgcacaaggtctggaagagagacctgggaa

SEQ ID NO: 712697 - DNA, 602 bp, Homo sapiens
  misc_feature 448: n = A,T,C or G
atttctgccttcaaatactccagaactgagaaaagaaggaaatagcaagcagtaggtcaatcgatgggcsaaacccctattaactgtactaggggaggcaccaggttcaagaggctgaagagatccagagccagccagggttttattaggggcttacagagaagggagagagtccagtggcagcgggctggacaggagacccgcacccgcctgcaagcatcatgcaattcatgtagcattttcactgaacacactccctgacaaaggacctccacctggcatccttcatgcaacccaaaactcagggcctcaatcacacctgttccacgagacaagctgcagggactcagatgctccttaaagacaaggactgaatctccaggctggcaacttctggatttccctagctggggaacacacattcaggtacggtctgccacacaaggtncattctaaggggtctgctttaagttattgctggccaggtgtgttttaccctacatcatccatatattaatgaggaagcaaattacaggcccagaaaagggaaacaaccaaggccattgggttcagggaataccagggctggtaggccttaactt

SEQ ID NO: 712698 - DNA, 2419 bp, Homo sapiens
  misc_feature 1028, 1029, 1030, 1031, 1032, 1033, 1034, 1035, 1036, 1037,1038, 1039, 1040, 1041, 1042, 1043, 1044, 1045, 1046, 1047,1048, 1049, 1050, 1051, 1052, 1053, 1054, 1055, 1056, 1057,1058, 1059, 1060, 1061, 1062, 1063, 1064, 1065, 1066: n = A,T,C or G
  misc_feature 1067, 1068, 1069, 1070, 1071, 1072, 1073, 1074, 1075, 1076,1077, 1078, 1079, 1080, 1081, 1082, 1083, 1084, 1085, 1086,1087, 1088, 1089, 1090, 1091, 1092, 1093, 1094, 1095, 1096,1097, 1098, 1099, 1100, 1101, 1102, 1103, 1104, 1105: n = A,T,C or G
  misc_feature 1106, 1107, 1108, 1109, 1110, 1111, 1112, 1113, 1114, 1115,1116, 1117, 1118, 1119, 1120, 1121, 1122, 1123, 1124, 1125,1126, 1127: n = A,T,C or G
aaaatctctgtggctgtcttctgagtcagaacttttccttagatgtaaaattctgatgtgcttcttagtacttgaaggaattaaatgtaatttgcatctgatagctttgtttctgatagtaattatgtatctagaaaaatgaaagaatgtagtttctgataaactagtgttggattcaagaaaagaaagcattttctttattaataaatggtatgaaaaggaaaatatttgactattgaactgcctatgcaaaaaaaaaaaaagtatcgacaaacagattaattgaaaaagttgctccaaccacattagggaactggtttggaagaagaaacaaagacatgattgacattttagctttttagctaattgctttggcaatgtattcaaacaaatgtggtttcatggctttattttttctctggcactcttgaggaattcaccaccatctaacccaagtggaaaacaacgtaaaacaaaccaagaaataataataaatcttttcatattaatataataaatacacaagtatacttgatgtcagaattgtttataggatgatttcctccaacgtttgctgaacaactggaaatttcagccaaacagacaaattgcaaaactcaaagcttagtggaaatgtggctagacagaaacaagatcagatgacaacacagattaagtacaaagcaaagatctgctatgtttactgagtgtgttagaggaaaaataaatagctgtttatttggaacaaagatgcaagaagacttaggccaaaaaatgtaattctaattgttagcaggcaacaaggtgaagggttaatgagctcaaggcttgaatcctatctctaaccacttcctagctgggtgacttgcaggaagttgcgttcatttagcttgagtttcttcatcaattaaataaggcaaatgttaatatctacctgataggtgttagaatgaaattctctttggtagaaaatacccaatacctatttttttcagagacaaacataattcatcctaatattgaattcnnnnnnnnnnnnnnnnnnnnnnnnnnnnnnnnnnnnnnnnnnnnnnnnnnnnnnnnnnnnnnnnnnnnnnnnnnnnnnnnnnnnnnnnnnnnnnnnnnnngaattcctactctaaaagccaagtttcattctcatgtggcatcatttataaagcactaaccaaaataactacaaatgagtgaaatataatggaaacatgagtattgagcctgatgcatttgtgaaaaagtaagttatgtcaggcaaacttaattactttctcaattgaattacataattaacggatgaagtgactgtagtagatgtgatagatttatattttatagagttgatgcaatgactaagaattatgatttgaaaaatggattgaattgtcatacatgagttgacatttcttattgaaaatggaaacaccaattaaatctgttgacgaaacggataaggtctacaaattagtaatcaaacctacycataaattccctctcttatgaacctttagtaaatgatgatggcacactgagctctaacatacctctcaagttctctaaacacagaaactgagaccaaataatcaaggaactcgattcattccagggaaagaagaaagctaagctagtgaggtcacctgtgttcttatttcttctttcactgactccttttcatcatgtaatttggaaatttgcatacctctacctttactgtaacttataaagaaagaagtgataaaaatcaatgtcattaaatgttggtagttaaatgcattatgcctcacagaagttttggtgatatttatatttttaaaaattattaataaagaaataagagcatataaattagaaaagaaaaaataaaactatccctacaaattatcttatatagaaaattctaacgaactcaaacatgcacacacacacacacacacacacacacacacacacacacatcagaattaaatgaataccacaaggttacaggataaaagagcaataaaaaaaatcagctgtatttttacacaccaacaataaaaaatccaaaatttcaattaagaaaaatgttatttacaatagtatataactaataaagtagttagaaacaaacaataaaaagggtatgaaacatgtataccataaaagacaaacattgttgaaaaaaattaaagcaaaccttaaaaaatgaagtcatcccatgtttatcgattgaaagttttttttgttttgttttgtttttttttgagatggagtctcactctgttgccaggatggagtgcagtggcacgatctcggctcactgcaacctccaacgccttagttcaagcgattatcctgcctcagcctccaaagtagctggaattacagcaagcaccaccatgcccagctaatttttttttttttt

SEQ ID NO: 712699 - DNA, 529 bp, Homo sapiens
gatctgtagtacttcttttgcagtggaaaatatttttttcctcctttagaaaaacaaatagtcatggttattgaccaaagctaatatttcatttactttaaaartatttacttaaaatccatttttgtttcatattatattagaaagatttttttaaatgagttatttgcatctaaaatttcagttcatgtcttaagctctgtaagcttaatgagctgtgtgtgggccaccattctctctgcgcttatgtggtaatttcctgattaatactaattaatgacatgtcactgttcatttaaaatgaatgatgaaaatgattattcaaccctgatattgaaatcactcagcaacttggcaccagatctctgtgtcaggaggcagtgccaggctcacgaggacttcgtgttatttccacttgctgctacagtaaactggaattaaatgatgtttgtttttaggtagactaggcctcaaaaggcatgatggatgatttagcttcctttcatagcttctgtttgatttatttata

SEQ ID NO: 712700 - DNA, 3104 bp, Homo sapiens
gcataagcctcctaactttttactgggtttttgtgatgttctgtcagtttctttttttcctttcttgcagcagtggatacattgcccccagatacacagtaattgcttacaaaaaacaggacaatgctacaagccagaatacagatctgaaaaaaataaaataaaatgacgagttaaaaatacctacgcatcatgtagaacagagtttatgataatagcagcttccatgttttggattaaagttaaaccacagttaacaggtcaaaattaatggattatttaatacttctttattgagtattcatgtcctgaccccaagatagttctgggaattttaaagaattgctagatttctcattttgcagtgttgtggtagagtgtgtcagacactctgaaagttcagttaattaccacatcagagtatccatctttctgatccagtgtccttaatttttattgcaatttgaaaatgataaatttcaaggggctagtttatatgctataacaatctaaggagacttaatgagaaatatgctcattgtaactggagctcacataaaaataaaggtcggattatataagaaaatatttttattttaaatattttgtttaatcaaattcaaacagaaatatatctttagcatacactgagtcagtggattttgtgatctgcctttgtttcttcttacatttagaaaatttcaatttgacctcaaccatctctctatatggccatttatttacccatgtagtagttaaattacacatagtaaaaccctgacttttgtaattttattttttggttcacatatgttgttttggtatagaattacacaaaggataaagaaggcatttcttaacatttttcatgttaaaaaaatttctaagatacattgttttacatttaaatattttagaaataagaatatatcatattttatgaccttcattaaaagcaaatagctataaggatctgaaagagatatttgcactcccatgttcattgcaacattattcacaattgccaaggtattaaagcaacccaaaactccatcaacagatgactggagaaagaaaatgtggtatgtacatataattgaatattatttagcttttaagaaaaaggaaatcctgccatttgcagcaaaatggatgcacctggaggacatcatactaagtgaaataagccagtcacatggagacaaatactgcatgatttcattcatattggaatatctaaaatgttcagtcttaaaaaatcagaaaataaaacggtgattgataggggctgagctgttccatgggtacagagtttccattatgcaagatgaataagttctagagatctgctgcacaacataatgctcatagttaacaatacagtattagacatataaaaatttgtcaagagggtagatttcatgttgtgtttgaaacatactcagacacaacaaaactatcaaaaaataaaaacagaggcacacggaaacactgaaatgtagttaatgtgtctagtactttgtgggggtgattttataggtgtatgcatataaaaactcatcaaattgcatacattamatttgtgcaattatttttgtatacaaatcatacctcaataaaactgttaaaaaaaagaaaagagaaagtaaaaaacaaatgactaccaccaacaacaaaaatgtccaagaacagtaaatagagtttgtatatatacatgatgtattttttatcgccattgcttctcatgtatgaaaagaatttttgttaaattgtcacctttgttgagttatttgtttttgtaatatgatttgtagcttgagtttaacataattgtgaaatcctaactttgctgttttcaaaggtaacattttgtgaaagaatgaaagcaaaaagttattctatcctcagaatattgtctgtcacatgccaatcaacataattaaaggcaatagaaattgccaaatttctcatgtatatgtatgtatatataataaaaataggcaggggacaaagtaatatacatgtttcatgaaggactattattcagggaaaacatcttcaaacctttcaactgactttcaacattaagtagtccaattttcttggtgcataatattctcagggttggtgtgtggagactagacaaaccacagaatcatagtaatttagggtttcaagaaaattgaagactatctaacccaattttccaaattgtagagtcaggaaaaagaatttttctctgatctcccaagaggaagttatcttttctatgtgctctcatttttccgcactgtagcatttatggcaagatgattattatggcctatttacttctttatatctctccttaagtaataagtgttttgagcacaacactgtactatgggccctgtgttcttagagcatagcactatacccaaaacgtagagaatcttatcaaataaattatgatcaataattctcttccatagtaaatggccaccaatgtatatttgaagacattagggctatgaaactaaaaaagaaaaagaaacttccatcacttctatttttagggattttacttctcttgacataaggtttgtgtgtctttgtaaataccactaattctgtgtgaataattactaataatactactaatactgttacttgagtaattctattagcttggaatcacaaagaacaggtctatgttcacatctaattataatcactcaaatctttaaaagtagctatcatacccctactcatgtccattttacagtctctgattcactcatgctatctccctatttgatttaaaatgttgttgctgtatatgaagttatatttccgttcagcttagcagaaagttatcaattcgctaggcattctcttagagtacatatggtataaaggtgaatagacatacattgttttgaggaaatagataaatttataattctaaaatattgtagggctttatcacatgatattgtatttaaaaatggtgtctgagattcagatatgcacaaattcctacgggagcatagagaacaggcttttagttcaaccaaagaggtcaggtgaacaataattttattattttatttcatcctcttaga

SEQ ID NO: 712701 - DNA, 3104 bp, Homo sapiens
gcataagcctcctaactttttactgggtttttgtgatgttctgtcagtttctttttttcctttcttgcagcagtggatacattgcccccagatacacagtaattgcttacaaaaaacaggacaatgctacaagccagaatacagatctgaaaaaaataaaataaaatgacgagttaaaaatacctacgcatcatgtagaacagagtttatgataatagcagcttccatgttttggattaaagttaaaccacagttaacaggtcaaaattaatggattatttaatacttctttattgagtattcatgtcctgaccccaagatagttctgggaattttaaagaattgctagatttctcattttgcagtgttgtggtagagtgtgtcagacactctgaaagttcagttaattaccacatcagagtatccatctttctgatccagtgtccttaatttttattgcaatttgaaaatgataaatttcaaggggctagtttatatgctataacaatctaaggagacttaatgagaaatatgctcattgtaactggagctcacataaaaataaaggtcggattatataagaaaatatttttattttaaatattttgtttaatcaaattcaaacagaaatatatctttagcatacactgagtcagtggattttgtgatctgcctttgtttcttcttacatttagaaaatttcaatttgacctcaaccatctctctatatggccatttatttacccatgtagtagttaaattacacatagtaaaaccctgacttttgtaattttattttttggttcacatatgttgttttggtatagaattacacaaaggataaagaaggcatttcttaacatttttcatgttaaaaaaatttctaagatacattgttttacatttaaatattttagaaataagaatatatcatattttatgaccttcattaaaagcaaatagctataaggatctgaaagagatatttgcactcccatgttcattgcaacattattcacaattgccaaggtattaaagcaacccaaaactccatcaacagatgactggagaaagaaaatgtggtatgtacatataattgaatattatttagcttttaagaaaaaggaaatcctgccatttgcagcaaaatggatgcacctggaggacatcatactaagtgaaataagccagtcacatggagacaaatactgcatgatttcattcatattggaatatctaaaatgttcagtcttaaaaaatcagaaaataaaacggtgattgataggggctgagctgttccatgggtacagagtttccattatgcaagatgaataagttctagagatctgctgcacaacataatgctcatagttaacaatacagtattagacatataaaaatttgtcaagagggtagatttcatgttgtgtttgaaacatactcagacacaacaaaactatcaaaaaataaaaacagaggcacacggaaacactgaaatgtagttaatgtgtctagtactttgtgggggtgattttataggtgtatgcatataaaaactcatcaaattgcatacattaaatttgtgcaattatttttgtatacaaatcatacctcaataaaactgttaaaaaaaagaaaagagaaagtaaaaaacaaatgactrccaccaacaacaaaaatgtccaagaacagtaaatagagtttgtatatatacatgatgtattttttatcgccattgcttctcatgtatgaaaagaatttttgttaaattgtcacctttgttgagttatttgtttttgtaatatgatttgtagcttgagtttaacataattgtgaaatcctaactttgctgttttcaaaggtaacattttgtgaaagaatgaaagcaaaaagttattctatcctcagaatattgtctgtcacatgccaatcaacataattaaaggcaatagaaattgccaaatttctcatgtatatgtatgtatatataataaaaataggcaggggacaaagtaatatacatgtttcatgaaggactattattcagggaaaacatcttcaaacctttcaactgactttcaacattaagtagtccaattttcttggtgcataatattctcagggttggtgtgtggagactagacaaaccacagaatcatagtaatttagggtttcaagaaaattgaagactatctaacccaattttccaaattgtagagtcaggaaaaagaatttttctctgatctcccaagaggaagttatcttttctatgtgctctcatttttccgcactgtagcatttatggcaagatgattattatggcctatttacttctttatatctctccttaagtaataagtgttttgagcacaacactgtactatgggccctgtgttcttagagcatagcactatacccaaaacgtagagaatcttatcaaataaattatgatcaataattctcttccatagtaaatggccaccaatgtatatttgaagacattagggctatgaaactaaaaaagaaaaagaaacttccatcacttctatttttagggattttacttctcttgacataaggtttgtgtgtctttgtaaataccactaattctgtgtgaataattactaataatactactaatactgttacttgagtaattctattagcttggaatcacaaagaacaggtctatgttcacatctaattataatcactcaaatctttaaaagtagctatcatacccctactcatgtccattttacagtctctgattcactcatgctatctccctatttgatttaaaatgttgttgctgtatatgaagttatatttccgttcagcttagcagaaagttatcaattcgctaggcattctcttagagtacatatggtataaaggtgaatagacatacattgttttgaggaaatagataaatttataattctaaaatattgtagggctttatcacatgatattgtatttaaaaatggtgtctgagattcagatatgcacaaattcctacgggagcatagagaacaggcttttagttcaaccaaagaggtcaggtgaacaataattttattattttatttcatcctcttaga

SEQ ID NO: 712702 - DNA, 3104 bp, Homo sapiens
gcataagcctcctaactttttactgggtttttgtgatgttctgtcagtttctttttttcctttcttgcagcagtggatacattgcccccagatacacagtaattgcttacaaaaaacaggacaatgctacaagccagaatacagatctgaaaaaaataaaataaaatgacgagttaaaaatacctacgcatcatgtagaacagagtttatgataatagcagcttccatgttttggattaaagttaaaccacagttaacaggtcaaaattaatggattatttaatacttctttattgagtattcatgtcctgaccccaagatagttctgggaattttaaagaattgctagatttctcattttgcagtgttgtggtagagtgtgtcagacactctgaaagttcagttaattaccacatcagagtatccatctttctgatccagtgtccttaatttttattgcaatttgaaaatgataaatttcaaggggctagtttatatgctataacaatctaaggagacttaatgagaaatatgctcattgtaactggagctcacataaaaataaaggtcggattatataagaaaatatttttattttaaatattttgtttaatcaaattcaaacagaaatatatctttagcatacactgagtcagtggattttgtgatctgcctttgtttcttcttacatttagaaaatttcaatttgacctcaaccatctctctatatggccatttatttacccatgtagtagttaaattacacatagtaaaaccctgacttttgtaattttattttttggttcacatatgttgttttggtatagaattacacaaaggataaagaaggcatttcttaacatttttcatgttaaaaaaatttctaagatacattgttttacatttaaatattttagaaataagaatatatcatattttatgaccttcattaaaagcaaatagctataaggatctgaaagagatatttgcactcccatgttcattgcaacattattcacaattgccaaggtattaaagcaacccaaaactccatcaacagatgactggagaaagaaaatgtggtatgtacatataattgaatattatttagcttttaagaaaaaggaaatcctgccatttgcagcaaaatggatgcacctggaggacatcatactaagtgaaataagccagtcacatggagacaaatactgcatgatttcattcatattggaatatctaaaatgttcagtcttaaaaaatcagaaaataaaacggtgattgataggggctgagctgttccatgggtacagagtttccattatgcaagatgaataagttctagagatctgctgcacaacataatgctcatagttaacaatacagtattagacatataaaaatttgtcaagagggtagatttcatgttgtgtttgaaacatactcagacacaacaaaactatcaaaaaataaaaacagaggcacacggaaacactgaaatgtagttaatgtgtctagtactttgtgggggtgattttataggtgtatgcatataaaaactcatcaaattgcatacattaaatttgtgcaattatttttgtatacaaatcatacctcaataaaactgttaaaaaaaagaaaagagaaagtaaaaaacaaatgactaccaccaacaacaaaaatgtccaagaacagtaaatagagtttgtatatatacatgatgtattttttatcgccattgcttctcatgtatgaaaagaatttttgttaaattgtcmcctttgttgagttatttgtttttgtaatatgatttgtagcttgagtttaacataattgtgaaatcctaactttgctgttttcaaaggtaacattttgtgaaagaatgaaagcaaaaagttattctatcctcagaatattgtctgtcacatgccaatcaacataattaaaggcaatagaaattgccaaatttctcatgtatatgtatgtatatataataaaaataggcaggggacaaagtaatatacatgtttcatgaaggactattattcagggaaaacatcttcaaacctttcaactgactttcaacattaagtagtccaattttcttggtgcataatattctcagggttggtgtgtggagactagacaaaccacagaatcatagtaatttagggtttcaagaaaattgaagactatctaacccaattttccaaattgtagagtcaggaaaaagaatttttctctgatctcccaagaggaagttatcttttctatgtgctctcatttttccgcactgtagcatttatggcaagatgattattatggcctatttacttctttatatctctccttaagtaataagtgttttgagcacaacactgtactatgggccctgtgttcttagagcatagcactatacccaaaacgtagagaatcttatcaaataaattatgatcaataattctcttccatagtaaatggccaccaatgtatatttgaagacattagggctatgaaactaaaaaagaaaaagaaacttccatcacttctatttttagggattttacttctcttgacataaggtttgtgtgtctttgtaaataccactaattctgtgtgaataattactaataatactactaatactgttacttgagtaattctattagcttggaatcacaaagaacaggtctatgttcacatctaattataatcactcaaatctttaaaagtagctatcatacccctactcatgtccattttacagtctctgattcactcatgctatctccctatttgatttaaaatgttgttgctgtatatgaagttatatttccgttcagcttagcagaaagttatcaattcgctaggcattctcttagagtacatatggtataaaggtgaatagacatacattgttttgaggaaatagataaatttataattctaaaatattgtagggctttatcacatgatattgtatttaaaaatggtgtctgagattcagatatgcacaaattcctacgggagcatagagaacaggcttttagttcaaccaaagaggtcaggtgaacaataattttattattttatttcatcctcttaga

SEQ ID NO: 712703 - DNA, 2056 bp, Homo sapiens
aagtaaaagtaccaaaatctatcctgatgttttcaattttatctgcctttctgctaaccccacatatctaatctgcacagaaacatgaagttagggggtgtttgaacatagttttcagcctttcccttaggatctctaagaccgtgtccagaaggggatggaggaggagaatggagtgatcagatcactgacaggtgttcctatcttggtccttatgctccatttctttacggttggcagccccaatcaaccattatccttgttacaggctgaattgtgtcctccttatccccacctcccccatctatatgttaaagtcttaacccccagtcacccagaatgtgactgtatttggagataaggcctttaaagaggtaataggtaagatgaggtcattagggtgggccctaatcccctgtatttggtgtccttataagaagagagcttaggacacaggcacatgaagagggaagacaatgtgaaggcactgggagaagatggccacctaaaagccatggagagaggccttagaatgaaaccaacctggcccacaccttgatcttggacttccagcctccttgattgtgagaaaataaacttctgttatttaggccatcccatttttagtgctttgttatgggaatgctaccaaactaatgcaatgtcctgtggaaattactataaccctcaccaattggcttggagatcaagttctaaygtagaaaaccatggattaaaaaacactggccttgagctacaagggggtcacaccctactcatcgcatctctagcaacttagaaatgaagaaggtataaattaagagagcctaatttcaaggcataaatttggggtttatacttttcctaattttagggtttgtgaaagctttagcattcatagtcatagcccatttagatggacacattcctaggcatgtgtccatctaaatgggtttctcctttgggaccttaggactcagatgccacatctggaactttcccttggatgagagatgtgatagcatgtccctctatgacagacaggtcagtctggtggaaaagagcctagaatgggagccagaagacccaggccctagtcttgattctgtcacaaacttccagagtggccctaggcaactagatatgcctgtttggactaggaatccttatatggtcttcatgattgattttcaaactcacttccatggaatggttttcagactcagttccatggaatcttagggggctctatggaggagttttaggagttctggaaacttttcatttgatttttctcttgcaaaatatatcttaactattgaaaacactgtaaaaaataacatacattcagatgtattttatttcacattttaacatatctgagaacatcagtgtgttaaaatgtgctgctaggttcatttggaatgaatgtcacaataaaactttgtcatgtgggtatgcacatttgatgaggaatactgatattctgcactagtctatctctcaaattctaacatgactgatgcctgtctccactgacacaaagtagcacaagtgagtttgtgactatggcatatttgctttttttttttttttttttgcatatgctcttctcatttcataagacttgcttgtatcaccacaactgactctcttgcatcttgaaaacatcacacaagagctagaatgaatgatccgttctgactttatgattagaaatgcaagaatttattaggtgttaccaacaattcaactttgaaacagatatttcctactacttttcttgcaagcttctgggtaaatttagttgaacagaaatccaagttgtaagacaagttgttttaaaacaaaactgttgccatttccaactacttagctagatgaatgagtattttctaaatattgtgctactaagtgaaaataacataatactttggatgctgaggataatatgtttgtaattattcaaagtttttacattaatcaaatcagtcttagagccagcagtgatatattttatattatacgtagcatatttgaactcatgaagtaaata

SEQ ID NO: 712704 - DNA, 1014 bp, Homo sapiens
tgtcttccaccttccaggaaaccagggtgtttctccaccacacagccacatccaaaatctgccctcaagaatccagtaccagtcacttaagccttggtctaaatttaaatctatggtacttctcctagggatatattcatagcaagcctatgtttaattgtggaataaaatattttcctgcaaaataatgataataataataatcatgaactactacaaacatggaagagttgttcagtgattttcttggggaaggaaatggaaaatttcctcatatccctgacaatgtgctacacataggcaccatttaaaagatgatccaagcattgaaagtaatgtcacagcattgtgtatcatcaaggtatcctttaaaggataatagatcattcagcattgtattacaacagtgatcattttgaaggtttgtaattgagacacagaaaaaaatggaagtgatgtcatcaaaaaatttaaaagcccctggcttctagaacactctgtaagactctaagacaggtaagagctatcaacctaatgaccayaggctgcaaaccccagaaaactttagagcacagctttcaaataagtggcaactggaaatctaccagtcaaggttttaaattttttaacataaatgtaaatctacttaactaatagcattgacccattccctgctcttcctttttattgctttccaaggccatgttatttcacttgcacggaattagacaccaaggattaagtcatttactctagagtgacccaggagtggaactgagggtataacccaggcccactgactcccttccacaagccatggatgctttaactactacataggaaatcaccattcagaaaatctcttaaataaaagtcaacagtaataatgtcaagacttaataaatgggtgtggactatgtcttggaaaaattagttctaccaaactgtggagacatgggctaggtcaaagtgagtacatggttagacctgtctatcttctgaaagaatttggaa

SEQ ID NO: 712705 - DNA, 2191 bp, Homo sapiens
gaaagatataagtgagacccagtaccttcatgtagatgcaggaaaaaatgactaatgttgaattcttactgggaaccaaaatattttagaaattcagacatgtcattatttgctcaacaataagtcactgtgtagtgaactttaaagaaaattactgattttatttgactataagaatataattaagtgtaagattgtataagaatcttatttagcaaatgtactaattatgatccttggggcattggatatttagtttctattgtaccttcacaagacactccccaggcatctttttcattttccttattggaagctagtggtattccctgcaggatttagttaagagtttctgctttacaaacctactaggaaaacattccatttcttctcagctggtcattttcaaagactaaaggcacttaggctattagttttttctaatgcattgagtctggttatytctatttaaatggagctctataataaatttcagttctcaaaattttgtgaagtgtgtttagtgtaacagattcctgggtgatttcgtttgcgtcagaatttctcttactttctagaaaggacatgttcatatgtgagtggcagagttcagaacaagaacaaaataaaaacattaattaccccgagctgcctgaatcataacagctgtgttgaatgtgcggaacactggtgtaggcatccaaggagcatcaatatttattagaagatgtgcctattcattgagctataaaatgattcagtgtaatatatgccattccaataattgaactccatgcaaaagaacaccaatgtagccacaatgaaaattgagaacaatgattttgatttattaaattattctatgcagccacaagatcttgaacaaagagataaaaagttaatgcaagtctatggtcatgctgctgtcttacagttagaaggaccagaagcaaattttccagcctgactaagggatgcctggttctaaaggtctagccccatattgttttgataaaaagtgctcatttgagccttcggtggcccagaggcagaacccttaggctacacatttcccttgaatggcatccccttatcatatcacctgttcctttcagaagaccttctctggtcaccctaacattcattgtactcatctctgaaaccttatgtctgtaggtagatataggcataaggggaggtaacagggatgaaatccacatttaaggaaacaatgtggtctatctactcaaaatcctcaactggccagaatctctatgttctgctttaacaaaagatagatcacatacacctcacagctcatccacgggggtcagttttcttgttgttaaaggacttttagagtctgtattgaggtcaataaattcatctcaagtttttctattctctgtatccatatagtgcaaattcatagtcagattgaaaaccccatgatattataaaaatacctattattaaagaaatgtataattatcttcataataccataattactgagacatgaaagtcaacagaaaaggttttaaacgtagattaaaacaagaagattttatgtaaccacgaaccaaaaaggttaattactcagcacagccccagctccttattaattttgttaattgggtgtaccggttttgggaccccctcccaaaacatatgtacaccagaaactgtgaatgtgactttagttggaaaaaaaggatctttgaataagtaattaagttaaacatcttgagatgagatcaccctagattatccagatggaccttaaatttagtggcaagtgtccttgataagaagagtagacacagagacagaagataaggtcatgcaaagaggaaagtagggattggagatatacagccacaagctcaggaatgcctggagctacaaaaagctggaagaggcgaggaaggattctcctgagaccttcagagggagtatggccctgccaacaccctgattttggatttcttgcctctaaacctgtcagagaaaaaatttctgttgttttaagccaccatgtttgggcttatttactattacttaggtacttaattactatcacggctctagaaaactaatacatagggttttactatatttgaataaatgccactcaataaacacaaataaggtataaagatgaagactctttagaaattcatttaacaca

SEQ ID NO: 712706 - DNA, 2191 bp, Homo sapiens
gaaagatataagtgagacccagtaccttcatgtagatgcaggaaaaaatgactaatgttgaattcttactgggaaccaaaatattttagaaattcagacatgtcattatttgctcaacaataagtcactgtgtagtgaactttaaagaaaattactgattttatttgactataagaatataattaagtgtaagattgtataagaatcttatttagcaaatgtactaattatgatccttggggcattggatatttagtttctattgtaccttcacaagacactccccaggcatctttttcattttccttattggaagctagtggtattccctgcaggatttagttaagagtttctgctttacaaacctactaggaaaacattccatttcttctcagctggtcattttcaaagactaaaggcacttaggctattagttttttctaatgcattgagtctggttatctctatttaaatggagctctataataawtttcagttctcaaaattttgtgaagtgtgtttagtgtaacagattcctgggtgatttcgtttgcgtcagaatttctcttactttctagaaaggacatgttcatatgtgagtggcagagttcagaacaagaacaaaataaaaacattaattaccccgagctgcctgaatcataacagctgtgttgaatgtgcggaacactggtgtaggcatccaaggagcatcaatatttattagaagatgtgcctattcattgagctataaaatgattcagtgtaatatatgccattccaataattgaactccatgcaaaagaacaccaatgtagccacaatgaaaattgagaacaatgattttgatttattaaattattctatgcagccacaagatcttgaacaaagagataaaaagttaatgcaagtctatggtcatgctgctgtcttacagttagaaggaccagaagcaaattttccagcctgactaagggatgcctggttctaaaggtctagccccatattgttttgataaaaagtgctcatttgagccttcggtggcccagaggcagaacccttaggctacacatttcccttgaatggcatccccttatcatatcacctgttcctttcagaagaccttctctggtcaccctaacattcattgtactcatctctgaaaccttatgtctgtaggtagatataggcataaggggaggtaacagggatgaaatccacatttaaggaaacaatgtggtctatctactcaaaatcctcaactggccagaatctctatgttctgctttaacaaaagatagatcacatacacctcacagctcatccacgggggtcagttttcttgttgttaaaggacttttagagtctgtattgaggtcaataaattcatctcaagtttttctattctctgtatccatatagtgcaaattcatagtcagattgaaaaccccatgatattataaaaatacctattattaaagaaatgtataattatcttcataataccataattactgagacatgaaagtcaacagaaaaggttttaaacgtagattaaaacaagaagattttatgtaaccacgaaccaaaaaggttaattactcagcacagccccagctccttattaattttgttaattgggtgtaccggttttgggaccccctcccaaaacatatgtacaccagaaactgtgaatgtgactttagttggaaaaaaaggatctttgaataagtaattaagttaaacatcttgagatgagatcaccctagattatccagatggaccttaaatttagtggcaagtgtccttgataagaagagtagacacagagacagaagataaggtcatgcaaagaggaaagtagggattggagatatacagccacaagctcaggaatgcctggagctacaaaaagctggaagaggcgaggaaggattctcctgagaccttcagagggagtatggccctgccaacaccctgattttggatttcttgcctctaaacctgtcagagaaaaaatttctgttgttttaagccaccatgtttgggcttatttactattacttaggtacttaattactatcacggctctagaaaactaatacatagggttttactatatttgaataaatgccactcaataaacacaaataaggtataaagatgaagactctttagaaattcatttaacaca

SEQ ID NO: 712707 - DNA, 651 bp, Homo sapiens
gacaaactgtcctgcaaataagttgcaccaatcacactctaccagtaatatatgtaaatgccccaagttatggtcactttccttacatcctcactaactttattatcattttttctctttgccaacttaaaagaccaaacaaaggcatatcaatttgattttaatttctcttattgctagtgagattgaacctgttttcatttgtttatcatacatttgtgtttcatctttcaaattatttattcatggtctttatccatttttctattaggatatttgtctatttgattagcaagaatattgyatgcattagggatatgcaccttttaggtgacatatagattatatatgtttttcccaactctttgtcttttaacttccctcatagtgttgacatatggaaattttagaaggtttttatagccaaacctgtccctcttctttcatatttttattcctcttataaagcccttccctgcctcgagttatcatttattcaacattttctcccattacatttattggtttgtgttttgcttttgtcactaacctacacatttaatctatctgaaatttattttgccatgacaataggaaagaaccctccaactttttgtaaatagttaactctgagccacaacttatgccatt

SEQ ID NO: 712708 - DNA, 1167 bp, Homo sapiens
ttgacctgcaaagcctaagatattttcgtatctggcattttaagaaaaagtttgctgaactcttctctaaaggaaaaactgtgttctcctacagattctgtctgcagcattctctccttgcaggacttaaaacaaaacaaacaaaacaaaaaaaccaggcagctgggtggatttagaaatcctggctatagtttgcaaacctttgctttagaagtttgtttgcttatattgtgtttatattttacagtgtgtgtgtgtctgtctttctaaatctttcttgacattattgcctcaaaggcactgagacagcgtgtgttaaaacccaaggacacagattgtaattctagtcttattgctgtaggaatcagtttgctggtttctagagggtgggctgaccttgacttagtaaagtatagtactttttgtctccctagtagaagtattaactgacctttaaagtgaacttgatgcaccctcttcaggaaacaggaaactgttacatttgggtgtgatattaggagatgaggatactgtgtaggaggtgttggacctgcctaaagtgtttggccttgaaatgtcaaggttgctctcccaaacctagttttccttgacctggctgtttttctaacttcagagacggacttaaacaatagagtttattagattatatgtctgtgtaaacaaatgaagattaaaagacaaaaaataaagtagttaaaaatgaaatgtcttactttttcttgttttaggataaaaattgtattaataccttaaaatgtattcagcaggcaaaaacttcggtagtttcggtattacagtgacaccatttatttttaggcatagtcttgtctttttttttttttttttttggtaaatattataccattttcaacttaatgtgaaaagcttttccagttaatctttatcgtgtgtgtgtgtctgtgtgtgcgtgtgygtgtgtgtgtgtgtgtgaaagaaaatgtgttttaggcagcatcagtagagcaaaataagatttaatgttgttacttcaaaactgtatccctaacaagacgatacaaaattcagagtgttttggccccttttctaggacagatttagaaacttatagacttgtagttataggataaatgtatgccaaagctttcttcaaagaaagctccatca

SEQ ID NO: 712709 - DNA, 592 bp, Homo sapiens
ttaaagatcaggaaactcaggcttaaagattaggaaacttgctctaggtygcatggctattactctcaataccaattgttcccaagagttagacctttttctcttttttggcatttaattctatacatgtggaagttccttcatgtcagaaaattctgtaatcaagatttaacagatttttactcagattcaatatcattttagagcatctgccttttattcaaaacataatggtgtaagatacctatttatatatctatgtcttacaatgctattaattaattctatcacaaacgtgaaacacaatgatacatcattcaaattctgttttgcttttctcttttgtgaaaaggcactaacactaatagcctcatagtggtattataaaagtcaaataaatattcaaaagcattttggaaaattaccaagtttttaggcaagctgaaaaaagtattagtttatatcctccaaaaaaaaaatctgtgtcaaatattaaaaacaacagttcacgtagtgcaggaaagtagttacccatgtatgaggtggggaatgttgggtcataggtagaaaggagtaggaagaagccacttct

SEQ ID NO: 712710 - DNA, 1185 bp, Homo sapiens
agaaaactacttcaaaataattaaagtattcttgcacatttacctctgatgtgttaagaaaaacaggttggaaaagtttcttggaactgtagtattactaaggcatctcgtgcaaaataacaggataaaaatcaagctaaacctagaccagctgtcagtatacttaaatgaaatgcctgttatattatattatattatttatttatttatttattttgagacagagtcttgctctgtcgcccaggctggagtgcagtggtacaatcttggctcactgcaacctctgtctcccgggttcaggtgattctcctgcctcagcctcccaagtagctgggactacaggtgtgmaccaccatgcctggctaatttttgtatttttagtagagatgggggtttcaccatgttggccaggctggtcttgaactcctgacctcaggggatcctcccacttcggcctcccaaagtgctgggattacaggcgtgagccactgcgcccagccacctattatatcatttaaagagtagatatacaaagattaaattgggaacaaggatgtttagcaactttgtagcgctctatttggtcaactaaggcaagtcaaagaaaacaaagggacagaaagctgaaacttgattaattgaattggtttgaaatgtgacattgagaagagctaaaaggaatatctgggattatatcaacagttgtaaaaagtgggaaaaatatttcatatatcttgattgagctaataattaaaaacaaatacacaaaccaaatagtcttgtaaatactgaaacaatggaattctatatgaccagaagtaaggacagaaaagcaaggcaagattaaacttcagtggtttcacattgagagaagtggttacatcaagatcctatagctaaaaaaaaaaaaaaaagaaaaaaaaaaaagaaaaaaattaatatatttaagaagcaggaatgtctatatttattattgatccctcatttagcaaaaatcattgtttttgttttcctaaatggtttaagagcttcgatttttcagcatcttcaactacttcctcaacgggatctttctcattagcctaaaaccaacctaatacttactttccctctctaagaaaaaaacacaatgggccctgtatcttgatcaccttatttcactactctcctttataagcacatttt

SEQ ID NO: 712711 - DNA, 1185 bp, Homo sapiens
agaaaactacttcaaaataattaaagtattcttgcacatttacctctgatgtgttaagaaaaacaggttggaaaagtttcttggaactgtagtattactaaggcatctcgtgcaaaataacaggataaaaatcaagctaaacctagaccagctgtcagtatacttaaatgaaatgcctgttatattatattatattatttatttatttatttattttgagacagagtcttgctctgtcgcccaggctggagtgcagtggtacaatcttggctcactgcaacctctgtctcccgggttcaggtgattctcctgcctcagcctcccaagtagctgggactacaggtgtgcrccaccatgcctggctaatttttgtatttttagtagagatgggggtttcaccatgttggccaggctggtcttgaactcctgacctcaggggatcctcccacttcggcctcccaaagtgctgggattacaggcgtgagccactgcgcccagccacctattatatcatttaaagagtagatatacaaagattaaattgggaacaaggatgtttagcaactttgtagcgctctatttggtcaactaaggcaagtcaaagaaaacaaagggacagaaagctgaaacttgattaattgaattggtttgaaatgtgacattgagaagagctaaaaggaatatctgggattatatcaacagttgtaaaaagtgggaaaaatatttcatatatcttgattgagctaataattaaaaacaaatacacaaaccaaatagtcttgtaaatactgaaacaatggaattctatatgaccagaagtaaggacagaaaagcaaggcaagattaaacttcagtggtttcacattgagagaagtggttacatcaagatcctatagctaaaaaaaaaaaaaaaagaaaaaaaaaaaagaaaaaaattaatatatttaagaagcaggaatgtctatatttattattgatccctcatttagcaaaaatcattgtttttgttttcctaaatggtttaagagcttcgatttttcagcatcttcaactacttcctcaacgggatctttctcattagcctaaaaccaacctaatacttactttccctctctaagaaaaaaacacaatgggccctgtatcttgatcaccttatttcactactctcctttataagcacatttt

SEQ ID NO: 712712 - DNA, 870 bp, Homo sapiens
ctgtctccaaggtcccttagagcaacccatataagaaacaggctgcgtacactaccaaggaagctgctgtttgcagcttttgcacactgggccccaggaggaaaggaactccatcagctcaattggctgcagccctttatcatttttacatgtagcctactatctgtttcttcttcatatacaaccatatgtgtatattacctttttatggtaacaaaatatatatgccaattggaatatgtataaataatttctttaaaaagcaccttgtattattaagaaaatgcgtttgaaaataaaatctgatatggtttggccctgtatccccacgcaaatctcatcttgtagcttccacaattcccatgcattgtgggaggaacccagtgggaggtaattgaatcttgggggcgggtctttcccatgctattctcatgatagttaataaagtttacctgcacaagctctctggacatccacgtaagatgtgacttgctcctccttgccttccaccatgattgtgaggcatccccagccacgcagaactgtgagctctccattaaacctctttcctttgtaaattgcccattctcgagtacgtctttatcagcagtgtgaaaacagactaatacagtagattggtaccagtagagtggggtgatgctggaaagatactygaaaatgtgaaaatgactttagacctgggtaacaggcagaggatggaacagtttggagggctcagaagaagaaaggaaaatgtgggaaagtatggaacttcctagagacttgttgaatggtttggacaaaaatgctgatagtgatatgaacaataagatccaggctgaggtggcctcagatggaggtgaggaactt

SEQ ID NO: 712713 - DNA, 649 bp, Homo sapiens
tcatggagtccttatgcatatgtgcatgaatattcccttaagttatgcttgggtgttttccaatcttatcaaagagtaaaaaatgaactttgggtgaaattggaattgctacaaaatactgactccatcagatatgaacatttttaccaatacattgagtaatatgaaagataaatttgtcaacctaaaaatgcaagcccattcacaaaaataagggaacacacaatgaatgtttggcattatatagataacatattatgggatccaggaaacataagttggcatttgaatgttgatgtttctaaatttttcagcagctttgtagtttgaacatgtagtttggtgtgatactaagtcacaagatataagaaatatgttatagctatatggtaaataaagaggaagaaaacttggattgttgaaattgtgaagaacactttatgaagctcttgtatgagagtaagatgattagattcttagtgatgtaaagatgaactaaatagcataaaacataagcaactttagactgccatgttgcttcagtatttcatsctacttagtatacatcacattattttatcatttttaataaagtattattgtttatacttttcaataaaattagatttaagaatatcttctatttctt

SEQ ID NO: 712714 - DNA, 1166 bp, Homo sapiens
ccatacctaggttttaattcttcagagggtttgggaaccaaggcaatgcatatcaaggacctaacacaatgctgggtacacagtgggcacgcactagaagttaattccttttttctcccctccacttggaaatgtataacataaatatgtcctggtactaatatgcaccctcactccaatctgtcctttctggacccctgtattttcatagtaatcccttcctaccacacccaatcccttaacacttaactaattttaacaaccattaataagagtgattcattgacccagaaatgaatattttytttcagcttacagaattgttagaatgatgccagcctccccccaggtccagacccacctctcagatgtggcttctgaatgacccacttggagcatggccaagccactcctatcacagctcaataccacatctacccccttcagggcaggactatgccatacttttaatttagggattattttctatgctatacttttactttaaggattatttggggggaacctctaatttgaaatgttggtgagccctctcccaccaagcagtcaatttttgttttcatacttttccaaaattttatatgtaataaacagaaattcctaaagtagggactgaggccacagaactgtaaactattagctatgcagaatagtcaatatttcaaaaagggagtcaaaacccttagcaagttgtattctaagagatgccaaaatgaaagcagcaacaaagtaagtttttctgaggattaaagtggaggcaaggatcaaaacctgggtgtacccaacatagaatggaatgttaggatatgcttcatagtaacttacaggatttcagatggagcttcaatgaaatcctacctaaatacggcttattttggaggcacttgttttgtgttggttgttccgaaatggtataatgagaaatcttttaaagtatcaaaaactacttgttgataagttttatagcaaaaaaagattaaaatataataatgtacccattcatggtttgtattagcccattttaggtcactgctattatcctttctctatcagctgctgagagaataaaattaagcaaccaattcttattaggataaattaaatatttagcagtataacctcaattctgtgggctaaaaaaagag

SEQ ID NO: 712715 - DNA, 2227 bp, Homo sapiens
ggcagatgtgaacatacaacacgcccaaggccaattcctagagggctgtggtgactggcagatggatggggcctgcggtcaagctggttctgaactgaagaggttggcagaattcagattgtccaggcccaacaaaacaaaacaaaacaaaacccacaaagacaaaaatcaccatcatgtctcatagagtctcttgggagaacctccaacctgctctctgcttccattctaaactccctccaatccattttttccccagtagccagaccaatttatttttatcactgtaaatctgataatttcactccttgcttaaccccctttccacggcttcccatcactcttagaataaaatccaaactgtggattattgctgacagtctacagtcccccacagggcctaatgttattctgcataactctccagctgcacccaccagggcctctcgcctctgtgttcactagactcataccagaacaaactccttcctatttcgcacaccttccaagccctctcccatctcgtctattgtaccagtggcccctctgtctgggacactctcatcagctcttaacaccaaggccttgttcaaaagtcacttcttccaacaaacttcatggccaccttaatgtgctccctccccaacttaatcctccctcatcatgttgtttatttccatttcagcatttatggattgcaactaggatttcagttgcttgcttattgagagcctccctgactagggtgtgggaactgtgacttattgactgccatgcacttagaaggccctaataaaacctttcattgacttattcaacaggtggagagagacgtttagaaattccaacttgccaaagtgtgctagtgagatgttcagtgaccaatgcctcattattccttcatcagtctcctgaatcatcaatttctgcctcttcactggatcactccaagtactatatgtactaatatgctatggtatcttaataaaatcctccctaaaaatatagatttacttatttaatgatacttatgtagtgtttaccatgtgctgggagtatatcagcatgtgtaccctcattttttattatttttatgaatgattctatctgataacacacttaactaaggctttataaaatcaaggagaactcaggataaacacagatgcttatgcagtgtgataaaggaaactttactctcaagtaaatatttgctttcaaaattctcctgacactaaaactattatcacattagtaaaaatttcccaaagcacaaaaattacaaccaattacatatttaaattataatacttatttaaattatactacttaatttcaaatcctgaccttacagtggctatgttattagtaaagacaacatgcagaattttaccttaatattttaacatttcaaaaattagggtatatatatatatgccctaattttatacatatatatgtataaaatgtatatatgtgtatatgtataaaacgtatatatataaaaaatgtgttttwtatatatatatatatatatatatatatatatatatatattcacacacatacatatacatatatatatatctcccccctacctaacaatagaaactgctgcttcattctaggaacggtaaaataaatttagacctacatctataagcacctaaaatcaaaaacaacaaaaataagttaatgtatgccctagaatggaaaaacttcagttgaggtttggaaggccacaggagaaaagataaaattaagtgacagaaacatttacacaagctcgagtcaagttttaatctgagtcacaagtaaaataaaatcattgactcaactggaatatgtgaaaggatatgcttgtaatataaaattcagcaaaatgtgttaaatgctgatatcaaacttagtaaaactataaacttcaacaatagtaaattcaagtatctcatatctaccacctttttctgaaggactaaaaacttctggcatatatacctttctccacacatccaggacaatcaggaaaaaggtatgaagttttttttaagattaaacaatgaaaggaaagaaagtaaattactttctgcagaccagagagaaagagaatcttcagtcctatccagtatagaaacaaagcaaagaaacagtattccatgtgtctagaaatacaaaaacaaaatatattttaggaataatactccacaaaatcctaagctgcagatat

SEQ ID NO: 712716 - DNA, 1826 bp, Homo sapiens
  misc_feature 940, 941, 942, 943, 944, 945, 946, 947, 948, 949, 950, 951,952, 953, 954, 955, 956, 957, 958, 959, 960, 961, 962, 963,964, 965, 966, 967, 968, 969, 970, 971, 972, 973, 974, 975,976, 977, 978, 979, 980, 981, 982, 983, 984, 985, 986: n = A,T,C or G
  misc_feature 987, 988, 989, 990, 991, 992, 993, 994, 995, 996, 997, 998,999, 1000, 1001, 1002, 1003, 1004, 1005, 1006, 1007, 1008,1009, 1010, 1011, 1012, 1013, 1014, 1015, 1016, 1017, 1018,1019, 1020, 1021, 1022, 1023, 1024, 1025, 1026, 1027: n = A,T,C or G
  misc_feature 1028, 1029, 1030, 1031, 1032, 1033, 1034, 1035, 1036, 1037,1038, 1039: n = A,T,C or G
aatttcagttcagctaacatatattaatacctttgtaactctttgctatggcttttgttatcacaccaaaactatgcaattggtacatggttgtttaagaagaaaccgtatttttccatgataaatcactgtttgaaatatttggttcatggtatgatcgaaatgtaaaagcataattaacacattggctgctagttaacaattggaataactttattctgcagatcatttaagaagtaacaggccgggcgcggtggctcacgcctgtaatcccagcactttgggaggctgaggcgggcagatcacctgaggtcaggagttggagaccagcctgaccaacatggacaaaccccgtctctactaaaaatacaaaattggcagggtgtggtggcacatgcctataatcccagctacttgggaggctaaggcaggagaatcgcttgaacccgggaggcggaggttgcagtgagccgagatcgcaccattgcactcctgcctgggcaacaagagtgaaactccatctccaaaaaaaaaaagaaaaagtaacaaaaggaaattatttgtttttgaaataccagttcaactttgtggattatttttcctctgaaggaaaagaaaaggcttaatggttaggatttttaagtattcccaaagatctgaagggtaataaaatgtactggattttttaaggtggtaccaaaaatgaatgtctgtcatatatttatattacaaatacattatatttatgttctattcatcttttgaatgtttagtatgctattaagtcattctgaatctttgtatttgcttttgcaaataggtatttcaaagctcttttcctaactggttaagtaaaataaaaaattgagctttctagaatatttgcctaattgggaattaaaaagtaaaataataggccaggcatggtggctcatgcctnnnnnnnnnnnnnnnnnnnnnnnnnnnnnnnnnnnnnnnnnnnnnnnnnnnnnnnnnnnnnnnnnnnnnnnnnnnnnnnnnnnnnnnnnnnnnnnnnnnnataaaatattgttatatacaatttttacaagtatattttaaaattgtacctgtatactattttgatggaatgtaagtaacccaatgcactagcaatttcagcagcgtaaaacctagctctgtgctcaggaaaggaccgttctctttgtaagtggaaaaaaagctgtcaaattggttgtgggggtggggggagagagaatgttaggatcattcacacatagcattaaacaaatatattcggggaatacaaaggtaggaattgttctttgttactttggaatgtgagctaaaaatgttaacaaggcacagaaatgtgactccccttcatccatgtccccacctaacaatcattctctctcttcaaccacgtgtctttgtttacccttgctaatgtcactcatctcccatttactacttaatgcaaaaatgtcctcacccttccaggcaactgttctggaaaagattatcgatgaagatcaacgatcttgatactgccatgtaattatcttacagggcctttctggactatgttttccatttgaaaaaaacaaacactattcagagattaaaaactagagcccagcagaacaaatataacccatatgaaaatrtatatatatatatatatatatatatatatatatatatatatatatatatatatatatctccatacatataatttacttgagccaaatactgtttttcaaaaaatctgaattagttgataacattaaaaactgggaatttgggggtaaaaattcatggttttagtttttttttttaaa

SEQ ID NO: 712717 - DNA, 1826 bp, Homo sapiens
  misc_feature 940, 941, 942, 943, 944, 945, 946, 947, 948, 949, 950, 951,952, 953, 954, 955, 956, 957, 958, 959, 960, 961, 962, 963,964, 965, 966, 967, 968, 969, 970, 971, 972, 973, 974, 975,976, 977, 978, 979, 980, 981, 982, 983, 984, 985, 986: n = A,T,C or G
  misc_feature 987, 988, 989, 990, 991, 992, 993, 994, 995, 996, 997, 998,999, 1000, 1001, 1002, 1003, 1004, 1005, 1006, 1007, 1008,1009, 1010, 1011, 1012, 1013, 1014, 1015, 1016, 1017, 1018,1019, 1020, 1021, 1022, 1023, 1024, 1025, 1026, 1027: n = A,T,C or G
  misc_feature 1028, 1029, 1030, 1031, 1032, 1033, 1034, 1035, 1036, 1037,1038, 1039: n = A,T,C or G
aatttcagttcagctaacatatattaatacctttgtaactctttgctatggcttttgttatcacaccaaaactatgcaattggtacatggttgtttaagaagaaaccgtatttttccatgataaatcactgtttgaaatatttggttcatggtatgatcgaaatgtaaaagcataattaacacattggctgctagttaacaattggaataactttattctgcagatcatttaagaagtaacaggccgggcgcggtggctcacgcctgtaatcccagcactttgggaggctgaggcgggcagatcacctgaggtcaggagttggagaccagcctgaccaacatggacaaaccccgtctctactaaaaatacaaaattggcagggtgtggtggcacatgcctataatcccagctacttgggaggctaaggcaggagaatcgcttgaacccgggaggcggaggttgcagtgagccgagatcgcaccattgcactcctgcctgggcaacaagagtgaaactccatctccaaaaaaaaaaagaaaaagtaacaaaaggaaattatttgtttttgaaataccagttcaactttgtggattatttttcctctgaaggaaaagaaaaggcttaatggttaggatttttaagtattcccaaagatctgaagggtaataaaatgtactggattttttaaggtggtaccaaaaatgaatgtctgtcatatatttatattacaaatacattatatttatgttctattcatcttttgaatgtttagtatgctattaagtcattctgaatctttgtatttgcttttgcaaataggtatttcaaagctcttttcctaactggttaagtaaaataaaaaattgagctttctagaatatttgcctaattgggaattaaaaagtaaaataataggccaggcatggtggctcatgcctnnnnnnnnnnnnnnnnnnnnnnnnnnnnnnnnnnnnnnnnnnnnnnnnnnnnnnnnnnnnnnnnnnnnnnnnnnnnnnnnnnnnnnnnnnnnnnnnnnnnataaaatattgttatatacaatttttacaagtatattttaaaattgtacctgtatactattttgatggaatgtaagtaacccaatgcactagcaatttcagcagcgtaaaacctagctctgtgctcaggaaaggaccgttctctttgtaagtggaaaaaaagctgtcaaattggttgtgggggtggggggagagagaatgttaggatcattcacacatagcattaaacaaatatattcggggaatacaaaggtaggaattgttctttgttactttggaatgtgagctaaaaatgttaacaaggcacagaaatgtgactccccttcatccatgtccccacctaacaatcattctctctcttcaaccacgtgtctttgtttacccttgctaatgtcactcatctcccatttactacttaatgcaaaaatgtcctcacccttccaggcaactgttctggaaaagattatcgatgaagatcaacgatcttgatactgccatgtaattatcttacagggcctttctggactatgttttccatttgaaaaaaacaaacactattcagagattaaaaactagagcccagcagaacaaatataacccatatgaaaatawatatatatatatatatatatatatatatatatatatatatatatatatatatatatctccatacatataatttacttgagccaaatactgtttttcaaaaaatctgaattagttgataacattaaaaactgggaatttgggggtaaaaattcatggttttagtttttttttttaaa

SEQ ID NO: 712718 - DNA, 630 bp, Homo sapiens
  misc_feature 530, 531, 532, 533, 534, 535, 536, 537, 538, 539, 540, 541,542, 543, 544, 545, 546, 547, 548, 549, 550, 551, 552, 553,554, 555, 556, 557, 558, 559, 560, 561, 562, 563, 564, 565,566, 567, 568, 569, 570, 571, 572, 573, 574, 575, 576: n = A,T,C or G
  misc_feature 577, 578, 579, 580, 581, 582, 583, 584, 585, 586, 587, 588,589, 590, 591, 592, 593, 594, 595, 596, 597, 598, 599, 600,601, 602, 603, 604, 605, 606, 607, 608, 609, 610, 611, 612,613, 614, 615, 616, 617, 618, 619, 620, 621, 622, 623: n = A,T,C or G
  misc_feature 624, 625, 626, 627, 628, 629: n = A,T,C or G
tcacaatgaacttaagtcttttttgataagcccccttccccattcctagaatcataaacattgacagtgrcccctattttgcaaaccgtataatggttactcctccttcccatgctgaaatgtgtaattctccccaaccattgtatctcatagaaatcactaactaaacctccatcatcagatttaaaaccaagctttctccaatcccatagtccatccggaaattattgttagccaacaaaagcagaccttttttttttttcctgcattatcccagacaatgaattctcaatatttccagaaacatgagggcttaaaggatacatatactgtactaagaatagccattacctcaggaagaggatcaatcagagtacctgaaaggggctcccatattttactcagtctatacatgtattgtttttatcttctacagtgaaaaagcaagtattgctctgtcattttagaaaatgcattttaagatgttctgacctcaataagctaagattattttttacagattcatgccnnnnnnnnnnnnnnnnnnnnnnnnnnnnnnnnnnnnnnnnnnnnnnnnnnnnnnnnnnnnnnnnnnnnnnnnnnnnnnnnnnnnnnnnnnnnnnnnnnnna

SEQ ID NO: 712719 - DNA, 632 bp, Homo sapiens
gggcctgcacttgtgccttccatcccaaactccctctttccctgggattctttctcaagctgagtgaaagagcatcttggctctgggatttctcctttgctgaaaggttgaaaacactggtggaggtcttggtcaagttaggcaaattctctgcacttttgtttcttatctgtaaaataggaaaaataataattcaygaggcttgttgccaaacatagtcctgagtgcaaggaaggcagctgataaatgtttattctctcctttgccttttataataaaatatctgaatattgctggtttctgattagtctaaagaaagttatttagttttgtctatttatgaagataatacctcttccttgtagaaaatgaaacaatgctgaaaatcgtgaaatcccctgaacagttactatctagagataactcttcatacttttgcaacattctttcagtcatctttctacgcatctttgtttatatttgtgttcaaatctataattttacataaaatgaaatcatagtagaaacactcttttgcaatctaccttgttcactcaagaggtcagttcaaagaaagcactaatagatattttctgccagatgtttgtctccgctgtaggacagaatgaaca

SEQ ID NO: 712720 - DNA, 632 bp, Homo sapiens
gggcctgcacttgtgccttccatcccaaactccctctttccctgggattctttctcaagctgagtgaaagagcatcttggctctgggatttctcctttgctgaaaggttgaaaacactggtggaggtcttggtcaagttaggcaaattctctgcacttttgtttcttatctgtaaaataggaaaaataataattcacgaggcttgttgccaaacatagtcctgagtgcaaggaaggcagctgataaatgtttattctctcctttgccttttataataaaatatctgaatattgctggtttctgattagtctaaagaaagttatttagttttgtctatttatgaagataatacctcttcyttgtagaaaatgaaacaatgctgaaaatcgtgaaatcccctgaacagttactatctagagataactcttcatacttttgcaacattctttcagtcatctttctacgcatctttgtttatatttgtgttcaaatctataattttacataaaatgaaatcatagtagaaacactcttttgcaatctaccttgttcactcaagaggtcagttcaaagaaagcactaatagatattttctgccagatgtttgtctccgctgtaggacagaatgaaca

SEQ ID NO: 712721 - DNA, 664 bp, Homo sapiens
tatgagaatctaatgcctgatgatctgaggtggagcagttttatcccaaaaccatcccctgcascttgccagtccatggaaaaattgttctccacggcaccagtctctggtgcccaagcagttagggatcactgttttagataacaacgtttttatttctttggctcaataaggtaaaattagtaggtgagaaatatactatttcaagcactttttcatcataatgtttagaagaggaacttactaagagcacaagatgtattcccaataagtcatatcaatgtctcattcagccacatgttttatctctgataatggcacgtgagctgtgtgtgatgaaatgttattaaagatgggatgtatgttttaaaagcttcatttttcctgaacagccaatgctatagctcttgttgatgaatttttaaaaccccaattgtactaattcacatttcttttggacttcaaggttggtgtattagtcatttctcatgctgttaataaagacatacttgagactggataatttataatgaggtttaattgactcacagttcagcatggctggggaggcctcaggaagctttacaatcatgctggaaggcaaagggaagaaaggcaacttcttcactaggtggcaggaaggagacctgctgagcaaaagggg

SEQ ID NO: 712722 - DNA, 664 bp, Homo sapiens
tatgagaatctaatgcctgatgatctgaggtggagcagttttatcccaaaaccatcccctgcagcttgccagtccatggaaaaattgttctccacggcaccagtctctggtgcccaarcagttagggatcactgttttagataacaacgtttttatttctttggctcaataaggtaaaattagtaggtgagaaatatactatttcaagcactttttcatcataatgtttagaagaggaacttactaagagcacaagatgtattcccaataagtcatatcaatgtctcattcagccacatgttttatctctgataatggcacgtgagctgtgtgtgatgaaatgttattaaagatgggatgtatgttttaaaagcttcatttttcctgaacagccaatgctatagctcttgttgatgaatttttaaaaccccaattgtactaattcacatttcttttggacttcaaggttggtgtattagtcatttctcatgctgttaataaagacatacttgagactggataatttataatgaggtttaattgactcacagttcagcatggctggggaggcctcaggaagctttacaatcatgctggaaggcaaagggaagaaaggcaacttcttcactaggtggcaggaaggagacctgctgagcaaaagggg

SEQ ID NO: 712723 - DNA, 652 bp, Homo sapiens
ttacttgctgtctctctttagaagtgagatgttttataaataatacttaaaagccagtttatttcaccttgtacatgccctttcccatagcttttttatgtgaactcaaaaatgtgaagtaaatagataatcttgtcagagaccctggactcattcattaaaactgccaccttgattaatgactagttggtgttaagtaagttaaaattctgttccaaatccccagctaagagagttgcaggtttacagaggattggtaatgttacatttggtaaattgtccctaataatatttaaattttgcttacatctttcttctgctaatgattttttaaaaatagaataatcaggaaggaacatcgactgaaggaatttacgtttcaaaaattttagaaaatggacctgctgacagagcagatggcctggagattcatgacaaaatcatggaggtaagacaatgataaaacatgtatatgatccatgcaagaaagattgggatattttaagttttcaaatttaccactttaccttggtgtggtgcttattagaatatacattcttagtagcagtaaaggcattatcrtttttactttcttacaaaaaatgtaaaagtcactgggagaggtggctcatgcctataatcccagcacttt

SEQ ID NO: 712724 - DNA, 1710 bp, Homo sapiens
ctttctctaccttcagagtccaaggtgaggtcaatgacattctctacatttcttactaggaagagactctcttttgccaggctggaagctaagggatgatccaactgtatatatttttttaaatacaataatttttgttacacataaagttggtggacttagtggtttttcccaagtttccacaagcggcttttgtcagagctggttcatgacctgattcgtattgctgtgttggggatttccttataattcaacagtaatcatttttcaaagccatctgtgtctcttctggagaccagaaatcacaaaccggataacatttttgaatatagtggacattgctgctggggagggcactatgtcagcacaatttaaagtaagccaccccctctccagctttaagttgatcaagcagagtacacacgctctttaggttctgggtaagggacagtgcattccatgtgaaagtagggaggtttttgaaactttatattagaggacacttatacatccatgattgcctcagttgcaaatttttagccctgactgccttcctagcccctctacttatcactggaatgtgttcaggcaggataactgtaatgaatattcattactctgaagaaataataactagtaactgcgtcttctgttaaaatacaaaacaaaaatcatgccacccaatcaaaggtcatatttgtgatttctagattattgctttgctggattatctttatttctgcttctctccactggcatgtatcccaaagaatttatcattactgataagttatacatgcaatctgttagaaataaggatggcctgttttaatagtagtgtggaatcagtaacatcctagtcttccttccttggaaatggtagattccaaataaagtgtatttcatctatatcactgcacttgaaaatttttcgtcttttttgaagtcatttgttattcttaggcagtgtttcaattattttagaaattttcagaaaaaaatagatttttgtctttcatttccaactcttatacttgcttttatttgtaatagtcacatgcatggtagttcttttatattaacacacagctaatctctttttttacccagaaaacaagaaaatctgtatttcagtcacattcaaaaataacaatatactctttgttttgtctctgagctgcctgaatctgccatggtaggattaatttaaagtaattcccatcacttcccctgtggtttaatggagtgtgtaggtgtgtgtgtacacacgtgcatgtgtgttttcaaaaagaaatatcaaggatatatcaaacagaaattcattcatgaactcacattgcctcctatagtaacatgatgtattgaatgaaaaacactcattagggctaaacagatacagggagttaggagctgatttagacttgataagcccttgwgcagtaagattgctctgttgccattccgggttttataaatttctcaattgctttattcaggatttttattagagaaaaatatatgtatgttaacatgcctttgtgccatcagcattaaaaactcatttgttggcatttacattgcctaattttccggtaacatcattcattgcagaaaggatcagatttggtctgttgtgacacacataacagcaaaaacactgcaaggtagtatagctaacttgcctatctatttgactcccatgttgttaga

SEQ ID NO: 712725 - DNA, 1031 bp, Homo sapiens
caaaaatttatggttccatgaaagcaggctgataattcttattgttgaagttattctgaaaaagacaggatcattatacagtagcattttcaaactaccatggcactgtttgtaactaaatttaaagtatattaaatttaaaaatcattgaaattataattgttttaataagtgaattatttgaagatttacttacattagttctttgtttctaaacaaagacgaggtatataaaaaaattttttttgactatttctaaraggccagttttagaaaattgcaaagacatgttgtagaatgccatctgaagcagtggaaccactgagattataaatcaattacggaactgcatgctaaaaaagtaagagctgaaatttagattcctaagttttaatgaaatgctgtcttcatatactgttgcggaatatttattttcataataaagcaggtgtaaggtgatgctcatgtagcctcacctgcccttcagcagaggatggtaaataaggaatggcattattatgctttccctggttcatgatacactgaatgtgcaataagaaaaaaaattcctttgctatttttccataggcagttcctggatctgtaagcgggtgttcatcggctgcatcctcaaggcctagaatttggcagctcattgtgaaatttatatggttctagatgaagtttctcttatccttacatgtttagcacatcaggagagggataacaaagaaatctttgtagattctggatattaaccctttgtcagatgagtaggttgcaaaaattttctcccattctgtaggttgcctgttcactctgatggtagatttttgctgtgcagaagctctttagtttaactagatcccatttgtcaattttggcttttgttgccgttgcttttggtgttttagacatgaagtccttgcccatgcctatgtcctgaatggtattgcctaggttttcttctagggtttttatggttttaggtctaacatttaagtctttaatccatcttgaattaattttcg

SEQ ID NO: 712726 - DNA, 1031 bp, Homo sapiens
caaaaatttatggttccatgaaagcaggctgataattcttattgttgaagttattctgaaaaagacaggatcattatacagtagcattttcaaactaccatggcactgtttgtaactaaatttaaagtatattaaatttaaaaatcattgaaattataattgttttaataagtgaattatttgaagatttacttacattagttctttgtttctaaacaaagacgaggtatataaaaaaattttttttgactatttctaagaggccagttttagaaaattgcaaagacatgttgtagaatgccatctgaagcagtggaaccactgagattataaatcaattacggaactgcatgctaaaaaagtaagagctgaaatttagattcctaagttttaatgaaatgctstcttcatatactgttgcggaatatttattttcataataaagcaggtgtaaggtgatgctcatgtagcctcacctgcccttcagcagaggatggtaaataaggaatggcattattatgctttccctggttcatgatacactgaatgtgcaataagaaaaaaaattcctttgctatttttccataggcagttcctggatctgtaagcgggtgttcatcggctgcatcctcaaggcctagaatttggcagctcattgtgaaatttatatggttctagatgaagtttctcttatccttacatgtttagcacatcaggagagggataacaaagaaatctttgtagattctggatattaaccctttgtcagatgagtaggttgcaaaaattttctcccattctgtaggttgcctgttcactctgatggtagatttttgctgtgcagaagctctttagtttaactagatcccatttgtcaattttggcttttgttgccgttgcttttggtgttttagacatgaagtccttgcccatgcctatgtcctgaatggtattgcctaggttttcttctagggtttttatggttttaggtctaacatttaagtctttaatccatcttgaattaattttcg

SEQ ID NO: 712727 - DNA, 1031 bp, Homo sapiens
caaaaatttatggttccatgaaagcaggctgataattcttattgttgaagttattctgaaaaagacaggatcattatacagtagcattttcaaactaccatggcactgtttgtaactaaatttaaagtatattaaatttaaaaatcattgaaattataattgttttaataagtgaattatttgaagatttacttacattagttctttgtttctaaacaaagacgaggtatataaaaaaattttttttgactatttctaagaggccagttttagaaaattgcaaagacatgttgtagaatgccatctgaagcagtggaaccactgagattataaatcaattacggaactgcatgctaaaaaagtaagagctgaaatttagattcctaagttttaatgaaatgctgtcttcatatactgttgcggaatatttattttcataataaagcaggtgtaaggtgatgctcatgtagcctcacctgcccttcagcagaggatggtaaataaggaatggcattattatgctttccctggttcatgatacactgaatgtgcaataagaaaaaaaattcctttgctatttttccataggcagttcctggatctgtaagcgggtgttcatcggctgcatcctcaaggcctagaatttggcagctcattgtgaaatttatatggttctagatgaagtttctcttatccttacatgtttagcacatcaggagagggataacaaagaaatctttgtagattctggatattaaccctttgtcagatgagtaggttgcaaaaattttctcccattctgtaggttgcctgttcactctgatggtagwtttttgctgtgcagaagctctttagtttaactagatcccatttgtcaattttggcttttgttgccgttgcttttggtgttttagacatgaagtccttgcccatgcctatgtcctgaatggtattgcctaggttttcttctagggtttttatggttttaggtctaacatttaagtctttaatccatcttgaattaattttcg

SEQ ID NO: 712728 - DNA, 576 bp, Homo sapiens
gaattacatcattttgtattgtgaatctattggcacagttatatagtcatttttaagtctttgttatctcaactacatagcagaattaaaagtattctgtgcatcttcattataataacaaaaatattataattgtgtacataattatctgttagaaaactttatattttacataattctatgttgctctcatcattattttattttttaatgtcaatgactagcatttttttatacaggcctacygtgcataaattaatacagttttcgttgatcttgaatattctttatttttattttttaattcatttgaaatgatagctttggcagacatagtgttcttggttggtacttgccatttttttcagcactttgagtatgtcatcctacaacctcttgcctgcatgctattggctgagacatctgctggtcatcctataggggtaacattgtacatgctaagtcattttttcttgctgacttcaagattctcggtgttttaacatttgaatctctgattaaaatgtgtcttgtcatgggtctccctgtgttgctactagttggtaaagtttcatt

SEQ ID NO: 712729 - DNA, 576 bp, Homo sapiens
gaattacatcattttgtattgtgaatctattggcacagttatatagtcatttttaagtctttgttatctcaactacatagcagaattaaaagtattctgtgcatcttcattataataacaaaaatattataattgtgtacataattatctgttagaaaactttatattttacataattctatgttgctctcatcattattttattttttaatgtcaatgactagcatttttttatacaggcctaccgtgyataaattaatacagttttcgttgatcttgaatattctttatttttattttttaattcatttgaaatgatagctttggcagacatagtgttcttggttggtacttgccatttttttcagcactttgagtatgtcatcctacaacctcttgcctgcatgctattggctgagacatctgctggtcatcctataggggtaacattgtacatgctaagtcattttttcttgctgacttcaagattctcggtgttttaacatttgaatctctgattaaaatgtgtcttgtcatgggtctccctgtgttgctactagttggtaaagtttcatt

SEQ ID NO: 712730 - DNA, 576 bp, Homo sapiens
gaattacatcattttgtattgtgaatctattggcacagttatatagtcatttttaagtctttgttatctcaactacatagcagaattaaaagtattctgtgcatcttcattataataacaaaaatattataattgtgtacataattatctgttagaaaactttatattttacataattctatgttgctctcatcattattttattttttaatgtcaatgactagcatttttttatacaggcctaccgtgcataaattaatacagttttcgttgatcttgaatattctttatttttattttttaattcatttgaaatgatagctttggcagacatagtgttcttggttggtacttgccatttttttcagcactttgagtatgtcatcctacaacctcttgcctgcatgctattggctgagacatctgctggtcatcctataggggtaacattgtacatgctaagtcattttttcttgctgacttcaagattctcggtgttttaacwtttgaatctctgattaaaatgtgtcttgtcatgggtctccctgtgttgctactagttggtaaagtttcatt

SEQ ID NO: 712731 - DNA, 619 bp, Homo sapiens
tgattgtgttaaacaacaggcaacattagatcaagcaccgactcctaattgttccattttttcctcatggaaaagcaccaggaaagggtcagatggatcagcacaaacatggggcactgtctcactgccgaggtggcaccctcataaaaaacaggcccgcaattttgtggaaaagggggyaggagagcgtagaggagaatgtatgagcaagattaaagagaattgaatattaataggaatgtatgaaaattattatcaaagttccatttcttctccagaaacagggatctgaacaaaagtttctgaagaaggcctcaaccaaaagcccctcagttaggtgcccctgaatctagatgcctggactgggaatgaaaatctacatgtgagcctcagtggccaagatttccggtattgtttatttcaacccctcagagactgcaatgcactgacatttacatgcttctcctaaatgcacatgtcagcagcagtgtgacaaccaatgctttcaaagatataatgtgggtatcagagtttctggcaaaaatttagataatcttatcttttcaacctcaaataacaatatatgctgagaaacttcaaaggcatgcacctccacaaa

SEQ ID NO: 712732 - DNA, 619 bp, Homo sapiens
tgattgtgttaaacaacaggcaacattagatcaagcaccgactcctaattgttccattttttcctcatggaaaagcaccaggaaagggtcagatggatcagcacaaacatggggcactgtctcactgccgaggtggcaccctcataaaaaacaggcccgcaattttgtggaaaagggggtaggagagcgtagaggagaatgtatgagcaagattaaagagaattgaatattaataggaatgtatgaaaattattatcaaagttccatttcttctccagaaacagggatctgaacaaaagtttctgaagaaggcctcaaccaaaagcccctcagttaggtgcccctgaatctagatgcctggactgggaatgaaaatctacatgtgagcctcagtggccaagatttccggtattgtttatttcaacccctcagagactgcaatrcactgacatttacatgcttctcctaaatgcacatgtcagcagcagtgtgacaaccaatgctttcaaagatataatgtgggtatcagagtttctggcaaaaatttagataatcttatcttttcaacctcaaataacaatatatgctgagaaacttcaaaggcatgcacctccacaaa

SEQ ID NO: 712733 - DNA, 580 bp, Homo sapiens
attctgatcaaaagaaaaacaatagttaaaagcataataccataatagagaaaatcacgtaaagctatctaagataaaattcaaattaattataaagcaatgaaaagaaacacatttctcaatatgtgaataagatcaagaatccaataggttacggttttaaaagttctgagggaaaaacatgtaaatttaaaattacatatattygaaaagttattttcaggtttaaggacaaaatgtaacttaatacacaaatacaatgtaaacactataattatgtcagtgaaatgcatttaaaatttgctgaaaatttagtttatgaagaaaaatactcttcctgagaacaaacattgagataaaataaatgtgcaaacatctaaatagatggaaactatgttaacactgtgtgaaattatacacaatatgtgatatatccatgtgaagcatatttatggaagcataaaagaaaatgttatcccaagggttatattaaataaaagagtaaatttggtaatagatgaataacttattttatatcagtataatgtgtatttaagaggtttttgtcactaaattatta

SEQ ID NO: 712734 - DNA, 580 bp, Homo sapiens
attctgatcaaaagaaaaacaatagttaaaagcataataccataatagagaaaatcacgtaaagctatctaagataaaattcaaattaattataaagcaatgaaaagaaacacatttctcaatatgtgaataagatcaagaatccaataggttacggttttaaaagttctgagggaaaaacatgtaaatttaaaattacatatattcgaaaagttattttcaggtttaaggacaaaatgtaacttaatacacaaatacaatgtaaacastataattatgtcagtgaaatgcatttaaaatttgctgaaaatttagtttatgaagaaaaatactcttcctgagaacaaacattgagataaaataaatgtgcaaacatctaaatagatggaaactatgttaacactgtgtgaaattatacacaatatgtgatatatccatgtgaagcatatttatggaagcataaaagaaaatgttatcccaagggttatattaaataaaagagtaaatttggtaatagatgaataacttattttatatcagtataatgtgtatttaagaggtttttgtcactaaattatta

SEQ ID NO: 712735 - DNA, 2665 bp, Homo sapiens
atgtcagaaggaacaaactccagacatgccacctttaagaactgtaacactcaccgtgagggtctgtggcttcattcttgaagtcagtgagaacaagaacccaccaattccagacacattgtgatgggtgtgctggaccagtgtgaggtgttctggggttgcctagcccatgagtcacgtttgttccaccagggctgctatgtcaatgacctcagccatctggggagggacctgaggaaaactctcatcctggacaactcgcctgcttcttacgtcttccacacagagaatgcagtgcctgtgcagtcctggtttgataacattccagacagcagctgctgcacctgatatcagtctttgaggacatgagtggagcatagggcatctatactagccttgggcagcagtgggcccttagcctttcctgcttcccagcaatggccatcacagtaggggattttcccacactgtgcctttatgatcagcctgaaagaatgaagcctggaacacctacccacatgggcctggaaacagtgagaagtgattgaaaaaaagctttaggacagcttagattcccagtgggtgaatgccagaccaaggatacccagagctacctgccatcaagtttttgggttcccaagatgtgggtgtgagagaaagaaagagagcatgtgtgttttgtgatgaactgtgggcccaatatatagtgtttcagtaggggagaagctgaaggacagagactcttcccaagttagctttgtctcctctcctgtcaccctatgagaccctgagttccatagggatgaagactgttgaaggctccattgcaaacctggtctttcttcagtgctgcaaggcctatgccaaggagaaaggaaaagtatgcctttgggtgttccagacacatatctttctgaaatatttctccagccagttgttgcagacaaaagacgatatttctgggaagatggggacttatgtccagaccagtacccaaaccatcaggtcttgtggcctaaaggctatgcttacttaagtccagccaagtgcctgggatggatcctttctgcatctcctcaagactcaccacttaggcatagcctcaaacctgtggggaaggaagttgtctccccaccctgcaagaggacaaataactgatttctcttctttcgactctgttttaaaattctcttaaaaaaaaaaaaaaagcctatctgaaactgaaaagaaaaaaacaaaaaaacaaggaaaaagatgtcatacttacataagtgaaaaacatacagatatatctataagcaacaaacacagctaattcacacatatattaaacatcacattgagataaagtgtaccgagctaaaaattatctttcaactgatgatatcaagctttaaaataaaaatacatttaactgatctgagaaaacataactcccaagaaaagaaacacaataacacggacttgaaaataagaagagagattttcgtgcataaaatcctgaatacaacatagatttacaatggaaaataaccgtttttttttttattttttttttgagacagagtcttgccctgttgcccaggctggagtgcagtggcgcgatctcggctcactgcaaactctgtccactgagttcacgccattctcctgcctcagcctcctgagtagctggggatacaggcgcctgccactatgcccggttaattttttgtatatttagtagagacggggtttcaccatgttagtcagggttgtctcgatctcctgacctcgtgatccacccgccttggcctcccaaggtgctgggaatacaggcatgagccaccacaaccggccgaaaaataattctttagatatctacagcattcaactgtgtgcactcatgaaaagcagacaatttaagtcattagaatttaataaattgcagtaaaattatacagaaaatacattacaatcattaataacaggctstaatgagaggaatttaataaataatcattaaaaatacaggataattttattatgttctcaatatgttgctgcacttcttaccacaaaacataataaaattatatgactataatatagatttcaggagctaaaaaagccttatatttccaaataaaagaacaacataaattttgcaaaatatgacgagcattactgcagtataaagtaaatatctggaattaaaatatgccatcatttagatacagactaaaaaaaagaatataaatgttaatgattcctttctgcctgcagtgagcttaaaattacaaccgaaaattttaataaatatgtagcacctacaagacattttattaatagcttacataatgtggaaatttgagcaatttattttagaatttttgaatctaaaaatcaccagcttgacattcatttgagaaagtgaaacataaaggagagtaacataagcaagatgacagaatgggaggttcggcatgcacatcccccacaacataatgcagctgccacgggaaacataagtgcattcatgaaagccttagaatccagttcagagtttgtgacacccagctggaggcaaagaccaaggaagacatctttagagggtaagcacttgaccaagtggcaagcttgccaatcatggtcctcggttcaaaacagaatactaccacatctt

SEQ ID NO: 712736 - DNA, 2665 bp, Homo sapiens
atgtcagaaggaacaaactccagacatgccacctttaagaactgtaacactcaccgtgagggtctgtggcttcattcttgaagtcagtgagaacaagaacccaccaattccagacacattgtgatgggtgtgctggaccagtgtgaggtgttctggggttgcctagcccatgagtcacgtttgttccaccagggctgctatgtcaatgacctcagccatctggggagggacctgaggaaaactctcatcctggacaactcgcctgcttcttacgtcttccacacagagaatgcagtgcctgtgcagtcctggtttgataacattccagacagcagctgctgcacctgatatcagtctttgaggacatgagtggagcatagggcatctatactagccttgggcagcagtgggcccttagcctttcctgcttcccagcaatggccatcacagtaggggattttcccacactgtgcctttatgatcagcctgaaagaatgaagcctggaacacctacccacatgggcctggaaacagtgagaagtgattgaaaaaaagctttaggacagcttagattcccagtgggtgaatgccagaccaaggatacccagagctacctgccatcaagtttttgggttcccaagatgtgggtgtgagagaaagaaagagagcatgtgtgttttgtgatgaactgtgggcccaatatatagtgtttcagtaggggagaagctgaaggacagagactcttcccaagttagctttgtctcctctcctgtcaccctatgagaccctgagttccatagggatgaagactgttgaaggctccattgcaaacctggtctttcttcagtgctgcaaggcctatgccaaggagaaaggaaaagtatgcctttgggtgttccagacacatatctttctgaaatatttctccagccagttgttgcagacaaaagacgatatttctgggaagatggggacttatgtccagaccagtacccaaaccatcaggtcttgtggcctaaaggctatgcttacttaagtccagccaagtgcctgggatggatcctttctgcatctcctcaagactcaccacttaggcatagcctcaaacctgtggggaaggaagttgtctccccaccctgcaagaggacaaataactgatttctcttctttcgactctgttttaaaattctcttaaaaaaaaaaaaaaagcctatctgaaactgaaaagaaaaaaacaaaaaaacaaggaaaaagatgtcatacttacataagtgaaaaacatacagatatatctataagcaacaaacacagctaattcacacatatattaaacatcacattgagataaagtgtaccgagctaaaaattatctttcaactgatgatatcaagctttaaaataaaaatacatttaactgatctgagaaaacataactcccaagaaaagaaacacaataacacggacttgaaaataagaagagagattttcgtgcataaaatcctgaatacaacatagatttacaatggaaaataaccgtttttttttttattttttttttgagacagagtcttgccctgttgcccaggctggagtgcagtggcgcgatctcggctcactgcaaactctgtccactgagttcacgccattctcctgcctcagcctcctgagtagctggggatacaggcgcctgccactatgcccggttaattttttgtatatttagtagagacggggtttcaccatgttagtcagggttgtctcgatctcctgacctcgtgatccacccgccttggcctcccaaggtgctgggaatacaggcatgagccaccacaaccggccgaaaaataattctttagatatctacagcattcaactgtgtgcactcatgaaaagcagacaatttaagtcattagaatttaataaattgcagtaaaattatacagaaaatacattacaatcattaataacaggctctaatgagaggaatttaataaataatcattaaaaatacaggataattttattatgttctcaatatgttgctgcacttcttaccacaaaacataataaaattatatgactataatatagatttcaggagctaaaaaagccttatatttccaaataaaagaacaacataaattttgcaaaatatgacgagcattactgcagtataaagtaaatatctggaattaaaatatgccatcatttagatacagactaaaaaaaagaatataaatgttaatgattccwttctgcctgcagtgagcttaaaattacaaccgaaaattttaataaatatgtagcacctacaagacattttattaatagcttacataatgtggaaatttgagcaatttattttagaatttttgaatctaaaaatcaccagcttgacattcatttgagaaagtgaaacataaaggagagtaacataagcaagatgacagaatgggaggttcggcatgcacatcccccacaacataatgcagctgccacgggaaacataagtgcattcatgaaagccttagaatccagttcagagtttgtgacacccagctggaggcaaagaccaaggaagacatctttagagggtaagcacttgaccaagtggcaagcttgccaatcatggtcctcggttcaaaacagaatactaccacatctt

SEQ ID NO: 712737 - DNA, 2665 bp, Homo sapiens
atgtcagaaggaacaaactccagacatgccacctttaagaactgtaacactcaccgtgagggtctgtggcttcattcttgaagtcagtgagaacaagaacccaccaattccagacacattgtgatgggtgtgctggaccagtgtgaggtgttctggggttgcctagcccatgagtcacgtttgttccaccagggctgctatgtcaatgacctcagccatctggggagggacctgaggaaaactctcatcctggacaactcgcctgcttcttacgtcttccacacagagaatgcagtgcctgtgcagtcctggtttgataacattccagacagcagctgctgcacctgatatcagtctttgaggacatgagtggagcatagggcatctatactagccttgggcagcagtgggcccttagcctttcctgcttcccagcaatggccatcacagtaggggattttcccacactgtgcctttatgatcagcctgaaagaatgaagcctggaacacctacccacatgggcctggaaacagtgagaagtgattgaaaaaaagctttaggacagcttagattcccagtgggtgaatgccagaccaaggatacccagagctacctgccatcaagtttttgggttcccaagatgtgggtgtgagagaaagaaagagagcatgtgtgttttgtgatgaactgtgggcccaatatatagtgtttcagtaggggagaagctgaaggacagagactcttcccaagttagctttgtctcctctcctgtcaccctatgagaccctgagttccatagggatgaagactgttgaaggctccattgcaaacctggtctttcttcagtgctgcaaggcctatgccaaggagaaaggaaaagtatgcctttgggtgttccagacacatatctttctgaaatatttctccagccagttgttgcagacaaaagacgatatttctgggaagatggggacttatgtccagaccagtacccaaaccatcaggtcttgtggcctaaaggctatgcttacttaagtccagccaagtgcctgggatggatcctttctgcatctcctcaagactcaccacttaggcatagcctcaaacctgtggggaaggaagttgtctccccaccctgcaagaggacaaataactgatttctcttctttcgactctgttttaaaattctcttaaaaaaaaaaaaaaagcctatctgaaactgaaaagaaaaaaacaaaaaaacaaggaaaaagatgtcatacttacataagtgaaaaacatacagatatatctataagcaacaaacacagctaattcacacatatattaaacatcacattgagataaagtgtaccgagctaaaaattatctttcaactgatgatatcaagctttaaaataaaaatacatttaactgatctgagaaaacataactcccaagaaaagaaacacaataacacggacttgaaaataagaagagagattttcgtgcataaaatcctgaatacaacatagatttacaatggaaaataaccgtttttttttttattttttttttgagacagagtcttgccctgttgcccaggctggagtgcagtggcgcgatctcggctcactgcaaactctgtccactgagttcacgccattctcctgcctcagcctcctgagtagctggggatacaggcgcctgccactatgcccggttaattttttgtatatttagtagagacggggtttcaccatgttagtcagggttgtctcgatctcctgacctcgtgatccacccgccttggcctcccaaggtgctgggaatacaggcatgagccaccacaaccggccgaaaaataattctttagatatctacagcattcaactgtgtgcactcatgaaaagcagacaatttaagtcattagaatttaataaattgcagtaaaattatacagaaaatacattacaatcattaataacaggctctaatgagaggaatttaataaataatcattaaaaatacaggataattttattatgttctcaatatgttgctgcacttcttaccacaaaacataataaaattatatgactataatatagatttcaggagctaaaaaagccttatatttccaaataaaagaacaacataaattttgcaaaatatgacgagcattactgcagtataaagtaaatatctggaattaaaatatgccatcatttagatacagactaaaaaaaagaatataaatgttaatgattcctttctgcctgcagtgagcttaaaattacaaccgaaaattttaatraatatgtagcacctacaagacattttattaatagcttacataatgtggaaatttgagcaatttattttagaatttttgaatctaaaaatcaccagcttgacattcatttgagaaagtgaaacataaaggagagtaacataagcaagatgacagaatgggaggttcggcatgcacatcccccacaacataatgcagctgccacgggaaacataagtgcattcatgaaagccttagaatccagttcagagtttgtgacacccagctggaggcaaagaccaaggaagacatctttagagggtaagcacttgaccaagtggcaagcttgccaatcatggtcctcggttcaaaacagaatactaccacatctt

SEQ ID NO: 712738 - DNA, 641 bp, Homo sapiens
attctttatgttgcccagggtttctaagagcagtatggacctctgaagtaactcacacagtagagaatccagataccatgcttgaaaggaaaagactttggctatgacaactgactttgattttgggggacctggacacttttggtgtcctcctcactcttggctcatggctggaagctcagttagtcaaatgaagattgacttggtgcacagccaaacctcaagagcacttgcttccatccctttccctcaagcttctcctctgcactcaacccttccactcaccaaacatkaactaatggctgctaatgatccacaaaaagtcacttctctgaacaccagagaaaatctttgttatatgtcctaccaccttgccttcgtgtgcagaatggagggcagtagaaagtccaaacccttttctttatgttgtgaaattaatgaggtaacaggtaaaaagtgttttttaagtctctggaagagaatacttctgttaatagtagctagaatgttatttcggtgatgattattgccttcctgactttcatcaggtttctcaaaaactaatctgagattttagtttctttcacctaatcaaagggtttggtcgtgggataacattttaagtttccttgttaggtata

SEQ ID NO: 712739 - DNA, 594 bp, Homo sapiens
ataaattcttcaagtaactacattaagttgaaatcccctgaggtattttgcggagtgttcaggatcatatgtcttttgcaaaatagatttttacattgcagctgatgagtcctccaattcactagcaaaatgagtgctggacacactctgtggtacattggctctcacttcagtggggcattgggaattctggcccacttccaaggaagggcaaccaaaaacattgactcctgtgaactgttctctgctcctttggttcacagtgaaaagcaagtaagggcatatgtaatgccttttaaccatgagtgatgtaggcctcaaaatatgcagcctcctctagtaaacaaacacttttccaatcataggcaacaccagaggagatttttaaagacagacaaccgttagggaagcttcrtgagatattgcaatgtgaacatgtatctagattaagttaaatgatactgttttgataaaaagaggaacatgttgatgtcaagggtggctttgatgagagaatatattatatagtggcttagagagttgacctgcaacctcaggctgcctgtggctgagtcctggttcttgcactgggta

SEQ ID NO: 712740 - DNA, 603 bp, Homo sapiens
ggagatattgattaaaggatgcaaaggttcaattaagagagatgaataaattctgaatacccactgtacagcatgctgaccatagttaataatactgagttattaatacatacttgaaatttgctaaaagagtttatcttaattgttctcaccacaaaaaaattataagtatgtgaggtgatagatatattaattagcttaattgtggaaatcatttcacaatgtatctgcacatcaaaacatcatgtygcatacctcttaaatatatagaatttttatttgtcaggtataccgcaataaacgtgaggggcaagaagagtcatatgttaagagtttaaggcctgtgcatgaattggggaagcagaaatgccaactttttaattttaaaattgttcacaaattattgcttcatggaaagattcagattggaaatacaaggagtggcagagttaagggaacattattttagtaaagaagcacgctatgttaaagcaaagaaagtgccctggagaagatattagaaaggtaaaggagggaagtagataactttatgagtaaatcagacaggaaatgaaaaagagaggactgaatccaggaaggtaa

SEQ ID NO: 712741 - DNA, 603 bp, Homo sapiens
ggagatattgattaaaggatgcaaaggttcaattaagagagatgaataaattctgaatacccactgtacagcatgctgaccatagttaataatactgagttattaatacatacttgaaatttgctaaaagagtttatcttaattgttctcaccacaaaaaaattataagtatgtgaggtgatagatatattaattagcttaattgtggaaatcatttcacaatgtatctgcacatcaaaacatcatgttgcatacctcttaaatatatagaatttttatttgtcaggtataccgcaataaacgtgaggggcaagaagagtcatatgttaagagtttaaggcctgtgcatgaattggggaagcagaaatgccaactttttaattttaaaattgttcacaaattattgcttcatggaaagatycagattggaaatacaaggagtggcagagttaagggaacattattttagtaaagaagcacgctatgttaaagcaaagaaagtgccctggagaagatattagaaaggtaaaggagggaagtagataactttatgagtaaatcagacaggaaatgaaaaagagaggactgaatccaggaaggtaa

SEQ ID NO: 712742 - DNA, 624 bp, Homo sapiens
actacgtctctataatatatttgacaaaaaaaagagtaaagcactgcatatatgtcacaatgtataatacacaaaagaatttttattgttgtttttagttgtttatttttgtttttgctgtacttttcaagacaacattactttaaacaagcataccttcaaacactagcagttttacttcagttaattgataattaaaacaacaaacatgtttttcatacagctagayaggccctcaaacttatcatgtcttaaatttttctactttggttacaccttataacaagaattggactttgtactacctaaaatttatgtattaatacgatacattttctaattttttaaattcattttctggtagctttgtttgtttgtttttaaacaggatcttacactgtcacccaggctggagtgtagtggcacaatcgcggcccactgctgccttaacctcccacgcataagccatcctcctacctcagcctcctgagtagctggaactactggcacatgccacctcacccagataatttgttaatttttgtagagatgagtttttgtcatgttgcccaggctggccttgaactcctgggctcaagaaatctgaccaccttggcctcccaa

SEQ ID NO: 712743 - DNA, 604 bp, Homo sapiens
tacatctttgagaacaacataaacaataaagccaagtagtcaataataccagatttagttagtcatttgattaaaactgatagctacaaaatcaaaaccatcattatttctaaaaaatactagaattactagttttctactgattatttgttaactgttacatatttaagtaccacagaatagcaagaaaataagaaaaatcattccaaatcatacaaattatatctgtgctaacaatatgcaaccacaaaaataaaaccagctagtgaataaaaaaaaggcttcttcctcatagaaaattatacaatgttagcaagcttatgtcatctamcaatggcatttacataataaaaattactttatatttttatatcacctgtatatcttttgatctaatttatcactgcaattgataaatctcaagaggaaagtttgttctgttaaaatacacacttttttgtatgttgttacaactatcagaactgctgtttatattttcatatgccaacttttcttaaattctcataaacactgacacttatatctacctatatgttttataatatcgtgggagataaatgatttactttttatttaattacca

SEQ ID NO: 712744 - DNA, 1534 bp, Homo sapiens
gggcagtgccctccatgattggatctaagagtgcaattcacaagtagtggagttgcttcttggtggccccataggcagcccagagtaatgctttataataacttctctgtgcattttatcatttacggtacctggatttttttccactgtttgggtctttcttacctattgtccttcatgatcatatttaaagtgggtgttaaaaagtgtgcttttcctggaacttcataatattcataacacacttcctgctgctgtaggtttggatgactgaggcatactttaagaattaaataattgtatgcttctgttttctatactgtggtttctttaacaacgtgctttcctaaaaatagataaataaataactcttgaattatttgtttcaataaatcatgtgaaagaataaatacacaaagatcctttctggacataattctaacctgcaaaatttccaattttgtttgctgcgttttcaggctatgatatctgctacatcacaacactagtgcttaaacactaactaaatgttacacattttacggttttcattacagcaacaacaaactattggttggaatatgtgttatgctgttgcaataaaaataacttaatctataatggccttacaagaagttaaagtttctcttacatgtaacagtctagagttagtagtccaggcctaatggggtggtcattctactcccagtacctaattcccaaggttgtttcacttgttgacatttccctgccagtacaaataaaggaagaagtggcctaaaggtggcactgaattgtcaatataatttgtagatatgtattagctcaatttttagcctggtttaatttttgtagttatttttgtcgttattgttgcctgaaagtgtaaatgcaaagaatggcagatatttttattttacaatcaaggagtgagcattagaagacacttttttttttttttcggaaagacagcacctttatctgctacattttctgtggcttcctcaagttaagaagctaaaactcatttttccagttttccttgcatctacagctcagcaatgcaaattatacttctctagttagatgtatttgttcaagatgcttgtatagaatagttacaacagcagatactcaatcatttccctcttgtgagtgtagcaaagtatgacagaagtattcttcttttgaggcagtgatgcccgaggtggtagcagaattagctcatacccagtrtcaatggtgcaaactgagactcttggctcactagcactgtcagctgaatctcatcatgtatatttttatttctgtaaatcattggggaaatataattaaaacaaaatgttctactaaccagaaaacctcttgataaaggtagtaaagaaagaaagcagttttattattaaataatccttcaaccagaatgtgttgcccataacagataatcgctaagagattgcaaaaacagaaagaaatctcatccttttacataaataagcagataaaacccatcacatacttgttgtcaagataa

SEQ ID NO: 712745 - DNA, 1944 bp, Homo sapiens
atgtgtgggcttgcaatattgccaaacattgtgtggcagccagacgtcatagcaaacaaacaaatttggatctacagtaaagttcagaggcacacagatttacaatttgaatatgaacacttaacaaaacttactaacctgtcaggttctattaattgacctttggagagtagagtattagcagtttatgaagtaaacatcctttaataaaagcttaaaaatgacttttatattttatataattatataaaatattaatgcaacatttgtggaaaacctgaggagcatgcattaaagattgaaaaatactgcttaaaagatagtagagaataattacatttgaggaatggtagagatacctaaattttatcagcaacatcttaaattcttggtcctcaatttcatcattactttcttctctgttttttttttttttaatagaaggtgaggtgctataaaagtaaatgataaaaattgcactgcctcctagggatattttcaagccatgaagtaaaatctatataaacatggacatggtttagtgattgcagatattttatttttctagaatagaacgttatgattttatactgaagtctctgaccacaagccatgtaaagaaaacataaaatcatcccttccagaaaactctatctgtaacccttaacaaagcagagtacrtatgcttagacaataattttccaatttttgtttcgatttttaaacgtatatatgttaaagttttaaatgtttaagaaataattaatagtttaatgtttctatgcactaaaaaaaagtgcagccttagtcaaagaaaaaaacttgttaccacaatatttcttgcatcttcacagattgcttcatcagttttttccacacttactaatgtcacatttgcatcaatagctgtgaatactgggaacttgttatatctgactaatattctgtggttactttaattggataatatatatgaaaagattctggtcttgttgtccacatgctgtaacagaccttaaatatgatggtagatttcaaagtaccttatagtttaaaaataaaatataatctatctaaagacaacagtttttcccatttaaatgattatacattcttacatgacataaattttaataccttagcttttagtaacaacaacaaaaatgctaagcagaaatgcttattatatattgctgagttatttagtggaggcagaaataactaatttttcatgtagaattctcaataaaatattccgaaactcaatttttaaatgacatcattcacttcacttcttttggtgaaaaacttgcgttaaaatgaaattattctagaattatgatgactataaatcattgacagtaagggacactttcagacagataagaattcagtgtgttttaaaaatttcccttgaatatttgaaattatgttttaaaaattttggaaaaatagaaattcacacacagaaaaatatcaacattattaagaaaaaggcaaaaaagttttagaaatgtgtgtgtatatatatacatatatatataaaacttggtatcattagtataacagacacaactgaatatttcaagtgcagttttcttgcatgtgtgtttaaatttttccttcccaaacctgaaatggattgcatagggaatgaatttgccttgcctcttctaactatccttacagatcagcagcatacatattttgtccccacagagtctttgcttctaggtacatcatagatacattctccaagaaaaacttatgtatataataggttgagagaagttttgatttaaaatgggaaaatagttctattaaagcaatactctttctttaaacagagtttcctgtagccctaaatgtcctaaaaaatatttaatcaataattgctaaatttttaactattatacaactggcaacatgaatccttgaatccag

SEQ ID NO: 712746 - DNA, 640 bp, Homo sapiens
ttcttttctaactctttctttccactmacactattcctttaataagagaaagatctaaatcctacttatcacagcagaataatacgtactcaatggaagttcatattgttaacattaatttctcatagaggtctgctttctgccatgcaatatttgattcatgtgattcagacattgatgggattgctattcaacattaaagagaatttcaccccaaaaaatgggcaatgtgtgtcaattatgtctgtgaggaaataaccaactttatgtatccctttgacattctagacaagattatataaaagaaatcagaagttcattataatgttcaccatgcaacattatgagtttaagattattgagctgctaatttcattttttatcgattaatatttaccttcactcctgctattatgctgaagccacagtaggttgtatctctttttcccttaagaatctttaatagaaagtatattacaagctgctacattacaaagctgagtggtcagagcaaagattgtttcctgagaaattttgtttcctttttatttattttcttcttttatttacagattagctttccactacaggcctaattatgaaaagacaaatgaattggttttcactatcttaaatacag

SEQ ID NO: 712747 - DNA, 640 bp, Homo sapiens
ttcttttctaactctttctttccactaacactattcctttaataagagaaagatctaaatcctacttatcacagcagaataatacgtactcaatggaagttcatattgttaacattaatttctcatagaggtctgctttctgccatgcaatatttgattcatgtgattcagacattgatgggattgctattcaacattaaagagaatttcaccccaaaaaatgggcaatgtgtgtcaattatgtctgtgaggaaataaccaactttatstatccctttgacattctagacaagattatataaaagaaatcagaagttcattataatgttcaccatgcaacattatgagtttaagattattgagctgctaatttcattttttatcgattaatatttaccttcactcctgctattatgctgaagccacagtaggttgtatctctttttcccttaagaatctttaatagaaagtatattacaagctgctacattacaaagctgagtggtcagagcaaagattgtttcctgagaaattttgtttcctttttatttattttcttcttttatttacagattagctttccactacaggcctaattatgaaaagacaaatgaattggttttcactatcttaaatacag

SEQ ID NO: 712748 - DNA, 640 bp, Homo sapiens
ttcttttctaactctttctttccactaacactattcctttaataagagaaagatctaaatcctacttatcacagcagaataatacgtactcaatggaagttcatattgttaacattaatttctcatagaggtctgctttctgccatgcaatatttgattcatgtgattcagacattgatgggattgctattcaacattaaagagaatttcaccccaaaaaatgggcaatgtgtgtcaattatgtctgtgaggaaataaccaactttatgtatccctttgacattctagacaagattatataaaagaaatcagaagtkcattataatgttcaccatgcaacattatgagtttaagattattgagctgctaatttcattttttatcgattaatatttaccttcactcctgctattatgctgaagccacagtaggttgtatctctttttcccttaagaatctttaatagaaagtatattacaagctgctacattacaaagctgagtggtcagagcaaagattgtttcctgagaaattttgtttcctttttatttattttcttcttttatttacagattagctttccactacaggcctaattatgaaaagacaaatgaattggttttcactatcttaaatacag

SEQ ID NO: 712749 - DNA, 640 bp, Homo sapiens
ttcttttctaactctttctttccactaacactattcctttaataagagaaagatctaaatcctacttatcacagcagaataatacgtactcaatggaagttcatattgttaacattaatttctcatagaggtctgctttctgccatgcaatatttgattcatgtgattcagacattgatgggattgctattcaacattaaagagaatttcaccccaaaaaatgggcaatgtgtgtcaattatgtctgtgaggaaataaccaactttatgtatccctttgacattctagacaagattatataaaagaaatcagaagttcattataatgttcaccatgcaacattatgagtttaagattattgagctgctaatttcattttttatckattaatatttaccttcactcctgctattatgctgaagccacagtaggttgtatctctttttcccttaagaatctttaatagaaagtatattacaagctgctacattacaaagctgagtggtcagagcaaagattgtttcctgagaaattttgtttcctttttatttattttcttcttttatttacagattagctttccactacaggcctaattatgaaaagacaaatgaattggttttcactatcttaaatacag

SEQ ID NO: 712750 - DNA, 612 bp, Homo sapiens
attccatgatcaaaaattcttaacttggagttagcgcttacaactttggtcttcaaagaagaaataattgatgatagccagtggcaattataaaatgttaacctgcttgaacaatagagcacagagctatctccaaataaaactttgggcttagtttagctctatcaatcatttgttctgtgactgggctacttatttgccttgcactgccttttttaaataagcaaatattattgtattaagctatctctaaaggaccttccatctctaatattgttcaattctcacttgtaagacatgttttccatgctcaagacatttccacattgcccccaatgctgaagaacaagctgtcttctgattgcaagtacaatcaatcaacaggaaagtccaatttagattataaaatgaaaataccttaaaatattatttaaatctactaaatggaatgacaatatttaaagttttgctgatackttacattacacttaaatttcaaaaatatctcaggaataaggcatgctattgggtaccaaattaaatgacataaaatgctttaagtaaggttgtaagcatgagaattagtaataatggcacacaggatatagaaag

SEQ ID NO: 712751 - DNA, 2327 bp, Homo sapiens
catttattctgtgctgaaaagagagaatgccctgtggcccattttatgtgtttaatgtccactcagcaaagtttttctgtaagcatcaaactccattgggaattttgccaaggaaggattgcagaatcaggacttaggcataaagcattgagtcatgacttaagcgcctgcattacaaactggagccattttagaactacacctacagaaacttatcaaccataattgtttttgttttgtttctgttgttgacttaatgggtttgagaggtgtgtaagagggacagagacagagacagagaacatgtgtgtgtggaggtgtgcttgtgtgtgtgtctatgtgttatgggaaaagcagtgatgtcagtagtttgaggctcttgcttcctgaaataactaacaataaacaaattagttcgtgtagccactctgaataattttactagacagacaaattaaatataaatatctgaagataatgcacaccagggttcaacgtctagtgagtcagttctaatgtgtttttccatacatgtaagggttttggatagtgagacagggattctgcttcatattttggtttaaacaccctaaaaatgaagttagcattttgattttcctgtcattttgaaacagcattttaattttgttatatatccgtaacaatttttgagtgttcacataatgttctgtggctattctaggcagtgaggctccaaagatgaaaagacatattccctgtcctcaaagatctcacaagacagtgaaaaaaggtgggacaggccaagcgcggtggcttatgcctataatcccagcactttgggaggctgaggcaggtggatcacgaggtcaggagatcaacaccatcctggctaatatggtgaaaccccgtctctactaaaaatacaaaaattagctgggcgtggtggtaggcacctatagtcccagctgctggggaggctgaggcaggagaatggcatgaatccaggaggtggaggttgcagtgagccgagattgcgccactgcactccagcctgggtgacagtgagactccgtctcaaaaataataataataataataataataataataataataataataaattttaaaaaaagagctgggacaggggaaaagtgaagtgttcgccaatgctcccttcaataaggcagaccaaattgtcatctaatcaatggagatctgttatttcaatattagtacttgaatactcaggaaatatttgttaaatcatttagtctaattctagccacaaattcctgagataattataatgtttccatttcaaaagattagaaaatggaaatttggagagtttcagagatcacatattagattatttggttaaaaaggaaataaatttcaaactgaggaattgtttgcttgcttagcttttgcctgtttgtttgtttttcttcaactgcagtggcaaaaatgatctctgcaactccttgacatgaatgaagttgaactatcacttgagaatatcatcaccttgcttcttcattatgcatggaaggattcctcagttcatgagcaaagatgatactaattcagaaagataatcagggaaaatgggagcatagagaatgcatgaagtgtcaagaccatatggatgtggctaaataagagaaaggaaaatgttaaacagtcagtaaaatattgaagtaaagaaatgtacagccagataagatgaaaagctatgtagtagcagatgctgggtgttggttcactgtgtgacctcacccaaagttagaacaatttcttcttttggcaatctatgaactgaagaagttcaaaatcaaactcaaaggcagtgaaatcttgtctttttcacagttatatttatccggaccacaaagcattgtgtctgcagcagaagaaatcagataccatctagtatagcagactgaatctttgcaaaataagcattcctcttaagacttatttagggaggctyatctcatatctgaaacattgaagtcaagctatttggagtgacagtatttctatattccatgcagtacttcctcatgcagaaaacagaatgtggaagagtgtgagtgtgtgtgtgtgcaggcacatgcaaagtgcatcacattttcttttaaataataatatagttaggaccacaacaaagttgtgaaattgcgtgtctttgtgtgtagtagtggtaatagtagtaatagcaagtagtagcaacaggttttcatcaaagtccaaatattcaggagatcctgaataaaaaaaggtccaaatgatggaaaaaccatgggtttggaataaatgtatgaatgttgcttataaca

SEQ ID NO: 712752 - DNA, 2327 bp, Homo sapiens
catttattctgtgctgaaaagagagaatgccctgtggcccattttatgtgtttaatgtccactcagcaaagtttttctgtaagcatcaaactccattgggaattttgccaaggaaggattgcagaatcaggacttaggcataaagcattgagtcatgacttaagcgcctgcattacaaactggagccattttagaactacacctacagaaacttatcaaccataattgtttttgttttgtttctgttgttgacttaatgggtttgagaggtgtgtaagagggacagagacagagacagagaacatgtgtgtgtggaggtgtgcttgtgtgtgtgtctatgtgttatgggaaaagcagtgatgtcagtagtttgaggctcttgcttcctgaaataactaacaataaacaaattagttcgtgtagccactctgaataattttactagacagacaaattaaatataaatatctgaagataatgcacaccagggttcaacgtctagtgagtcagttctaatgtgtttttccatacatgtaagggttttggatagtgagacagggattctgcttcatattttggtttaaacaccctaaaaatgaagttagcattttgattttcctgtcattttgaaacagcattttaattttgttatatatccgtaacaatttttgagtgttcacataatgttctgtggctattctaggcagtgaggctccaaagatgaaaagacatattccctgtcctcaaagatctcacaagacagtgaaaaaaggtgggacaggccaagcgcggtggcttatgcctataatcccagcactttgggaggctgaggcaggtggatcacgaggtcaggagatcaacaccatcctggctaatatggtgaaaccccgtctctactaaaaatacaaaaattagctgggcgtggtggtaggcacctatagtcccagctgctggggaggctgaggcaggagaatggcatgaatccaggaggtggaggttgcagtgagccgagattgcgccactgcactccagcctgggtgacagtgagactccgtctcaaaaataataataataataataataataataataataataataataaattttaaaaaaagagctgggacaggggaaaagtgaagtgttcgccaatgctcccttcaataaggcagaccaaattgtcatctaatcaatggagatctgttatttcaatattagtacttgaatactcaggaaatatttgttaaatcatttagtctaattctagccacaaattcctgagataattataatgtttccatttcaaaagattagaaaatggaaatttggagagtttcagagatcacatattagattatttggttaaaaaggaaataaatttcaaactgaggaattgtttgcttgcttagcttttgcctgtttgtttgtttttcttcaactgcagtggcaaaaatgatctctgcaactccttgacatgaatgaagttgaactatcacttgagaatatcatcaccttgcttcttcattatgcatggaaggattcctcagttcatgagcaaagatgatactaattcagaaagataatcagggaaaatgggagcatagagaatgcatgaagtgtcaagaccatatggatgtggctaaataagagaaaggaaaatgttaaacagtcagtaaaatattgaagtaaagaaatgtacagccagataagatgaaaagctatgtagtagcagatgctgggtgttggttcactgtgtgacctcacccaaagttagaacaatttcttcttttggcaatctatgaactgaagaagttcaaaatcaaactcaaaggcagtgaaatcttgtctttttcacagttatatttatccggaccacaaagcattgtgtctgcagcagaagaaatcagataccatctagtatagcagactgaatctttgcaaaataagcattcctcttaagacttatttagggaggcttatctcatatctgaaacattgaagtcaagctatttggagtgacagtatttctatattccatgcagtacttcctcatgcagaaaacagaatgtggaagaktgtgagtgtgtgtgtgtgcaggcacatgcaaagtgcatcacattttcttttaaataataatatagttaggaccacaacaaagttgtgaaattgcgtgtctttgtgtgtagtagtggtaatagtagtaatagcaagtagtagcaacaggttttcatcaaagtccaaatattcaggagatcctgaataaaaaaaggtccaaatgatggaaaaaccatgggtttggaataaatgtatgaatgttgcttataaca

SEQ ID NO: 712753 - DNA, 672 bp, Homo sapiens
acttcatgctctcaggagtaaacagatttttctcttaaactacttgtactatgcatgtgctctattgtccttcagtgggacgctaacttcagtgaatttgggatgatttagttttctaagaatacgttccaaaatgattcccatgaactccatacctatctttcaggaggaaaaccttgagctatgtgcagattttctgccacctttttcactcaagaagagaaaacaaaaataaattaaattaaacctttaaatgtaattatcccttcagtagggtacatagttaattcggtttgctataaatcaagaatctgaggaccctrtgtattagatgggtaatgcaaaatactgtatcaaacaaaccctagaatttcagtggctgaacacaaccaacttttatttctttacataaagaaataatgtgacatgtgacacagtgacaatccaatgtgactcccttatccaatgggcctgggttttctgccaatgcattaaggcagagaaggcatgttggtttcttacttgactggcctcagaagttataccacttacactcacagtctgttggtggaaattactcaacctctcccagatgcaggggctaggtatcaggagactgggaaatacagtctaactgctaactggcaacaagcaaataacataaaagggaag

SEQ ID NO: 712754 - DNA, 583 bp, Homo sapiens
gaatgcacttattatatagtagtgcaggcactttggaaggtggcacttcagctgaaatagcatttgttgaacatttggattcaatggctaattcctgcttctttcctgtgtgctgcttccaggtggctagaaaataatctaattcttcctaccagcagaatgtaaaataggtttctatcagacttgattgtcaacctttggaataggatgtatacataacaagcattaaatagactcatgtattactttgcaaataaatttcagaaaataattaccttaatttagactataatttgaaggaacgatctagagcagggtttctcgatcttagcataactggtattttgggctcaataattctaagcggtggggactgtgccatgcattggatggtatttagcagcatccttggcctctaccaactagatrccagtggcacaccactacccaatctcccagttaaacaaagaaagatgtctccagacaccgccaacgtcccttggggaacctccaattaagaaccactgacctagagtcactccagttacaggttaaaaccctacatacatcaatgatggaaatc

SEQ ID NO: 712755 - DNA, 2866 bp, Homo sapiens
agagcagaagtccaaaattcttcttttctattgtcttcagagtatggggtacagcccataatattgcagagtgagcccagctggaaactctcagtgaaaagactagctgagctaaacaagggggaaaaaagacatgctacctctttttttgaggcaaaattgctttaatgtgttatgcaattttttcctgcctgccttttctctcttggtatccaggagagtttcaaaatatcttaaacggttctcctaaacctcttcaatccttgtgcatttgtgagtctgacatggtagcctttaattccactctgtgttcaagtttctggggtggctcagaaatgtgagagtcaaggaagatggtgcaggtgaagggaaaaaggaaaaccagagttaagagcaagggagagacagtttctgagaagcatttgaaggaagggaactaatgcccattgagtattttctctgtaccaagaacattgtactcattatctaattttatgcccacaataatactgcattgcaggttgtcttatctccatcaaagaaaatgaaactcaaagagtttagggaacatgcccaaggttacacagctaagaagctgcagaactaagatttggaggctggtttgattcttaagttcatattttttccctgctatcaggctgtgtccttcacaagacacctccaactgaatagatgtcagtgacccttcttttttcaaggcagttcactgaatcatttgtcccactgagggacactatccaggacaatccagtacctgaaggacttttctgctccttcttcctcatctgtggagaccatttcatacttgttcttccttcctaccctccatgtagatttagggctgagtttgcagacctgaggtttgtgttttgtcaataaagcaccaaaaatcattgaaagcttaggggaaggaatatcagtaagcaaataaggagacttggaatctggaataataataataataaatattcattattactattagccagctacttttccacatattagctcatacaatcctcacaagaatcccaggaagtcaatgctactaactacattttaaagccgaggcactttaatatatgatatgatgcaacttgcctgaagttggtggaactgagatttgaactagaaagaacgattctaacacctggtttcttaactactctgttagggcatcagtattttaaaaagcacttcctgggttgaatctgaagttcagccagaggtgaaaccccatgtgactcagttattccacttcctgtgcctcagtttcttcctctgaaagtgagagaagtgaggtttagaactgtgggggatatgtgagaagataaattgagatgcctattagcatttggtgggcaactttgagggatgctaaacatcaagggatgctgaggacttactgcctgaggaagaattttctcgcccaaattgccaataacatcccactgattacaagacaccctatggctctcaaaatctgtgcatgggtgattataaattctactgagtgctaaaggaggtggaactctttccttcaatactgaatggactattctactttaaacatttaaccagtaagctgtagaagagacaggcaagtctgcaggttgaccttctgctggtggagtgcctctgtgaccccggaaaaatgtgtcaccattctaggcctagggctcctcatgtttaaaatgggatttaaaagattcagtgggctcttcagagaattaaataaaaccatgtatgcaaatcactaaacgtagagatacttgctacataataaatacttataaacaatacacacatgatgaaattaatctcattttcctctttgggttaattagagaagaatctatgctaattcatgtaaagcatgatcaaagtaacataagcagtaattaaagatgcacactatgatgaagtctttcaattgtgtgcttactgtactcatggcagctctgcaacaatcttaatttcctatgttcttgttcaaatggaaaatcttgcataaggtaccactaatttctcccataataaatgtaaaagttttagtgtgtgtttattattgcattaaattaagataaagaataaatcaagtaaaaatcaaatatatgtatacttacatatgatagataactgtaatcccatgggaaaccccaccttccagcacacatatcctttctaagaaggaaacatcaccctaagaggatcctgtaattgcaggtcagggagaggaatgtgaagaggtctgagagtgaaagcactttttttgaaaagggatataaatgttaggggtacagggaaaaaaaaagcatggaaactgaagcagagttgctgttggggaatctggagataaggataagacagtaaatggttcattctcatctttccctstctacccaatcctcagtaaaataatcatgtttttccttaagaccttgcagacatgaaactgttccttgaatttgttaaaggaaagtactggattctccttcaaattggttttgctgcaggaacaatgactgttcaagagttactacattcaaacaatgtaaagtttctgaattgttcatcacaacattgttagtgggagtttgggattagaaacaacccaatgcccatcgctgaggaatgggtaagccaaaatggaaaacatccatctggatgccatttagcaggaagaagcaacaaagtatgttgtttaccagaaacagttggagaatataaaaacaaaatgatgttattaacatagtgccatttaagtaaatgtataacatgctcacagcaataaaaatactatgaattttacaagagtacataaaatttagagtttcatattcaa

SEQ ID NO: 712756 - DNA, 2494 bp, Homo sapiens
tgcattgaatgctattatttatatatactatctcacttacttcttgcaaccctcctatggggtaagtattactatctctaatgtgcagatgaagaaagagattcagagaggacaaggactttgcccaaatacacacagctaagaagtgatagaactcacatttaaacctaagtccacttaaatttctataagccctggtctatttgaaagcctttaactttaaatggtattacctccttattgatttccacaatgttgaacatgtctgagggttgcagaatccttctatgacactatgcctatatggctttacctggagccattctggatgctataagttcataaataatgtctcttcaacttggttaggctcacagtgccaatgtagacagatgatctacggctttgtatggtatcattgttagctaatgtgttacttcatagtcttgggttgccatcccctggagtgttttgatgcgatcagttgtcagtttcaggtctgttgtttctctcaccagaagcccagccggtggaaactaacagccccaaagccctgcttgtgttaggggagctatcgaacacggataatgacataaacgagtcggtgttcatctggggaatctcagacaaagcagcccagaggaaaaccatctctgtcgatgaaggtttgtttcatttgcaacaggaaaagcagcagcaacagcagcagcagcagcgactggagcccgtgcacaggctgggaagaggtaaagggaggctgaggctgccgcatgtgagtagcattttgtgatttctttgcagctgggaaaggaatgctggggaggggtctcggctgtgaggtgggcatatgtgtgtgggttggggctggcagtaattaacaagtgcatttgaaatctgtcctcctcttccaaaggaggtacaggagtgtgcccacacgcacttgcattttctctgcagattataaaaaaaaaatcagcaggtgggamatattttcttttttttccttcttcttcagtctttaaagtgggctgcatggcagaaagacatcactgtccagaggagctttcccaggtgaaagaactccctagagggtttctttcccaagtttcttttgcagatgtgtggatctctatttctttgctatcaagcgccttaatgtggaggggcatttacatccctctagctgcaaaaagatgagggtgacttttgtatctctggttctcagctggagttgcctgtaataaacagcaccaaatccaatatgatttaacctctcagttgtcaatgttgaatgtgttcaaagaacacagtctgggcacggaaaagcatgagttgcattttacccatcctctcagcctggggaaaataacgaggtatttcaacattgacacctgttttgaactatgggaaagttttttcttttcctttcttttctttttttttaaattaagccctgaaatttgctatctgtgaacactggatagattgaagttgaaaggagacaggtaagaatgattttgctgtaaagcacttttgcagtgagcatcaggttgtcttagtataagacagtgctgtatacctttgggtaatggtcgttactaatgctaaataatgtgctgagcaaaagtgtgtctggtcataaagttgcctgtatcctggttatctggagacacaggatccccctccctgccctgcttctttctttccttaaaggctttgatgtttctcagcatgtcatgctgaatgtctagatatttgggaatctgcagtaaatgcatactagttcatctccaagagagggggaaagggggagaacgaaggagcacgggaggagcactctgcttatccttagagctggctttgagcagctgtgtgtaatgagggttgaagagtctgaggcactctgcactgggacttggccaggagtggcgtggttggctggatgcttgggtgcacaactgaatgctgttatgtgggagtcagggccccagctcccaagttgctatgggacataaaatgaaatatgaaccaggggatgggaactggggagaggaaagagccatctgtcttctacaaggtatcctttcactgaagcagttctccccacgcttcccctccctgcccccaccatgacacatgggggtaaacggagaaagctgttcaaatcaggtgataagtagcaagagggctcaggtggccatccaagtggacagggctcaatgctaggggtcagcaccatatctggacccttccatgacacagtggtgtgccttggcagacaggttgagaagacctaatttaagcaacccaggaaaagccaacaaaatagggcaatatgaataatctgatgcctgtgactctttattttttcccgttactattaatgcattgcagaaacgttacagtgtttttaaaggatcttctcctaatctcacccctttagcacctctgatttttccctgtgccatctcccaatctttgtccatgtatacat

SEQ ID NO: 712757 - DNA, 2494 bp, Homo sapiens
tgcattgaatgctattatttatatatactatctcacttacttcttgcaaccctcctatggggtaagtattactatctctaatgtgcagatgaagaaagagattcagagaggacaaggactttgcccaaatacacacagctaagaagtgatagaactcacatttaaacctaagtccacttaaatttctataagccctggtctatttgaaagcctttaactttaaatggtattacctccttattgatttccacaatgttgaacatgtctgagggttgcagaatccttctatgacactatgcctatatggctttacctggagccattctggatgctataagttcataaataatgtctcttcaacttggttaggctcacagtgccaatgtagacagatgatctacggctttgtatggtatcattgttagctaatgtgttacttcatagtcttgggttgccatcccctggagtgttttgatgcgatcagttgtcagtttcaggtctgttgtttctctcaccagaagcccagccggtggaaactaacagccccaaagccctgcttgtgttaggggagctatcgaacacggataatgacataaacgagtcggtgttcatctggggaatctcagacaaagcagcccagaggaaaaccatctctgtcgatgaaggtttgtttcatttgcaacaggaaaagcagcagcaacagcagcagcagcagcgactggagcccgtgcacaggctgggaagaggtaaagggaggctgaggctgccgcatgtgagtagcattttgtgatttctttgcagctgggaaaggaatgctggggaggggtctcggctgtgaggtgggcatatgtgtgtgggttggggctggcagtaattaacaagtgcatttgaaatctgtcctcctcttccaaaggaggtacaggagtgtgcccacacgcacttgcattttctctgcagattataaaaaaaaaatcagcaggtgggacatattttcttttttttccttcttcttcagtctttaaagtgggctgcatggcagaaagacatcactgtccagargagctttcccaggtgaaagaactccctagagggtttctttcccaagtttcttttgcagatgtgtggatctctatttctttgctatcaagcgccttaatgtggaggggcatttacatccctctagctgcaaaaagatgagggtgacttttgtatctctggttctcagctggagttgcctgtaataaacagcaccaaatccaatatgatttaacctctcagttgtcaatgttgaatgtgttcaaagaacacagtctgggcacggaaaagcatgagttgcattttacccatcctctcagcctggggaaaataacgaggtatttcaacattgacacctgttttgaactatgggaaagttttttcttttcctttcttttctttttttttaaattaagccctgaaatttgctatctgtgaacactggatagattgaagttgaaaggagacaggtaagaatgattttgctgtaaagcacttttgcagtgagcatcaggttgtcttagtataagacagtgctgtatacctttgggtaatggtcgttactaatgctaaataatgtgctgagcaaaagtgtgtctggtcataaagttgcctgtatcctggttatctggagacacaggatccccctccctgccctgcttctttctttccttaaaggctttgatgtttctcagcatgtcatgctgaatgtctagatatttgggaatctgcagtaaatgcatactagttcatctccaagagagggggaaagggggagaacgaaggagcacgggaggagcactctgcttatccttagagctggctttgagcagctgtgtgtaatgagggttgaagagtctgaggcactctgcactgggacttggccaggagtggcgtggttggctggatgcttgggtgcacaactgaatgctgttatgtgggagtcagggccccagctcccaagttgctatgggacataaaatgaaatatgaaccaggggatgggaactggggagaggaaagagccatctgtcttctacaaggtatcctttcactgaagcagttctccccacgcttcccctccctgcccccaccatgacacatgggggtaaacggagaaagctgttcaaatcaggtgataagtagcaagagggctcaggtggccatccaagtggacagggctcaatgctaggggtcagcaccatatctggacccttccatgacacagtggtgtgccttggcagacaggttgagaagacctaatttaagcaacccaggaaaagccaacaaaatagggcaatatgaataatctgatgcctgtgactctttattttttcccgttactattaatgcattgcagaaacgttacagtgtttttaaaggatcttctcctaatctcacccctttagcacctctgatttttccctgtgccatctcccaatctttgtccatgtatacat

SEQ ID NO: 712758 - DNA, 839 bp, Homo sapiens
tgatcatatttcaaagggagaaagagactcacaggcacacaaggagaggcagagaggtggtaggcagagagtaagtggcatttgagcaggtccaattgatgtgtgcctgggaaagatgcaatgagcatctgattctctgcagaccagggtccagttaaccagggagaaagtgatcactccttactggaggtggaggtgagcacatgggtgtgaatgggccccaagccagtggggaagagatttggattccctccaggttaaaggaaggaagaaaatggatttccattcaagtttgaaaggccagctgccaggctgttaaggggcagggggagtgggccagatgaatgaggccaagagctacccctaaaacctgagaaagaagggcagacttaccacctggggctcagaagcggcctgtcagtgctcccagccttcaggctgttccccagggctccagcttgaggctgcccagccagctctgtttagagacttttcaccatggttcccaaccaggaactgggagctctgtgcaaacacagctactgtggtggcatgccggggtgaggcacttggtcactgtgtgtgcaggtggcataccttctgctaggagtgtcctcaaggaaaygagggacctgacattttaggttaggactttttccaactttcctttcctgcaaaaggtattgttggggtgagtacattgttacctgcagcatggtttaaaggaaggagttcaaagcaggtatcagtagacccagagtttagtcttggccttcattcattcattcattcactttgccttcattcattcattcactttgccttcactcatttgttca

SEQ ID NO: 712759 - DNA, 1016 bp, Homo sapiens
aggcatctgtaatcccagctacttgggaggttgagttaggagaattgcttggacccgggaggtggaggttgcagtgaacagagatcgcaccactgcattctagtctgggtgacagagcaagaccctgtctcaaaaacacaaaaaactcttcttacatcttgcataacagtatccaacaaacatctgtcaaatagaattgcacagacagacaagatcagggctatgcgtatattcttcacaagatcttgcaatagcattctgggtcaatgccattgtttcattgttgttgttttaaatttttatcagactgacttatattttgaccagacactacttccctcctctgactttctaacctgtgcatcaaattgcctcttagactgaatcattctcttttccatctgcttttcttttgagttcctcagtgtgtgatgccactattcacttgccaacctgtggcagaaacctggaagtgaagatttacttttccctctgccttgtcccccacatactgttaattaccaaatcttattgattccacttcttaaatatttaccaaacccaacccctcctcctgatctccacagctactcccctctggccatcctgtctcatccagattattgcagcaatcttctgttgccctgcatccaactctccctctcaccaactcatttccacwctgcagctaggaggatgtttctaaattgtgtattttacttgactgctctacactgttcactggctactcatcacatttaggaaaaggcttttaaaaaaatcattacagaccacattatctgaacttggcatacctcttcagcttcttcacttattactcactccccattctccttccgtattacaccttctctacaatgcagtttttggcttctccaatactccttttttgcctctgagctttcacacaggcttttcttctgccttgactactctctgctttctctcccatggtttggctcactcttatcagccttagtctcttcacttaatca

SEQ ID NO: 712760 - DNA, 609 bp, Homo sapiens
tgagtgccattaggggcattttctcacatcctgtgaaaaaggacaaagcgaagctgggatgggaaataatatgggaaacatgcatgtccacaaaacttagataagtatgatctatacaggcaggaaaaacacggaaacttcctcaggtttcccagtcggaatgagaatacactttcccctttaccttctttgaacagcaaataacaagatcttcacagatcatgacagcaaaaagctgacactaaatttctgatgyatgatctttccctgttattctagatgctatttctgatatttaattctgccttctatagattaaaaattatagtaagtaaaatgtccacttgctgtagttgaggatttttacacattaaagttttacataaggggagtgatttatgcatctattaaaaaaatatttggcaaaaatttcccttgtctataaaagtctacatggggttaatatactgtgcaggaaatgtacctgaaaattctctttgttatgggtggctctttctgcttgtagaaattttgtattgcatatagcgttgtctcataaatgtgaaaaaggctgtgatagaatttgtgggatgtcctcctgttgagtaa

SEQ ID NO: 712761 - DNA, 608 bp, Homo sapiens
tgctaaccctgtgaagaagtaactgtcttcattagagagacgaggtcattgaaattgaggagttaatttgcccaaggtcacacaacaagtaagtgacatagtcaacattcaaacccaagttggccagaccccaagaccctgctttctacctcatgattgtgccatgaagctgagcccctcagaggtgtttttaatgagtacaagaagatggctcccaaaaccaactcaaaaagatcatctttcctgcctctgcaataagagtaagcattttggccgggcgcggtggctcatgcctgtaatccaagcactttggaaggccgaggcaggtggatcatctgaggtcacgagttcaagaccagcctggccaacatagtgaaacccccgtctctactaaaaaaaaaaaaaaatacaaaaattagctgggcatggtggcacacacctgtagtccyagctactccggaggctgaggcaggagaatcgcttgaacccaagaggcagaggttgcaatgagccgagatcacaccattgcactccagcctgggcgacaagagtgaaactccatctcaaaaaaaaaaaaaaaaaaaaggagtaagcattttacaacatct

SEQ ID NO: 712762 - DNA, 633 bp, Homo sapiens
catgagggtgatctagctaccagtgtaactgaattctcaatctgtcaacagcagaggccagtgtggaagtcttgctggaattatcttttatggggatcaggcagatgtctagcagtattttgaggatctggaatgctttcatgatggaaaaagcagctatttgtcctcaraggagaaatacacattctggttgtggatttgtctattccctttctgccagagctaccatttatgaacttacagaatatctcatccattgccatggtagcccacacaatacggcttccaacaagaaatacatattatgagaaggaagtgcaataatggtcttacccccatggattcactagtctgactatgtaccacatcacccaaaagaagttgccttgttagagtgatggaatggcttttggaagactcagttgtagctcctcgtgaaaataacatctgggagattggggtgctgatctactggatttactatgtcttaatctggtgaccaatgtaggaaacaagggtgagggggaagtggccactctcattacaacaaatcctctcctgaacacaatttttgttcttatcctcaagactttcagttcaatgggtttgaatgtcccagtgccccagggagga

SEQ ID NO: 712763 - DNA, 631 bp, Homo sapiens
atcccagcactttgggaggccgaggcgggcagatcacgaggtcaggagaacgagaccatcctggctaacacagtgaaaccccatctctactaaaaaaatacaaaaaaaaaattagccaggagtggtggcrggcgcctgtagtcccagctactcgggaggctgaggcaggagaatggcatgaacccgggaggtggggcttgcagtgagccgagattgtgccactgcactccagcctgggctacggagcgagactccatctcaaagaaataaaataaaagataaataaaaaataaaaaataaaataaaaatgaagaatgcctttgatgggctcctcagtagactggacataggcaaggaacagtgagccacctctgacagccagcaggactttctaaactgaaatgcaaaaagaacaaggtggcaagaaacagtaatttcaaaaggtttgacatgtgtaatgggagtaccagaagaggaagagagtaagtatacactttcatagaagaaataagatgtagaatttaatagattagtagggtgactgtaatttacagtaatctattatatatatcaaaatggctagaagataagaattagaatgtttctagcataaagaaaaggcgacatttat

SEQ ID NO: 712764 - DNA, 631 bp, Homo sapiens
atcccagcactttgggaggccgaggcgggcagatcacgaggtcaggagaacgagaccatcctggctaacacagtgaaaccccatctctactaaaaaaatacaaaaaaaaaattagccaggagtggtggcaggcgcctgtagtcccagctactcgggaggctgaggcaggagaatggcatgaacccgggaggtggggcttgcagtgagccgagattgtgccactgcactccagcctgggctacggagcgagactccatctcaaagaaataaaataaaagataaataaaaaataaaaaataaaataaaaatgaagaatgcctttgatgggctcctcagtagactggacataggcaaggaacagtgagccacctctgacagccagcaggactttctaaactgaaatgcaaaaagaacaaggtggcaagaaacagtaatttcaaaaggtttgacatgtgtaatgggagtaccagaagaggaagagagtaagtatacactttcatagaagaaataagatgtagaatttaatagattagtagggtgactgtaatttacagtaatctattatatatatcaaaatrgctagaagataagaattagaatgtttctagcataaagaaaaggcgacatttat

SEQ ID NO: 712765 - DNA, 2015 bp, Homo sapiens
gggaaagtgccatacttcaaaaccatcagctcttatgagaactcactcactatcacaagaacagcatgggggaacaacccccatgatccgatcacctcccaccagttccctccctcaacacgtggggcttacaattctaaatgagatttgggtggggacacagatccaaataatatcaccacgtaagatgtccgagtgcataatgtgtgcaggctatgtatagcacactttgggaaactctcttcttcttgtttgatgagccccttacagagcccatcatggcatgtccacactgacagagatcctagatatcaccagggccaattccctttgcagactctactagcagacagaggcccagcaaaaggaccagacttgcccaggataacccattatgggagggacaggctgatgcctcctaacctccagtcctatgtctttggctccctttacacactacctctccctaggtccctccactccccctacctcccaccatcctgttgacccctcagtcagggcttgtgcccatgagagcctaataatatgcccctgtctgagtctaagagaaggtaagttgatacaatttgggcggcaccccagaaccaccttggattctctcctggtctctttccttagattatgaactccaggaggggaagagccatgattaggaggttggtgtgagatagcaggtgaagaggcagagttatatagagctcatcttcccaagtaggtactgaataggctttggacaaattgcacaggataaagagaagtagccagaagaattgtagaatttccagggctcagaactactatcaggccacagcttctggtggggcgggttgtactctgaaggaagacacctgcagaggaggcaactcaggatctcctacctgaggctgaggcagcaggcagagaggaggctgttttaactgggctcccagaggagctgcctttcacaatttgttcacctgaggggtacctgcttgtaatatgctctaaggtgccatatgagctagcagagcctacatggatcccaaagaaaattatggcagtcaaggactatgaggtaataatctgaaactcaaatgggtcctctggggcccaacagggatatgtcttcctcacctaaaggcccctgcagagctgatgagcagtgctgccttggaccagtgaggataacctgcagagctcatcagagctaagcaccaataagattcaggttgggagggtggagtacagagaccccacaaagtctagcaataatgctgccaacactcaaggtagacagaagaacaatcttttcagctctgcttagcctctgccaggtgttgctattgggaaggctgtgggctgaaggaacaagccctggattaggagccagaaggctagagttctcactctggctctgtgtgatgttgggcaagtttctttgccactctgggcttcagtttcctcatctacacattttcctaattcttgttctgctgtaaaaattaggaaattggccaagtgcagtggctcacacctatgatcccagctctttgggaggtggaggygggcggatcacttgaggtcaggagttcgagaccagcctggctaacatggtgaaaccccgtgtctactaaaaatacacaaattagctgggcgtggtggtgtgcacctgtaatcccagctacttgggaggctgaggcaggagaaacacttgaacccgggaggcagaggttgcactgagccaagatcatggcactgcactccagcctcagcaacagagtgaaactccatctcaaaaaaaaaaaaaagattaggaaatttaggttctgaagtcagacagacttggtttttagcccagttcttcccaaaggaactcagaggtcagctaaggacacagatacataaacaggatttacaaaagagactggcacaaaagcaatgatcttgcttcttgctcaaggcagcacagtgagtggcagagtgaggactagaatacagggcccagaccttgatgt

SEQ ID NO: 712766 - DNA, 2015 bp, Homo sapiens
gggaaagtgccatacttcaaaaccatcagctcttatgagaactcactcactatcacaagaacagcatgggggaacaacccccatgatccgatcacctcccaccagttccctccctcaacacgtggggcttacaattctaaatgagatttgggtggggacacagatccaaataatatcaccacgtaagatgtccgagtgcataatgtgtgcaggctatgtatagcacactttgggaaactctcttcttcttgtttgatgagccccttacagagcccatcatggcatgtccacactgacagagatcctagatatcaccagggccaattccctttgcagactctactagcagacagaggcccagcaaaaggaccagacttgcccaggataacccattatgggagggacaggctgatgcctcctaacctccagtcctatgtctttggctccctttacacactacctctccctaggtccctccactccccctacctcccaccatcctgttgacccctcagtcagggcttgtgcccatgagagcctaataatatgcccctgtctgagtctaagagaaggtaagttgatacaatttgggcggcaccccagaaccaccttggattctctcctggtctctttccttagattatgaactccaggaggggaagagccatgattaggaggttggtgtgagatagcaggtgaagaggcagagttatatagagctcatcttcccaagtaggtactgaataggctttggacaaattgcacaggataaagagaagtagccagaagaattgtagaatttccagggctcagaactactatcaggccacagcttctggtggggcgggttgtactctgaaggaagacacctgcagaggaggcaactcaggatctcctacctgaggctgaggcagcaggcagagaggaggctgttttaactgggctcccagaggagctgcctttcacaatttgttcacctgaggggtacctgcttgtaatatgctctaaggtgccatatgagctagcagagcctacatggatcccaaagaaaattatggcagtcaaggactatgaggtaataatctgaaactcaaatgggtcctctggggcccaacagggatatgtcttcctcacctaaaggcccctgcagagctgatgagcagtgctgccttggaccagtgaggataacctgcagagctcatcagagctaagcaccaataagattcaggttgggagggtggagtacagagaccccacaaagtctagcaataatgctgccaacactcaaggtagacagaagaacaatcttttcagctctgcttagcctctgccaggtgttgctattgggaaggctgtgggctgaaggaacaagccctggattaggagccagaaggctagagttctcactctggctctgtgtgatgttgggcaagtttctttgccactctgggcttcagtttcctcatctacacattttcctaattcttgttctgctgtaaaaattaggaaattggccaagtgcagtggctcacacctatgatcccagctctttgggaggtggaggcgggcggatcacttgaggtcaggagttcgagaccagcctggctaacatggtgaaaccccgtgtctactaaaaatacacaaattagctgggcgtggtggtgtgcacctgtaatcccagctacttgggaggctgaggcaggagaaacacttgaacccgggaggcagaggttgcactgagccaagatcatggcactgcactccagcctcagcaacagagtgaaactccatctcaaaaaaaaaaaaaagattaggaaatttaggttctgaagtcagacagacttggtttttagcccagttcttcccaaaggaactcagaggtcagctaaggacacagatacataaacargatttacaaaagagactggcacaaaagcaatgatcttgcttcttgctcaaggcagcacagtgagtggcagagtgaggactagaatacagggcccagaccttgatgt

SEQ ID NO: 712767 - DNA, 1215 bp, Homo sapiens
gaagctttaatttagatgagtattgattactgcagttaagacagttattgaaactatggtgttcttggggctgaaggatatttaaacttttttcccccctttttgtggagatgggggtctctctctgtcgctgaggccggtctcaaactcctgggctcaagcagtcctcctgcctctgcctcccaaagggctgggattacaggcatgaactgttgtgtttggcctaaatatatttatagtcaaagaatgattttaaaaaattatgagacttgccttagatttcattcaggaacaaggaaaaactttcccacagaggggcttggagggaaagttttatgcttatacccattgagtttaactcagtatatcagttattcatacattcacttagacacatacatgaaaggataagcaattgtaaaaggaaattgtaagtagcaattatatagtatacattaagcttggtatatgtattttccaaatcacaacttaytactaataagacagaagttgagaaaaatccaaactgttgtcactttaagggtaagagaatattgagattgttttctggttggagtgttgaaagcattgcaaagaaagcaagatgtgatttgggctttatcagctataatttattaagggcctactgtgtgtcatctgttgggctttgtactctacatagacatagagtatttttaacttttcacaacaatcctgcaaagttggtgtgattttcatttcatagacaaggaaactgaggttcaaacaggttaagtgagctactctagtttcccacagctggcaaactgatagaactgtgtccgggtctatttgacttacatctcagactccctcaattctgctgcctccctaggcagccccacacaccagagatacagtggtgggactagggacaggatggcttcagccagcgcttctgtcctggaagaggagagtggaggctacataacagtcactggggacctgtggcccttattagatcccgaggggcaactttgtgagcttccccctactccctgggagtgggagcagctccctgggaagcttttccttttctcttacaacttctttgctgccacatctgaagtgggcattggaatatgccttccctaaactagctgttcttgcccttttctgttgaggaaatggagttagagatgtgttagtttacccaaggactcaaacagctagcaa

SEQ ID NO: 712768 - DNA, 777 bp, Homo sapiens
tgtatttttagtagagacggggtttcaccatattggccaggctggtcccaaactcctgaccttgtgatctgccagcctcggtctcccaaagtgctgggattacaggcgtgagccactgcgcccggccaattttattttttaattaaacatttctgagacattttggctttaatgaaaatgtttccaaagcatgttcaaagcgtagtccttagtttgatggtctgaagaatggaatcatttattagtggagttcaataaatatttattcgcatttatacatacaaggtcctttggacagagtaagagacacaagacaccaccactccctgaaagagcacacaaaacaattacatagataagaccaacacacacatttgaactgtggtattgaaacttaaaaaaaaaaaaagcctaaagccctctcagtaaaaaagagtacttatcgacacttacatgtttatttatacattatcccatgtactagcatatggcttgactatatacaccagaactcacactgtaacaaatagaaagtttataagttaccaaaataaatagaaactttaacacttccttcctgtatcctcaaggatcatttgcacattccctgtagtgtgcacattccattttgtaaaccagtgtttttagaaaacaatgcctwcctgtatataaccaagcactaagttctgtgttacagattaaaaaaaccattttagagtaaagagaaataagagcaaacccagactactagaactggtaaatgaaaggaatagcatt

SEQ ID NO: 712769 - DNA, 777 bp, Homo sapiens
tgtatttttagtagagacggggtttcaccatattggccaggctggtcccaaactcctgaccttgtgatctgccagcctcggtctcccaaagtgctgggattacaggcgtgagccactgcgcccggccaattttattttttaattaaacatttctgagacattttggctttaatgaaaatgtttccaaagcatgttcaaagcgtagtccttagtttgatggtctgaagaatggaatcatttattagtggagttcaataaatatttattcgcatttatacatacaaggtcctttggacagagtaagagacacaagacaccaccactccctgaaagagcacacaaaacaattacatagataagaccaacacacacatttgaactgtggtattgaaacttaaaaaaaaaaaaagcctaaagccctctcagtaaaaaagagtacttatcgacacttacatgtttatttatacattatcccatgtactagcatatggcttgactatatacaccagaactcacactgtaacaaatagaaagtttataagttaccaaaataaatagaaactttaacacttccttcctgtatcctcaaggatcatttgcacattccctgtagtgtgcacattccattttgtaaaccagtgtttttagaaaacaatgccttcctrtatataaccaagcactaagttctgtgttacagattaaaaaaaccattttagagtaaagagaaataagagcaaacccagactactagaactggtaaatgaaaggaatagcatt

SEQ ID NO: 712770 - DNA, 993 bp, Homo sapiens
tcaaatagattgaatcagtttccaatgatgtgaaatatttgatggaatgctttaaattatatatgtggttatggcattagtttattttgttatatgtaaggatattgctctctatctagaattaattgtaatatgatacatcaactactgaagattgagtttagtcatagcaagctgacaaaatatattttcttataccttaaaatgacataatgagaggctggtaaatataaatcaaatcagtttatatgtatctaatagaaggaaaaacgaagcatcatacaggaaatttaaaagtactattayatatgttatttctatccattcaaattttttaataatacatagaagtttataaatttctccatctataatatcaaagatgtgcattaataatatactgatctgtagtatatgtaacatacgatttaccatataacatatggttcaactatatttaagagaaataacaacatgaaaaattggaaataacttgctcatggtcttttgaagccttgttacacaccaactgcaagtaataatgctatcaacaagggcagattttctcttctcgaaagttgactcagatacattggattgttatcacaatcaaatgcagctacttaaatacattaaagaagtcacaataccactcaagttaaacacattataatttttgtactacctgcctgtttttaagataaattcttactatatcaaattcttacctcagaaaatacagaaaccagaggaacatgtatcttcaacaagaataaattcaatgttattcataaacatttattatacttggtggcagatgatagtttaaaataagagcattttatccgtcttaatcagcatatttagtgggtccacttaacatctcatgtgtcaaatatgctgtgatttagtattgtctatagtgttgatataatatcattcattccacaagccttcactaaatgtctaccgtgtgccaataactgtgttatg

SEQ ID NO: 712771 - DNA, 993 bp, Homo sapiens
tcaaatagattgaatcagtttccaatgatgtgaaatatttgatggaatgctttaaattatatatgtggttatggcattagtttattttgttatatgtaaggatattgctctctatctagaattaattgtaatatgatacatcaactactgaagattgagtttagtcatagcaagctgacaaaatatattttcttataccttaaaatgacataatgagaggctggtaaatataaatcaaatcagtttatatgtatctaatagaaggaaaaacgaagcatcatacaggaaatttaaaagtactattatatatgttatttctatccattcaaattttttaataatacatagaagtttataaatttctccatctataatatcaaagatgtgcattaataatatactgatctgtagtatatgtaacatacgatttaccatataacatatggttcaactatatttaagagaaataacaacatgaaaaattggaaataacttgctcatggtcttttgaagccttgttacacaccaactgcaagtaataatgctatcaacaagggcagattttctcttctcgaaagttgactcagatacattggattgttatcacaatcaaatgcagctacttaaatacattaaagaagtcacaataccactcaagttaaacacattataatttttgtactacctgcctgtttttaagataaattcttactatatcaaattcttacctcagaaaatacagaaaccagaggaacatgtatcttcaacaagaataaattcaatgttattcataaacatttattatacttggtggcagatgatagtttaaaataagagcattttatccgtcttaatcagcatatttagtgggtccacttaacatctyatgtgtcaaatatgctgtgatttagtattgtctatagtgttgatataatatcattcattccacaagccttcactaaatgtctaccgtgtgccaataactgtgttatg

SEQ ID NO: 712772 - DNA, 993 bp, Homo sapiens
tcaaatagattgaatcagtttccaatgatgtgaaatatttgatggaatgctttaaattatatatgtggttatggcattagtttattttgttatatgtaaggatattgctctctatctagaattaattgtaatatgatacatcaactactgaagattgagtttagtcatagcaagctgacaaaatatattttcttataccttaaaatgacataatgagaggctggtaaatataaatcaaatcagtttatatgtatctaatagaaggaaaaacgaagcatcatacaggaaatttaaaagtactattatatatgttatttctatccattcaaattttttaataatacatagaagtttataaatttctccatctataatatcaaagatgtgcattaataatatactgatctgtagtatatgtaacatacgatttaccatataacatatggttcaactatatttaagagaaataacaacatgaaaaattggaaataacttgctcatggtcttttgaagccttgttacacaccaactgcaagtaataatgctatcaacaagggcagattttctcttctcgaaagttgactcagatacattggattgttatcacaatcaaatgcagctacttaaatacattaaagaagtcacaataccactcaagttaaacacattataatttttgtactacctgcctgtttttaagataaattcttactatatcaaattcttacctcagaaaatacagaaaccagaggaacatgtatcttcaacaagaataaattcaatgttattcataaacatttattatacttggtggcagatgatagtttaaaataagagcattttatccgtcttaatcagcatatttagtgggtccacttaacatctcatgtgtcaaatatgctgtgatttagtattgtctatagtgttgatataatatcattcattccacaagccttcactaaatgtctaccgtgtgccaatractgtgttatg

SEQ ID NO: 712773 - DNA, 609 bp, Homo sapiens
tcttacccaatttttcaactaaaatactcttgttctctccaatactcattctttgagagtggaaggggcccagaaatgtcaactggctcaccttccagtaagaatttgtgtttttactcaattattgcaygtatttgagggcttgccatttatagatgtttgtctcctgtctttcctatgcctcaaaattcttgctgacatttgtctcccgtctttcctatgcctcaaaactcttactgactagaagtacctaccataatacagtgcacataaaagctactcagcaaatttactttcaaattagaacacatttacgcctggcacggtggctcacgcctgtaatcccagcactctgagaggcctaggcggacggatcacctgaggtcaggagttcgacaccagcctgcccaaaatggtgaaaacctgtctctactaaaaagacaaaaaattagccaggcgtggtggcaggtgcctgtaatcccagctactcgggaggctgaggcaaaagaatcacttgaacctgggaggcagaggttgtggtgagtcaagatcgtgccactgtactccagcctgggcaacaggaatgaaactccgtctcaaaaaaaaaaa

SEQ ID NO: 712774 - DNA, 609 bp, Homo sapiens
tcttacccaatttttcaactaaaatactcttgttctctccaatactcattctttgagagtggaaggggcccagaaatgtcaactggctcaccttccagtaagaatttgtgtttttactcaattattgcatgtatttgagggcttgccatttatagatgtttgtctcctgtctttcctatgcctcaaaattcttgctgacatttgtctcccgtctttcctatgcctcaaaactcttactgactagaagtacctaccataatacagtgcacataaaagctactcagcaaatttactttcaaattagaacacatttacgcctggcacggtggctcacgcctgtaatcccagcactctgagaggcctaggcggacggatcacctgaggtcaggagttcgasaccagcctgcccaaaatggtgaaaacctgtctctactaaaaagacaaaaaattagccaggcgtggtggcaggtgcctgtaatcccagctactcgggaggctgaggcaaaagaatcacttgaacctgggaggcagaggttgtggtgagtcaagatcgtgccactgtactccagcctgggcaacaggaatgaaactccgtctcaaaaaaaaaaa

SEQ ID NO: 712775 - DNA, 761 bp, Homo sapiens
gctccttatccaccattcaattaaatagctctttaaaagatcaccaatgaacactatattgttaaagactacttcagccatcttcttgccagatgtctccaatactctacacattgcccactactaattcctttttgaaactttctgcagaccccagtttagcatagtggttgagtgtggactctggatcctgattgctttggtttggattccagctttgccactttcttgctctgtaatctatgcattattgatgttataagaataataatggttcccatctcaaaggctagttccaagaactaaatgacttaataacatacgttgcaacttagaacgatgcctagaccataataaatgctatccataygctaatataattatgacaatattactgttattctcatcatctttgggcaacaatactctccccctgttctctctccagtctggccaaccttcccggtctcctccatggacttcccctctgcccgactcttaagcactcctgtccttcaggttcacggattctctctcactacaaaattcttcaggcaacctcactccctcttgggtttttgaacagccaaagttcttgaaggattcgaatccacacaagtagccaactgtctgcccaaatctgcagaattggacatgtaacaactcttgaacatatccatttggaggttctaaataaaggacaaacagtccaaaatagtccaaagctgaactccctgaaatgcttccaaactgatttcttt

SEQ ID NO: 712776 - DNA, 665 bp, Homo sapiens
ggctcagtctttggataaatgtttctgaaccaaggaaatggcttcttaggaagtaatgcaccccctgtcactggagggcttcaagccctggctagcaggctcctcatccgggagcctgggagtcaggcatgatgatggctgagtcccctttcctcccctggggttgtgggggtcctggcagcctgtcccagccctggtcccttgctcaacagctgcccaccccgtgcctccgaatgcgccactcacaagtcacccttccttagtgcccgcacacaccagagaggcctcatatactgtggggttgtttcatctcccccagagcaccagagcccctcagccctcttgctctgtctctttgagcagaaatcatcactaacttctcaagcacggygctcatataaccctcaagccctttgagggcagctccagaatccagctctgcctgcttggtctttgaattcctagagcctgctctcaggaatggccttgacagagccgacttcccgctggaaggatactgggggctcctccagcacattctctcacagggggcagcacttagagcccaaaacgggaagggaaggagggtctggctcgagtggcaggaccccatggttgctactgtgcgtaggctgagagtctcctcgctgttacgtaactgagga

SEQ ID NO: 712777 - DNA, 665 bp, Homo sapiens
ggctcagtctttggataaatgtttctgaaccaaggaaatggcttcttaggaagtaatgcaccccctgtcactggagggcttcaagccctggctagcaggctcctcatccgggagcctgggagtcaggcatgatgatggctgagtcccctttcctcccctggggttgtgggggtcctggcagcctgtcccagccctggtcccttgctcaacagctgcccaccccgtgcctccgaatgcgccactcacaagtcacccttccttagtgcccgcacacaccagagaggcctcatatactgtggggttgtttcatctcccccagagcaccagagcccctcagccctcttgctctgtctctttgagcagaaatcatcactaacttctcaagcacggcgctcatataaccctcaagccctttgagggcagctccagaatccagctctgcctgcttggtctttgaattcctagagcctgctctcrggaatggccttgacagagccgacttcccgctggaaggatactgggggctcctccagcacattctctcacagggggcagcacttagagcccaaaacgggaagggaaggagggtctggctcgagtggcaggaccccatggttgctactgtgcgtaggctgagagtctcctcgctgttacgtaactgagga

SEQ ID NO: 712778 - DNA, 625 bp, Homo sapiens
gagccaggggagcctctgcttgctcatgtcggctcctatatcaacacagtttgcacaggtttgcagagccaggccctgttcgaaatacaggcagtgaacagacctcacaaatggggagtctttgtcagaccccctgccatgggtggcaagggtgcagacctagcagcttgtgacaggcggggccaggctggctgtcacctgctcacacagcctcttggccccgggtggaatgctaagcacagcaggtgctstgtaacaaggcactgtcaggcgcatcttgcaagaagcccttgcccagcctccaaccatcaggggatgggtttgtgctggctggagtcaccagaccataggtccgcacaggcaaaggcctccttcctacttactctgacaagaaggagcggctctctgccagcagacaagcagtgagggtctaggtgcctggtgaccccaactggctttgcttccagggctgttgcgagccacagtgttatgtgatagtgaagagtgccactcaggagacttttgttctggccctggtcctgccgtggatttactgtgacactgagtgagtcactttccttctttgggcctcagttatgtcatctataaaatgggaatatacacc

SEQ ID NO: 712779 - DNA, 625 bp, Homo sapiens
gagccaggggagcctctgcttgctcatgtcggctcctatatcaacacagtttgcacaggtttgcagagccaggccctgttcgaaatacaggcagtgaacagacctcacaaatggggagtctttgtcagaccccctgccatgggtggcaagggtgcagacctagcagcttgtgacaggcggggccaggctggctgtcacctgctcacacagcctcttggccccgggtggaatgctaagcacagcaggtgctctgtaacaaggcactgtcaggcgcatcttgcaagaagccctygcccagcctccaaccatcaggggatgggtttgtgctggctggagtcaccagaccataggtccgcacaggcaaaggcctccttcctacttactctgacaagaaggagcggctctctgccagcagacaagcagtgagggtctaggtgcctggtgaccccaactggctttgcttccagggctgttgcgagccacagtgttatgtgatagtgaagagtgccactcaggagacttttgttctggccctggtcctgccgtggatttactgtgacactgagtgagtcactttccttctttgggcctcagttatgtcatctataaaatgggaatatacacc

SEQ ID NO: 712780 - DNA, 625 bp, Homo sapiens
gagccaggggagcctctgcttgctcatgtcggctcctatatcaacacagtttgcacaggtttgcagagccaggccctgttcgaaatacaggcagtgaacagacctcacaaatggggagtctttgtcagaccccctgccatgggtggcaagggtgcagacctagcagcttgtgacaggcggggccaggctggctgtcacctgctcacacagcctcttggccccgggtggaatgctaagcacagcaggtgctctgtaacaaggcactgtcaggcgcatcttgcaagaagcccttgcccagcctccaaccatcaggggatgggtttgtgctggctggagtcaccagaccataggtccrcacaggcaaaggcctccttcctacttactctgacaagaaggagcggctctctgccagcagacaagcagtgagggtctaggtgcctggtgaccccaactggctttgcttccagggctgttgcgagccacagtgttatgtgatagtgaagagtgccactcaggagacttttgttctggccctggtcctgccgtggatttactgtgacactgagtgagtcactttccttctttgggcctcagttatgtcatctataaaatgggaatatacacc

SEQ ID NO: 712781 - DNA, 1408 bp, Homo sapiens
  misc_feature 1308, 1309, 1310, 1311, 1312, 1313, 1314, 1315, 1316, 1317,1318, 1319, 1320, 1321, 1322, 1323, 1324, 1325, 1326, 1327,1328, 1329, 1330, 1331, 1332, 1333, 1334, 1335, 1336, 1337,1338, 1339, 1340, 1341, 1342, 1343, 1344, 1345, 1346: n = A,T,C or G
  misc_feature 1347, 1348, 1349, 1350, 1351, 1352, 1353, 1354, 1355, 1356,1357, 1358, 1359, 1360, 1361, 1362, 1363, 1364, 1365, 1366,1367, 1368, 1369, 1370, 1371, 1372, 1373, 1374, 1375, 1376,1377, 1378, 1379, 1380, 1381, 1382, 1383, 1384, 1385: n = A,T,C or G
  misc_feature 1386, 1387, 1388, 1389, 1390, 1391, 1392, 1393, 1394, 1395,1396, 1397, 1398, 1399, 1400, 1401, 1402, 1403, 1404, 1405,1406, 1407: n = A,T,C or G
ggattatggagagccagcagggctccactctaaccccagacacggattatggagagccagcagggctccactctaaccccagacacggattatggagagccagcagggctccactctaaccccagacacggattatggagagccagcagggctccactctaaccccagacacggattatggagggccagcagggctccactctaaccccagacacggattatggagggccagcagggctccactctaaccccagacatggattgtggagagccaacagggctccactctaaccccagacatggattgtggagagccagcagggctccactctaaccccagacacggattatggagggccagcagggctccactctaaccccagacatggattgtggagagccaacagggctccactctaaccccagacatggattgtggagagccagcagggctccactctaaccccagacatggattatggagagccaacagggctccactctaaccccagacatggattgtggagagccaacagggctccactctaaccccagacatggattatggagagccagcagggctccactctaaccccagacatggattatggagagccaacagggctccacgctaaagaggggaaggaagatggaagatactctctttaggagctggtggtgaagccaggaggcccagcactcggcggtgcattaatgcaacaagtatttattgagtgcctactatatactaggctctgttctaggcattgagaatacagtggtaagagagagagacagaaaaggactacattctagtagaaaatataaacaataaataagtaaaaaacaaatataaacatgaactataaaaatatcagagtggtaagtgctatgcaaaaaattaaaatagagtgatgggctagagagaagttgagtggcccctttggaggagttggtcagcgaagttcggcaaaaaatatacttcttgtgggcttctgagttgagcataagtaactctatacttattattgaagtaaattgtattacttgtctccacatgccttagagcttttgtgtgtagttttttctgacatttacagyttgtaaagtatttggcaataatttaataacaggccacgcttgttttctcttaagcttctattatattggattaagatagtccagtctacttccagtagaagtggatggagtgaaagatgttgcttctttggctcaaactgcaaataagtctgataaccttgcatagagagcaatttccatgaagaaaaatgggggaagcaatcaatnnnnnnnnnnnnnnnnnnnnnnnnnnnnnnnnnnnnnnnnnnnnnnnnnnnnnnnnnnnnnnnnnnnnnnnnnnnnnnnnnnnnnnnnnnnnnnnnnnnnc

SEQ ID NO: 712782 - DNA, 1408 bp, Homo sapiens
  misc_feature 1308, 1309, 1310, 1311, 1312, 1313, 1314, 1315, 1316, 1317,1318, 1319, 1320, 1321, 1322, 1323, 1324, 1325, 1326, 1327,1328, 1329, 1330, 1331, 1332, 1333, 1334, 1335, 1336, 1337,1338, 1339, 1340, 1341, 1342, 1343, 1344, 1345, 1346: n = A,T,C or G
  misc_feature 1347, 1348, 1349, 1350, 1351, 1352, 1353, 1354, 1355, 1356,1357, 1358, 1359, 1360, 1361, 1362, 1363, 1364, 1365, 1366,1367, 1368, 1369, 1370, 1371, 1372, 1373, 1374, 1375, 1376,1377, 1378, 1379, 1380, 1381, 1382, 1383, 1384, 1385: n = A,T,C or G
  misc_feature 1386, 1387, 1388, 1389, 1390, 1391, 1392, 1393, 1394, 1395,1396, 1397, 1398, 1399, 1400, 1401, 1402, 1403, 1404, 1405,1406, 1407: n = A,T,C or G
ggattatggagagccagcagggctccactctaaccccagacacggattatggagagccagcagggctccactctaaccccagacacggattatggagagccagcagggctccactctaaccccagacacggattatggagagccagcagggctccactctaaccccagacacggattatggagggccagcagggctccactctaaccccagacacggattatggagggccagcagggctccactctaaccccagacatggattgtggagagccaacagggctccactctaaccccagacatggattgtggagagccagcagggctccactctaaccccagacacggattatggagggccagcagggctccactctaaccccagacatggattgtggagagccaacagggctccactctaaccccagacatggattgtggagagccagcagggctccactctaaccccagacatggattatggagagccaacagggctccactctaaccccagacatggattgtggagagccaacagggctccactctaaccccagacatggattatggagagccagcagggctccactctaaccccagacatggattatggagagccaacagggctccacgctaaagaggggaaggaagatggaagatactctctttaggagctggtggtgaagccaggaggcccagcactcggcggtgcattaatgcaacaagtatttattgagtgcctactatatactaggctctgttctaggcattgagaatacagtggtaagagagagagacagaaaaggactacattctagtagaaaatataaacaataaataagtaaaaaacaaatataaacatgaactataaaaatatcagagtggtaagtgctatgcaaaaaattaaaatagagtgatgggctagagagaagttgagtggcccctttggaggagttggtcagcgaagttcggcaaaaaatatacttcttgtgggcttctgagttgagcataagtaactctatacttattattgaagtaaattgtattacttgtctccacatgccttagagcttttgtgtgtagttttttctgacatttacagtttgtaaagtatttggcaataatttaataacaggccacgcttgttttctcttaagcttctattatattggattaagatagtccagtctacttccagtagaagtggatggagtgaaagrtgttgcttctttggctcaaactgcaaataagtctgataaccttgcatagagagcaatttccatgaagaaaaatgggggaagcaatcaatnnnnnnnnnnnnnnnnnnnnnnnnnnnnnnnnnnnnnnnnnnnnnnnnnnnnnnnnnnnnnnnnnnnnnnnnnnnnnnnnnnnnnnnnnnnnnnnnnnnnc

SEQ ID NO: 712783 - DNA, 914 bp, Homo sapiens
tgatccatccacattgccgtgtgttgttctagccagctttccctcttcactttccccgtgacacactctgggtgactttcagtttccccgccacgagtaacaacayggcaatgagcaccctccaaaagcacttctgctccctcctaaccggactcacctgctctcaggttggtccgtgcagtctctaacttttgagtctgaaaactcacaaagcgctctctctctcttagatttttcttgagtcatgaagcccacagtaacacccaggcggcataggaatgaacgttaatgtttgttccaccttttttctcctggggccccagggaagaggcttctagacctctggtctcagacaataagagcctcttctgtgagtttttgtatcaggctcaggttgctttcttcgtttgattgaataaagaaagcacgtgttccaaaggcaaacacgtttcccccctcagaaacagtacagtctaaagccataaggaatctttccttcatcaaccacacattcaccctgcccttggaatcctgttgaggagacttgggtctctttttgtcagtggggagtgaggagaaggctcagggagttctgctgatgcttcagaagagctactcttgattttcatggctgctctgagctcatacatgaggaaaggcataggcctccattaatttttttcatcagtaattgtcttctagtcaagaagagcttcatggtttgccagttcctcgcaaacaggagctttaataggactgaacgctattcactgaatgctgtctattcctagtgggcaaagttgtatggatttcccgacatcttcattgtcctggtccatcttcttcgctcaggccacttcctcaactttctcagtcaaaccgtctctttttggggggtccagaggtgttgcaca

SEQ ID NO: 712784 - DNA, 914 bp, Homo sapiens
tgatccatccacattgccgtgtgttgttctagccagctttccctcttcactttccccgtgacacactctgggtgactttcagtttccccgccacgagtaacaacatggcaatgagcaccctccaaaagcacttctgctccctcctaaccggactcacctgctctcaggttggtccgtgcagtctctaacttttgagtctgaaaactcacaaagcgctctctctctcttagatttttcttgagtcatgaagcccacagtaacacccaggcggcataggaatgarcgttaatgtttgttccaccttttttctcctggggccccagggaagaggcttctagacctctggtctcagacaataagagcctcttctgtgagtttttgtatcaggctcaggttgctttcttcgtttgattgaataaagaaagcacgtgttccaaaggcaaacacgtttcccccctcagaaacagtacagtctaaagccataaggaatctttccttcatcaaccacacattcaccctgcccttggaatcctgttgaggagacttgggtctctttttgtcagtggggagtgaggagaaggctcagggagttctgctgatgcttcagaagagctactcttgattttcatggctgctctgagctcatacatgaggaaaggcataggcctccattaatttttttcatcagtaattgtcttctagtcaagaagagcttcatggtttgccagttcctcgcaaacaggagctttaataggactgaacgctattcactgaatgctgtctattcctagtgggcaaagttgtatggatttcccgacatcttcattgtcctggtccatcttcttcgctcaggccacttcctcaactttctcagtcaaaccgtctctttttggggggtccagaggtgttgcaca

SEQ ID NO: 712785 - DNA, 1468 bp, Homo sapiens
attgcagttcttggctggttgctagaggggaggtataaggaagcagaaaatctgtgcccattggaagggaagggttgggaggaactagggcaarttgaaagaaaatgccattcatccatttgtctgtccatctgtccttctatccatacctttactagccagcctgcccatccatccatccatccatccatccacccatccaataaacatttgttgaataaccactaaaggccaggtctcatcctaggcatggtacaaggcatttgagttctaaagtgaatcaggcccagtaccttgccgcaaggaatatgcacataagggatcacatacgattcccttgaggggctgtgcagcatattcctgggatctgggctggagcaaggcaggggaagttccccagaagcagcatcttgtggcctgtgagctcagtcacaggcagccagtccagagcctagtttccattggccggaaagtaagccaagttgccaaacccagcaggtcagggcctgggggaagccagtgcagaggaggttcaaagtgggcgggaggaagtggacccaggggtcccaccctgagctccaggcagctgggtttttatttggttcctgtggtgtgcagatgaaggccttctaggagtgtaatgtggctgaagggaggaagagaaatagatacacagaaataaaagcaatgctgttaagactgcgcttgatgactgagttctggggtttggttcatccaggtcagtgttgacctggtgtcagcctggggcaggtagcttatggcagcccatagctcaggcttggagcagggtctcagctccaacggcattccctgaagggccctacagacaagcccccaaagcaccaggaactggttgaccacctttcccagcatgtctcttaggggcctgacctcaggatttcagactggattcactgtgacagaactaagggaataaatacattttatgtccacgttcccactctggtgtgtaccatctgtccacagaggggagagaacaagcaagaggttggggtgtgccatccagtgtcccctggagcagaccttggcctctggtcttcagtgcccggtcctcctgtctgttgtctggcctggtgaggaagccctgacttgtaactctcaaagcctaacttcaggggttgccctgccagtgccctctccgggagctttgggtccctggttataagctttcagttctcagtgtctgctgtcaccagtaaccaagtgctgaaaatgatctgtaccactttgctgacaagggcggctgggccagggtgcccccgcccagcttcctctactctccctgtggcctggggctacacttgggttaaaactccccattatggagccaactgattctcccacttggccccagggcatgatttaagcaaacttaaaactcaatgctttattgatagtttaaataattaacattacgtaaagaaaa

SEQ ID NO: 712786 - DNA, 645 bp, Homo sapiens
ggtttgccaaagtcaattctatcagttcactccaagtgtgatcacactctgggaaaattatttggactggaaaaacctataagagaaggacacgaaaaccagagaatcaatttatttatataagttgacattttggcaggataagtgtcattgatcaagtaatacaccagggaaactgagttagagattaaaaggttgctcagtaagctcagcctaagtgtaatggtagttaagaattcttaaaaagtattctttcaggctaaactagttgttcaaataatattttcaagcagctttattgagatataactcacatactatacaattcacccttctaatatgtacaattcattgttttagttcatccacagggttgtgaaaccattaccgtagtctaattttagaacatttcatcaccccaaaaaaatctcatacccattagaagtcagctcccattccctcttttccccagccttactgccctaggcaaacactaatttactttctgtccaatcgatctgcctattctggatattttatattaatggaattctgcagtatgtggtyttttgcgactggctttttttttaacttagtgtagtgatttcaaggttcatccatgctgtagcatgtatcaatactttg

SEQ ID NO: 712787 - DNA, 3489 bp, Homo sapiens
tggtttgccttgaagtgctcagtatcctcacacccccatactaggaactacagtgtagaaggagtgttctcacatagccatcaggaatttggtatgtcagtatttgaggcagatgcaatttagtgattgcactcttgtgacagcagataccaattcattagcagccctgttcagacaacagggctcctcactgtccacgtcttgcctggttattgatgaacattaaagaagcaacaggaatgaataagaaattatgccattggtctaaatctatctaatgcatcctttcaagttcttgagagacaacacatttatttttccaaccttgtcctacatggtcaaaagttgtacagttctgttcataatgcttatctgtgtttagtgcatgtcttagtcatggaaacaggcaaggttatggtggcctgggttttcttttttagtctctactatactcttgggatattgaagagtcttcaaaaccaaaattatcccagtttaatttaaaagagccagagagaaatcctcttttcacaatttgactattcaacctatagatttcagagggtttctatccccctaacatgaataggagtaatattaaaatcttctaagcccacacgctgcctataatataagctgacacctttaaagtgttagcgtttgtagcyatcaacaccactccttgatgtcgcctgcacctggcacaccattcctatacgtccctccagtagagacaggcagaaactacatcccatttatgaactagcactagaaattgtatagcatcctttctgagatactccattagtcaaggcagttacaagccctgcctagattcaaggggagaaaacaaaccccactgagaagtgtgtcaatcgccttgtaaggaaatcatgtgagtttgataaccatattggtgccgccatctttagaacataaaatctgtgctctgtcgtacccttcctccaaaggtaaggcgggcccagttcttagacatataatgacctttctctcctggttcagttggaaccaaagacttactttactcagctgtagtatcagtaattaataactttacatcattcgtgaaagttcagctagaaatgaataatatttaaattaagaatgcactacgtaagactttgtaataaactgtctaattggaagtttattgcgaggttaagtctcttaaactaacttccctaatgaaacggaaaaatttttttaataatttggcaaaaataaatattgaatcctaaatttaaataagagaaggaaacagtaattaattgaaatcatttataccacatcgttatctaaaacctggctgttggtaagaatggcataacattccattttaatttttaaatataaagttaattaacagatttctggactatggactttaataaattatcagtaatcactaacaaaataattatttgaataataaatgccttctaggtgtttgaagttcctcaagctggtggaggggaaaaggagtttcctcatatatttcttaaatctcttagttttccaccttcaaacgtctgtattttttctcttttgcaagaaactttcaattaagcaaccataacttcaagcctttgtctaaatcatattaaattctgaacagacacgttccaacatgatcgttgatcaaacttgagagcagggaagcaaaaagaaaatctacgtagatacatcttcatttctgtaccctgtatgaaaaaaaaatgtagttacaatatcgccaaggtcttctctggaatttgagacctcagtaaaagccttttccgtatccatggattaaagaaaaagagagtgaactgccctaccctaagcgttggaacctggagttagccttgccagggcagtgaaacccaaggaatgaagccacgggttgcatgagaaaaaccaagctgtgactgccctctgctggaaaggtctggatgacctgtctctgaaactcttggtaggccctagaggtagttcccctccactctccctcctgccaactgtgaacaaaagttctctgaaaaggaatttgaaggaaagagactttattccagtgaacagtttgctaactggtgagacacagccttaggtgtaaaacaaaggtggttccagagaacaaagaaagagtgtgggttttatagcaaaagcttcagcccagcttcccgagcaggtccttttatgtaaacaaaggattcaaacttccttattgctgattggctgacacagctgagttctgattgattgatagagccaagctgtgactggttggttcaggtgagctctgaaagtcccaaagttaaaaaagtgtggctttttgtgcatctcagagtatgtgtgtgaactttagtcagcacatagctccttggtctattttaaatagccacttgggatccattctgaaggactgactctttcaagttcacatttgttcacacaactaagcccataaatgccccatcagctagttgctacaacctccaccctgtctgctccagcctgccaccatgctagatctttcttctccttaggtctgtactgtgacttcttaattagtagtaagtaagccgtgggtctttgctttccccattaattgccaaggtgacattctgccacaagcctgagacatctgtctcttcaccaattccacccaaaaaaactgaagtattttatctttagagatgagatgggcaaaataggctacaagcatagctgactgctgtacaatccactcatgcctctgagttatcttctttaacacacagctattctagaatggaatagaaaggtctatgccctacaagagacccatgcgtgaatcgtaatgtgtatgctaactaaaataacatatttctaaagaacttaattataattgcataattgtaattacttttgtcctagattaacatatttgaaaaaataaattatttacataattcaaaaaccttgagctcttacccgtctgtggatttgaatgaccatacatcatgatttaagccaaaatttatctgatttatcacgcttatctgtacaattatcagctacctccttaattatatttcacatagccacctctgacaatccctggggagttacacaaatgcccacaaaacagtaaaattgtattcttcccctcctcgcttttagatggtttctgctgtttgcaaatccatcataaataccattaccacagctccaggtactttctggggattgcctgccaatcccatgaagttgtctccctgactttccaatgcctaaagacccttgagctagtgaaccctatagttttactgcacttaagctaaactcaattcagcacataaggaaaaataatggtgtctctaggtaaggatcagagaaagcccataaaccttggtgaaactgagagctaaacctcctcttaacctctctatcttatagtctctgctgccccaaactcatcctgcctttattatctggagagcaaaagga

SEQ ID NO: 712788 - DNA, 649 bp, Homo sapiens
taattttcatgatttaaaaaaaaccacacattgggccaaattacactttcagagatgccctcagaattttgattaacataataggtccaacttcgattctttatttagtacttctttttgattcaagaaggtgttgagaattctaactcccccttttgtaaggtaaaaaaaaatcagtttttgcaggctgaattatatacccattgtccaacagtgaattgtagaagagttcatcatagttgtgggtttcgtgaacgtgmagttcttgccctaatagtggtgccaattggtaaaactggtcatatccacatttgtcccaatgaatggcttagttatgctatcttccctagtcccctacctcttctcttttggatttgtggaggtctgagaattatggaaagaacaaggatctgcgtatattaaatgagtttttaaaatatcctaaaaatattgtaataaaactgaaatgttattatttatatttatatggcagcatgtcccagcaaagcttcgcaaagatgtcagtattaattgtcaccatcctccagggaggtaagtaatggtatttctaagccaactggtttatttaaatttagttcctatatgcatatgatttttatgtaaatgagctccatgataaaagcaaccc

SEQ ID NO: 712789 - DNA, 2227 bp, Homo sapiens
cctgtcattataaacccaaaatggcatacccactcagctctaaggatttagaaaacttaccagaaaaagtaaaaaccagacatgattttttttttcccctagatccagctattctttggatactttattctcaccccccatgtgggagaattataccagtcaaggtaacgacggcaacagtcaatcctagagttgctgtgttggctgcagtctaggcaataaccaactgtctcattgcctctttgactgttagcaattataggagcaattgatgaaggttttatatgctccatgtgaccattataattaaggcacgttttaaggtatactttaagtctttcatttttctggaaccttaaagctaacttaacaaaatattcgtgttggtggagtcaggaattataaatatacatgtgatctcaggatcagaggatcacccttggaataatttttcttggctgcctgttggataccagatcatcagtgactgcactgcagtgacaagatggcagtacttgttaccaggttaataaagctgcaaaaagctgaggcccaggtttattaatgcttataagcattatttctatgacaataatccttttgcctataaagaaataagtatcactagtgcaaataaaattagaatggtcactttagctttcaggaaaagtaataagatgaagatctttggggaaaaggaatatgatctttggggaaaaggaatatttcagattctaagatttggacctaatcccataacactaggacaaagayataggcaagaagtcattctttataaatgatttattgtctttgatggtaggaatattcctcgatctagaaatgggaaacacgaagctctctaaactctgcaatcgaaagctctggagagcttacttagaaacagagccaaaccagacgaagattgagtagtactaacgctgcaagccagcattttccaagattattccctcattagattaagatgctcatcttccttctctatatgcctagcagacaaaacggtgaagtatttttcataaaaataatatcttttggaacctctacatttttaaaacacaatattcaacacttaaaatgaaattaccaggcatatggatcaacagaaccaaataattgataaatgagagaaaaaaagataaaatagaacacaagttagcctcattttaaggttagcagaaaagactttcaagtaactctatgtaatttatttttaaaatagaaaaatagttgaataggtagatgaacacatagaaatttaaatagagcactgaaacattaaaatatttaaaaattaaaaataaagaaaactaatgttagaaatcaagaacgtagagatttttgcttctttctttgttttggatgggaggagtaatgactataaatattattttaaaaaacaagcaccaggccagatttagcctatgcactatagctagccagttccaataatacattttaaaataaaccaaattatgattatcttagtagatgcagataaaatatttgattacatttaagttaaaaactattagcaaagaggcaggacttccagaatagcagaataagaaattcagcaaaccatctccccagcaaacaaaccaaaaaaaaacacccaaactgaaaattattaaaaagcaaaacaaaaacaatcattccaaatatttctggaactgtcttaagatcggcatgcaggaaataaagaactttcacttaagaaaatctactaaatctcagtaagacagtgatagtgttattgaggcacgacatatttccccactccctactcagctctgtgttgtggaagctctatcctgagttcctacttcatagaagtgtggccaagaagatggaggctccctctttccccagctcccagtctgaagatatggtttcacctcagaaggaacaggctcccagtgtttgcccccctccagccccatgtcgatgaagctctattctgagcggacatttagagagggccaatttcctttctcccacacagatcctactcagagacgaagctttaagacatgtgctgcaggccaggaatacgggggtttgaatcaccctaaacccagctaattcgtagggggaattccatgccaggaggatcaagatgaaaggacaggcattcttgccatccccatccaatgcccactcacagagtataggtgtcactctggggaaaacaaatactcacccc

SEQ ID NO: 712790 - DNA, 610 bp, Homo sapiens
ttactgagagcttagtgatagatgagaacgttagaggatcaatagaaacctggagtgctaagaaaggaagaaagttttgctggatttgattgaatgatttgagtctaaraacaaggcagtgtgaatatgtaaacatgtctgagtacttgccaggggcctgggggttggaatggcaggtgagtcgtggattatggagaaagatggtgagcttagagtggtcgggtgatctaaagagctacacacaccataccagggagtctggacataacacgggcagcacaagagctgtggaagggctttaatctgaggaatgactgggacagacatgcgccgtaggaagatcattctgctaactttgtggagagtggacaaaccctgacacacatagcacttggggaggttatcacaataatctagatcagtgttcctcacactttagatttacattacctggggatatggttaaaatgtaaccctgatggaagaggtccaagtgtggcctgatattctgcatttctaacaagcacccaagttttgagcggcaaagagctgggggagagaaaacaagagccctgctgaagccgtggtagcagcaatgaagagcagggga

SEQ ID NO: 712791 - DNA, 610 bp, Homo sapiens
ttactgagagcttagtgatagatgagaacgttagaggatcaatagaaacctggagtgctaagaaaggaagaaagttttgctggatttgattgaatgatttgagtctaaaaacaaggcagtgtgaatatgtaaacatgtctgagtacttgccaggggcctgggggttggaatggcaggtgagtcgtggattatggagaaagatggtgagcttagagtggtcgggtgatctaaagagctacacacaccataccagggagtctggacataacacgggcagcacaagagctgtggaagggctttaatctgaggaatgacwgggacagacatgcgccgtaggaagatcattctgctaactttgtggagagtggacaaaccctgacacacatagcacttggggaggttatcacaataatctagatcagtgttcctcacactttagatttacattacctggggatatggttaaaatgtaaccctgatggaagaggtccaagtgtggcctgatattctgcatttctaacaagcacccaagttttgagcggcaaagagctgggggagagaaaacaagagccctgctgaagccgtggtagcagcaatgaagagcagggga

SEQ ID NO: 712792 - DNA, 610 bp, Homo sapiens
ttactgagagcttagtgatagatgagaacgttagaggatcaatagaaacctggagtgctaagaaaggaagaaagttttgctggatttgattgaatgatttgagtctaaaaacaaggcagtgtgaatatgtaaacatgtctgagtacttgccaggggcctgggggttggaatggcaggtgagtcgtggattatggagaaagatggtgagcttagagtggtcgggtgatctaaagagctacacacaccataccagggagtctggacataacacgggcagcacaagagctgtggaagggctttaatctgaggaatgactgggacagacatgcgccgtaggaasatcattctgctaactttgtggagagtggacaaaccctgacacacatagcacttggggaggttatcacaataatctagatcagtgttcctcacactttagatttacattacctggggatatggttaaaatgtaaccctgatggaagaggtccaagtgtggcctgatattctgcatttctaacaagcacccaagttttgagcggcaaagagctgggggagagaaaacaagagccctgctgaagccgtggtagcagcaatgaagagcagggga

SEQ ID NO: 712793 - DNA, 610 bp, Homo sapiens
ttactgagagcttagtgatagatgagaacgttagaggatcaatagaaacctggagtgctaagaaaggaagaaagttttgctggatttgattgaatgatttgagtctaaaaacaaggcagtgtgaatatgtaaacatgtctgagtacttgccaggggcctgggggttggaatggcaggtgagtcgtggattatggagaaagatggtgagcttagagtggtcgggtgatctaaagagctacacacaccataccagggagtctggacataacacgggcagcacaagagctgtggaagggctttaatctgaggaatgactgggacagacatgcgccgtaggaagatcattctgctaactttgtggagagtggacaaaccctgacacacatagcacttggggaggttatcacaataatctagatcagtgttcctcacactttagatttacattacctggggatatggttaaaatgtaaccctgatggaagaggtccaagtgtggcctgatattctgcatttctaacaagcacccaagttttgagcggcaaagagctgggggagagaaaacaagagccctgctgaagcygtggtagcagcaatgaagagcagggga

SEQ ID NO: 712794 - DNA, 594 bp, Homo sapiens
gttgggatccctctgaacagtgacagacccagaaaatgctattctccagtcatggctgccgacttagagttgagcctgactccagcagactgcgaagacacaggcagcgcctcgtttgtatgactgaagacagccacatcttcaaacaacaggtgaaggcatctggttaaacacccacatctcggagtcaatttcaatttgctttagttctcaataaccagacaaagatcagatctctgtgtttcctcagagaaaaagggagagaatgcctatactggcatggaagattccgagctgttccaactaacgagctccgtgtcatgcccagatgcatgcctctagccaactcccctgaccttgcaccatggtcgtccacacctgggtttgccctgaatctgaagaagtatatctgcaggcccaaggacagaccaagtacgggagaggggccagaaagggcaccgcagtctaccctccgggcctctttctgccgagctgagcacacgcagttgttggtttttatttatttatttaatgaatmattgcttataaccaagggagttgttagttttgaggtcaagggactaagcagaagca

SEQ ID NO: 712795 - DNA, 1242 bp, Homo sapiens
cctgtgagaaaaccacccaagaggaatgcattcatgagcttccacgaggtctgggtcaagtccagaacaaggggaatgacagccctggagttcctacccctggtctgaccaccctgaaacaactgtatcctatttagaagcccctctcattgctgagatgatctgacagctgggcccatatcccagggagcatagtctggcaggaagagaagaatgtccccacagcacctctgagtgggccatttctgccccagcagcgggctctgccaaaccaaggtgattgcacttctcaagctaccgtgtacaggtgccctttcccatccactcattaccaatgcccataaatgtcaggtgctgtggtctgaacatttgtgtttctcaaaaatgtgaggccaggtgcagtggctcatgccggtaatcccagcactctgggaggccgaggcaggcagatcgcttgaggtcaggagttcaagaccagcctggccaacatggtgaaaccccatctctactagaaatacaaaaattagccaggcctggtggtgcrcacctgtaatcccagctactcaggaggttgaggcaggagaatcacttgaaccagggaggtagaggttgcagtgagctgagattgtgccactgcactccagcctgggcaacagagcaagactccatctcaaataaaaaagaaaagatgtgtatgctgagatgctaacccccaatgcgatggtatcaggaagtgaggctttggggaggtgattaggccttgaggttggagccctcatgagtgggattaatgcctatataaaagaagcccgagagagaggccccctcacccttcctatcatatgaggacacagcaaggaacccccagtctgtgaaccaggaagctagccctcaccagacaccaaatctgcggccaccttgatctcagacttctcagcctccagaactgggcaagaagactgcaaactccaccccatgcccttaaaagtaagagctgcttatggctccattgaaaaagaaaacacttgttttttattgtttgctttcctagcactgacttaaactctaagaatgttctattaatataagagtttaattttttttttctgtaagtgtccctcattgggagagaagaaaagtaacatttggcaacctctgaagacatctttgtcacaactgggacaggaggtgctactggcatctagtgagtagaggccagggatgctgcaaaccaccctagag

SEQ ID NO: 712796 - DNA, 1691 bp, Homo sapiens
tccagcctaggcatcagagcgagactctgcctcaaaaaaaaaaaaaaaaaaaaaaaagccatgggttatagcagtcaaagtgacaaatggtaaagactggtggcatactatttcagagcctcttaagatgcattcatccgcataagctgataccaggtctgctgcactgcatcttaaagataagggattgcggccaggcttggtggctcacacctgtaatgccagcactttgggaggctgaggagggcagatcacctgagatcaggagttcaagaccagcctgaccaacatggtgaaaccccgtctctactaaaaatacaaaaattagctgggcgtggcagcgggtgcctgtaatcccagctacctgggaggctgaggcaggagaatcacttgaacccaggaggcagagtttgcaatgagccaagattgcgccattgcacttcagcccgggtgaaaaagtgaaactccatctcaaaaaaaacaagaaaaatagatatgggattgcctctctgcctagagtctgcctctaggaccccagtcctcagcatctctcacatatcactgcccccaggacagtacaagaatcccttaatctcattacccatctagatgtgcgtcccacttcctgcccatacagaagcaagaagtctaagacagagctagaagctgctgtgtgaactccctgtcattgaggaatagcctgagtgtccttcagtcctgaaaaacaccccgggatccatcagccatccagatatcttctgcttttgtaacaagctgaacatttgggggcatggcaaggggggtttattttggtatctaggactactttcctatcttgatggaaaggcaagatggggtgtataaaataagacatgtatgtgggagggtatatagcacatttgcctttgaaattgggttgtttacagtaagacaggaagataagtgtaaaattttgttggcataggctgtgggttaattgtctggaagtgccagcatcgaagatatctgtagttacagtattaactaagaatagaactttccatcaactattctggcacacttaaattcttcacagaagttttccatatgtttgtggatgggaagggtgatgtttccatcagattccagctgggtgcccaggccctgactcctggtttcccatgcagtcaattgctaaaacccaaggttatgccataaggccttagcatatgcttgctaccctataaaggtgtcactagcctccctgtcggtttctgataatttggcccattgtgatccagagatgtcggggagggaatctcatctgtcaaggtgaagaaaatgaatactcagcagcctgaagggtgggcttggccaatcaaatttaattttttttaagcataaacgatcatttctagccaagctaacatattttcctggtctgaggtatttttgcatacctgtatgtgaaatgcatttagcatctctgagtgacaagaaagaccaggaggattgagatacatacttaacttactcttcaagctctgcaaatccaatgggcaggaygagaaaaacacatggaataaagaaaacgatgtatccagcatttctgtaattgtttctccttagctcttttccaccctcccggtggtggccatttgaagccaccactaaagcccttccaccttcccttcctacgtcctctctgataa

SEQ ID NO: 712797 - DNA, 615 bp, Homo sapiens
ggataaattgaaaacaaacctaaatatatcagttattatagtaagtataaatggtscgaaaacaccaactaaaagaaaaaaagtagaatactggataaaaaaacaaacaacaaagtcaattatgtgctacttacagaagacataccttaaatataagaacatcaaaatgttaaaagtgaaaggatatgagaaaagacataacacacaaatataaacaatgctgctgtcattatactaatataagtccaggcattgactttaaggcaaaagtcttaagatagggtgagggcattggcaagggcatttgccaatgacacactagaatgcaaagactaaggtaatgctgagagatgatgtaaggcacaatagaaagccagggatatttctgaagaagaaaaggctacaatagcagccagcagtgtcattttagtcttaggaaaagttgttctagtaagtcacataaagagttggcaccacaattcctgtgcccagacctcagaattcacccatcaaaccacagaggtaaaaaaattcccattctaaaccttattcaggcaataaatccaagcactttacacatttttatcactaaaagctgataatctattgaatatt

SEQ ID NO: 712798 - DNA, 615 bp, Homo sapiens
ggataaattgaaaacaaacctaaatatatcagttattatagtaagtataaatggtccgaaaacaccaactaaaagaaaaaaagtagaatactggataaaaaaacaaacaacaaagtcaattatgtgctacttacagaagacataccttaaatataaraacatcaaaatgttaaaagtgaaaggatatgagaaaagacataacacacaaatataaacaatgctgctgtcattatactaatataagtccaggcattgactttaaggcaaaagtcttaagatagggtgagggcattggcaagggcatttgccaatgacacactagaatgcaaagactaaggtaatgctgagagatgatgtaaggcacaatagaaagccagggatatttctgaagaagaaaaggctacaatagcagccagcagtgtcattttagtcttaggaaaagttgttctagtaagtcacataaagagttggcaccacaattcctgtgcccagacctcagaattcacccatcaaaccacagaggtaaaaaaattcccattctaaaccttattcaggcaataaatccaagcactttacacatttttatcactaaaagctgataatctattgaatatt

SEQ ID NO: 712799 - DNA, 615 bp, Homo sapiens
ggataaattgaaaacaaacctaaatatatcagttattatagtaagtataaatggtccgaaaacaccaactaaaagaaaaaaagtagaatactggataaaaaaacaaacaacaaagtcaattatgtgctacttacagaagacataccttaaatataagaacatcaaaatgttaaaagtgaaaggayatgagaaaagacataacacacaaatataaacaatgctgctgtcattatactaatataagtccaggcattgactttaaggcaaaagtcttaagatagggtgagggcattggcaagggcatttgccaatgacacactagaatgcaaagactaaggtaatgctgagagatgatgtaaggcacaatagaaagccagggatatttctgaagaagaaaaggctacaatagcagccagcagtgtcattttagtcttaggaaaagttgttctagtaagtcacataaagagttggcaccacaattcctgtgcccagacctcagaattcacccatcaaaccacagaggtaaaaaaattcccattctaaaccttattcaggcaataaatccaagcactttacacatttttatcactaaaagctgataatctattgaatatt

SEQ ID NO: 712800 - DNA, 615 bp, Homo sapiens
ggataaattgaaaacaaacctaaatatatcagttattatagtaagtataaatggtccgaaaacaccaactaaaagaaaaaaagtagaatactggataaaaaaacaaacaacaaagtcaattatgtgctacttacagaagacataccttaaatataagaacatcaaaatgttaaaagtgaaaggatatgagaaaagacataacacacaaatataaacaatgctgctgtcattayactaatataagtccaggcattgactttaaggcaaaagtcttaagatagggtgagggcattggcaagggcatttgccaatgacacactagaatgcaaagactaaggtaatgctgagagatgatgtaaggcacaatagaaagccagggatatttctgaagaagaaaaggctacaatagcagccagcagtgtcattttagtcttaggaaaagttgttctagtaagtcacataaagagttggcaccacaattcctgtgcccagacctcagaattcacccatcaaaccacagaggtaaaaaaattcccattctaaaccttattcaggcaataaatccaagcactttacacatttttatcactaaaagctgataatctattgaatatt

SEQ ID NO: 712801 - DNA, 760 bp, Homo sapiens
aaaggcaaataggaataactgataaaaaagagaaggaaatagtgtttcagcttgagtgaagagacagaatttggaataaatgtatggtctagtttttcaactgatcaataggacgattttcctcagctaccgatagctgaacaacgaaggcatcatcttcattcactcaatggatattttctgaaccgctccccccaccctgccacccactatgctgggatctgttctgggcagtggaggagcagaggaaggaagaggagttgggatccaagaggttgaagggtcaaattatacctggaaacaaggtaaggacttgcagcctcaaaacatattctgtctctaaaatgtttttgttgaccttgaaagtccttagactttaagtcttaaacattaaacatttatttaaggatgaaagtattttgtactattcattagagtcaccaggtcatatcaacatcccatgcctcaagaagcaggctactgtatttgttgaatatggacttgggagccagattgccttggtccaaaccttcactctgctattgatcagttttgtaagagaaaccaaggtacttaacctctctggaattcagctttcccatctataaaatgagaggaataataatcatttytacctcatgcagtggtttgggaattaaatgagttaatatgtgtaaagcactttagaacagtgtctgctacattgtcagcagtcagtaagggttgcatattattacagcaaaaatctcaggataatcat

SEQ ID NO: 712802 - DNA, 2685 bp, Homo sapiens
taatgaagtggcgctgccccgtcagacctcatcagcagtcctgtgcaggcagaatgaaatcactcctattgaccccctggcatatttatagcctctctctttctgctgagactggtagttttcaccttcccttccctgtgttgtgtttattcagcagcacgctaaatcacacccgggcacaagtggagcattcatcaggaaccacgagcccctctttcagtctgccaaacctatccaattactggggctggaagagcctgcacaaacccttctgccaggcaagttctcttgtttgcaccctctaaaaataataccttctgagctccgcacgcttccccatccaatcttcacattgactttgaactggcagagcactcatttattcttcattggctttgtctccgagatcccccttttcttcttaaacaatgagaaagagatgctgcatttctttctggaggggatgggagaggatgtgggtagatccacttcccattcttttctctattttcttggctacctcttcagatgtgcaagttgtacagtcaggttcttctgaaggacagctgcactctggtcccatgctgccctctgtctttctgtttcttgctaaagatgttacagatttctttaacaagcaagctgggagaaacagttaaaattactggaaaaattgtgtcacttcgattgaaagtcataagagctacatccaggcattcctttaaaagttgacagatgatagtaaattgtttaaacgtatgtctctcttaacatatatatattaatttgttaggagttttggttttttaccaatatttttacattttctacttttcttaatgtatcctagtttttagattagaaaaaaagcaaagattaatagtattagagctaaatctgtggcttgcaatgctttctgaagcttattacaatggaatatttatgatttaggattttttgaaaattattagagagttgtataacagcaacaaaacctacctgggactcagaaaacccagattcttgtcccagcatctttccctctaactagaattgtgaccttgtaagtcattaatcactctgggctttagctcccttatctatggttctgtctagagctaacacatccatacttacaagcataggaccgaacaaaggaagccagaccaaatgatcatttgattaataaccaagctatttatgagacctgggacaaaggtttattacttcccttatccccagagactaatgcataatagctggtaaagccacaggagtaacacacaaagcatacggaagacacctagatcaagcatcaatcaaccttacagggtgtgctggtacatacttaacgagttctaaaaaaaaaaaaattaaacttatttgtrgcctttgccaatttctgtgatgtaaatatcctccaccgtggtaaatttcagctaccatcttgatttcactgatggaagagctagaaaaaaatgctaaataaattcttaagagctcatacaagggcacaccccacctccttccagagatcaattgggctttgagtgggaaatgatagaatttcattgacagccagagatataagatgaagacaataaagaaaaggagcttatcttaatagagttgtttcgaatacttctcaaaaatgtcatagcaatatccctaacaacattgaaaaaggagtgggaagtattttgatgcctccaatctgtctggatatgtaatccaaagacaacttagaagaaaatttatttaaaatttcaaagtaaatttaaaatgtaaactttgcattctattttggggatatctgggatgattttaatacaaaaatcatataaaaataataaaatcatataaacattctttgcaaattggaaaaaaagctttcatatactcctagcataccaacatgtaatttcaataaaagactgtaaactcaaaccacaatttgaaggatttagaatggtttttcccataaaggaaagaagagtggaaggaaaggagagaaggaagggaggaaagaagagagatgggaagggagggaggcaggcaaaacaaactatataaaaacagtatcacatggaaggagagatgattagaaaggtagatgccataattgggaaattcttgttatcactaagctcaccatcaccctccatggcaaaaaggttccaaatttctgagctcactggctcactcatgaacactttttcatttaagttattgcctatttaggcaaaatttgaagaacaacagaggaggtattataaaagccaccaaaatgactgtgttaacgggagtaagttgagagaccacaatgatagtgcgaatcaaaaacagacataatgaattatgaggagataagagctttagtttagaagaaattaataccctaatggcatgaatatgcttagagagggaaaatgagcactaagctagaggccttgctgcctcaattagaaagggaatattttaaataatttggacgaatggatcaaaatttttctgaattgatgttggaccattcactttaatctcataaatattcatgtcacatctgtgagtacaaaatcccaagtggaacagaaattgatgtaagaaaaggggcaggcacaggaagtgtggtcaaaaataaagataagatcatcaccctaaagaaggtaaggatataacaagggt

SEQ ID NO: 712803 - DNA, 1140 bp, Homo sapiens
cctcgtgttctttttttcctttctttttttttttttttttttatgagacatggtctcactctgtcacccaggctggatcttcgactaaggaaataagagctttcatcatatctttcttgtatgtttctgtatttctgaaaaaaattatagtaaacatgaaacatttattgctgagaaagataaaaaggttcagttcctctgttggaatcttatttttcttatgtatttaaatcacatggtatattctaagttaacacatgcatttcagaatgctgagaccatggctgattgatgcctgacaatgcataatggacatctcatgagaaccagggtcagcctacgtgccagtgatgctcctgatccaatcaagaagtctccagtgtctcactcttcacatcatagcctcctttgtctgatgtcctttatcgccagctgctttcacctcctgacacaacagttgctcattaccacaagctgtgccatcacttataatattttggaaatatctaacaccacactctaaagcaaagctcttctcactatgcccttgcatctcctcatttggactttatctagacttggaaggcgatctgcttctttcctgttgaccaacaatcttctagtctcattccctttccttttcagccaagctcctgtgaataaacagaagcttaaaagatccaatccttcaggatgaatcccaagcggctaactgggcttaaatttaaaatagagccaaacagccatttcctgactagaggtgacacacatgccctgagttccctgaaaacacacacctttttaacttcaagaccttcagagcttacctgaaccaaccaatcagaactcagcaagtttgaatccttcatttgcataaatggacctgattgggaacatgggtggaaacttttgctacagaacttgaactctctctttgttttctggaacgcacctttgttttacactaggggctgtgtctctccagtttgcaaactgttcgctggaatraagtctctgcttcaaattcctttgcaaagaacttttgttcaagatcccaagttttgtcacctttaccacttttcttccaaaatgctaaactcctttaccccattattatttcattcaacaactctccaccat

SEQ ID NO: 712804 - DNA, 647 bp, Homo sapiens
ggcaagacatagaaaacaaatgttatgactttagaagaaatacgtacaattttatttgtatataataggattatcctcaaacacaatccaaaaacatctacaaataaactatcagacctaagagttcagcaagatcattggatatgacattaacaagtaaaaactgtttttcgttctacatgccagcaacaaaatgcctaattttattttaaaagcaaagctccttaaaatgacaagaaagtataagttaaaaataaatctaacaaaagatgtgcaagaattgtgtagaagaaaaataaaatgtcattgaaagaaattgaagaagacagacttactattgtaaagatgctaattcttccaacattgatttatagatcaatgcaattccaatcaaaaccctaraagagttcttgatggaaactgaaaggatgattctggaaggcatatggaataacaaaaatccagaaataacctagatcatccaaatagcaagatggtattactgtatactgctcagggataacatattgtatggttggctcaaggattaacaacttaccaaagagacaaaaaacccgtatgtataagcagtgtcattgctcatggctgcagaaactatggcttctcagtaatagtcctgggcaact

SEQ ID NO: 712805 - DNA, 2269 bp, Homo sapiens
  misc_feature 613: n = A,T,C or G
cacatacacactccttgtcttggatcttaaatttacccaaaacttttaaatttgtattctttcatctttcttttactttattaaaaaatatttctaacattatgaaatttatttggtataaattacttttccctcatattgacatataaatgtcccagagacaaaaaagtttttctttgtggaataacatttattttactgtattattatctccttatagcctgtttcaacaccatagaacagaatatcattgaatgctatcactattctaaaatctggtaaataaagtgattaatacattttactgaatgttttacttttgttttgtttttgagatgaagtctcactctgtcatccaggctggagtgcagtggtgtgatcttgacactgcaacatccacctcccaggttcaagtgattctcttgcctcggcctcccaagtagctgggactacaggtaagcgccaccatgtctagttaattttttgtatttttagtagagacagggtttcactatgttggccaggctggtctcgaactcctgacattgtgatctgcctgcctcagcttcccaaagtgctgggattacaggcatgagccactgcacccagcctnaatgttttacttttaatatgtatgtataattacaattagttaaatttctgttaaagaagatgaaattcttgtgttggagattctgaaatgttttttcactgagattacagtgcttctgtgtatgtggaagagcaagacagaggggcaatacagagagagaggatgcctgtttgtatgtgtgtttgtttaatggtaaagatttttagcatttctaaaacatggtgatattaatataaattctgtaataattttttcccaaactatctcaagggcatttttccacaggtctcataaatagttgaatagcaaaatgtgaactccataaatttataggaagcacaactaccacagattttaaatcaggaaaatcatgaactcatagagaatagcagagtgagactaagattttgtaacgttaagaaactttaggtcaggcgaagtggctctggcttgtaatcccagcactttgggaggctaaggtgggcagatcacctgaggtcaggagttcaagacaggcctggcctacatggtgaaaccacatctctactaaaaatacaaaaattagcctggcgtgtgataggcacctgtaaccccagcaactcgggaggctggggcaggagaattgcttgaacccgagagtcggaagttgcagtgagcygagattgtgcccctgcactccagcctgggcaacagagtgagactccgtctcaaaaaaaataaaaagcaattttaaacaacctctgacattattaggacaaatatttgccggttactaaactacattgttaaaattttaagaatattattctacaaaagacatttttacaatatggatacattttatttaaaatacctagaccaggggttcccaaccccagcgccttcagaataaatccgtgctcctcactgaggttcgaagatcctatgacagaggtccccaacccccaatactggtcacagcctgttagtaacacagcaggaggcgagcagcaggcaagcgagcattactgcctgagctccacctcctgtcagatcagcaggggcactagattctaataggagcacaaaccctattgtgaactgcacatgtgagggatctaggttgtgcactccttatgagaatctaatgcctgatgatctgtcactgtctcccatcacccccagatgggaccatctagttgcagaaaaacaaggtcagggctcccactgattctacattatggtgagttgtataattatttcattatatgttacaatgtaataataatagatataaagtgcacaataaatgtaatgcacttgaatcatcccaaagccatctccccaccccggtcagtggaaaaattgtcttcaacaaaaccagttcctggtgccaaaaaggttggggaccactgacctaggcaaaataaatgctcagaagtttgatatttcagaatatgtaagtggaagaatgtgaaagtattcatatgataggaaaatggcaaatctttataaatatgagttgataagctaaatctatttttagtgaggcctgtgttatgaaatattattgtacgtaatgaaacagttacccaatctcttctataaacccataaggcgtggaaaaactaaaaggtaaaaaagaatctgcgaaaccatatttatgaaatttgttca

SEQ ID NO: 712806 - DNA, 1086 bp, Homo sapiens
ttgcaaatctttgctatttatgttctttttttaatttgttatttttcactttatatcctttaagattgtttatatttaaatttttttattttaaaaagaataaaacagctttgactataaacacacttgaccagaaagaaagtataagasagcatgattagtgagatcagtcaaataggattggggtagaagctgttcaaagacagttatttggatgttgtaaatggagctatagacacctacccgtgactgtaagaaacatgttggtcacagcaaggccaaaagaattccgagccacacattcatatcttccctggtcagggaaccctgcgtcgtagatagtcagcgtgccttcatcatccacatggaatttaccactctcagtaatctgcacaccttcctagggagcaaaaaagagttgccactgaatgagtgtggttccttaaaaaatcatttatttactttttaaaatgtgggttcatttattcaacagatatctattgcacgtttgctgtgtgtcaagtactggaggagatacatgaatctagtggagagaaggaagagaggaaaagaggtttctaggaagtgtggtttttctctctctctaattattaaatatgataaccaaaagttcaatcatgtaattatttaacataataataattttaaaattatcactccaatgaatggatagacacaattgattcatatattgcttactgctaaagataattctgacaactacatttggtcgggcacagtggctcatgcctataatcccagcactttggaaggctgaggcaggaggatcacttgagctcaggagttcaagaccagcctgggtgacatagcaagaccccatccctacaaaaaaaaatagaacaaaagtcagccaggcatggtagtgtgtgcctgtagttctagctactcaggaggctgaagcaaaagggttgcttgagtccagaagtgtgaatctgtaatgaactatgatcatgccactgtactgtagcctgggcaacatagcaagatcccatatctaaaataaaaaaaataaaaattaacgaggagaagtatgctcacaaatcc

SEQ ID NO: 712807 - DNA, 1086 bp, Homo sapiens
ttgcaaatctttgctatttatgttctttttttaatttgttatttttcactttatatcctttaagattgtttatatttaaatttttttattttaaaaagaataaaacagctttgactataaacacacttgaccagaaagaaagtataagagagcatgattagtgagatcagtcaaataggattggggtagaagctgttcaaagacagttatttggatgttgtaaatggagctatagacacctacccgtgactgtaagaaacatgttggtcacagcaaggccaaaagaattccgagccacacattcatatcttccctggtcagggaaccctgcgtcgtagatagtcagcgtgccttcatcatccacatggaatttaccactctcagtaatctgcacaccttcctagggagcaaaaaagagttgccactgaatgagtgtggttccttaaaaaatcatttatttactttttaaaatgtgggttcatttattcaacagatatctattgcacgtttgctgtgtgtcaagtactggaggagatacatgaatctagtggagagaaggaagagaggaaaagaggtttctaggaagtgtggtttttctctctctctaattattaaatatgataaccaaaagttcaatcatgtaattatttaacakaataataattttaaaattatcactccaatgaatggatagacacaattgattcatatattgcttactgctaaagataattctgacaactacatttggtcgggcacagtggctcatgcctataatcccagcactttggaaggctgaggcaggaggatcacttgagctcaggagttcaagaccagcctgggtgacatagcaagaccccatccctacaaaaaaaaatagaacaaaagtcagccaggcatggtagtgtgtgcctgtagttctagctactcaggaggctgaagcaaaagggttgcttgagtccagaagtgtgaatctgtaatgaactatgatcatgccactgtactgtagcctgggcaacatagcaagatcccatatctaaaataaaaaaaataaaaattaacgaggagaagtatgctcacaaatcc

SEQ ID NO: 712808 - DNA, 675 bp, Homo sapiens
catcctggtatctgctttttggaggatccatatgaacacaagcagtagaggaaggcctcggtgaaaaggtgatgttaaattccattgagcctaaagctgtcttcttatatattttaaatttagtctaaagatttctctatgcacagggaactgtatcctaactggatgtgtaaacagactgtaacctactcttgtgtcaacacagaatattggccaatcacaggtggccaactgttcaaatcatgttcaataaggcaaacrttaagctgtaaccaacccagatgtttctgtacctcatttcctttttctttaagtcactttcctttttctgtccatctatgtcatcagacaacgtggtagccccagagttgttctgaacctattctggttttgggggctgcctggttcacaaattgtttttcccccaattgaattctgttaaatctaacttgtctatcattttccttttaacactgacatttgaacaagacatgcaggaggtgaaggaagctagccaggagggtatttggagaaagaacactccaggcaagcaaatagcaatagcaaaagcttggagaggaaggagtgttctctgctgtcctcagagagaacagggtccgtggagaagtgagtgggtcgggtcatagcaggcaaggccaaagaggtgggtaatgg

SEQ ID NO: 712809 - DNA, 651 bp, Homo sapiens
gaaaaaaaaaagacctaatagaattaataggtatgaacaatttaataatttaattagaaacaacagaagaaacaactgatgagagattagtgaaataaaraagtgatttttttaaatgtccagaattctttagctttttgcttctaacaaatagaataaagcagaagtgaagctctacagttttggagataaggtcatagaagtcactgtagcttccagtagcttcttgctgtttctcttggatccctgtctggggaagccagctgtcatgtcatgagggcactccagcagccctgtggagaggccaggtgacaaggagctaaggcgttggggcaagccaaggccttggaagcagctactctagccctggtgatgccctcacacgaccacagccctggctgacggctccttgtgagacgctaagccagaaccaccaaaccaagccacgcctggactcctgactctcagaaactgtgaaatgatcaacctttgctgcattacgctgctcccttttggagtaatttgttatgccacaataaataactaacacaagattaatttgaagaagttatcccaaatgcagcacagaaagacaaagaaatagacgtgaaatgacattaaatcagcattctagaaaaagtaatgggaaaa

SEQ ID NO: 712810 - DNA, 651 bp, Homo sapiens
gaaaaaaaaaagacctaatagaattaataggtatgaacaatttaataatttaattagaaacaacagaagaaacaactgatgagagattagtgaaataaagaagtgatttttttaaatgtccagaattctttagctttttgcttctaacaaatagaataaagcagaagtgaagctctacagttttggagataaggtcatagaagtcactgtagcttccagtagcttcttgctgtttctcttggatccctgtctggggaagccagctgtcatgtcatgagggcactccagcagccctgtggagaggccaggtgacaaggagctaaggcgttggggcaagccaaggccttggaagcagctactctagccctggtgatgccctcacacgaccacagccctggctgacggctccttgtgagacgstaagccagaaccaccaaaccaagccacgcctggactcctgactctcagaaactgtgaaatgatcaacctttgctgcattacgctgctcccttttggagtaatttgttatgccacaataaataactaacacaagattaatttgaagaagttatcccaaatgcagcacagaaagacaaagaaatagacgtgaaatgacattaaatcagcattctagaaaaagtaatgggaaaa

SEQ ID NO: 712811 - DNA, 1423 bp, Homo sapiens
tgatcctaggaagcggtgtcaccttggcagaaagaatgcagaaaacacctacgttgagaaatgactcagggatgttcctgctgcaacagagcagattgcccaggagggaggtcagctcttttgaatcaagattctgataccctcagccagaagaaccagaatggaaaaacagacgcctgatcaaatgccttctgtcccagtccaattcaaggaagtcttaactcttataatagaaatggaacattctaggaacatcttccaggttgcagcaaactctggggatggaatgtgtgaaggagtttgctgagggatatgatttgcaaattggttgctctaagtattatatagtaaccagcatcttccagaacacagccagaaatacactcacttaagtacattcatacttgtcagtccttgtgtcctgattttctacttgaatagcttcaaggctggacaataagaatagattgtttcatgagaggcatgtgaattaattaagaaatatgttacaggcaaattagactctgaattatttttccctctctttctctttctctttttcttcttctttcttctccttatttttcctcccttatcttccttgaacaaacaagtactgaaaatctattgtatgttaagcactaccccagttgaagttgactccatgatttatgaagcatagtccctgttcccagggaaataaacatgtaaatgacacatgacaattgcattatgatacagtaagcacttttgggtacaaatagctgagaggagaaaggaatttttaaggaggagttgacatttgtgctggttctcaaagggcggtaggaattagacaagcaattaaataaaagagagaggggaggtagaagaaagacatgccagggagagaccacagcctgatgctttgggagtctgtgtacttgcgtgcttactatgacctatcaatgtgctaacatgattgcatctaatcatgacataatagtccacatagtgtggacttgggagtcagacctactctgttcaattgctgttttgccctttgctggttgtaccaccttgggcaagctgattcacgtctctgagccttagttgtctcatctttaaagtggagatgcacctgtgcatggggtggtgtgcggtgtagatgcattcgtgtttgggatgtagtagcacggtgctggattacggtaagcactcaggtggtggcacgtaggaggtgggatgctgggtgacataggatgtaagggtcatttgtaaactstgaaagtattatcaaaatgcaatgggagtggcatttggactgtttaatatttccagtgcagttcctcagaagccttggctggctgcactctgctcagtaaacatttgacaattgttgcttagtatctgggctgtgagccaggaggggcccccgggaaga

SEQ ID NO: 712812 - DNA, 1423 bp, Homo sapiens
tgatcctaggaagcggtgtcaccttggcagaaagaatgcagaaaacacctacgttgagaaatgactcagggatgttcctgctgcaacagagcagattgcccaggagggaggtcagctcttttgaatcaagattctgataccctcagccagaagaaccagaatggaaaaacagacgcctgatcaaatgccttctgtcccagtccaattcaaggaagtcttaactcttataatagaaatggaacattctaggaacatcttccaggttgcagcaaactctggggatggaatgtgtgaaggagtttgctgagggatatgatttgcaaattggttgctctaagtattatatagtaaccagcatcttccagaacacagccagaaatacactcacttaagtacattcatacttgtcagtccttgtgtcctgattttctacttgaatagcttcaaggctggacaataagaatagattgtttcatgagaggcatgtgaattaattaagaaatatgttacaggcaaattagactctgaattatttttccctctctttctctttctctttttcttcttctttcttctccttatttttcctcccttatcttccttgaacaaacaagtactgaaaatctattgtatgttaagcactaccccagttgaagttgactccatgatttatgaagcatagtccctgttcccagggaaataaacatgtaaatgacacatgacaattgcattatgatacagtaagcacttttgggtacaaatagctgagaggagaaaggaatttttaaggaggagttgacatttgtgctggttctcaaagggcggtaggaattagacaagcaattaaataaaagagagaggggaggtagaagaaagacatgccagggagagaccacagcctgatgctttgggagtctgtgtacttgcgtgcttactatgacctatcaatgtgctaacatgattgcatctaatcatgacataatagtccacatagtgtggacttgggagtcagacctactctgttcaattgctgttttgccctttgctggttgtaccaccttgggcaagctgattcacgtctctgagccttagttgtctcatctttaaagtggagatgcacctgtgcatggggtggtgtgcggtgtagatgcattcgtgtttgggatgtagtagcacggtgctggattacggtaagcactcaggtggtggcacgtaggaggtgggatgctgggtgacataggatgtaagggtcatttgtaaactgtgaaagtattatcaaaatgcaatgggagtggcatttggactgtttaatatttccagtgcagttcctcagaagccttggctggctgcactctgctcagtaaacatttgacaatkgttgcttagtatctgggctgtgagccaggaggggcccccgggaaga

SEQ ID NO: 712813 - DNA, 954 bp, Homo sapiens
ttttccatttatggtatcagtataaaatttccttttaagattaatttatattaaaaagtgcgtatttaaaaataattaatagaataattagtagaagaggtaacccatatatttggcaacaatcatgaaggttgtacttaaatctgaagtttgggagacattgaatgtatccaatcccatcatttacaaataaagaaactgaagcctggttgttaagtcacctgctcagggtcaccttatggaaacatccatctcctatctctctcagaacaatgttcttttacctctaaccggttactcatttgcactttgaagccagttagtatgaatgcaaattattgtacttttaacattcatgaattcagagccagaaaatatcctggtgacatttccacagacatggttagtagagattgatgagcaatttgaaacaaaatagaggggccattcacatctgaagcatgaatcttgggtgattagtgacatattggtttcattaagtcrtaaaactacccaacagaaaaaaatatatttggcagtataccctgttgggtatatttaagcacagtttgaatacgaatatttggtatttcatcatgtagttattgctgttttcattaggattctccaggatctcacaccgactaaaagcaagccaattccttcatgcctagaacctcttcccacattagaagtttattaatctgcgggggttgatcagagagctgttgggaaagtgtgttaggaaacttgagctctgcccaccttagtagggtgctggaatgttacagagttgttcattgctgttgatacctcctttccaagatgcagtattacagtgacttacatgatgactaagtgtttggctatcactctaaaggggcagaaatatttgtatcatttaacaactaaaactaaaactagaaaaacatccatttggatcacagctcaaca

SEQ ID NO: 712814 - DNA, 1323 bp, Homo sapiens
aggttttttttgtttgtttgttttgttttttccccgagatggagtctggctgtgttgcccaggctggagtgcagtggcacgatctcggctcactgcaacctttgcctcctgggttcaagccattctcctgcctcagcctcttgagtaactggtatcacaggcatgtgccaccacacccagctaatttttttgtatttttagtaggaagaggtttcaccatgttggccaggctcgttttgaactcctgatctcaagtgattcacccgcctcagcctcccagagtgctgggattacaggcgcacaagccactgcacctggcctttgtaagtttttttttttttttagagatttttcttctgttaggtaatactttggggttaggttaggtcttgtaaaaatgaacttttgcttttcccacagtctcgtagcctcttatttctatttaaaaggacttactacagtttaacgttgttagtcatttttgcayatattaatacctgtcattgattgctttgggctcacagtgtagatctttgcatctcctgtactgctttgcaatccataaacacttctcaggtaatcaaggtctctctttctcattagttatattaagtggttttggtaaagtgttgaatatcatttctcttgtttcttgatcttttaggaaggtgcttcaatattggatattcacacagagcccagtttttcaagtttgctttcacagtcatcgtgtgctgacatgggtgttccacttcctgcaaaaaacttaatatttaaagatggtgtcttatcagaatggagtggacggtcaccttcctcacttcttattgctaatctccatttgcaataatttggttacaccatttgttgctcacactttctgccttttttctttcttaacgttagctttatagtgtcagccactaaaaagcatcctgctgctgcagtgcaattcttgcttaactaatattaaaagttggggaacatattcatgttttctgaagttttgctcattattgcacatcttattgcgacaaagtgctttttagcagccagcactgtattttttaccttgagacaatctgcatttcttttataaaactaagtatatactttataggctttatgatgactgttatgtttataagcagtcactatgaaaattgcaatggtaattttatatgttagtttatcaaacataaatcttgtttaattttatattttgttacctatactttgggggatcaagggaagagatggaactcttcctctgaaaaggcttcttggtacttaaagtagtaaaactataaaacaataaacatc

SEQ ID NO: 712815 - DNA, 1323 bp, Homo sapiens
aggttttttttgtttgtttgttttgttttttccccgagatggagtctggctgtgttgcccaggctggagtgcagtggcacgatctcggctcactgcaacctttgcctcctgggttcaagccattctcctgcctcagcctcttgagtaactggtatcacaggcatgtgccaccacacccagctaatttttttgtatttttagtaggaagaggtttcaccatgttggccaggctcgttttgaactcctgatctcaagtgattcacccgcctcagcctcccagagtgctgggattacaggcgcacaagccactgcacctggcctttgtaagtttttttttttttttagagatttttcttctgttaggtaatactttggggttaggttaggtcttgtaaaaatgaacttttgcttttcccacagtctcgtagcctcttatttctatttaaaaggacttactacagtttaacgttgttagtcatttttgcacatattaatacctgtcattgattgctttgggctcacagtgtagatctttgcatctcctgtactgctttgcaatccataaacacttctcaggtaatcaaggtctctctttctcattagttatattaagtggttttggtaaagtgttgaatatcatttctcttgtttcttgatcttttaggaaggtgcttcaatattggatattcacacagagcccagtttttcaagtttgctttcacagtcatcgtrtgctgacatgggtgttccacttcctgcaaaaaacttaatatttaaagatggtgtcttatcagaatggagtggacggtcaccttcctcacttcttattgctaatctccatttgcaataatttggttacaccatttgttgctcacactttctgccttttttctttcttaacgttagctttatagtgtcagccactaaaaagcatcctgctgctgcagtgcaattcttgcttaactaatattaaaagttggggaacatattcatgttttctgaagttttgctcattattgcacatcttattgcgacaaagtgctttttagcagccagcactgtattttttaccttgagacaatctgcatttcttttataaaactaagtatatactttataggctttatgatgactgttatgtttataagcagtcactatgaaaattgcaatggtaattttatatgttagtttatcaaacataaatcttgtttaattttatattttgttacctatactttgggggatcaagggaagagatggaactcttcctctgaaaaggcttcttggtacttaaagtagtaaaactataaaacaataaacatc

SEQ ID NO: 712816 - DNA, 648 bp, Homo sapiens
taatgactggcatgggtacaagagggactcttgagagtggcatgttatgattttgccaaacctgacatataaatcttgagtttcactctaatgctggatgctgaagaggtcacaaaagatctgcttagcattcctggcaccaatatcaatgggtttctcagatgagatctttaaaatgctgtatggccaatgctgttcatctcaggatataaatggtccaagaratctttgagtacagacacctaaagtggggagaggggagaaagccagtgaaaggccacttttgtaagctgtttccttccatctgtcctggtaatcacctctcccaattattatgacatataggtgttatgttgataatcgtggtaggactaaagtggaagaaaactgtaaataacttctttgagatacaatgatatgaaacattgttgattgcatgttatcaggaaatagcataggctaatcaaatattcaaagaatctgcaggctagattattctctttcattactgtgttattccagtgacattatgcaaagaaagcaggatggggcagggtgccaagacaaataaattttttttgcagtttttagcatggctgtgaatgttctccatgacatgcttaccttttcaaactcatgctcctcctc

SEQ ID NO: 712817 - DNA, 599 bp, Homo sapiens
ttaattatttttgttattatattcagtggtcacttatatgaatgaatcagtttatttcctcttagtgatagctgttgtttggggtgggggtggagagaaactctgaattataagattttctgacattattggtgtaaatacgcacaacatggccaattttaagctccagatgctttaacaattgcttagcaaaagtcctggaaataatatattcttgcaagatgatgtgagcaagwtcttgcacagtagtctttgctatctattcatttattttttccttctagaaacaattttctctttgaactaaaatctttaatattaaatatctttactataatatttaatatttggtcatagagataaatttgtgaggctagatatgattatttccattatttataagtaaataaagatgtctgaaacataaataatatgatccatatcttgaagttaaaaatcatagagttgagtcttaaagcaaatttcgatttccatcctttttttttttaaccacatatcatagtctgaaagattgcatccacaaaatttgcatgttgaaacctaatcgcaagtgattagattaggagtagtgtttttgt

SEQ ID NO: 712818 - DNA, 599 bp, Homo sapiens
ttaattatttttgttattatattcagtggtcacttatatgaatgaatcagtttatttcctcttagtgatagctgttgtttggggtgggggtggagagaaactctgaattataagattttctgacattattggtgtaaatacgcacaacatggccaattttaagctccagatgctttaacaattgcttagcaaaagtcctggaaataatatattcttgcaagatgatgtgagcaagatcttgcacagtagtctttgctatctattcatttattttttccttctagaaacaattttctctttgmactaaaatctttaatattaaatatctttactataatatttaatatttggtcatagagataaatttgtgaggctagatatgattatttccattatttataagtaaataaagatgtctgaaacataaataatatgatccatatcttgaagttaaaaatcatagagttgagtcttaaagcaaatttcgatttccatcctttttttttttaaccacatatcatagtctgaaagattgcatccacaaaatttgcatgttgaaacctaatcgcaagtgattagattaggagtagtgtttttgt

SEQ ID NO: 712819 - DNA, 599 bp, Homo sapiens
ttaattatttttgttattatattcagtggtcacttatatgaatgaatcagtttatttcctcttagtgatagctgttgtttggggtgggggtggagagaaactctgaattataagattttctgacattattggtgtaaatacgcacaacatggccaattttaagctccagatgctttaacaattgcttagcaaaagtcctggaaataatatattcttgcaagatgatgtgagcaagatcttgcacagtagtctttgctatctattcatttattttttccttctagaaacaattttctctttgaactaaaatctttaatattaaatatctttactataatatttaatatttggtcatagagataaatttgtgaggctagatatgattatttccattatttataagtaaataaagatgtctgaaacataaataatatgatccatatcttgaagttaaaaatcatagagytgagtcttaaagcaaatttcgatttccatcctttttttttttaaccacatatcatagtctgaaagattgcatccacaaaatttgcatgttgaaacctaatcgcaagtgattagattaggagtagtgtttttgt

SEQ ID NO: 712820 - DNA, 1308 bp, Homo sapiens
gcttgtgtctcttcaacagtcttttctgccattgaataaatagtaacatcattcttgaatttctaaaatactatgaaattcattgacatgaaatattttgtaaaagattcatggtcattcaacctttgaaatttgtgatggttaattttatgtgtcaccttgagtggaccaaaggatgccaagacagctgttaaagcattatttctagctgtgtctgtgaggttgtttctggaagagattcacatttgcatcagtaggctgagtaaagaagatcyacctcaccaatgtgggccaacagcatccaatccaaatagaataaaaaggaaggtaaaggaagggtacgttttctctctttcttcttaagttggggcacccatcttttcctgccctcagacgttggatattggagctactgggtgtctggccttcaaactaggattgaattacaccaccagccttcttggttctccagcttgcagatggcatattgtgagactttacaacttccgtaattatgtgagctaattgccataacaaatcttcttgtatctatatctatagctaactgtctacatatatggattgcatacacacacacacacacacacacacacacacacacacaggcacacgcacagagatatacatcttattatagacagatagatggatagatatgcccatatagatatatatgcccatatctctatctatctatctatctatctatctatctatctatctatctatcttatctatcttttattgtttctttttctctggaaaatcctgaccaatacagactctattaaataaacccaaaagacttgcatatcttaagatgagtttataattcttcaccttgagaaaaagtggacaaagtgatgacacccaacctcactgataaggaatcccattatatggaaaatataatccaccaaaatgagattccttatgatagaaataaagttatatgtggaaagggaaacagatacatgtggacagaaaatagtcatgcatggaaggggagacagcatagagggataaactcagaatgaaaattaaagcctaaggccagctaaacccagtctgctgttatgtaagtcttgtatattttttgtgagggacacaaaaaaagccagcagtttacaaactgcatctggtttacatgaatttctttaaaaatgtaacactaaatcctactaaatattagagaataattccatatacatgcatccaagcacatacatatttcttacacaaccaccccaccccccactcacccacacccaccactaacttgggcca

SEQ ID NO: 712821 - DNA, 643 bp, Homo sapiens
ctggcaacacatcatttgcaggttccttctctgttgctcatattatgtgacagctcttttgttcacagctcccccaggaaataataggtgggttggctggggagtgtttgacctcccccaaagtttcctgttgtaatgtccattacctcctttaagcctacaaaagagaattcagctgacaaagaaaaagcacaaagcatcaaaatactgaaactaaagctagraagttacagataatgtcaatgcaagatgttattctgactttgtaactcaggactaagaaggcagatagccctcacattttagactaatcatgtttagttaggacttttttgagtaatggtttatttggaggagggagtgattagtatccaaatgttaagggagaagtggcatgggcaaaaatccataatttttaattcgattcaagttccagatattaggtagctgccaatgtcatgccactacccgtatcccctcaggccttacatttcagtaggaccttcaacagtcagtatcactagccatttgcctgagggctttctttggctgtaagccccactctgtcttcagcacagaagactgagttctaggatcagtaccacagttgaagctttcaggtaatgagtgaatggaagtggtg

SEQ ID NO: 712822 - DNA, 638 bp, Homo sapiens
aaaagaagtattaaagcatcaagaagtatttatttaaaagatgcgtggttcaataggacatgggctttgaagctcagtgggccaagaggaacatggcaaaagaktaacctggggctgtaagcagggtggataattcagatgtcatccaccactttagtaagtctgcattttatttcaaccacactgagatgttattaagggattttaagcaaggaaatgacgtgatcagatttacatatctggaagatcattctggctgctgtatagagaatagtttgaggtggtggtggtgaatacaagagtggaagcaggaatctcagagagaaacttaacagcagtcaaggcaaaaggaaatagacaagtaaggtaatagtgggatggaagaaaggagaaagtctagctatattttgatgtataatgaacagaacctattgaatgttgaatatgtttatgaggaaaagggatgggtcaagaacaaacctcagtttccaagtaaaatatttaggctgtgattttgcttaggttatgtaggtataaaaatgcagtggtatggaagatagcaaaaaatataatacatgtgagcaagagatatggttaaaaattaaacaggagtaagaggctaattattcaatgtcaat

SEQ ID NO: 712823 - DNA, 584 bp, Homo sapiens
gaaatataatttacctgtgttttcccactcccctcagaaagcacctttgcataacatactgtgtggaattctgtcatatgagaaagaaatttatttcttatagattttctataatctcttatattagagtaacagtattttatgatgtgtacattccttttactaccattaatcctttgatagacaatcctcttagctgtgcaggataaagctcactgtccctttcttatgtttgaggactctgagtttcaaaatcttactagttctacaccagtgaagggtagaagcaagccttttgagtctgggtcttctgaagccaacctttagctttgttttacccttttccatgaattacatttttccatgaataaaattaarctatagtatcaaggaaacttgtttgttaacatgtatcatcaaagagccttcactagaataatatgtggcattaattgatacaggttttgatgggtaatctaaaatatctttgctgaaatactggcttatagaaatcagtgccattgcttttacgatcttttctagtgtgagaacagtcttgcatggtgatgctaattctctccctg

SEQ ID NO: 712824 - DNA, 651 bp, Homo sapiens
catttcttctacagaaaagtaactgaatccctgaatagcttttgcttgtttgtttgtttgtttgtttgagacggagtctcacccttgttgcccaggctggagtgcaatgacgtgatctcggctcaccgcaacctctgcctcctgggttcaagcgattctcctgcctcagcctcccaagtagcagctgagactacaggtgcgtgccaccatgcccagctaatttttgtatttttagtagagatggggtttcaccatgttggccaggatagtctcgatctcttgacctcgtgatccacccgccttggcctcccaaaatagtttttataaaacagaaggatttaaagacttcaattgaataattgagtaaaaatatgcaggaaacttcgaagaaacatttttatcatatttggagttaattggagataaaagatattcataaaataatgtatagaattcgctttaaaaactgcagttttaaaacatkagatataagtaccatttaaatatgattatgactttaaagaattatcttgaaggtattattttaaatggctgtctaatttttgctctcttaaagaagagtctaaatgtagatcttctactcagtataaataaaaggaaaacatggttaaatgccctctaaaataagga

SEQ ID NO: 712825 - DNA, 572 bp, Homo sapiens
tattggttctcctataacctgattacaacctaataaacagtgcccttctttttggccaagtctaatttatcgttttccccaaatcagttactgcttctgtgtcctaaaaaaatgttgccatctcacaccagtcagaatggctattattaaaaagtcaaaaaataacagatgttgttgaggttgtggagaataaggaatgcttatacactgttagtgggagtgtaaattagttcaaccattgtggaagacagtgtggtgatttctcaaagacctaaaaacagaataccattcaacccygcaatcccattgcttggtatatacccaaaggaatataaatcattccattataaagacacatgtgcgtgtatgttcactgcagcactattcacaatagcaaagacatggaatcaacccaaatgcccatcaatgatagactggataaagaaaatgtggtacatatacaccatggaatactatgcagccataaaaaagaatggggtaatgtcctttgcagggacacggatggagctggaagccattatccttagtaaattaatgtaggaacagaaaac

SEQ ID NO: 712826 - DNA, 834 bp, Homo sapiens
ttctctcatcgctcccctgtttaggttctggtatgcacaaaacacatgctcgagaattagctggcacaaacagttgatatgttgcttcatgtaatgtgaatttacatgttcacaggagggcctgtcagggtaactgggttcaaaggagttatactaatgaggaaaactctaggtccttgayacataaatgctggagatatttttcagcagacggatattttggcattccctgaatatgtgtatgcataagttagcacatctggttgacatcttatttggttgggttagccccagttcttcacagattcattttttccatactagtgtcagacaaaatggttaagggtcaaggtgccctaggagaaacctacacataccaaagaggtaggtggcgtcggtcgaaaatcctaaagcaagtgactagcttaaacttagttcacagtgagagatgcaaagaggcaaacagaatcaggagagagttacttacattatcagagaacatcataatttggagctagatggatcagatctaacatcttaaattgtagaagaaactcaacctcagatttactgagacattagtgaagaagcaacggtgtagtaaaaagaacacttgaattttacttgctatgtggaataagtggattaaccttgagtaagttatttaaacttgcagagcctcagtcttcccatctccaaaatggggataataatatagacctaaactgaactatttataagtgaaaatgaaaccatgaaaccatgcaagaaaattcttaacattatgcctgatacatggtaggcacttatttatatttatttatttaagtgaca

SEQ ID NO: 712827 - DNA, 393 bp, Homo sapiens
ccccactgcactccagcctgggtgatagagcaagactccatctcaaaaacacaaaaacaaaacaaaaacaaacaacaacaacaacaaaaaaaactatgccaaatttgattttgactattcaaaattgtatgtctgtgttratgtgaaatctgagatctctctaaatgagatagaattatgactatgggctataaagcaagggagtggagccctaggaactgtatcaggttctcagcagaaagccagcatctccactctggggaagagaatgaccagtggctcctggggagagtatccctctgaagctaccttgactgttgtcgtcagcttctcatacttgaatccaaaaaagggacacaatgaaaatcaattttacatcaaaaattaatacca

SEQ ID NO: 712828 - DNA, 629 bp, Homo sapiens
gtcaggggtgtgggggcagggaaaacatcaggaagaatagctaacggatgctgggcttaatacctagatgatgggttgatctgtgcagcaaaccaccacgacacacatttacctatgtaacaaacatgcacattctacacatgtaccctgcaacttaaaataaaagttaaagaaaaaaacatgtagtaattaattcagaaagcaataagattgaataataattgaagaaaaatcaccaacgcttgagagaaattgtttaaccattttaaaaaatattttttgatggagaagaaaggaataagatggcagagtgtctcaaggaaatcattgtatttttttgaaatttttacaccaaataactatttggaacaacattaccagatggagataatggaacagacttcggtaaatacagagagcatgctagaggttggtggaaagcgggagttcagaaatcaatagaactttgtcaaatgtgaactccattacaaagagaactctttgtcaggggacaggcyactttctccctggatgtcatcttgttagggcactggagagaacattggtaatgttgaaaggaccatcttttggctgatttaaaaaaaaaaatcatactagtctatcacttc

SEQ ID NO: 712829 - DNA, 639 bp, Homo sapiens
tgtgcccactccccaaccttgtgtggggaggaattaaaggctactgagtaaataaccagtagaggctgccacagtcaatcacagtaaaattgccatacttaatttttgaatgtattaatatgattatttttattgttggtgaggtcttgatataatgtgatgaaaacygaaaaggggtacaccatttatagtactcagctaccatgatggtagctggttataataaaatatatctctattctgcaaataaaaagttattagctccaattcttggaccatggacagttcacatttaccattgtcatcactgtgatcatcatcattactgtgaatcgttctcatcaaacagcattcatttggttctctgcttacaaaagatgccgtattatctttctatgtttctcttaaacatgtggaaaataatgcttttggagaaattgggatattgggaggataaacgagcttctgaaggtgttttccattgtgtgccatagatgagctctgaaaagtcaagtatacattgaagttttgtaaatcgaatcaattttaaatgcactagagaactcaaaatttaaaagaaccttgtagtgagtctgtgttgcaaggactccatttgaaacacaggtattcagtcccaga

SEQ ID NO: 712830 - DNA, 602 bp, Homo sapiens
agaaggtggcgtccggagacagcttttgaagaggtgtcagaggagccaagggacggtgggcagccaggttttctgtctctctttcccccaggtctagaccagccttcccccagatgtggtctggggccactctcagcctgtaactggtctccctgtggctgctcttgcctgttcccatcagttctcacccagmccctgagggcgccgaacacctaaatcggcccacgtgctgccctcagagcattcccactgcacctggatgcagccctgcctgatatcccctcccatctgccaccttcagctcatggcctggccccatagtctcttatagtctagtgccttttctggcccttaaacgtgctattccttcccatcttcgagactttttttgtcccatttcctctggaatgttcctcctgtggctgtctctctccttcacattcagtttaaacgttgttcctttacagaggcttccagagaaatgggtgctgcgtataatcccccatcttagcccccattttcttcaaaactctgcaccctttgtctgacccccggtgtgagcctgttcacctgcttagtttttatctcacattagaattgaa

SEQ ID NO: 712831 - DNA, 602 bp, Homo sapiens
agaaggtggcgtccggagacagcttttgaagaggtgtcagaggagccaagggacggtgggcagccaggttttctgtctctctttcccccaggtctagaccagccttcccccagatgtggtctggggccactctcagcctgtaactggtctccctgtggctgctcttgcctgttcccatcagttctcacccagcccctgagggcgccgaacacctaaatcggcccacgtgctgccctcagagcattcccactgcacctggatgcagccctgcctgatatcccctcccatctgccacctycagctcatggcctggccccatagtctcttatagtctagtgccttttctggcccttaaacgtgctattccttcccatcttcgagactttttttgtcccatttcctctggaatgttcctcctgtggctgtctctctccttcacattcagtttaaacgttgttcctttacagaggcttccagagaaatgggtgctgcgtataatcccccatcttagcccccattttcttcaaaactctgcaccctttgtctgacccccggtgtgagcctgttcacctgcttagtttttatctcacattagaattgaa

SEQ ID NO: 712832 - DNA, 602 bp, Homo sapiens
agaaggtggcgtccggagacagcttttgaagaggtgtcagaggagccaagggacggtgggcagccaggttttctgtctctctttcccccaggtctagaccagccttcccccagatgtggtctggggccactctcagcctgtaactggtctccctgtggctgctcttgcctgttcccatcagttctcacccagcccctgagggcgccgaacacctaaatcggcccacgtgctgccctcagagcattcccactgcacctggatgcagccctgcctgatatcccctcccatctgccaccttcagctcatggcctggccccatagtctcttatagtctagtgccttttctggcccttaaacgtgctattccttcccatcttcgagactttttttgtcccatttcctctggaatgttcctcctgtggctgtctctctccttcacattcagtttaaacgttgttcctttacagaggcttccagagaaatgggtgctgcgtataatcccccatcttagcccccrttttcttcaaaactctgcaccctttgtctgacccccggtgtgagcctgttcacctgcttagtttttatctcacattagaattgaa

SEQ ID NO: 712833 - DNA, 602 bp, Homo sapiens
agaaggtggcgtccggagacagcttttgaagaggtgtcagaggagccaagggacggtgggcagccaggttttctgtctctctttcccccaggtctagaccagccttcccccagatgtggtctggggccactctcagcctgtaactggtctccctgtggctgctcttgcctgttcccatcagttctcacccagcccctgagggcgccgaacacctaaatcggcccacgtgctgccctcagagcattcccactgcacctggatgcagccctgcctgatatcccctcccatctgccaccttcagctcatggcctggccccatagtctcttatagtctagtgccttttctggcccttaaacgtgctattccttcccatcttcgagactttttttgtcccatttcctctggaatgttcctcctgtggctgtctctctccttcacattcagtttaaacgttgttcctttacagaggcttccagagaaatgggtgctgcgtataatcccccatcttagcccccattttcttcaaaactctgcaccctttgtctgacccccggtgtgagcctgytcacctgcttagtttttatctcacattagaattgaa

SEQ ID NO: 712834 - DNA, 1551 bp, Homo sapiens
gggtttagaatttcagtgctgatggccaaggttgaccacatagtttgcaggacccaatgccaaatgaaaatccagggcctcttattcaaaaagcaagggaggccaggcacggtggctcatgcctataatcccagaactttgggaggctgaggtgggagaattgctggagcccaggagtctgagagcagcctgggcaacatagtgaaatcccatctctataaaataaaaataaatattagttgagcttggtggcatgcacctggagtcccagctacttgggaggctgaggtgggaggattgcttgagaccaaaaatttgaggctgctgtgagccatgatcatgccactgcactccagcctaggcaacagcatgagacctgtctctccctcttttttttttttttttttttaaagggcaaaggaaaagtttttgtttcttcggtggtctctctccatctgcaatggtgttttaatttgctatttaatgtcgtgcccccttggagatagggacactcatgaaggaagtatagacactccaggtgcccctgactcagtgtgggaagtgcacctgcccagtccttcctgtgcctgtgcccaggtgcttggttgcagttgctgggtggaggtgggagagaaaatgctgagaataggtgatggggggatgtagagaggtggcggaaggcagggcagcctgtgggcccaggctcttaagctatggtcacaccttccattgtccctagacttcactcataaaacataaattaaaagagaacattattaagaattttaagatgatgaccacagaggattaaacctcagggcgggatccccttctgagggcatgactctgtgtgactgcactggttgggtgcccacaaagccagacctgcttatggcctccaaagtggaggatggcaagagcgaaagacgtggggaacagaggggagctctgcccgcccacagtttctgccgaagtgtcagatggatgaaaggcattttatcactctggattttcagcaggaaccacagctgccaaacggggcagcacagcaagctcctgagtttgttgactctggtgctaactcagagagcttaaagatctgaggcatctgggccatgtctgcaaagacggtgttagcaatgccttaacactatcctgatattttcagcctaacttgttttacttggaagtaaaaaggagaggtaggtggaaagctaattttgcatagaatatttaacaggaaataaggatacaagcctagtaaacctgtattagtccatgttcacactgctgtaaagaactacccaagactaggtaatttatgaaggaaagaggtttaattgacttacagttcagcgtggctggggaggcctcaggaaacttacaatcatggcagaaggcaaaagggaaacaaggcatgtcttacttgttggcagaagagcragagggaggggaaactgccaaatatgtttaaagcatcagatctcgtgagaactcactcatcatcatgagaacagcatgggggaaaccgatgccctgatccagtcacct

SEQ ID NO: 712835 - DNA, 1551 bp, Homo sapiens
gggtttagaatttcagtgctgatggccaaggttgaccacatagtttgcaggacccaatgccaaatgaaaatccagggcctcttattcaaaaagcaagggaggccaggcacggtggctcatgcctataatcccagaactttgggaggctgaggtgggagaattgctggagcccaggagtctgagagcagcctgggcaacatagtgaaatcccatctctataaaataaaaataaatattagttgagcttggtggcatgcacctggagtcccagctacttgggaggctgaggtgggaggattgcttgagaccaaaaatttgaggctgctgtgagccatgatcatgccactgcactccagcctaggcaacagcatgagacctgtctctccctcttttttttttttttttttttaaagggcaaaggaaaagtttttgtttcttcggtggtctctctccatctgcaatggtgttttaatttgctatttaatgtcgtgcccccttggagatagggacactcatgaaggaagtatagacactccaggtgcccctgactcagtgtgggaagtgcacctgcccagtccttcctgtgcctgtgcccaggtgcttggttgcagttgctgggtggaggtgggagagaaaatgctgagaataggtgatggggggatgtagagaggtggcggaaggcagggcagcctgtgggcccaggctcttaagctatggtcacaccttccattgtccctagacttcactcataaaacataaattaaaagagaacattattaagaattttaagatgatgaccacagaggattaaacctcagggcgggatccccttctgagggcatgactctgtgtgactgcactggttgggtgcccacaaagccagacctgcttatggcctccaaagtggaggatggcaagagcgaaagacgtggggaacagaggggagctctgcccgcccacagtttctgccgaagtgtcagatggatgaaaggcattttatcactctggattttcagcaggaaccacagctgccaaacggggcagcacagcaagctcctgagtttgttgactctggtgctaactcagagagcttaaagatctgaggcatctgggccatgtctgcaaagacggtgttagcaatgccttaacactatcctgatattttcagcctaacttgttttacttggaagtaaaaaggagaggtaggtggaaagctaattttgcatagaatatttaacaggaaataaggatacaagcctagtaaacctgtattagtccatgttcacactgctgtaaagaactacccaagactaggtaatttatgaaggaaagaggtttaattgacttacagttcagcgtggctggggaggcctcaggaaacttacaatcatggcagaaggcaaaagggaaacaaggcatgtcttacttgttggcagaagagcgagagggaggggaaactgccaaatatgtttaaagcatcagatctcgtgagaactcactcatsatcatgagaacagcatgggggaaaccgatgccctgatccagtcacct

SEQ ID NO: 712836 - DNA, 711 bp, Homo sapiens
atgtcaaatgagcacagccccaggacagggtctctcctgccagtcctcctctgggttcctgcccctgcctgagccccacccccaggcattctgaggctggccctggccctgacaaaggcttcctattattctacctagcaactgcaagccgtcaggacaagaatccagaaacctgacattttacatcaataggatataaggagcatagttggttatctattgctgcataacaaattgccatctaaatttgtgtttgaaaacaacacgcatgcatcttgtggtttctgtggatcagaaaccttggcacagctgtactggctcctcgacttcatggtctcttgcaaggtgtcagcgaggtgtttcacagmtcacagtggagtggggaagagcctgcttcccagcttgtgtggttgttggtgtgattgttggtgtgatactcacgttctgcctgtcactatgtggtgcctgtggcttgtgcactccccggcctacctctgaagtgttggcctgggaatgttttgtagcatgggcccatggctgctgtctggaggccaccatcagctcctactggcctctgcaacacagccgtgtgccagcagatcaacgtcaagggtgctaccctgtgaggtgatctaatcccatcatcttcaccacatcctattggccagcaccagtcactaggttcagttcacactcaaatggcgggggcag

SEQ ID NO: 712837 - DNA, 1617 bp, Homo sapiens
attagtttaaccaataatatacaatgtttctgttgtgaaatgtcaaaattatggtgaaggaaacagaagagaatataaataaatggagagatgttctacttttggctgagatgatgtaatgttataaagatgtcttttatcaccaaactatatataaattcaatgcaattccaatcaaaatttcagatcttttttaagaaactcattaacttactttaaaattacatggagaaataaaagtccaacatttaaatcaatcttacaaagaagaaacaggggatttgccttaacagatgttaagacatacttcaagatcacaggaatgtggtatgtgctgtagaatggacaactggatgagggagacagataaacagctcaggaagaagaaatgctatgggaatttagtgcatgtgaatgacacatatctgtgaacaatggacaaattcagcagatgatcttagaaaactggctcgttatctaaaggaaagttacattgggtgcctataccaaaccacatttgagactggactgtatttagattgaaaaccaaatgggacaggtaaaattataaagttaatagaggaaaatgtagcatgatatttttgtgatttgggttggaaaaatgcttctggaataaaactctaagagcacacattgtatggcaaaattgatcaatctgaatacattaaaattcaagattggtattcaagggaaggcacgatggacaaagttattagataaaaattacaatgtcaaaaactgacaagggatacacctgtgtaatatacaagggattcttacagaccttctaggaaaatgtatcaataaacaacaaaatggcaaaatatcaacaaggatatgacaacgagaaaactcaaaaagctaaaaacgtatgatgattattcaaattcattagtttgcatcaggaaaatgcaaatccaaacaactacaagaaatcactctacaactgaagatgagcataaacgaaaagctgaaaatatggggtcataggtcctctgatgtcctgctagagagaggacagaataaaccagccatttcgaatgatctggcattactgacaaattaggtaatagcacaccacctggggcagaaaaattctgtgcctgggtagatatcacaaagagatatagcacagattgcataaggaagcatgcataaagatattcattatggcagtatttatgggggtggggtgtcggaagcacccaagtgtgtgtgtgtgtgtgtgtgtgtgtgtgtgtgtgtgtgcacgcgcgcgcgcgcgcatgcgtgtgtgtgtttcctgacatatgcatcaatgaagggggacaaaaagaattacaagaatatttactaatatgagtgaatcttacaaataaacatggatggtagtgaaaaataagaaaccaaatgagatgtatatgaatatatatcatgataccattcacatacagtcgactctccttatccatgggttccacatctgtggattcaaataactgcagattgaaaatattcagtaaaaaaaggtgactgcacygaacatattcagattttttcttgtcattattccctaaacagtacaatataacaacaatttacatactatttacattg

SEQ ID NO: 712838 - DNA, 1984 bp, Homo sapiens
tattattaaatagccaacaatagacacatttggagcatatatgtttttaattccaattctatgtgtgtcttgggaaatccttagggggtttttgctaaaatcatacagatcatgagtctggatcttgtactactccctcccccatagctcttccttcacacacagaaaatgcagggggagggggagaagaaggacctagcgtgggatgagccctgctgtggctcagcttcctgttgggtcatcttcagaagaccctgcaaggcaggcgtcatggatcaggaagtcaggcctcatagaggcaagcaatttgtccggagcctcagtgtcaggattcaaccctagacaatgcccagcctctccactgagcctctgactccccagtggatgcctttccccttactgagcagagagtgaagatgactttgagttcacctcaaggtgccacattcttattctattgtcacagtgatgcaaacaacacaaacatctcaggagaaaaaagaacagtccaggaacctcgccacagggttaggctgatcaaccagacttttaagttttggctttctttatttttgcagcatttttcctatgtgtggacccaatttcttcattattatgtgatatgcagattttatctttcctttgcaggattaaaatattagtttcattattattactagctacagatcattttgagatgtattcaaactcttctgtcccttcctcactaaagtgttattttagagaaatccctggttacacctgcctcccactccacagtgggagttctgtcaatattaattgataatcgatgatgaggagtctggactccctccttcaaccctggagtatgtgtttttgatgacctgctgcctaggtgaacaatgactaatcttactaacagagcataaatctcattttccaatttgccacatctctccaaccaaactcaaccctttgaggagcaaagatgcacctgtgtccttgaactatcaacccarttacaggattatgcttcccagagtccctaaagcccttgcccagtcagctgcctcacaggtgagctcatcaggatgaaactctccccgtggtccttgacctccctgctaccccagggtgaacttgactgggctgagaaagaatattatcctcatgcttcatgggtcctacctcatggctggggactaagcaggaccaagcaccagtttagagacaagttcctcttgggcaatttttacatttgcaaaccaaagaagtggagctctaaagcagggttggggtggctttcatttctctccttttccattggcggccaatggcatttccaacaaaagtacgtcaccttggcctgctcatctgcctgtttctcttcttgcctctttgtccactcaaagtccctgatacccagcctcctggcctgccttctcacaccctgaataatctgttcatcttctgcccacttacctctgagcacagacccagtgaaaactcctttaattcggatttatgcagcaagtaatggatgcacctcacaatagcagccgggggaaacagcagcactcctcccagcctccatgggggatgtgcaacctcccctggacagcctctctgctgatagctccatgacgaaagtattgagtaaggaacatagcctttcctgtgtgccaggcgaagtttcaggggcttcagctctactgtgtaacagactcctgacagctcctgctatactcaacagtgttcgagatttctaagtaggactgtcctggacaaccccaaacacgtgctcactctacctctagtcatgattcctgctgaagtcttgagaaaactgagcagagagaagctacatgcattttccaaggtcactcacctagtgagaggaggaggtagccttgaacctgggtggtttggcatcagcatgggtgttctatgctgtagcacaggggtcctcaacccccaggccacagaccggtaccacacagca

SEQ ID NO: 712839 - DNA, 434 bp, Homo sapiens
ttgttttcatgtgtgaaggatctgtagtaataatcccttttcattcctaatataggtaatttgtatcttctctctttttttcttggtcattctggctgggagttcatcgaagaacattatcaagaacaakctttaggattcattgattttttttcctattgtttttctgcagtcaacttaactattatctgctcttatacttattactttctaactttttcttcctttgggttcaattgctttcttttctctagtttcattatgtggaggcctggatttataatttaagaaccttttattcctttctatgataagtgttttaaaataagtgttcctttctataagtgtttctgtaaccatgctacaagtttcccttaaaacatgacagtctacaaattttgattcctactagatttggttattgtgtctttagt

SEQ ID NO: 712840 - DNA, 562 bp, Homo sapiens
catcaagaaaagcctgtcatttctcatcacttccctctggaaaatctattcttcagccacattgaagggttcacaattgatattaggtgtggtattataagtgggggtattagttaagcttcctaactaatttccagctttccttatgttcttgagtcttttattatactgttcactgcttggaagggaagcactctcttgacattctctttcttctctttctcctttgaatacctttattatttttaaaataatatttaaaaaatttttattttasaatcgggggaggagtgtacatgtgcaggttcattaccaaggcatattatatgatgccgaggtttggagtatgaatgaatccaacacccacatttatctttaaaagtagcctttacaattgatgcaagttctcataacctttttactgaatgacttaataatgaacaaaaactcgtaaaggcctatttcatgccaaagtacttgtggttattattgcctcaatattgccaatattctgcaagctaggtttctttttctaggcctccttttgtttgtcccagaaaat

SEQ ID NO: 712841 - DNA, 623 bp, Homo sapiens
aacagaaaagacctgatgtccatttcttcctctcatttgaagtgaaggctgttgcttacttctcattgctaattacaatgtctagagccctggagttttattctcacttttccattttgaacttgactcaaacccttycacctgtcatttctcatgtgggccatggaagatccatgtttaagacgagaaaactgaggtatagggggataaatcacacacacagcctcgtctcctgactcccaggctagaactctttccagtctctgggggcccctggaagaaggaaatgtgagggtgtggggtgctggggaggattctccaagggccacagcacctcccggctgagaaagggaaggaggctggcttagaggctctcagcttggagccctcatggctttgtcatttccttgcacctggccttgggtgaatcacttaacctctggagcttcagttttcctgtctgtaaaatgagcgtgaaatgtcaagcaccatgcacgtctgtatgaccttgatcgcgattccgctccttcctttatgcttccaatgggaagatactggatttggaagtccgacctccccatttgacagatgtggaaagctgatggcagagaggggatggctgt

SEQ ID NO: 712842 - DNA, 1442 bp, Homo sapiens
tgatctcactgtcccatgggaacttggggtgggcatgagaggtcaaataaggcagcataaaagaaggtgccaggcacatcacataggagctattttccctctcgggcttgggctagctcagtcagccaccgcagcctgccaagctgtcccccagcctctctccagcaggaggaactcaactcctccccgcatggcccctccaggtacctatgtccgcacccctactccaggagagccctgcagaaacaggaagagggatgcaagggtcatatattccccaaggcagttttcctggccaaacactgaagctcaccagccgaagggatgtgatcttctggagccccttccccaccccaggctgcaaagggtgatatccccaatggacaactgagacctacaagaggtcattgctgttccatgccatatctgtccatatagcacccttgagagccctaagtccactccaaatggataaagccaaatatgggtgccagagagggggagggaagaacctgaggacacacagcaaacccgagacctcaggggcagtgagacgcaggccaaagagccaccaagagttccaaagaacagtgtgagataactcacccgagccccacgtgcaccagggattccaggtagccccagtagcccaagggggaccctgaggagaaaacaagaagacagcattagacagtgcccactggcagcagagaatgggctcaagcagtcattcaacaatcccgccttccgctgtgggcatggatagtccccggctaaaaagagaagtcccctgaggtccctgccctgagaaattcatgctctttggggcttttgggctttcatagctactattcagtcactgacgccctcatcatttatcacccagctaacttagggtgtcaccttctccagaaaaccttccccaagttggacaaagtcccttcttttcctctattttaaagaccgctatcttacttggggaattatctgcttagaagcctgtgtctcccatcagatgacagtctcctcaaaggaactaaggggatatgagtcatctgcctatccccagggctcagccaaacgtttgataaaataaaacagccagaaacctcagagctcagccaaattctctgcagaatcagaacagagaagggacttggccaaggtcacaccaagtatctctgccccacaaacaggcagcacagcacacagagcatggcatgggtttttgaatcagacatgcctgggttcagatccctgcctgccgctgacaaaatgcacaagtctttagccagcttgtgcccatacaaacggaggcaataaaacactccccatgggattccaaggatgacatgagagatgataaatgttaacacggtgcctggtatgtaactggcactcaaattttctatctgttcmcatggccacagcatggtccagcc

SEQ ID NO: 712843 - DNA, 1442 bp, Homo sapiens
tgatctcactgtcccatgggaacttggggtgggcatgagaggtcaaataaggcagcataaaagaaggtgccaggcacatcacataggagctattttccctctcgggcttgggctagctcagtcagccaccgcagcctgccaagctgtcccccagcctctctccagcaggaggaactcaactcctccccgcatggcccctccaggtacctatgtccgcacccctactccaggagagccctgcagaaacaggaagagggatgcaagggtcatatattccccaaggcagttttcctggccaaacactgaagctcaccagccgaagggatgtgatcttctggagccccttccccaccccaggctgcaaagggtgatatccccaatggacaactgagacctacaagaggtcattgctgttccatgccatatctgtccatatagcacccttgagagccctaagtccactccaaatggataaagccaaatatgggtgccagagagggggagggaagaacctgaggacacacagcaaacccgagacctcaggggcagtgagacgcaggccaaagagccaccaagagttccaaagaacagtgtgagataactcacccgagccccacgtgcaccagggattccaggtagccccagtagcccaagggggaccctgaggagaaaacaagaagacagcattagacagtgcccactggcagcagagaatgggctcaagcagtcattcaacaatcccgccttccgctgtgggcatggatagtccccggctaaaaagagaagtcccctgaggtccctgccctgagaaattcatgctctttggggcttttgggctttcatagctactattcagtcactgacgccctcatcatttatcacccagctaacttagggtgtcaccttctccagaaaaccttccccaagttggacaaagtcccttcttttcctctattttaaagaccgctatcttacttggggaattatctgcttagaagcctgtgtctcccatcagatgacagtctcctcaaaggaactaaggggatatgagtcatctgcctatccccagggctcagccaaacgtttgataaaataaaacagccagaaacctcagagctcagccaaattctctgcagaatcagaacagagaagggacttggccaaggtcacaccaagtatctctgccccacaaacaggcagcacagcacacagagcatggcatgggtttttgaatcagacatgcctgggttcagatccctgcctgccgctgacaaaatgcacaagtctttagccagcttgtgcccatacaaacggaggcaataaaacactccccatgggattccaaggatgacatgagagatgataaatgttaacacggtgcctggtatgtaactggcactcaaattttctatctgttcccatggycacagcatggtccagcc

SEQ ID NO: 712844 - DNA, 805 bp, Homo sapiens
aaaaatcagaggagagatccagacaggcagatatgggtaccaaggtcactgggcaagagccctgagcagaaggaggagggtctgttttgtgacctcgggcaagtcccagctacctctgagcatccagagacctctggccaaattggcggcagagttccaggggtgggtagaggggttgtctggttttgtgggttctggactctgggtgccrgtcttacccacttctcctctccagctgtctctgggcagtagagtatggtgtaacaccacgggcctgggttcacatagggcaccccccccccacccacctactatctgggtggctttgagcaaagctatttccaggctccaagccttttttctattactgtaaaatgaggttaataatagcacctagccgacagataatctataacaagtgctaatcctggtgtctggcacccaattaatgctcaaaaaaaatgttagctgttatttctgtgaagcaagcttctggaacgtcctcaactcaaaattttaagccatcctccttcacatctgtttctaggggacagcaaaagatgtcccttcttagaaggccctccttgacccaactgtcccaggtggacccagaattaaagaaaaagcagggggctgagacgaagcatactgtaggtataccatgccgtttcaacaggtaagaaaccagagagaggttcagagaggaaaagtgacttgcccagtgccacacagctaacaagaggcagagcctggattcaaacccaggaccactggacctgttctcctaccctgggcagctgccaca

SEQ ID NO: 712845 - DNA, 839 bp, Homo sapiens
ctgccctttagaagttcccaggctaatgaggacgtgaagcatgaacacaaataatgaagatacaagggagaaagtggagaaggatgctaccgaggtgcaaaaatggcactggggatgggggggagagattgcttccggcttggggtatcagggatgcttgcccaaggagagcgcttatgagagctgggctttgaaggatttggctcagaagtcatgagggatgggaaggacatgcctggtggaggggacagagtgaggaaaggctgggagggaggaaatgagatgcatcctagggaagagccccagaatggtgacgagccccagctgtggagtcagctggccctgggtgacccttgaactgattaggaattcccgaagagaattcacagctccactactgactagtcgtgttgctttatctacagagcctcagtttctttgtctgtccagtgtgggtggtgacaatctggggggtccttgtgagagtctaatgtggtagcatgcatgtgcctggcacaatgttggcactccgggttcgcagccgctgttagttaatgccagcactcaggcggccagaggtggatgtaagccctacatccaggaccttgaaggcctaggaggagccatggcaggagccacgggcacctaccagcatccctgggggtgggcagggcttggtgccstgctagcatctaacccagccgcgagcttccttctgcaggtcctggagccctggcgtggggcgggcctcctgccggcgagcgcctgcgcccttccctgggcgtgaggggatgtgcctttggactacatctgggaaccagcaccattccatccatggg

SEQ ID NO: 712846 - DNA, 1710 bp, Homo sapiens
tttttatagtgatagaaattgtttgaacttatacattataaaatgtggaaaacagagggaaggattgagatatttatagtctaaaatgattgatgtctttaattattgaaaataatttttcctggaaaaaaaaagagttctattgccttgagtaaatatatatgaagtgatcatttaaatatcttgatatacatatgactacttaatatcctttacacacacagcaaaaaaatctgagaataatgaactctgttaactttattttttgtatcataaaatatctcatttttaaatttcgagtcattcagaaaacaacaatgaaaataaaactgtatccttagaagaaatgcaggcaaattttgtaacacacgatataaaaattagccttctccttttacatcgagttgtgtttttttttttctctccaacgagcatctttacttaaccctattttccgtaacaaattcataggtaaagaagagaaacaaaatgagttctaagatataaatttgatctgtgttacacagaaagaagaaaatcattccaagtttatcctctttactgtttctcaccaaatatcaagcaactttttgttaaattatgttttaaatactgtgtaagatcttttctaagtggacactgcctgtcaattatggtatatatactcttctttatacatatcaccttattctagatacaatttataacaattttcatattcagctttaatttattatgtaacaaaatatagccaaatattatctcatgtatgaaagtaacttaggtgacttttaaaaccctggtattttatcataagctaacaggaagttctaatgctatgttattttcaaatctgctgactttgtttctctagaatcatcatcaagacactgmgtaacgtgttatcagcaggttttcagacaaaacaactgcatggttatcttgttttttctatttttctgaaaggaaaaacaaaagagtttccacccaaacgaattaactcttctttttgtgtatgccttaaccttgcctgtttcgcctagtaaatgaggtaacttaatttgtttttatggtgtttctcaaaactaaaagttggctacagcataaattcacaatccaccttgactccagagtaatcaaaactgtgtgccttgagaatctaggtctcattctggagagggtcagactcacctgcactgttcactggagctctgcctcagcagaggggaacgcacaccctgagccctcccatcctgcaaattcagctttctctttgtgcttgaaggtgggtggctgaacgtgtgtgcccgtcttcgaaactgcggggagtcggaatcctcttcgggaaacgtttgccaagctgaggacggtggggacgctggcggtgtccctggtggagaatcccctggtgagtagtcctgaaacacaagcggaagggagccctttatttcccacgtgggtcatggcagacctgccaaaacacagagctcaaaagtgacagtgtgcctcatcttcctcctgagtcatgacaaaactgtttttcctcccccttttacttaatttatgccgtaggctaatcagtatcactacaacccattatcttctgataagcagctgtaatcagtatcaccacaacccacttatctttggataagcagctgtaagacagcatccgtaaagacaggccagaaagtgagagggatgacaaaa

SEQ ID NO: 712847 - DNA, 973 bp, Homo sapiens
aaacaaccaggttatgtcttttactaatccttcttcattcctgcctaccctctgcatataaggtggtgtcaccatcttgaactgcagctcagggttagcagggaggtaaactggtaagagactgggtctcaccagtaagaggattccatgaagcaaagccactrtatccaccctagatcactttctaccagcctttggcatggaaggaaaataaacttctacttgtttgagagtcacagttaaacctaaaccctaagtaatggaaaagtcaagaataaaagggtaatggcagaagcaggtgagagaaaataggcagcaagacagacatgatccctgccttcaagggacatagactccacaggaataaaaactcccgaatccagaactacctgttttatgaggtcaaaaagagagagtggccaccaaaatggtgcttgcttcttgtctcaaaactagtgatggagaagctctagtagagaaaagcttttttttttaattttaacttgatttttttttctttttttttttttttttaagacaaggtcttgctttgccgtccaggctggagtacagtggcacaatcatgactcacgcagcttcaagttcccagactcaagcaatcctcccacctcagcctcctgagtaactggtactataggcatgcaccaccacacccagctaatttttatattttgtttttgtagagatggggtttcatgatgtttcccgggctggtctcaaacttctgggcataagccaaccacctgccttggcctcaaaagtgttgggattacaggcatgagccactgcacctagatgagggaagctcttaaattcggcttttatctctctaaagtcttccctgaggacaagctttgcctggcacttccccacagatatttatcccaacactggcctcgtggtaacattagcttacagcaaatgctcctggagccttcactcttcaatttcc

SEQ ID NO: 712848 - DNA, 973 bp, Homo sapiens
aaacaaccaggttatgtcttttactaatccttcttcattcctgcctaccctctgcatataaggtggtgtcaccatcttgaactgcagctcagggttagcagggaggtaaactggtaagagactgggtctcaccagtaagaggattccatgaagcaaagccactatatccaccctagatcactttctaccagcctttggcatggaaggaaaataaacttctacttgtttgagagtcacagttaaacctaaaccctaagtaatggaaaagtcaagaataaaagggtaatggcagaagcaggtgagagaaaataggcagcaagacagacatgatccctgccttcaagggacatagactccacaggaataaaaactcccgaatccagaactacctgttttatgaggtcaaaaagagagagtggccaccaaaatggtgcttgcttcttgtctcaaaactagtgatggagaagctctagtagagaaaagcttttttttttaattttaacttgatttttttttctttttttttttttttttaagacaaggtcttgctttgccgtccaggctggagtacagtggcacaatcatgactcacgcagcttcaagttcccagactcaagcaatcctcccacctcagcctcctgagtaactggtactataggcatgcaccaccacacccagctaatttttatattttgtttttgtagagatggggtttcatgatgtttcccgggctggtctcaaacttctgggcataagccaaccacctgccttggcctcaaaagtgttgggattacaggcatgagccactgcacctagatgagggaagctcttaaattcggcttttatctctctaaagtcttccctgaggacaagctttgcctggcacttccccacagatatttatcccaacactggcctcgtggtaacattagcttacagcaaatgctcctggagcctycactcttcaatttcc

SEQ ID NO: 712849 - DNA, 645 bp, Homo sapiens
tgtcccattcactcaaagaatcaaaatgcacttcacatactgtttctatgaaaggattaccagataaaatattaatatgagtgcagatacaagaaattatcacagaaatttggaaaatatactttcttacaattgtatttcttcatctctttgttcttcctgagcctggaggaagtggacaaaagagttattaagaggccgggtgcggtggctcacgcctgtaattccagcactttgggagcccaagatgggtggatcacgaggtcaggagttcaagaccagacaggccaagacgatgaaaccccatttctactaaaagcagaaaaattagccgggcgtggtggcatgtgcctgtaatcccagctacttgggaagctgaggcaggagaattgcttgaatccaggcagcagaggttgcagtgagccgagattgcgccactgcactccagcctgggcgacagagcaagattctgtctcaaaaaaataaaaaaaaaataaaataaaataaaataaaayaaaacaaaattaaaaaaagagttattaagagcagcgtctctgtaatcccagcactttgggaggctgaggtggatggatcacctgaggttaggaagtttgagaccagcctggccaacatgctgaaaccctg

SEQ ID NO: 712850 - DNA, 633 bp, Homo sapiens
agtacagaggagaagacaactctgacccctccgccaccaccacttctgtccttttacccaccacacagtgaatctgcaagtccacggggaaaggtggacataaaatatcctgactgtgactgggctaagtctgaagggactgaaaaaaatcactgaatgtgactgaaattcccagcagtgattgtattgagttttatgccacattgagaatgggagttcagagccccaaaataaaatgttatagacaataaggttatatttttgcacactcaagtctgtgactataaaatttgtacccgtacaaagataggaaaggtagtcctgcactaactcgaaamctgagatttgcttacagatagacatggagcttgctgtggaaaaaataagactgaactgaagagaatgaaaaaataaataaccaatggaaaaatctggactctgtgaattgaactattccccaaaaccataagagacattggccaatgctcattacatggttgtaaacaaccacaaaatgcctgcagcataaaatctaaataacagttggttattttcaaagcctaatttattttcatgcattttagccaccacaaacaaatgatttatactcagaagataggaatatccagaaaa

SEQ ID NO: 712851 - DNA, 613 bp, Homo sapiens
tcttttgcatcacttgagtaaatgtcatccttggctccctcctgcttccactccmcatatttaaatccattccaaaaatatgttccaaatctgtctacttttttctgtttctacagctgctactccacatgaagctaccactctctatcatcaggattattttacagtctcttacctggtctcccatttctgtccatttttcctttctttacagaagaacccgaatgactctttaaaaacataaatcaaatcatgtcattacctgcaaaaatatctaataggttccatttgaaatagaatattttaatcctggcttatacgttttttaaagccaaccaactttttaccagaagatggtattacacatggatgactggcagatatttctctggtagaataagatttgatgctagtgatttgatatatggccaggggtcacagttcagtcaatactaatactgcaatttgtatttaaaaagaaatgatattctaggcattcaatatggaggaaatttttgtttcaacatgggccataccatgtatctttgtattgatgcaggagtttttcttgaactcttcatcagacttgcaatgggagtgccctgtttactca

SEQ ID NO: 712852 - DNA, 698 bp, Homo sapiens
agagctttaaaaaaaaaacaaaaaaaaactgcccgggcgcgggggctcatgctcttcgggaggctgaggcaggcggatcatgaggtcaagagctcaagaccatcctggccaacgtggggaaaccccatctctactaaaaatataaaaattagccgggcctggtggcatgcacctgtaatcccagctacttgggaggctgaggcaggagattcgcttgaacctgggaggcggaggttgcagtgagccgagattatgccattgcactccagcctggcaacagggtgggactctgtctcaaaattaaaaaaaaaaaattcatatctctttatcagattttagccaggacaaacagatgatagttctgtgttttgaatcatttttaccaaaggaaccttcctgagtggcgaagcagtatcccacaaagttggaagytatcacaaataccaaaccaaaagggactggctccctgatgaggaaggagccaggctgcagcagtgaaagcaccaaaccccagtcattaggccacagggtggacatgcttcctttttgtgggtaaatcttgcaggggatccaaagcaggtagttggaacatttaaaggatttaaagttgttttttatctgatttcagctggaatgctacttagctaattccctggatgtcagcatttcatcagtcagtcattagagtcctaaagcag

SEQ ID NO: 712853 - DNA, 1476 bp, Homo sapiens
tccctgacaactgcactttgctaacttataagcatctcaaaattgatgtttcyaaaactagacaatgttctttcttctgaagtttgtttctccccctagaattgtccaattcagtcaactgtatccatcccatggttcagtcagacacctggctccatctatggtcctccctgtctttcatcccctacgtatcattcagcatgtactgtcactcatgtctagccacagccatgcagctggtacaaagggtctgggatttctttaggtttccttcttcctgactccactataagaacagtatgggaagatctgtctggaggcaggcagatgttgaacaattagtcatgcatacatcttaggtcaactcccaaagtgccctttgtgggctgcttagtttctcacaaaggcacagagagatgcaacaggtctgaggatcctgaattcattcttatcattttgataaagctatattctttattctagggcattgtccaggaattgttgccattaatcacttttattaactgaatatatccctatatgtgtgcactttgtattgatataaatagcgtacattcctgttgatgggggcaggtgttgctttgctttgtccacagttcttagtccatggcaatcaagaataggtaagtattacagatttgcaacaagaaagcaagaaaacaaagtagagtgcaaaccttttctataaagaacatagtcaatcaaatatttactgaatatccacttcataccaggtaccctgctaagtgctgtgaaagggctcactgataaataaggcatggatcctgtgattccacaaagcacaatatgtgaacagtttaataataaggaggaatttagtattatgactttgtttatacaaagtaatacagagaaattgtatattggaattgtttctaaacaatgctttgcaaacaattataagagtaaggactgagaagtattaaaagatccttcaattgttttgggtccagtggagtatgtatctaggcctcatcagcacctcgtcagcacctcagctattcatttccacagtaactgaaaagtctaagggagtaataccattaatacttatcaggggaattagaataataatagcatatgctgaggctaactatgtttcgggcacaggcaatgcactttgctcatattatatcatttaaatctcacaacaaccctataaaggagcaactattccagaggctcagagagcatagacagtctcacatcctgtaagtggtaagagctgggacttgaacccaggtctcagcttctaaccagtaagtgagacaccaaagtcaggataggaactttcctcatcccttagtagctccttctgagaagaaagaatgaagaaagacagtggaattatatggaggaacaggttggctggagacagaggaagcagcataaattctctcaggtacattcctccaacaaacttaaggggagaaa

SEQ ID NO: 712854 - DNA, 1476 bp, Homo sapiens
tccctgacaactgcactttgctaacttataagcatctcaaaattgatgtttctaaaactagacaatgttctttcttctgaagtttgtttctccccctagaattgtccaattcagtcaactgtatccatcccatggttcagtcagacacctggctccatctatggtcctccctgtctttcatcccctacgtatcattcagcatgtactgtcactcatgtctagccacagccatgcagctggtacaaagggtctgggatttctttaggtttccttcttcctgactccactataagaacagtatgggaagatctgtctggaggcaggcagatgttgaacaattagtcatgcatacatcttaggtcaactcccaaagtgccctttgtgggctgcttagtttctcacaaaggcacagagagatgcaacaggtctgaggatcctgaattcattcttatcattttgataaagctatattctttattctagggcattgtccaggaattgttgccattaatcacttttattaactgaatatatccctatatgtgtgcactttgtattgatataaatagygtacattcctgttgatgggggcaggtgttgctttgctttgtccacagttcttagtccatggcaatcaagaataggtaagtattacagatttgcaacaagaaagcaagaaaacaaagtagagtgcaaaccttttctataaagaacatagtcaatcaaatatttactgaatatccacttcataccaggtaccctgctaagtgctgtgaaagggctcactgataaataaggcatggatcctgtgattccacaaagcacaatatgtgaacagtttaataataaggaggaatttagtattatgactttgtttatacaaagtaatacagagaaattgtatattggaattgtttctaaacaatgctttgcaaacaattataagagtaaggactgagaagtattaaaagatccttcaattgttttgggtccagtggagtatgtatctaggcctcatcagcacctcgtcagcacctcagctattcatttccacagtaactgaaaagtctaagggagtaataccattaatacttatcaggggaattagaataataatagcatatgctgaggctaactatgtttcgggcacaggcaatgcactttgctcatattatatcatttaaatctcacaacaaccctataaaggagcaactattccagaggctcagagagcatagacagtctcacatcctgtaagtggtaagagctgggacttgaacccaggtctcagcttctaaccagtaagtgagacaccaaagtcaggataggaactttcctcatcccttagtagctccttctgagaagaaagaatgaagaaagacagtggaattatatggaggaacaggttggctggagacagaggaagcagcataaattctctcaggtacattcctccaacaaacttaaggggagaaa

SEQ ID NO: 712855 - DNA, 1188 bp, Homo sapiens
tagaagagatggagtttcaccatgttggccaggctggtctygaactcctgacctcaggtgatccacccacctcgacctcctaaaatgctgggattagagatgtcagccactgtgctggcctaatgtcttttaaacctctctttcacacacacagatatattcctagtcatcacaccctaatgggtcaaaaagttcagacttagatctttgccataagtgaaatacaatgagaattacattgctgaaagtaaaagtcagaaaggctaaagaatagcacaaaagactgcagctaaaagaattaaataaattttaacatttcttatacttgtattctcattttgatttcaatgattttactaataattagttttgcctccaaaattatttaacagtgattagtatcccttattttccaggctgcacaaattttataaaactttttcttttcaaatttttctcccccaggcctccacagctggatgtgttctgcctgcatggaatcacattagtgcttccgtcatctggtgctatcattcaacccaaatatttttcattcaaaattaaccctgcaccagattcctcattaattatagcaggacgttttggaaaagctgatgctgttctggtatgagatttggactccaagaatagaattagaaaaaaaatatatataaagattattattccctacaacattaagccataaatcattccccaagaaagttaaagaatataattaagtaaagtacatatttattatttattttagtaagttttcattttgatataatttcaaacttaccaaaaggtgcaaaactattatgaagtctactgtacactttacacaggcttactattgctaccatttgctccatcttcatgaatcaatatctctctcccactcccctctgtctctctctctctctctcatttgatagatagatgatagataggtagatagatagatgatatagatagatagatagatagatagatagatagatagatagatagatagatgatagatgttctgaatcatatgagatgaagttacaagcatcatgcccctttccccttaaattacttcaggacatattttctaagaacaaggacattctcttctgtaaccacagtacaattattaatatcagaaaatttaacatggacactatcttattaatattgaca

SEQ ID NO: 712856 - DNA, 570 bp, Homo sapiens
ccttgcaggctgcagtgactgaataactattgaaaaaaggtggatatatttacagaaaatagtaatttcatttttacagtgtttaaggatgggagtcacctctgttgactagagcttaactctgcagtttaattttttaagaaggtctatggaggtaagacaatgaataaagaacattaaagaaaatagagctatatctgaacaacttggggaaaattacaataatggggaggttggtgaaggaggaaatgcatgtgattggctgagatagagcagcctcttttacttaaggttgcttgccttttcttactctcttttctaaaaacaatgtcaagactcccagctcaaaatgctaatttgcatttggtttggaaaaatattcctatattttaaatacatgaatttctacagtaagaaccattagaacatatagaaattacaggcagatcagtattaagcttctgccacacggtaactttatarctgataatacaaacaaatcagtgcaaccaaattttttaggggaggaatttagtaaactttgttctcaagaaatgggagctgtcattc

SEQ ID NO: 712857 - DNA, 619 bp, Homo sapiens
ttccaatgttaggtgcatataaattttgtgatattttcctattggactagaatcttttatcattatataatgtctctttgtcttttttaactgttgctgctttaaagttcgttttgtctgatataagartaaccactcctgttcactttgggggtccatttgcatagaatatcttttttcacccctttaccttaagtttatgtgagtcctcatgtgtcaggtgagtctgttgaagacagcaggtacttagttggtgaattcttattcattctgctgttgtgtatctcttaagtgaagcatttaggccattacatttcaatgttagtattgagatgtgaggtagtattctattcatctttcttttcctttgtctactaaaatgttgaactcatttagctttcaggtagtgcctgaaaagtacagttttattttttactgctttgttaagaaataccttatttagatttggacttcatttataataagaaaaatcatcagaagatgcaattagatgttgatatcaattgtataggcccaggccccacgtcaaaaccaatggccattggtttccttcatttaaaaaaattttttttttaactagaattgagactcctagtta

SEQ ID NO: 712858 - DNA, 619 bp, Homo sapiens
ttccaatgttaggtgcatataaattttgtgatattttcctattggactagaatcttttatcattatataatgtctctttgtcttttttaactgttgctgctttaaagttcgttttgtctgatataagaataaccactcctgttcactttgggggtccatttgcatagaatatcttttttcacccctttaccttaagtttatgtgagtcctcatgtgtcaggtgagtctgttgaagacagcaggtacttagttggtgaattcttattcattctgctgttgtgtatctcttaagtgaagcatttaggccattacatttcaatgttagtattgagatgtgaggtagtattctattcatctttcttttcctttgtctactaaaatgttgaactcatttagctttcaggtagtgcctgaaaagtacagttttattttttactgctttgttaagaaataccttatttagatttggacttcatttataataagaaaaatcatcagaagatgcaattagatgttgatatcaattgtataggcccaggccccacgtcaaaaccaatggccattggtttccttcatttaaaaaaawtttttttttaactagaattgagactcctagtta

SEQ ID NO: 712859 - DNA, 2307 bp, Homo sapiens
atgctttcttctttatctctaagaaactacaaatttaatgagaatcgatttcatcacaagggttttctaagaagaaaaactagttttttaaaggtcattttagaaaaagctttatatttataggaagaaatactaacatatttattttttaaaagccaaaaacataataccaaaaatgctttgtgtaattcatttaacaacaccaccgttacgtaatcatttattcattcattgaagcagcattgaatagacattatataccatatggtgtgcatggaacagaaatacaacaaagaacaccccagctcctgcctagaagtttaygttctattgaaagagagagaaatgtacactctctgtatttagaagtctacaagggaagtagccacaaagcagctggagaaacatcaagaggacacctatacttgtttacatgggcaagtcatttctgaaagtagtgatagctaagatgagccttgaatgctaagtagaaatttcaaggccaaggtaagagaagagagaaaaaacaagcagtgttgaaagattaagttcacataaggtagtcttgtttatgaatttaagaaagtttgtgtggcaagaaatgaagctagggaatcaagcaaacagaagccacattttgaagggtgtagtaaaaccactccaaggatgaagagctaccagagacttttacgctggaaagtgatttaccatattgcattagtctgttttcatgctgctgttaaagatatacctgggactgggaagaaaaagaggtttaattggacttacagttccacatggctggggaggcctcagaatcatgacgggaggtgaaatgcacttcttacatggcagtggcaagaaaaaaattgggaagaggcaaaagtgtaaaccccaataaaactatcagatctcatgagatttattcactaccaagagaacaatatgaggaaaaacctcctcacgattcaaattatctcccactaggtccctcccacaacatgtgggaattatgggagtacaattcaagatgagatttgggtgggtacacagagccaaaccatatcacatattatgcattataaaagtcattctgttcactctgcggattccacatggctagaggaaaactcattgagaagatagtacactttaataattggtgagtgaatagacatttagtgattggaagtaggtaagggaagaatttgataataattccccaggtgcttgctctggtaatgaaggagtagtaatgccatttataaaggcagaggatcataagaatgcatgcaaaaccaagcacttactctgtgccaggcattgtacttgtttttttatatcaagcaattgaatcttcacaacaaacatacaaagtactatgattatctcaaccattgcagagagacatgaaaagctataactagcccaatattaaacaaactaagagaaggacacaaatcaccaacatatacaagagctacacaatatcagcatttgcagaagaaaaaggagagaggagcaataaggagtctgactggaaatagccaagagttattgactagaatgagcttcagccaactggagaattgaatctcaaccaccagggattttacccactccattacctggtgaatgcaagagtcactataaaaatggaaggaactgatgcagtctactcacaggaaacctcaacagagttttctttctgggcagggaccaacatggagaaaaaggaaagtgctgggaataaaaccaaaattgcagggattaccacactagctgatgtagctcttaatgtttcttaatgttatattgatatgaagtggcagctccactgacctcacaagtgatcaagcattagtgaaccaagataatttagatttgtgtgtccaaaggatattttgcgtgaaactattagaagcattttgaatacaattgcaagtttggttctatcaaacgtatttactaacattcctatgaaagttcctagtcaaatatgggagactagaagaacaagagcactatattgttcctcaccttgtctctcttctcaaaaaaaaaaaaaaatctgaaagttctcaaagtgtaagtcacttatctgtgtgtcagagttctgagaattcctcattaacagctgcatcaaagaatttctgtcattagtcagctctcagaactggatgtatctacactgaaagaaaattgctcattttcaaagccgttggggctgcacataggagagcacacatattttaaattgaaattatgtaaaatttcctctgaatattatagtttacttctatctgc

SEQ ID NO: 712860 - DNA, 2307 bp, Homo sapiens
atgctttcttctttatctctaagaaactacaaatttaatgagaatcgatttcatcacaagggttttctaagaagaaaaactagttttttaaaggtcattttagaaaaagctttatatttataggaagaaatactaacatatttattttttaaaagccaaaaacataataccaaaaatgctttgtgtaattcatttaacaacaccaccgttacgtaatcatttattcattcattgaagcagcattgaatagacattatataccatatggtgtgcatggaacagaaatacaacaaagaacaccccagctcctgcctagaagtttatgttctattgaaagagagagaaatgtacactctctgtatttagaagtctacaagggaagtagccacaaagcagctggagaaacatcaagaggacacctatacttgtttacatgggcaagtcatytctgaaagtagtgatagctaagatgagccttgaatgctaagtagaaatttcaaggccaaggtaagagaagagagaaaaaacaagcagtgttgaaagattaagttcacataaggtagtcttgtttatgaatttaagaaagtttgtgtggcaagaaatgaagctagggaatcaagcaaacagaagccacattttgaagggtgtagtaaaaccactccaaggatgaagagctaccagagacttttacgctggaaagtgatttaccatattgcattagtctgttttcatgctgctgttaaagatatacctgggactgggaagaaaaagaggtttaattggacttacagttccacatggctggggaggcctcagaatcatgacgggaggtgaaatgcacttcttacatggcagtggcaagaaaaaaattgggaagaggcaaaagtgtaaaccccaataaaactatcagatctcatgagatttattcactaccaagagaacaatatgaggaaaaacctcctcacgattcaaattatctcccactaggtccctcccacaacatgtgggaattatgggagtacaattcaagatgagatttgggtgggtacacagagccaaaccatatcacatattatgcattataaaagtcattctgttcactctgcggattccacatggctagaggaaaactcattgagaagatagtacactttaataattggtgagtgaatagacatttagtgattggaagtaggtaagggaagaatttgataataattccccaggtgcttgctctggtaatgaaggagtagtaatgccatttataaaggcagaggatcataagaatgcatgcaaaaccaagcacttactctgtgccaggcattgtacttgtttttttatatcaagcaattgaatcttcacaacaaacatacaaagtactatgattatctcaaccattgcagagagacatgaaaagctataactagcccaatattaaacaaactaagagaaggacacaaatcaccaacatatacaagagctacacaatatcagcatttgcagaagaaaaaggagagaggagcaataaggagtctgactggaaatagccaagagttattgactagaatgagcttcagccaactggagaattgaatctcaaccaccagggattttacccactccattacctggtgaatgcaagagtcactataaaaatggaaggaactgatgcagtctactcacaggaaacctcaacagagttttctttctgggcagggaccaacatggagaaaaaggaaagtgctgggaataaaaccaaaattgcagggattaccacactagctgatgtagctcttaatgtttcttaatgttatattgatatgaagtggcagctccactgacctcacaagtgatcaagcattagtgaaccaagataatttagatttgtgtgtccaaaggatattttgcgtgaaactattagaagcattttgaatacaattgcaagtttggttctatcaaacgtatttactaacattcctatgaaagttcctagtcaaatatgggagactagaagaacaagagcactatattgttcctcaccttgtctctcttctcaaaaaaaaaaaaaaatctgaaagttctcaaagtgtaagtcacttatctgtgtgtcagagttctgagaattcctcattaacagctgcatcaaagaatttctgtcattagtcagctctcagaactggatgtatctacactgaaagaaaattgctcattttcaaagccgttggggctgcacataggagagcacacatattttaaattgaaattatgtaaaatttcctctgaatattatagtttacttctatctgc

SEQ ID NO: 712861 - DNA, 2307 bp, Homo sapiens
atgctttcttctttatctctaagaaactacaaatttaatgagaatcgatttcatcacaagggttttctaagaagaaaaactagttttttaaaggtcattttagaaaaagctttatatttataggaagaaatactaacatatttattttttaaaagccaaaaacataataccaaaaatgctttgtgtaattcatttaacaacaccaccgttacgtaatcatttattcattcattgaagcagcattgaatagacattatataccatatggtgtgcatggaacagaaatacaacaaagaacaccccagctcctgcctagaagtttatgttctattgaaagagagagaaatgtacactctctgtatttagaagtctacaagggaagtagccacaaagcagctggagaaacatcaagaggacacctatacttgtttacatgggcaagtcatttctgaaagtagtgatagctaagatgagccttgaatgctaagtagaaatttcaaggccaaggtaagagaagagagaaaaaacaagcagtgttgaaagattaagttcacataaggtagtcttgtttatgaatttaagaaagtttgtgtggcaagaaatgaagctagggaatcaagcaaacagaagccacattttgaagggtgtagtaaaaccactccaaggatgaagagctaccagagacttttacgctggaaagtgatttaccatattgcattagtctgttttcatgctgctgttaaagatatacctgggactgggaagaaaaagaggtttaattggacttacagttccacatggctggggaggcctcagaatcatgacgggaggtgaaatgcacttcttacatggcagtggcaagaaaaaaattgggaagaggcaaaagtgtaaaccccaataaaactatcagatctcatgagatttattcactaccaagagaacaatatgaggaaaaacctcctcacgattcaaattatctcccactaggtccctcccacaacatgtgggaattatgggagtacaattcaagatgagatttgggtgggtamacagagccaaaccatatcacatattatgcattataaaagtcattctgttcactctgcggattccacatggctagaggaaaactcattgagaagatagtacactttaataattggtgagtgaatagacatttagtgattggaagtaggtaagggaagaatttgataataattccccaggtgcttgctctggtaatgaaggagtagtaatgccatttataaaggcagaggatcataagaatgcatgcaaaaccaagcacttactctgtgccaggcattgtacttgtttttttatatcaagcaattgaatcttcacaacaaacatacaaagtactatgattatctcaaccattgcagagagacatgaaaagctataactagcccaatattaaacaaactaagagaaggacacaaatcaccaacatatacaagagctacacaatatcagcatttgcagaagaaaaaggagagaggagcaataaggagtctgactggaaatagccaagagttattgactagaatgagcttcagccaactggagaattgaatctcaaccaccagggattttacccactccattacctggtgaatgcaagagtcactataaaaatggaaggaactgatgcagtctactcacaggaaacctcaacagagttttctttctgggcagggaccaacatggagaaaaaggaaagtgctgggaataaaaccaaaattgcagggattaccacactagctgatgtagctcttaatgtttcttaatgttatattgatatgaagtggcagctccactgacctcacaagtgatcaagcattagtgaaccaagataatttagatttgtgtgtccaaaggatattttgcgtgaaactattagaagcattttgaatacaattgcaagtttggttctatcaaacgtatttactaacattcctatgaaagttcctagtcaaatatgggagactagaagaacaagagcactatattgttcctcaccttgtctctcttctcaaaaaaaaaaaaaaatctgaaagttctcaaagtgtaagtcacttatctgtgtgtcagagttctgagaattcctcattaacagctgcatcaaagaatttctgtcattagtcagctctcagaactggatgtatctacactgaaagaaaattgctcattttcaaagccgttggggctgcacataggagagcacacatattttaaattgaaattatgtaaaatttcctctgaatattatagtttacttctatctgc

SEQ ID NO: 712862 - DNA, 2307 bp, Homo sapiens
atgctttcttctttatctctaagaaactacaaatttaatgagaatcgatttcatcacaagggttttctaagaagaaaaactagttttttaaaggtcattttagaaaaagctttatatttataggaagaaatactaacatatttattttttaaaagccaaaaacataataccaaaaatgctttgtgtaattcatttaacaacaccaccgttacgtaatcatttattcattcattgaagcagcattgaatagacattatataccatatggtgtgcatggaacagaaatacaacaaagaacaccccagctcctgcctagaagtttatgttctattgaaagagagagaaatgtacactctctgtatttagaagtctacaagggaagtagccacaaagcagctggagaaacatcaagaggacacctatacttgtttacatgggcaagtcatttctgaaagtagtgatagctaagatgagccttgaatgctaagtagaaatttcaaggccaaggtaagagaagagagaaaaaacaagcagtgttgaaagattaagttcacataaggtagtcttgtttatgaatttaagaaagtttgtgtggcaagaaatgaagctagggaatcaagcaaacagaagccacattttgaagggtgtagtaaaaccactccaaggatgaagagctaccagagacttttacgctggaaagtgatttaccatattgcattagtctgttttcatgctgctgttaaagatatacctgggactgggaagaaaaagaggtttaattggacttacagttccacatggctggggaggcctcagaatcatgacgggaggtgaaatgcacttcttacatggcagtggcaagaaaaaaattgggaagaggcaaaagtgtaaaccccaataaaactatcagatctcatgagatttattcactaccaagagaacaatatgaggaaaaacctcctcacgattcaaattatctcccactaggtccctcccacaacatgtgggaattatgggagtacaattcaagatgagatttgggtgggtacacagagccaaaccatatcacatattatgcattataaaagtcattctgttcactctgcggattccacatggctagaggaaaactcattgagragatagtacactttaataattggtgagtgaatagacatttagtgattggaagtaggtaagggaagaatttgataataattccccaggtgcttgctctggtaatgaaggagtagtaatgccatttataaaggcagaggatcataagaatgcatgcaaaaccaagcacttactctgtgccaggcattgtacttgtttttttatatcaagcaattgaatcttcacaacaaacatacaaagtactatgattatctcaaccattgcagagagacatgaaaagctataactagcccaatattaaacaaactaagagaaggacacaaatcaccaacatatacaagagctacacaatatcagcatttgcagaagaaaaaggagagaggagcaataaggagtctgactggaaatagccaagagttattgactagaatgagcttcagccaactggagaattgaatctcaaccaccagggattttacccactccattacctggtgaatgcaagagtcactataaaaatggaaggaactgatgcagtctactcacaggaaacctcaacagagttttctttctgggcagggaccaacatggagaaaaaggaaagtgctgggaataaaaccaaaattgcagggattaccacactagctgatgtagctcttaatgtttcttaatgttatattgatatgaagtggcagctccactgacctcacaagtgatcaagcattagtgaaccaagataatttagatttgtgtgtccaaaggatattttgcgtgaaactattagaagcattttgaatacaattgcaagtttggttctatcaaacgtatttactaacattcctatgaaagttcctagtcaaatatgggagactagaagaacaagagcactatattgttcctcaccttgtctctcttctcaaaaaaaaaaaaaaatctgaaagttctcaaagtgtaagtcacttatctgtgtgtcagagttctgagaattcctcattaacagctgcatcaaagaatttctgtcattagtcagctctcagaactggatgtatctacactgaaagaaaattgctcattttcaaagccgttggggctgcacataggagagcacacatattttaaattgaaattatgtaaaatttcctctgaatattatagtttacttctatctgc

SEQ ID NO: 712863 - DNA, 641 bp, Homo sapiens
cattggcctacactgaagtgaccacaactacactcagtattattgacatcctgaaaattttctggtttaggaggaataaataatctgacaaaggatttttaaatttaccaatatatgcatagtgaaatctttacaaagataaataacaatttagctttgcacaacctttaagacaataataattctaaattgagtcttgtgtgtaaggcattttatatacattatcattatgctccagaacaggacttctaacctcattttatgcaygaagtaactaaggcttagagaactttatgggagccagtgggtaaaaactacatgataatatgattgatcaaactagaatatctgggacacacggtggctgtatgtctatatattcttgaagtcttaacaagcaggtacttggaatgaagatgggagagaagggcagggttcctgtgatttagcaatggaatgaggacaggagggaggaagtatagggtataaaacaggctgactttttgccccagaagtccaacgcacattcagaaaacttgaaggacttatctctgaagctgcctaacattttcccaaatagaaatattaattccattgagaaagaggtcacggaagaatggagaaggggtcataacagagag

SEQ ID NO: 712864 - DNA, 1001 bp, Homo sapiens
ggttgttaagccatcagtagttcattacacagctttaagtaaaaccttttcccttaccagaaattaataccctcatctatcaaatggaaagctttaatcggaccctataagcatcctggagttggattctgagaccatttctttctttgcatttgtccttgagtttctgtgtaaaatgtaacttgaggaaaactccttgaatctgtactctaatctatcctaaatatggcaaagcaaagccatttcctgttaagtttccttggaagcataaaaaacagagattgtgacttctcagctaagtacattttttcctccagacctacttgagggaggatgcgatgggaacactgtgtcagacaaaatcaaaacgtaccacacaagtggagccctcagctaatccaaacaaaatgacgggggtggatggtcaaagtctgaacaattttaatgcaggcatgaagataggccacacagttagatcagaatttaaataacctcacttcacatgttgcattttagagctcccttcttgagccctcaaaaaacttccaaatgtttcattttgggaagcagatgcccctggaaatgaagaccattcctccattgtcttctcctttctcccttccccagrgttaactgcttgctgtccaggactgagaatcctggcagatgatactttctctgtaaagacagaaagaggggctcaatgttttggcatggctttcttaggaagagtgacatgggtttgataagtaacatgctcatgggagaggctgaggcagagggtcccaagtatagaccaggccatgcagatgtttgtcagcaaccacccatggcaccacccaatcagccagacacattaagcccttccttgaccccagacaccatcctacacaccagggataaaaatggtgagaaaaactgtagtttcacctggcaaagtggtgccaattcacttattcaaagtaagaggcgagaccagaagtggacaaggagttacaaaa

SEQ ID NO: 712865 - DNA, 1542 bp, Homo sapiens
tggacctgcccaaccttgcaagggaagattgagcctcggcaggcagagccgcccggggtcgagagggagttcagatcctgggcagccaagccaaggcagtactgtgcactccaaggccggtcctagcggcagccgcaagtgtgggaaggtctccaggtccttggcctttggatgcactctgagcggacagggaagtggaacactgaggacattccagactcagccccagcggctcccggcctgttctcctgattccagacagagtggcaccgccttggggctgactaccagaacttctgccacactttatgggccaaagtgggtcatggaagcagcccgrtttcatgggatgggaaatggactctgtgtcttcctgcaaggagcagcaggggatgtgatggagacagctttgcaatcacggccctgacagccttgtcacctcctaacctgaagcccacggtggcttctgcgtggggaggtcctgtgaagcctgcactcaaagctctgtgggcacagcagggttggtgaccacagtcatggccccacagaggggtggggaggcctctgattctttaaagcacagaagttctaccctgggaggtgaaaaattgtccattgtacccaattttcgggtcttgcaaagccctgggaatggctgtggagacagctcgtgccaccttggagaggtgtccgtggcaccaggggagtgggggacaactttgcacacttgtctggctggagataggcagggtgtgtgcacagaagcgcagccatgtgtgtgcaaagaccagcattcagttgtcgttcatttttccattcactgggtatttactgaggacctactgtgtgctgagcactgtcccaagggctaaagacacagcaggagctgagacagacaaaacccttgttctcacaggccaataaatcagatagataaaactatggcaatgcgtgttttggggaaaagatggcaggactgagggacaggggccactgttggaaacggccattcaaacagggagggagtcgctgagaaaaaggcattggagtaggtgtggtggatggagaattcagaccagcaaagcttagaattcctaggcctggtggctatttagtttctagagctcagtggtcagaacccagaaacccagccccaggatcactggccatccactctcatggtgccccttgctgcggatctgcaagcctccagggcacagagcagtggggaaatttcttctccaaactccaacccatcctcaccatggaaggcattttgagagtcagttgctatgggaagtatttcaactggcaggaattcaaaagccaagaatgactgcctatcaaccctcaagggcccccacctgggagatttaatggggctttatcgggcgtgctgggaactcgccccaggaatgaagtggctctgcagccatgcagcagcttcctaatccaggattacgctgccaggaggcaggggccgtgctgcctgccctttttattggtgtccaagcaggcacccccagccatcatcgacctcca

SEQ ID NO: 712866 - DNA, 894 bp, Homo sapiens
  misc_feature 427: n = A,T,C or G
catttggggaatgacaaacaatgttttaaaattaattgcacaacaagcagttactcaattaactgattatagcaatgagtgccatgaaagaaagagtctgaattagaaagactatgtcacatggtgggaaaaagcattttaaamagctggattagtatgtgcaaaggccctgagacaagaagcaatttaacttattgaaggaattgaaaaaaggccagtatggctagagagtaatgaatgagaagagagaaaaagaggaagctccaagaagtgagcatgagccagaccatgcagactttgtggaatagtaggaattttaacttgatccttaaggcagtgaaattacctttttcaagctttacttatcttctaatgtatgcatttaaggctataatttctgtataaccacagctttagctacaagttntgatatactgtatttttagtataaatgagttaaaatttttccagttttcattctgatttcttctttactcataggttatttcaaagtatgttgtttaatttccaaatgtttaggggttttctagttacattttttataattggtttctgtttaattcttctgtgattagagaacatactctaaattctttgaaaattattgaaacttgatttatggtccagtatatgatgtgctttggtaaactgtccatgtgcatttaaagagattgtgtattctgtcagtaagatgtagtgttctgtattgtcaattaggttaagttggttagtcatgttcaaattttctgtatttttaatgatttacagatttattgtttttttctgacactttccttctaattttttttctactatttcttttcttttttcttttttttttttttttgagacaaggtctcactgtcacccagg

SEQ ID NO: 712867 - DNA, 649 bp, Homo sapiens
aattgataatgtacttgtgcagcattttgaaaaacattttattcatatttgtaactttatttacttttaaatgaactacatgtttcacaatgctttactgctatatgtttcacaatgcaggaaatacacaatacaagtagcatattaaatcaaacatacccaaatcattcccacagaacaagaacagttaacattagcaataatcagttccacttgcacagcaccactaaagtacttcaagcacttcacacgaaagattaaaggaaaaaaagtataactagattagaaaatagagagggttggctcatatttaaaatactgcctggctcagagagtgctggttaccactcccttcaaaatttcaggtaaacaaattgctactacctgggaagatcatttctagtggggaaatgaaggcagcttctgcaagaccccrggaaggtacattctctctgacaccaccaggaccagggctagagttgggagcatgcttgtgagcatgcgtgtgtgtgtgtgtagggtatgggaggtaaatccaaggggaagaatggttttttggtgcaagcaaatattttactaagtcagctaaattgtttctcacagaacaaagaaggtgcttgctttctgatttaggttttggcttcacaga

SEQ ID NO: 712868 - DNA, 1077 bp, Homo sapiens
ttttagtagagacagggtttcatcatgttagccaggatggtctcgatctcctgacctcgtgatccgcccrcctcggcctcccaaagtgctgggattacaggcgtgagccaccacacccggcctatttttattttttaaattcataccaatgtaagcctttggaatctatgtatgtatcatagaatagagatcagcgaactttttctataaaagaccagagagtaactattttaggctttgcaggccatgcggtctctgtcacagccactcaactctgctgctgtattgaaatcagagagcaatttgcgaatgagtctggctttgttctattggtcatagtttgcaaacccctgtcccaaagaaaaattgatccaaaagcaagttaattcaaacgtttttctataattctctaggttgtcttaacatgctttgaaggctttggaaattctccattgtaggctgataaagctgttcacttttccacttaagaggcatacagaagcctgccccttttcctgaagccatgtgatcactcatgcaccttattaaacacagaagaattattttcctacgtgcacagatgatctctgtccatgactggcctgcatctgggtgcaagaaggaacccagccatcctgcgccctccctctttagacccacaaggggcaggagcagctggatctgtgtagacacagcccttgtgcttacaaagaacaatggctttcttaaggcctgtcagtgagcagcaagtaaacagtgaaaaattgggagctcaggaaatacacaaactcctctgcctgttccctgtttgatgagctccttcctgggttcagtgagaagagagctgatattattattcctatggaaagaaaggataaaaataatagatatttgatcaatggatatataaaaaattaacaagtgtcaccgaggtgattgccttgcagctgactacaaaatcaaggtgctctgtgtctttctttgctacttttcattgcacttcatttgatttcagaaaccccaagagactgcatttcaaaatggctttttatctccaatgctatatgaagcgccctt

SEQ ID NO: 712869 - DNA, 761 bp, Homo sapiens
ccaatggactgttagcaatctttaacgtttatttttgaaaagctgatcacactctatgctttcaatagttacatagcactaagggagtgccacatgctggttttggtgctttagatatattaacacttaatcatacagcaaatgtattagatgagagccattaatatccttagttttaaatgaggaaaatgaaacagggagaggttaaatacactgcatataaaagtatcaaagcctgggcttgaccccaggtaacccagcttcgagtgagtgcttaccacagtatcctactgtctgtcccactctctctttagcaagccagaatcattagatttccttgatagaactattgcagtgaaatgcagcttttaatggctagactggtatacactcttctgtttgggtacaaaatgagatgaagaagattatggttttgatttttattgaaccatgttgatagcccatttctaaaagctgatgaaaacatgtaccaaatctagaattagtaagagaaaagtgaagctagartgtcttttagaatgtgaagttagtcatctgcatagaatgtttttttccatttgacaggtaattatgatatatttagtagaagtatggcatcaattttctttgtaacatataattaataccctggtgttttgtcatttctgaaatcattgtcctcacattgaaaaaggaaagccttatttttgaccaagaagtgctctaggaagcgagcacatgaaatagagacagaaaggaga

SEQ ID NO: 712870 - DNA, 1456 bp, Homo sapiens
taaaataaagagagtgtttcaaagatgaggktatgatgctcttaaattaaaatgagaagtcccaagttaaaacagtaacaaataatggctactggatcttcttaggctcacctcagtctatttttcacgtatttatttctttcgttgaaccaattatatacagcatcttatctcatttaaaacaaagcagaaattaaaaggagacaaagaaaaaaatagaagtactatactcactctctttttattacatttttgacatcatgcagctcaggtccatctggaaccttttccataatgaacaaggggagcaataatatcataccattcaaattaaactttctttctttttttaatgtaaagcaaaataatttctatttgaatatacaattgcaaaacaaagttgaaattctgccaaaaaagacctttagaagcacattctaataactaaatcagagaatgatgtaaatgcttatcttaaatgtgttttctcaaaattagaacgccaagaagcaaagatatatttactgaatgaaatttcagatcagaacgtcactccttaatcaaatattgtatgcaaataaaatacaagattactagaaatactgcacagcttagttcattttaaataacttcttttttaaagataagtgtgtgtttctactcatccataaattgttttaataactaaaataaaattaatttatatatgaaatagagctaaaccactaaggtgtaagagcttcatataatgcaatcaatcctgcttcatagagtataagaaataccaatagatataggagatcgagaccatcctggctaacacggtgaaaccccgtctctactaaaaatacaaaaaaattaggcgggcgtggtggtgggagcctgtagtcccagctactcaggaggctgaggcaggagaatggggtgaacccgggaggcagagcttgcagtgagccgagattgcaccactgcattccagcctgggcaacagagcaagactccgtctcaaaaaaaaaaaaagaaataccagtagatgaaagggagacacagtctggaacactgtcacaaaaagtggcaaaattcatgaaaacatttaaaattgtcaaaaatatataagaggaaaacaaacagtattggacttttaagcctagaaacttgcagatgaatttgtagttgggataaaaggcaggcagtggtgtgggaatgataaagcacaagactggaacgacagtatgcacctatgctaagacaagaactctgaaaaatgataggtgtgaattgctatgcaaggatttcagaccataataataaataattcatttctgaacttttgaaacatgtggagggaaatcaataaacaagaattccttgagatctgaatgtggaaaataaagctttaattctatttggaatgactcaatttttacgcataacctaatgcatttgtctttctctt

SEQ ID NO: 712871 - DNA, 1456 bp, Homo sapiens
taaaataaagagagtgtttcaaagatgaggttatgatgctcttaaattaaaatgagaagtcccaagttaaaacagtaacaaataatggctactggatcttcttaggctcacctcagtctatttttcacgtatttatttctttcgttgaaccaattatatacagcatcttrtctcatttaaaacaaagcagaaattaaaaggagacaaagaaaaaaatagaagtactatactcactctctttttattacatttttgacatcatgcagctcaggtccatctggaaccttttccataatgaacaaggggagcaataatatcataccattcaaattaaactttctttctttttttaatgtaaagcaaaataatttctatttgaatatacaattgcaaaacaaagttgaaattctgccaaaaaagacctttagaagcacattctaataactaaatcagagaatgatgtaaatgcttatcttaaatgtgttttctcaaaattagaacgccaagaagcaaagatatatttactgaatgaaatttcagatcagaacgtcactccttaatcaaatattgtatgcaaataaaatacaagattactagaaatactgcacagcttagttcattttaaataacttcttttttaaagataagtgtgtgtttctactcatccataaattgttttaataactaaaataaaattaatttatatatgaaatagagctaaaccactaaggtgtaagagcttcatataatgcaatcaatcctgcttcatagagtataagaaataccaatagatataggagatcgagaccatcctggctaacacggtgaaaccccgtctctactaaaaatacaaaaaaattaggcgggcgtggtggtgggagcctgtagtcccagctactcaggaggctgaggcaggagaatggggtgaacccgggaggcagagcttgcagtgagccgagattgcaccactgcattccagcctgggcaacagagcaagactccgtctcaaaaaaaaaaaaagaaataccagtagatgaaagggagacacagtctggaacactgtcacaaaaagtggcaaaattcatgaaaacatttaaaattgtcaaaaatatataagaggaaaacaaacagtattggacttttaagcctagaaacttgcagatgaatttgtagttgggataaaaggcaggcagtggtgtgggaatgataaagcacaagactggaacgacagtatgcacctatgctaagacaagaactctgaaaaatgataggtgtgaattgctatgcaaggatttcagaccataataataaataattcatttctgaacttttgaaacatgtggagggaaatcaataaacaagaattccttgagatctgaatgtggaaaataaagctttaattctatttggaatgactcaatttttacgcataacctaatgcatttgtctttctctt

SEQ ID NO: 712872 - DNA, 1230 bp, Homo sapiens
ttgatactgcaaagggtatatttgctctgtgaatgtgtgtgattttgtatgtccacaaattaagctacagacacaaggagcaatctcccacccctgaattttgactctaagcttggtatagatcctgaatcctgtaagtgarcgattctcaaagtctgaaactccccctttcatccaggtgcagcctttgtgaaggagaaccaccggcaactccaagccaggatgggggacctgaaaggggtgctcgatgatctccaagacaatgaggttcttactgagaatgagaaggagctggtggagcaggaaaagacacggcagagcaagaatgaggccttgctgagcatggtggagaagaaaggggacctggccctggacgtgctcttcagaagcattagtgaaagggacccttacctcgtgtcctatcttagacagcagaatttgtaaaatgagtcagttaggtagtctggaagagagaatccagcgttctcattggaaatggataaacagaaatgtgatcattgatttcagtgttcaagacagaagaagactgggtaacatctatcacacaggctttcaggacagacttgtaacctggcatgtacctattgactgtatcctcatgcattttcctcaagaatgtctgaagaaggtagtaatattccttttaaattttttccaaccattgcttgatatatcactattttatccattgacatgattcttgaagacccaggataaaggacatccggataggtgtgtttatgaaggatggggcctggaaaggcaacttttcctgattaatgtgaaaaataattcctatggacactccgtttgaagtatcaccttctcataactaaaagcagaaaagctaacaaaagcttctcagctgaggacactcaaggcatacatgatgacagtcttttttttttttgtatgttaggactttaacactttatctatggctactgttattagaacaatgtaaatgtatttgctgaaagagagcacaaaaatgggagaaaatgcaaacatgagcagaaaatattttcccactggtgtgtagcctgctacaaggagttgttgggttaaatgttcatggtcaactccaaggaatactgagatgaaatgtggtaaatcaactccacagaaccaccaaaaagaaaatgagggtaattcagcttattctgagacagacattcctggcaatgtaccatacaaaaaataagccaa

SEQ ID NO: 712873 - DNA, 1442 bp, Homo sapiens
atattggaaacaggctgctgtggaagttatgagctgccaccagcagcgtagactcaggtctgaggatgagatccccagtggtttctgataccacacagtccatctctaacattctcctgtcatggttgtaattcctcattaatagatttctttttcctgcatacccgctacattcctggttctgtgctgggactcacttgccgttgtatttcctctgcagagacctggttcgagttcacccctcaccacgctggcttccctgcactgggggcctttgtttccataacccacttcggaagcaaattcaagaagggaagactggtcagaactcaccctgagagagacctgactttcctgagaggtcagcgctggggtcagaggggattaaaagggggtgggaagtggaggagaggcaagaattttccttctgagggtctagtttgcccagctcttaaatttcttgggggaaagaaaaggacttggtaggcttccagaaagaggaatggtgtattccttctgctgagtcttcagtgtctctcaaaggtctccttaatgcggcagatacctgatatcctatcaaacaatccaggagagggagcttaatagaggggctcaagtccagggctgtggcttccaataagcagattcagaatgtgtttgggattacatggtgctttgggaggctgacctgggaggatcccttgagactgggagtttgagaccaacctcggcaacatagcaacactgtgtctctacacaagatttaaaaattagccaggcattgtggcatgtgcctgtggtcccagctactcaggaggctgaggcagtggaaggatcacttcagcatgggagttcaaggctgcagtgagttatgatcgccccactgcactccagcctggatgacagagaaagatcttgtctcaaaacaaacaaacaaacaaacaaacaaacaaaaaactagaatgtgttttgggcaccagcaaagcaaggggcatacaattttttttaaatggggyatttccagaaaaaattacaacaaaaaccaaaaacaaaacagtcatagtgagtaaaatcagaacttgattaaatgtccttgactgtagcttacacactggtatcacttttagttgtggcttcataatcttctcagcattcagggtctgaaggcattaccctgctgggcagacagctcccctacataggaccaaccatgccagcttgagaaagtcattaatgttacctgagcctcgtttttctcatagggaaagtacttacctcaaaatgtgggtgtgagagttaggtatgatccacaaataaaacactcagcccagtgtccagcacatggtaggaaattaaggatggttgactctccatgattttagcatacacttttgagacacactaggagcctgatactattttaaatgcaggggattcagtca

SEQ ID NO: 712874 - DNA, 597 bp, Homo sapiens
tttccattcagttttctaagcttaaaacatttggactaatttttaccttccaattcctcatgagaattttaaccttagagggatgctaatggcattttataggaatttgactcatacttgtaaaagagacagggccatgctaaccccaagaaaaataattgtgttagtgtgcttttgactaaaactgagctacttcaaaattcaatggtaaatattacttgaaaggaagaaaattaagcagtgttttctctataaataatgtttaaagaaataaagcctgayaatgctgttaatgatgatgatactcatattcagacttttaattttgagtaacaatttttgagtaatgaaatatatccatgacctgtgttcaaggtagtgaagtccctgacattttttaagttcaaagtttttatgaatgattgggttgtgagatgagctgatgcagcctttagcagcctacagtgaatgtaacccctggataagagtgtctgtaagacagagagagtttcttgtcctaataaggtcaagttatgcaatgctgcataactattttaactattttattctcctaggtggcgggggcctgtatagagg

SEQ ID NO: 712875 - DNA, 597 bp, Homo sapiens
tttccattcagttttctaagcttaaaacatttggactaatttttaccttccaattcctcatgagaattttaaccttagagggatgctaatggcattttataggaatttgactcatacttgtaaaagagacagggccatgctaaccccaagaaaaataattgtgttagtgtgcttttgactaaaactgagctacttcaaaattcaatggtaaatattacttgaaaggaagaaaattaagcagtgttttctctataaataatgtttaaagaaataaagcctgataatgctgttaatgatgatgatactcatattcagacttttaattttgagtaacaatttttgagtaatgaaatatatccatgacctgtgttcaaggtagtgaagtccctgacattttttaagttcaaagtttttatgaatgattgggttgtgagrtgagctgatgcagcctttagcagcctacagtgaatgtaacccctggataagagtgtctgtaagacagagagagtttcttgtcctaataaggtcaagttatgcaatgctgcataactattttaactattttattctcctaggtggcgggggcctgtatagagg

SEQ ID NO: 712876 - DNA, 522 bp, Homo sapiens
tcatagtttgatcatcattgtttttcaatgtaaatatgcttctaatgaaaaactctcagatcactaagagtattatgtttctagttaaagttatgtgctttataggttaattttcaaaatgcgacttttgttttattcatacgtttctatgggtcagtgagactgatgaaattgcaatgttgaggataagagcagaactttcttaaatgccaccctgtgaggacttttcagagacagctgatcgcttctgycttttgtcttcatgcaaagcatcgccaataaattcatgtgccccaaagacatgggatattcccaatttagaaatgaatggaagaagggaatatgtaagaattctgaggaaaatatattaaaaaataccagtatctcacctgaaataagaaaagttggactcagtaatttggactttcttgttttcagtgtaaactggaggaaggaagaaaaataataaaaattcataagtaatttctagcgggaaaggcagagcctctgaggaagggaggg

SEQ ID NO: 712877 - DNA, 442 bp, Homo sapiens
gcccggctgggtcagtttcccacctgtggtccagtcagctgtggccaggargataaggtcacatagtataaaaacagctgctgcaccacctctgcgagaaatgacagcctagagaaagcaggtactgatgaactggcttcaccagcaacaaaggaaccagaaaatcaaaactgctccaatcgcatctgaactaaaaagaggccgggcgcggtggctcacgactgtaaccccacgctttgggaggccgaggcagatggatcgcttgaactcaggagttcaagaccagcctgggcaacctggtgaaaccccatctctaccaaaaatacaaaaaattagctgggcatggtggcgtgtgcatgtagtcttagctacttgggaggctgaggtgggaggattgctcgaacccaggaggcggaggttgcactgagccgagatcatgcca

SEQ ID NO: 712878 - DNA, 442 bp, Homo sapiens
gcccggctgggtcagtttcccacctgtggtccagtcagctgtggccaggaggataaggtcacatagtataaaaacagctgctgcaccacctctgcgagaaatgacagcctagagaaagcaggtactgatgaactggcttcaccagcaacaaaggaaccagaaaatcraaactgctccaatcgcatctgaactaaaaagaggccgggcgcggtggctcacgactgtaaccccacgctttgggaggccgaggcagatggatcgcttgaactcaggagttcaagaccagcctgggcaacctggtgaaaccccatctctaccaaaaatacaaaaaattagctgggcatggtggcgtgtgcatgtagtcttagctacttgggaggctgaggtgggaggattgctcgaacccaggaggcggaggttgcactgagccgagatcatgcca

SEQ ID NO: 712879 - DNA, 442 bp, Homo sapiens
gcccggctgggtcagtttcccacctgtggtccagtcagctgtggccaggaggataaggtcacatagtataaaaacagctgctgcaccacctctgcgagaaatgacagcctagagaaagcaggtactgatgaactggcttcaccagcaacaaaggaaccagaaaatcaaaactgctccaatcgcatctgaactaaaaagaggccgggcgcrgtggctcacgactgtaaccccacgctttgggaggccgaggcagatggatcgcttgaactcaggagttcaagaccagcctgggcaacctggtgaaaccccatctctaccaaaaatacaaaaaattagctgggcatggtggcgtgtgcatgtagtcttagctacttgggaggctgaggtgggaggattgctcgaacccaggaggcggaggttgcactgagccgagatcatgcca

SEQ ID NO: 712880 - DNA, 629 bp, Homo sapiens
cagcaaacaataagcggagtctgaactgtggccagaaagatgtgaaactaagcggcaaagcagcccaaatatgaaatattgagggcaacmcatgtggttagtgtatttatcgataccacagaagcagcagccaaaaggagagcggacatatattctctctctaaagaatatagttgacttaaaaacgtttccccaagaactttactgaaatagcactggaacaagcagcgatagttaaccagggagtctggaactgccatagtattcactgcaagaaaagggaaactgaaattaatgaagcagacaaaactctccccaggtcatggtaccagaaatgttgatggctgatgtaataccttgtttcttatcttcttagtttaagagacacacagcaaaagaagtacagcataatttattgcaaaaaaagagaatattttgaaaattaagtgcagaatagacggtacggtctgagaaagagattccagggcagcctgctcataaaagtgagacagagctaattattgctggagaaaccctctttatgggagttttgcatgattattcataagaaggtggaaagaagtgttgcagaaagcatgttctgactggtcttctgggtgcacagtgca

SEQ ID NO: 712881 - DNA, 2006 bp, Homo sapiens
tgatgaaaatggctcacaagactcacgcctcggagtcttagcagattttgtgcgacccaataattaaccttctgatgactagactttcacagttgtgaaaaaggcgactttgagagtgacatttccaggaagccacagcccttgtcaccccctgcagagctctgaagctgctcacaagcaggccaggtgaaagatttctctcaaaaacggttaagtgcatgctctggctagagaaaaatgagggttgcggcacaatcgactgtgtctcagacatcaggaaagtttccacagcagtttaggaaagaaggcagcgcctagggctgcagaagacgtaatgctctggaaagaaccctgggtgcaattgaaagaggaacctgagaaggataggctcaatcgggtgaggacaaaccggccatttgggaaaagggaaggtgtcttcgtagggtaataccctcctcaatgcccagcccagacctgccctccaggtgcacctgtgtactcactctccttgcaaagagttggcatagcataagaactcaggagtgctttggactctgggaagtccacaccgctctaaccctccctccagggctatgcaccccggatcctggtacatgctgggagtatakttctgaagcctaccgacaaacaggctgagagcagttaacggactacagctcccagcatattaggtggggcgcgtaccactctgcctcttcttccagttctgcgcctcgccctggagcctggcgcatgctgggattgtagtcctgtagccctttgaccaaagggttgggagtgtttatgagaatacatcttccagcaatcctagggaggcgcacacagcccggtctcttcctccagtgacacgcattgtccctgagactagtgcatgctaagattgtagtcctgcagctctttgaggaaagggctggaagagtttatgagcatatatctcccagcaaacctagggagacgcacacagccccgcctctttttccagtgacgcgcactgtccctgaccccggtgaatactgggatggtagtcctgtagccacgggaccggaaagtctgggagtctttatgaaactacatctcccagcaagtagaaggaggcacccacagtccagtctcttccaccagtaatgggcactgtccccgagctgtgtgcatgctgggactgtagtcttgcagcccggtgatgaaagggctgggagtgtttatgagactacatctcccagcaagcccaccgaggggcgcatggccttgcctcttcctccagggacgcgcactttccctgagtccggtgcatgctaggattgtagtgctgcagccctgtgaccaaaggactgggagcgtttatgagactgcatctcccagcaagaccagcaagaagtgcggagcctcgtcccttcctccagatattagcgcactctccctgagcctggtgcatgctgagattgcagtgttgcagccctgtgaccaaagagctttgttatagttatctgtgaagtattcaacaaattactttacttaattattactggaagccagaacctcagttgcgttcactttttggatattatatgagtgaaattgtataatatgtatacttttacatcgactttcttctatgcaacattatagttatggtattaattcatgatattgcagatagctatagtttgtttatttaattttttttttttttactttgtggtaaagtgtacatcaaattaaccattttagctattgtaagtttgcagctcagaaaaattaactacattcacattgttttgcaactatcattcccattcatagggaccttctttcaacttgcagaaacaaaactctatacccattaaataagctccttgttactcccctcaggcttctaggaaccactcttctacttgggtttctagaatttctttactctaagtatctcataattggaatgattcagtatttgttcttttatgactggctcgtgtcactttgctcaa

SEQ ID NO: 712882 - DNA, 2476 bp, Homo sapiens
tacctctataaattaataatttagttcacctgctctatattttgagggcagtgcttctcttcctttgacatgcacaaaattcacccggggatcttattaaaatgcaaactcatagaycacgctttgactagctaagataagggatcagagcatcgaaataagtgtgtaggtgactgtgctaagattctactgctcatttgggcactggctcaccatattaacaaagcttaggacctctagtccttgctggaaaagaaatacacatacataggatgtgactgtgcatatggaatatctgttgtgttctggacattgtgctagacaacagagataagaagtcaaataatctcttgtctctatctgaaaggagcttcatacacagtggcttctggatgtctctgaaactgggttcactttcagatttgattattatatttatgatttgacactggcattgaaccccatgatgtgataaatttttccagaacctgccagaacaactggctttgctctcagcatcaggaagccactggggcacataaataattcatttatgtttgtatttcaccagacaggaacaacttgagctaattttctagccacatttgtttagagctgtttttgtttgtttttgtttgtttgtttgtttttgagacagggtctcactctgtcacctaggctggaatgcagtggtgtgatcagagctcattgcagcctctaccttctgggctcaagcaatcctctcacctcagcctcctgagaagctggaaccacaggcttataccaccatacccagctaattaaaaaaaatttttttgtagagacagggtttttccatgtttcctagacttgtctcccactcctgagctcgagcaatctgcttgcctcaacctcctaaagcgtagagctgtgtttttagtcttttttgaactgttttacaatccagtgttcaattgataagtttggattcactctgatatttgcagatttaacatcctacttcacaagatgctcatagccttgatccattacagccgctacctcatccatctctgctcatatccttgatccaatacagcagccacctcgtccatctctgctcataacctaaactaatagaagccagagggaagaaatggaagccaacgtgagtccagaacacacattttataagagcataagaaatttaaaaatagcaaagtatataatgaagtttgtaatagatattcatggctaaaatttattcttatattaatcaatatattctataaattgggagaaaatattaaacacatgaaaagtaaggaactttcatcattaatatataattaatatgacaagaatgtggtttatgtttttatctttacaagatttaggaacatttggtgcaaggaggaagaatgtataatcatggggagcatgtatgatactggagggagccttttgacaagggggaaatggcatcacgagatatgctatgatcatagctatgtaggaacacagctacctatggtctccccgtcaaatccactgggcagtgttcagttaccaacattgaggtagagctcactctcccagatcagaagagaaaatatacactgcagtcagaagccactgagtaggaagctcctttcagatagaggcaagggatatttgactttttatctctagtgtctagtacaatgtccagaacacaacagatattccatatgcacagtcacatcctatgtgtctgtatttcttttccagcagggactggaagtcctatgttttgttaatatggtgagccagtgcccacatgaacagtagcatcttagcactgtcaccagggcatccatttaaatgctcttatcttagctagtcaaagtgtggtctatgagtttgcattttaataagatccccgggtgaatcttgtgcatgttacagaggaagcactgtcctacatcccatgtgacaggctctcatagtcaccatcatcacgggaatcttgcccatgttacagggaagtgctgtcctacatcatatgtgacaggctctcatagtcaccatcatcaagggaatcttgcacacgttacagggaagcactgtcctacatcgtatgtgacaggctctcatagaaaccaccaccctgggaatctgcatttagagcatttaactatatgggctctgaaatcaggtgacttaggtttagacttccttctactttttactaagcagagaactctggggtgaaaactttacgatgccattttatcacatccaaattggaggcacggggagattataacattttccatggaatattgttttacatataaaatgaaatagtacataggaagcttctgccatgcactaactgcacaataaatattagttaatagtaactcatttagtcctaaggtctataaatttgtacactataattttttgtgactacccaaatttttataattaatgtagatttaaaatcaaggaa

SEQ ID NO: 712883 - DNA, 2476 bp, Homo sapiens
tacctctataaattaataatttagttcacctgctctatattttgagggcagtgcttctcttcctttgacatgcacaaaattcacccggggatcttattaaaatgcaaactcatagaccacgctttgactagctaagataagggatcagagcatcgaaataagtgtgtaggtgactgtgctaagattctactgctcatttgggcactggctcaccatattaacaaagcttaggacctctagtccttgctggaaaagaaatacacatacataggatgtgactgtgcatatggaatatctgttgtgttctggacattgtgctagacaacagagataagaagtcaaataatctcttgtctctatctgaaaggagcttcatacacagtggcttctggatgtctctgaaactgggttcactttcagatttgattattatatttatgatttgacactggcattgaaccccatgatgtgataaatttttccagaacctgccagaacaactggctttgctctcarcatcaggaagccactggggcacataaataattcatttatgtttgtatttcaccagacaggaacaacttgagctaattttctagccacatttgtttagagctgtttttgtttgtttttgtttgtttgtttgtttttgagacagggtctcactctgtcacctaggctggaatgcagtggtgtgatcagagctcattgcagcctctaccttctgggctcaagcaatcctctcacctcagcctcctgagaagctggaaccacaggcttataccaccatacccagctaattaaaaaaaatttttttgtagagacagggtttttccatgtttcctagacttgtctcccactcctgagctcgagcaatctgcttgcctcaacctcctaaagcgtagagctgtgtttttagtcttttttgaactgttttacaatccagtgttcaattgataagtttggattcactctgatatttgcagatttaacatcctacttcacaagatgctcatagccttgatccattacagccgctacctcatccatctctgctcatatccttgatccaatacagcagccacctcgtccatctctgctcataacctaaactaatagaagccagagggaagaaatggaagccaacgtgagtccagaacacacattttataagagcataagaaatttaaaaatagcaaagtatataatgaagtttgtaatagatattcatggctaaaatttattcttatattaatcaatatattctataaattgggagaaaatattaaacacatgaaaagtaaggaactttcatcattaatatataattaatatgacaagaatgtggtttatgtttttatctttacaagatttaggaacatttggtgcaaggaggaagaatgtataatcatggggagcatgtatgatactggagggagccttttgacaagggggaaatggcatcacgagatatgctatgatcatagctatgtaggaacacagctacctatggtctccccgtcaaatccactgggcagtgttcagttaccaacattgaggtagagctcactctcccagatcagaagagaaaatatacactgcagtcagaagccactgagtaggaagctcctttcagatagaggcaagggatatttgactttttatctctagtgtctagtacaatgtccagaacacaacagatattccatatgcacagtcacatcctatgtgtctgtatttcttttccagcagggactggaagtcctatgttttgttaatatggtgagccagtgcccacatgaacagtagcatcttagcactgtcaccagggcatccatttaaatgctcttatcttagctagtcaaagtgtggtctatgagtttgcattttaataagatccccgggtgaatcttgtgcatgttacagaggaagcactgtcctacatcccatgtgacaggctctcatagtcaccatcatcacgggaatcttgcccatgttacagggaagtgctgtcctacatcatatgtgacaggctctcatagtcaccatcatcaagggaatcttgcacacgttacagggaagcactgtcctacatcgtatgtgacaggctctcatagaaaccaccaccctgggaatctgcatttagagcatttaactatatgggctctgaaatcaggtgacttaggtttagacttccttctactttttactaagcagagaactctggggtgaaaactttacgatgccattttatcacatccaaattggaggcacggggagattataacattttccatggaatattgttttacatataaaatgaaatagtacataggaagcttctgccatgcactaactgcacaataaatattagttaatagtaactcatttagtcctaaggtctataaatttgtacactataattttttgtgactacccaaatttttataattaatgtagatttaaaatcaaggaa

SEQ ID NO: 712884 - DNA, 623 bp, Homo sapiens
aggggatgatattttatacacaaattcactgaagcaccatattcttatagtgtcattttaatctacctgaccaaaatctgtttygagacaatataacaccaagtcagggttaggcaggctaagttttagtctttatgctaatttgttaaatgaccttgggtcaatttattgccataatggaaaatcaagcaattctataactttagcctgcctcctttttttttttcttttttagcttttttcttacattttttaaaacattttaagcctcatgaaattgcctttattattttcatttgtaaggttaaaagtttaaaaataggctataggtcccagctacttgggacgctgaggcaggaggatcacttgaggccaggagttcaaggctgcagtgagctgtgatcacacctgtgaatagcccctgccttccagcctgggcaacatgggtagaccctatttcaaaaaaaaaaaaattaagttcatggccagtctgggcaatatagtgagaccccatctctttaaaaaaaaaaaatccactttttaaataacttgagttttaggatttgtacaagccattacctaaataaagtgaaaagttgaaggaattttgacaaagaagagga

SEQ ID NO: 712885 - DNA, 624 bp, Homo sapiens
tctattgaaacccaaggcaaatcagaacataggtacccccatctccatggacacaaacacaaatatctaagaagcataattcaacagagagagaatctaagtgatataatgaaggtaataagggtrtgggctttatgttggaacagacttgggttcaaatggtgattctaccatttattagctatatgaccttgcccaagttaggtaccttccctaaacctatttgcatctcataggacttgtgagattaaatgagaacatagaaaagaacttagcattccatctggcacataataaatatgtcaagttctttcatgcctttgtacatgcccttttttctgcagcatgcctgaataatttctatagtcttccttcaaaaacaggtggtcaagtttgcagcacttctggtcatgccatcttctatgaaattaagacaacatcaccttgtctgtgatgccttccttgcctttaactctatttcctgtgctatgacctggttatttactctttctctctgagcttccatgtatcttctatatatctctcactgtgcactatttcattgtacatgttgacctcctccacagggctaaatgctggggagcatggactatgtcttttcaa

SEQ ID NO: 712886 - DNA, 1062 bp, Homo sapiens
ttctgatacagagagaacatcctgttccagaatatcaggcttttttttttaaattaaaagagagagtctgtgttcaatttatgggaggggtatgtatatatatgtaatttcttctaacaaacactgtattagtattctccagagaagcagaaccaatagaatgtgtgtgtatctatgtatgtatatacatatacagatagatggggttgagaatgatacacagagagagaaagaaggcaaggtttattttaaggaattggatcatgctattgtggagctgaaatgtccgaaaactgcagggcaagacagctggctagaaattcctctaagaattgatgttgcagtgcatagtccaaaggctaggaactcagacagaattttcaggttacagtctggagcctttgatctcttttcttaaggctttcacctgattagatgaaggcccrcctatgttagggaggattatctgctttattcaaaatctactgatttacatgttaatcatatctataaaacatcttcacagcaacatctagactggtatgtggccaaactgggtatcatacccttaccaaattgacacataaaattaatgatcactcttatagtacctacttatggttcaggtcagtgctatagataataacttttcacattttgatagctatttttacatactgtcatactcataaatttcatattgtcataacagtattgcaggttaaacagagtagcaaatttgactctaatgacataagtgaggaaactgagtcatttttaaaatatgcaattcctaaattgtagactagagcgcacacccagtgtcataaagaattgtattagcagtcaataaggaaaaaaaagcaaaagcaatgttagtaagaaactatgttcctggaattaaaattaggcattgatatgggtaggagtatcatctttatcattaaattagaattattctgtgaatttgaaattgcagggaactttcatttagcttgaaatattttcacttacagaaatagctaagctgtgataagacagtttaatggtaagaatgatgca

SEQ ID NO: 712887 - DNA, 1062 bp, Homo sapiens
ttctgatacagagagaacatcctgttccagaatatcaggcttttttttttaaattaaaagagagagtctgtgttcaatttatgggaggggtatgtatatatatgtaatttcttctaacaaacactgtattagtattctccagagaagcagaaccaatagaatgtgtgtgtatctatgtatgtatatacatatacagatagatggggttgagaatgatacacagagagagaaagaaggcaaggtttattttaaggaattggatcatgctattgtggagctgaaatgtccgaaaactgcagggcaagacagctggctagaaattcctctaagaattgatgttgcagtgcatagtccaaaggctaggaactcagacagaattttcaggttacagtctggagcctttgatctcttttcttaaggctttcacctgattagatgaaggcccgcctatgttagggaggattatctgctttattcaaaatctactgatttacatgttaatcatatctataaaacatcttcacagcaacatctagastggtatgtggccaaactgggtatcatacccttaccaaattgacacataaaattaatgatcactcttatagtacctacttatggttcaggtcagtgctatagataataacttttcacattttgatagctatttttacatactgtcatactcataaatttcatattgtcataacagtattgcaggttaaacagagtagcaaatttgactctaatgacataagtgaggaaactgagtcatttttaaaatatgcaattcctaaattgtagactagagcgcacacccagtgtcataaagaattgtattagcagtcaataaggaaaaaaaagcaaaagcaatgttagtaagaaactatgttcctggaattaaaattaggcattgatatgggtaggagtatcatctttatcattaaattagaattattctgtgaatttgaaattgcagggaactttcatttagcttgaaatattttcacttacagaaatagctaagctgtgataagacagtttaatggtaagaatgatgca

SEQ ID NO: 712888 - DNA, 632 bp, Homo sapiens
ttgcatttattttaactttaagcatgtgaacactactgaagaattaaaagtatgaaaatcaagtgtcaatatatctaaaagacggagaagagccctttgtctttaccattctttcttttatttttcctgacacagggtctcattctgttgcccaggccagagttcagtggtgtgattactgcagcctcaacctgccaggctcaagtgatcctctcacctcagcttcctgagtagctgggactatgggactataggcatctgccaccacaccgggctaatttttcctttttttttttttatttttttttcttttgtagaccggccatgttgcttaggctggtctygcctgggctcaagcgatccacctgcctcagcctctcaaaatctgggattacaggcataagccaccatgtctggcctcccttatcattcaagtcacctttttatctcctcctgggaagaacatcagccatcaaataagttggagaatatgaaaggtgatagtgagaaagttgacttggcttatgaggagcaaaatctgtcacagtcagattctcagcatagacttcttcaaaatacagcaaaaaccaaaatagataaaattctacatttccatgcaaaaatagttgtta

SEQ ID NO: 712889 - DNA, 611 bp, Homo sapiens
tattctacaagcttaactgccgtgtgaatgaatatggctcaaatataaattttcaaatatacgttgtcaaaaacaaaatacaaattaatttcaaagcattagaggatttatggtagcttttamtctttatgtatttttttcagctaggggataaaacaaaataacaatttatataatttatatcacatggagtcctgtgaaatgtttttgcattatgtgcttcacttttttttcttttaatgattgtaaacgattgatctagttagactctatgggccaagattaccttaatgaaacatagatatcttagtcaatttaaatatttgagattagttataccatgtatgtggtcattgattcccagggccaaattctattttacactaaatatgatgggtgaaaaataatagcttgagaccattaagatgcaacactaataataataatttcctgaacacttagcttgtgccagacactgtcctaagtgtttttcatgaatttactcctttaatcatcgtaacatcatgtggagttatcaggacataaagccacatgttagattcaggtttagaaacttattaatgttttaattttacaatttaaaatattat

SEQ ID NO: 712890 - DNA, 2620 bp, Homo sapiens
gtatactaaaatgcttctaagtgattcatgccttggacaattgtccttttccaagtccattatttctgcaattttcaatcctgtcttcactatagttgtttactcttttgctaaggcagcaaagccttcagggcacaggctctggagccagataaaggagatctatatgccgggccactgcacacaaggtatataatcttaggcaaattatagccagagttgtactacttaaataagtcaaaacatctgatatggtttggctttgtccctacccaaatctcatcttgaattgtagtttccataatccccatgtgtcatgggagggacccggtaggaggtaattgaatcatgagggtggttatctccctgctgttctcatgatagtgagtgagttctcacaagatctgatggttttataaggtgcttttccccttttgctgcacttatctctcctgctgccatgtgaagaatgacatgtttgcttccccttctgccatgattctaagtttcctgaggcctccccagccatgtgaaactgtgagtcaattaaagctcttttctgtataaattacccagccttgggtatgtctttattagcagcatgagaacagccaaatacaacatctgaagtatttagaatagtctctggtataagagagtgcccaataaatacctaattttattatttattaattcaacaaatgtaattagtgaatactttatggtgttactaagtgccaggtatcacattcaatcctgaatgtagaggatgattaagatagagtcttactcttcgggtgttaaagtctagtggtggccataagtgtatgggtatcgtaaggaagatacccatacttagaatggcagtccagatattgggttatcaatctaagttcactacatttagagaacaagtctttaatgagtggttaagtgagagtctgtaattgagttgtagatatctcaaattagtgctttgccactaaggtagttcatttctcaagacagcctccataatccttgtcatacaatttgcccttttgcgatgtgacttttctaatcttcccatcaagaggtagtatctgtttcctctacactgaatttggactagccccatgacttgctttcaccaatagaatgtggtgaaaatgatgcaatgtgacttgctggcctataccttaagagggcttacagatttctttagactcttgggatccagcctccatgtactgaagctagggctagattatgggatgatgagagatttggtgaaaagagagaagcccagccaattcctggctattttcatcaccctggctagagtgcctgacaagtgaatgaagccctggaacacacaattgtccactttgcacttgagtccctactgaaactgtacactttactagtagagcatgtgtaacatcttgtttttaaatcagcttttatcaatcagactgggtgctccttaatcttgcattcatcctgtgtccccaacacttagcctggactggtccttaatgagaaaagtgctgcaggaaagaagtgagggtcagtaaggggtcagatcaaattgtcaagggcgttggatgccatgctaatataatctaagtatctgccacctggatgtcctcaagtcacaccatccttctggggccaccctttcttctaatattcaaagttgcaaagtctccagctcctattccacattctctggaaagcccaacatcctcctcctcatcctaagcctctccccctaagtatttctggaacttcaaggaagggggatttgagtcagggactcctagttcccttgattccctcatgttcacatttcctgcttatcttgacattgtaattctttctttgactactgtcctctgtctatgttgcttccctcttgatggattctgtcctactcctttgttctcccaaaacagcttgaacaaaatctgtgatgcttggaagacttttttctttttcaatttctttcaacgttttgaatatataatatattcacatagttcaaaaatcaaataatataaaagtatgcatagtaaaaattatcactcccacctctgccctcatctgccttatcacccacctcgccccaccctaagtacttacttgattagcttctttgatatccctctagggtttacttatgcaaatgtaatacaataaaaatatagatctttcttttctttctgttgaacactgttggcaaaagctatgctgcctggttctactttcaaatctgtgctgtcatctgctctctatggggccctccctgcagcacagaaaaatctttctttccagtttttccacagggatgatttcacaacgacaatattttttgaagacaaaattgggacacaaggtctgggaagtggactttttgtagaatgtgggaccagatgatggccttacccaggagaatgtaggactaaagtctctgcarctactccaaacttccctgaccctgaaggtcagactcttactcagggatagtagactttttgtattgtttaaactaacagacagtacgaaagctcatgaaagaattgacaatgatttaaacttgaacattagacatcactgtcttgacatgggggatgtatcg

SEQ ID NO: 712891 - DNA, 659 bp, Homo sapiens
taaaaatacaaaaaattagccgggtgcggtggcgggcacctgtagtcccagctactcgggaggctgaagcaggagaatggcgtgaacctgggaggcggagcttgcagtgagcggagatcgcgccactgcactccagcctgggcgacagagcgagactccggctcaaaaaaaaaaagaaaaagaaaaagaaaaaagtggggtataagctgggcaaggtggctcatgctcgtaatcctagcactttgggggaccaaggcaggtggataacttgagcccaagttctagaccagactgttcaacatggtgaaaccccatctctayaaaaaatacaaaaattagctgggtttggtggtgtatgcctgtaacccagctactcaggaggctgaggcaggaggatcacttgatcccaggaagttgaggctgcagtgagcagtgatagcaccactgcactccagcccgggtgacagagaaagaccctgtctcaaaaaaaaaaaaaaaagaaaaagttgagtatagaattagcctcctataaggagcatctgtgctaaagaaagatgaggaaaagggtgcttttcagattttaataagcacaggggcaatcttgttgaatttcatgggttttggatggggcctgggattctgcatttctcccaagctcc

SEQ ID NO: 712892 - DNA, 742 bp, Homo sapiens
tttttagtagacacggagtttcaccatgttggtcaggctggtcttgaactcctgacctcaagtgatccaaccacctcagcctcccaaagtgttgggattacaggagtgagccatcgtacctggcccatcgtgcctagctcttgcatttattttttatcattttgttttatgtgtttactattatttacatttgcttctttagttctggtcatctgccaaattgataaggttttctactatccccccactttgatgttctccttacttggaagttatagattacatttctgttccttaggggccacccttaaacttcctactaaagtctaaagttatttggtatttgaatctttcttccaaacaggaaaaggacattattttgtttactcattaacaaattcctaccttttcttttattgttgtctggaaattcagtttcaacatttttatcataaaatacaaaaaaaaattcaaacatgacaattttatgctcatcgtttctttttaaacaaaataattttattgatattcarttcgcataccataaaatcaccattgtattttgcatctaacttctttcccttacattcacttttcttcttgcaagctctaatggttatttcagtgagatgtattttggggttttgtttcattttgtttcccttttgtctgcaaatgcctttattttgctttcactcttagatagtagcttttggctgagtatagaattctacatccggag

SEQ ID NO: 712893 - DNA, 602 bp, Homo sapiens
agctcagacctatatgttttgtccatttcacgctccacctcctgctctccccagattgtttcctgtaggttttgtttttgcatctgcccctgccaaagtatgtgggttgacgtggaagacctgaacactctgggagcctttgaagcaaggatggatttattcctttcaggccacagacgccatgccgaggccctggttcccctccagacctgtgcgaggtcctgagcatggcccagtgcatgctaaaatccccacccacacacagaggctgcggatccatccccgaacttcaggggcagcttctgaagtccaggccacctagaaccagggtccctagctccccttctggaacccaatcccctacatggcccaggacccaagcaaggcagggagagtgcgccgtgagtcagcagcagatcaagtggtcgtttattcagcagcgatggcagccagaggcccacatccatkcattcattcactccatagataagtgtttatttaggatctaccgtgtgcctgtgctgaagtgagaggccctgatcgccacagacgtccctgccgctgggagctcacatgctaatgggtgaaagccgatgacaaaa

SEQ ID NO: 712894 - DNA, 1388 bp, Homo sapiens
tgatctgctaaaccatccaaatgtgaacatcctcccgtgcccctgaggctgaaatggcagcattcacatgtatctgatacaaaatcttatttttatgatagagaaaactaaagctcagagaggtttaagtagttaaccaaggtgccatttaacttgacttctgtaaatcaccttgagacttaaaggaacaaattgtttttcctttaaattagaaatctttaatacctggattaggttcaaagggtaaactgtcaagggtaaatttcaagagagataatatttcaaattggtggtatcgaatgataaaaatacataatctgtaatgtgtatttgcaagtaattaattcggctgtagaaggcaagaaaacaaacaggatgggtgaagctcagaagatgcattaagcatagataagtaaattagtaatctgtaagacgtgttcaatataaataaggtaagtggagcatatgcgtgtgaaaatagaaatggttgaaaggacgaagtgactttaactattcatgatatactaattatatatcaagcatgtgtgttcccaactagtcacattacatgaagtatgtaatgtaacgtgtaagtactcagaagaggaactcttgaactatatatgaaaggtaagttttctagaagaggtgatacctaaaccaaattcttaaggctctgagaaggtaagggtgggctggggaggggcattcagatggagacaaccataggtagttgggtatatggatggatacagggtaaggaatcactgtaggttaattctatgaaaatgattgaagtcaaaacggaagcacagtctaaaaagtatgcaggatggaactcaaggagctcacagactgtcaaggaaagaggacgatatgtagcatctgacttacttatattgcaaataactcaaagcatgtattaatatctttartaataatagatccaggttgggccttgggaataggtatagatttggacttatcatgtcaaaagacattaatgttcaaaaattttattaccatgtcatcaaaaatgtctttacttaggaacctaagaggttttcttttaatactaatacagcaactgaaaagagtaaaaccttgacatgcatctgttaaagtcccatctatagtcatcattatcatcattgttacctttattatttaagtaaatctagactgtgttaaataaccaccacacattatcttacttaatatgtaatactataaagtactatacaatatgctatactaatattataaaataggtacaatagtcccccacttatccatgggggataagttccaagaccccagtggatacctgaaacctagaagagtaccacacctgatggccatcaattggaatacacttctgttcatgt

SEQ ID NO: 712895 - DNA, 628 bp, Homo sapiens
tgagcgttgaagcagaaaacgagtgggagccaaaccatgacaattcaatgcctgacactgagaaactagaaaattcaaatgcagatggggcttcatttttgtctactgataatgtttttgaaagccttgatttcctccccacaactgaattcccaataaaggtatggaaagttcattgtgcaatggccggggaattcctgggtcacttgcaccgcttgaagaagcgattagggatggggtcactgtgttccccagtgactgtagtaaagagctgggaagycaaggacccagtcactttctgagcttttgtttcctcagatttcaaataggcattaaaaaaacaaaacaaaacaaacctatttcaagaagaattaaagagagaacttccacaaagaacctgatcatggtatgtgagataacatacaaaattgctaagtcaggaacttgaaccaaagaccttctggttcaatttgcaagagatctacatagccacttgagagggtcagacaaaaattttactattaaaggagggcttgactgtttttctctggactcctgaccactcaggggccatgtgatgtgttctgagaaatggtgtcacggcagtaaaagatagtggccttcttca

SEQ ID NO: 712896 - DNA, 1329 bp, Homo sapiens
taattttaagttaggaaactctactatttaccaatagtttgccactggactctaaaattcttgtgtataaaatgtggataatataacccgttctgactactttacaggatgttgtagggctaaaaataagaaaatatattcaagcaatgtgaaaagctggtggtaactcatttatttaaaaatattatggtagcagttgtagtgttataatttgaatgataaaactaaaagtcacaaatgtccaaaaacaggattatctaaatatataaataatggtacatccttacagttagataccatacagtcattacaaatttttatggatggaggaaatgatatatttgggacttgtctcaatataacataggaggaaagaagtaggtcagggtgcagatgaagatgaaacaggattggccctgagttgacaaccatgaaagctgggtgatgtgtacaggagggtccattataacattctgcttacttttgtatgtttgaaaatctctctaataaaatgttttaaatatatatgaaaagatgtaaatgacatatttaaaaataagtgtaaattatatatagaatgatattatacataaatgatatattgagggaaaagggactgcaaagcagtaatgaatgttgcaatcaaatgtttgttaaaaaatttacgtgtgcctgtttttatggaattacataaaccaaggacaaggagttgtctatatctaggtgacaggattatggataaagtagtttgcatcatatatgatgaggcaccagagggagttttacggagctgaaaaaaggaagagaataatggcagggaggaaaawaaatgggtgttagaaacttgcattagaaatagtaggcaatagttaatcaaagataattctgctcccttagagggaatgagtagaaaatcaagaggaagattttcaaataacctgtgaaattagagaggctatatatgaaagtacatagaaaaagggttcaaatgctgaagtggcatctaactaggcaacaactggtgatgatgccactgctaattaggaggtcattagtgacttttgtgattccagctgcactgtggagaagtgagggcataagctggaatgcaagagtctgaatgaattaaagtcattaggaagagcaaattaaacctaaagccaacagaaatttaaaaactaacaataaagattagaggagaaatgaataaaattaaaaacataaaaatagagaaaaatcaataaaaccaaaagctggttctttaaaaatatcaatacaattgatagctctctaaccagaccaataaagcaaaaaagaaaaaagacacaa

SEQ ID NO: 712897 - DNA, 1329 bp, Homo sapiens
taattttaagttaggaaactctactatttaccaatagtttgccactggactctaaaattcttgtgtataaaatgtggataatataacccgttctgactactttacaggatgttgtagggctaaaaataagaaaatatattcaagcaatgtgaaaagctggtggtaactcatttatttaaaaatattatggtagcagttgtagtgttataatttgaatgataaaactaaaagtcacaaatgtccaaaaacaggattatctaaatatataaataatggtacatccttacagttagataccatacagtcattacaaatttttatggatggaggaaatgatatatttgggacttgtctcaatataacataggaggaaagaagtaggtcagggtgcagatgaagatgaaacaggattggccctgagttgacaaccatgaaagctgggtgatgtgtacaggagggtccattataacattctgcttacttttgtatgtttgaaaatctctctaataaaatgttttaaatatatatgaaaagatgtaaatgacatatttaaaaataagtgtaaattatatatagaatgatattatacataaatgatatattgagggaaaagggactgcaaagcagtaatgaatgttgcaatcaaatgtttgttaaaaaatttacgtgtgcctgtttttatggaattacataaaccaaggacaaggagttgtctatatctaggtgacaggattatggataaagtagtttgcatcatatatgatgaggcaccagagggagttttacggagctgaaaaaaggaagagaataatggcagggaggaaaaaaaatgggtgttagaaacttgcattagaaatagtaggcaatagttaatcaaagataattctgctcccttagagggaatgagtagaaaatcaagaggaagattttcaaataacctgtgaaattagagaggctatatatgaaagtacatagaaaaagggttcaaatgctgaagtggcatctaactaggcaacaactggtgatgatgccactgctaattaggaggtcattagtgacttttgtgattccagctgcactgtggagaagtgagggcataagctggaatgcaagagtctgaatgaattaaastcattaggaagagcaaattaaacctaaagccaacagaaatttaaaaactaacaataaagattagaggagaaatgaataaaattaaaaacataaaaatagagaaaaatcaataaaaccaaaagctggttctttaaaaatatcaatacaattgatagctctctaaccagaccaataaagcaaaaaagaaaaaagacacaa

SEQ ID NO: 712898 - DNA, 2725 bp, Homo sapiens
tcctggaattttttttggtgtgaacatagctaggagaaatgggataaactccatttcttggcttaaacttctggctatggccagttttcttttgttaaaaacatgccttggctcttacaacttcaaaaacacagtgagaaatcaaattaaataagaagcttaactatgaatagaatttaaatgttagttgccaacggttgtctatgagaacaagttcaaaacctgttaattagatctttcatacctgaatctaaataattaaaattccatcacttgttaagtatccatttaaaattccatgataaagagaattgatattttagctttgtttgttaccctgctgcttggcagatgaagaatcaggtccttggctgtgtgacaggtcacagcaaggttccctcctaactgtatcactagaaattagggctcattgtctaagctacttataaacaccggcaaagcacggccatgtttagaaacattactttctcatagctgtggctatccagccatttcagagttctgttaaaaatcaagcctttcagttgagttaatttttttcctgctgtcaaagacattgtcatgaggttttacttttaaacaaggtaatcatcatctgttattcacaattctctcttttaaaaaaaaatttttgaagagatttattctgagccaaatatgtgtgaccatggcctgtgacacagccctcaggaggtcctgagaacatgtacccaaggtggtcggggagctgcttggttttacgcattttacggaggctgagacttcaatcaaataacttaagaaatctattggtttggtctaggaaggcagaacaacttgaagtgaagactccacaacctcttatggcaacccagacattcctttctattgattccaggtctttggataaactcaaccaactgtcaaccaaaaaatttttattcacgactctctttgtccttccttgtgatgtttgttagacttgaagcattatttttacctgtctttcatatccaaattttatccaaatttcacttcagttccaatcatagccatcatactcagagttggtatgtattaagcattcataaggtttagattattaggaatagtcttggctgggcgcagtggctcatgcctgtaatcccagcactttgggaggccgaggcgggcagatcacctgaggtcaggagtttgataccagcctggccaacatggtgaaamccagtctctactaaaaatacaaaaattagctgggcatggtggcaggcgcctgtaatcccagctatctgggaggctgaagcaggaaaatcgcttgaacctgggaggcaaaggttgcagtaagctgagatcgtgccattgcactccagcctgggcagcaagggtgaagttctgtctcaaaaaaaaaaaaagaatgcctgaacctcttctccataaatgtctttggcaggccaggtccaggagctggctccttccacaaaggctgaggccaagaggcaggggcagcaatgaggaccgttaggtcagtgcttctcaaaacccagcacgtgtaagaattatctggagagctgtcaaaacagggactcctgggctccacccccggaaattctgactcagtgggtctgaagtggggcctaatgatttgcatttctaacatgttccacgtggtcctgaggctgctagtgttgggcccacgttgggaactactgctccagattaaacagaactacaataataatctagaaggtccaaatattctagcctgctgtccttcccagtcaccaaagggccactgataccttgataaagtttgccctcaagggaaacaggtccctccagggatgaagcctattagatttccaatatctatgcaatattgcttatctctaggaatgcatgattttaaaatcttagacaccaaagattaatagtcactttcttattacttgaacctctggcaaatcatcacagctcatgagcccctgaataaagaagctccagtgttcacaaccaccatttattcagatcaacagagtctgttcaaatactgggtggccctttaagtggccaactggatgagagaagagcccaaaatatgaatgtgccatatttatttaactgttctccctagtaataaacatgtgagtgtctgtcccaagtttttaacaaaaacattgacaaagaatatgacaaaaacatgacaaggaagatactgtgacatactggaatactctgcccacttatctgcatatttctgtgggatagactattagaacaagaaattttaaagtggatcaaaattacattctttatgttgtacagtgccttcaattcttacattccaattttaagtctgaacatcttccaaaaagagacctctgagtaccactccaataattccaccaggctctgggtctgacattttatagattccttaatttacagggtataagactcaaataaaaccagcaaaataccattattttgttataattaatgtgagctggtcagttaacagtgtttattaagtactaccttttgctaatacatgaaagaaatgaaaatatttaaaaagaaagaaaggaaatctggttcctgactacatgccaaagtacattaccattttatctgtagagaaggtgtgtgctccggagtctccggcattttctcaattcttgacacaagctaagcagcctccatctacaggcctttgaacattcttttc

SEQ ID NO: 712899 - DNA, 2725 bp, Homo sapiens
tcctggaattttttttggtgtgaacatagctaggagaaatgggataaactccatttcttggcttaaacttctggctatggccagttttcttttgttaaaaacatgccttggctcttacaacttcaaaaacacagtgagaaatcaaattaaataagaagcttaactatgaatagaatttaaatgttagttgccaacggttgtctatgagaacaagttcaaaacctgttaattagatctttcatacctgaatctaaataattaaaattccatcacttgttaagtatccatttaaaattccatgataaagagaattgatattttagctttgtttgttaccctgctgcttggcagatgaagaatcaggtccttggctgtgtgacaggtcacagcaaggttccctcctaactgtatcactagaaattagggctcattgtctaagctacttataaacaccggcaaagcacggccatgtttagaaacattactttctcatagctgtggctatccagccatttcagagttctgttaaaaatcaagcctttcagttgagttaatttttttcctgctgtcaaagacattgtcatgaggttttacttttaaacaaggtaatcatcatctgttattcacaattctctcttttaaaaaaaaatttttgaagagatttattctgagccaaatatgtgtgaccatggcctgtgacacagccctcaggaggtcctgagaacatgtacccaaggtggtcggggagctgcttggttttacgcattttacggaggctgagacttcaatcaaataacttaagaaatctattggtttggtctaggaaggcagaacaacttgaagtgaagactccacaacctcttatggcaacccagacattcctttctattgattccaggtctttggataaactcaaccaactgtcaaccaaaaaatttttattcacgactctctttgtccttccttgtgatgtttgttagacttgaagcattatttttacctgtctttcatatccaaattttatccaaatttcacttcagttccaatcatagccatcatactcagagttggtatgtattaagcattcataaggtttagattattaggaatagtcttggctgggcgcagtggctcatgcctgtaatcccagcactttgggaggccgaggcgggcagatcacctgaggtcaggagtttgataccagcctggccaacatggtgaaaaccmgtctctactaaaaatacaaaaattagctgggcatggtggcaggcgcctgtaatcccagctatctgggaggctgaagcaggaaaatcgcttgaacctgggaggcaaaggttgcagtaagctgagatcgtgccattgcactccagcctgggcagcaagggtgaagttctgtctcaaaaaaaaaaaaagaatgcctgaacctcttctccataaatgtctttggcaggccaggtccaggagctggctccttccacaaaggctgaggccaagaggcaggggcagcaatgaggaccgttaggtcagtgcttctcaaaacccagcacgtgtaagaattatctggagagctgtcaaaacagggactcctgggctccacccccggaaattctgactcagtgggtctgaagtggggcctaatgatttgcatttctaacatgttccacgtggtcctgaggctgctagtgttgggcccacgttgggaactactgctccagattaaacagaactacaataataatctagaaggtccaaatattctagcctgctgtccttcccagtcaccaaagggccactgataccttgataaagtttgccctcaagggaaacaggtccctccagggatgaagcctattagatttccaatatctatgcaatattgcttatctctaggaatgcatgattttaaaatcttagacaccaaagattaatagtcactttcttattacttgaacctctggcaaatcatcacagctcatgagcccctgaataaagaagctccagtgttcacaaccaccatttattcagatcaacagagtctgttcaaatactgggtggccctttaagtggccaactggatgagagaagagcccaaaatatgaatgtgccatatttatttaactgttctccctagtaataaacatgtgagtgtctgtcccaagtttttaacaaaaacattgacaaagaatatgacaaaaacatgacaaggaagatactgtgacatactggaatactctgcccacttatctgcatatttctgtgggatagactattagaacaagaaattttaaagtggatcaaaattacattctttatgttgtacagtgccttcaattcttacattccaattttaagtctgaacatcttccaaaaagagacctctgagtaccactccaataattccaccaggctctgggtctgacattttatagattccttaatttacagggtataagactcaaataaaaccagcaaaataccattattttgttataattaatgtgagctggtcagttaacagtgtttattaagtactaccttttgctaatacatgaaagaaatgaaaatatttaaaaagaaagaaaggaaatctggttcctgactacatgccaaagtacattaccattttatctgtagagaaggtgtgtgctccggagtctccggcattttctcaattcttgacacaagctaagcagcctccatctacaggcctttgaacattcttttc

SEQ ID NO: 712900 - DNA, 2725 bp, Homo sapiens
tcctggaattttttttggtgtgaacatagctaggagaaatgggataaactccatttcttggcttaaacttctggctatggccagttttcttttgttaaaaacatgccttggctcttacaacttcaaaaacacagtgagaaatcaaattaaataagaagcttaactatgaatagaatttaaatgttagttgccaacggttgtctatgagaacaagttcaaaacctgttaattagatctttcatacctgaatctaaataattaaaattccatcacttgttaagtatccatttaaaattccatgataaagagaattgatattttagctttgtttgttaccctgctgcttggcagatgaagaatcaggtccttggctgtgtgacaggtcacagcaaggttccctcctaactgtatcactagaaattagggctcattgtctaagctacttataaacaccggcaaagcacggccatgtttagaaacattactttctcatagctgtggctatccagccatttcagagttctgttaaaaatcaagcctttcagttgagttaatttttttcctgctgtcaaagacattgtcatgaggttttacttttaaacaaggtaatcatcatctgttattcacaattctctcttttaaaaaaaaatttttgaagagatttattctgagccaaatatgtgtgaccatggcctgtgacacagccctcaggaggtcctgagaacatgtacccaaggtggtcggggagctgcttggttttacgcattttacggaggctgagacttcaatcaaataacttaagaaatctattggtttggtctaggaaggcagaacaacttgaagtgaagactccacaacctcttatggcaacccagacattcctttctattgattccaggtctttggataaactcaaccaactgtcaaccaaaaaatttttattcacgactctctttgtccttccttgtgatgtttgttagacttgaagcattatttttacctgtctttcatatccaaattttatccaaatttcacttcagttccaatcatagccatcatactcagagttggtatgtattaagcattcataaggtttagattattaggaatagtcttggctgggcgcagtggctcatgcctgtaatcccagcactttgggaggccgaggcgggcagatcacctgaggtcaggagtttgataccagcctggccaacatggtgaaaaccagtctctactaaaaatacaaaaattagctgggcatggtggcaggcgcctgtaatcccagctatctgggaggctgaagcaggaaaatcgcttgaacctgggaggcaaaggttgcagtragctgagatcgtgccattgcactccagcctgggcagcaagggtgaagttctgtctcaaaaaaaaaaaaagaatgcctgaacctcttctccataaatgtctttggcaggccaggtccaggagctggctccttccacaaaggctgaggccaagaggcaggggcagcaatgaggaccgttaggtcagtgcttctcaaaacccagcacgtgtaagaattatctggagagctgtcaaaacagggactcctgggctccacccccggaaattctgactcagtgggtctgaagtggggcctaatgatttgcatttctaacatgttccacgtggtcctgaggctgctagtgttgggcccacgttgggaactactgctccagattaaacagaactacaataataatctagaaggtccaaatattctagcctgctgtccttcccagtcaccaaagggccactgataccttgataaagtttgccctcaagggaaacaggtccctccagggatgaagcctattagatttccaatatctatgcaatattgcttatctctaggaatgcatgattttaaaatcttagacaccaaagattaatagtcactttcttattacttgaacctctggcaaatcatcacagctcatgagcccctgaataaagaagctccagtgttcacaaccaccatttattcagatcaacagagtctgttcaaatactgggtggccctttaagtggccaactggatgagagaagagcccaaaatatgaatgtgccatatttatttaactgttctccctagtaataaacatgtgagtgtctgtcccaagtttttaacaaaaacattgacaaagaatatgacaaaaacatgacaaggaagatactgtgacatactggaatactctgcccacttatctgcatatttctgtgggatagactattagaacaagaaattttaaagtggatcaaaattacattctttatgttgtacagtgccttcaattcttacattccaattttaagtctgaacatcttccaaaaagagacctctgagtaccactccaataattccaccaggctctgggtctgacattttatagattccttaatttacagggtataagactcaaataaaaccagcaaaataccattattttgttataattaatgtgagctggtcagttaacagtgtttattaagtactaccttttgctaatacatgaaagaaatgaaaatatttaaaaagaaagaaaggaaatctggttcctgactacatgccaaagtacattaccattttatctgtagagaaggtgtgtgctccggagtctccggcattttctcaattcttgacacaagctaagcagcctccatctacaggcctttgaacattcttttc

SEQ ID NO: 712901 - DNA, 2725 bp, Homo sapiens
tcctggaattttttttggtgtgaacatagctaggagaaatgggataaactccatttcttggcttaaacttctggctatggccagttttcttttgttaaaaacatgccttggctcttacaacttcaaaaacacagtgagaaatcaaattaaataagaagcttaactatgaatagaatttaaatgttagttgccaacggttgtctatgagaacaagttcaaaacctgttaattagatctttcatacctgaatctaaataattaaaattccatcacttgttaagtatccatttaaaattccatgataaagagaattgatattttagctttgtttgttaccctgctgcttggcagatgaagaatcaggtccttggctgtgtgacaggtcacagcaaggttccctcctaactgtatcactagaaattagggctcattgtctaagctacttataaacaccggcaaagcacggccatgtttagaaacattactttctcatagctgtggctatccagccatttcagagttctgttaaaaatcaagcctttcagttgagttaatttttttcctgctgtcaaagacattgtcatgaggttttacttttaaacaaggtaatcatcatctgttattcacaattctctcttttaaaaaaaaatttttgaagagatttattctgagccaaatatgtgtgaccatggcctgtgacacagccctcaggaggtcctgagaacatgtacccaaggtggtcggggagctgcttggttttacgcattttacggaggctgagacttcaatcaaataacttaagaaatctattggtttggtctaggaaggcagaacaacttgaagtgaagactccacaacctcttatggcaacccagacattcctttctattgattccaggtctttggataaactcaaccaactgtcaaccaaaaaatttttattcacgactctctttgtccttccttgtgatgtttgttagacttgaagcattatttttacctgtctttcatatccaaattttatccaaatttcacttcagttccaatcatagccatcatactcagagttggtatgtattaagcattcataaggtttagattattaggaatagtcttggctgggcgcagtggctcatgcctgtaatcccagcactttgggaggccgaggcgggcagatcacctgaggtcaggagtttgataccagcctggccaacatggtgaaaaccagtctctactaaaaatacaaaaattagctgggcatggtggcaggcgcctgtaatcccagctatctgggaggctgaagcaggaaaatcgcttgaacctgggaggcaaaggttgcagtaagctgagatcgygccattgcactccagcctgggcagcaagggtgaagttctgtctcaaaaaaaaaaaaagaatgcctgaacctcttctccataaatgtctttggcaggccaggtccaggagctggctccttccacaaaggctgaggccaagaggcaggggcagcaatgaggaccgttaggtcagtgcttctcaaaacccagcacgtgtaagaattatctggagagctgtcaaaacagggactcctgggctccacccccggaaattctgactcagtgggtctgaagtggggcctaatgatttgcatttctaacatgttccacgtggtcctgaggctgctagtgttgggcccacgttgggaactactgctccagattaaacagaactacaataataatctagaaggtccaaatattctagcctgctgtccttcccagtcaccaaagggccactgataccttgataaagtttgccctcaagggaaacaggtccctccagggatgaagcctattagatttccaatatctatgcaatattgcttatctctaggaatgcatgattttaaaatcttagacaccaaagattaatagtcactttcttattacttgaacctctggcaaatcatcacagctcatgagcccctgaataaagaagctccagtgttcacaaccaccatttattcagatcaacagagtctgttcaaatactgggtggccctttaagtggccaactggatgagagaagagcccaaaatatgaatgtgccatatttatttaactgttctccctagtaataaacatgtgagtgtctgtcccaagtttttaacaaaaacattgacaaagaatatgacaaaaacatgacaaggaagatactgtgacatactggaatactctgcccacttatctgcatatttctgtgggatagactattagaacaagaaattttaaagtggatcaaaattacattctttatgttgtacagtgccttcaattcttacattccaattttaagtctgaacatcttccaaaaagagacctctgagtaccactccaataattccaccaggctctgggtctgacattttatagattccttaatttacagggtataagactcaaataaaaccagcaaaataccattattttgttataattaatgtgagctggtcagttaacagtgtttattaagtactaccttttgctaatacatgaaagaaatgaaaatatttaaaaagaaagaaaggaaatctggttcctgactacatgccaaagtacattaccattttatctgtagagaaggtgtgtgctccggagtctccggcattttctcaattcttgacacaagctaagcagcctccatctacaggcctttgaacattcttttc

SEQ ID NO: 712902 - DNA, 2725 bp, Homo sapiens
tcctggaattttttttggtgtgaacatagctaggagaaatgggataaactccatttcttggcttaaacttctggctatggccagttttcttttgttaaaaacatgccttggctcttacaacttcaaaaacacagtgagaaatcaaattaaataagaagcttaactatgaatagaatttaaatgttagttgccaacggttgtctatgagaacaagttcaaaacctgttaattagatctttcatacctgaatctaaataattaaaattccatcacttgttaagtatccatttaaaattccatgataaagagaattgatattttagctttgtttgttaccctgctgcttggcagatgaagaatcaggtccttggctgtgtgacaggtcacagcaaggttccctcctaactgtatcactagaaattagggctcattgtctaagctacttataaacaccggcaaagcacggccatgtttagaaacattactttctcatagctgtggctatccagccatttcagagttctgttaaaaatcaagcctttcagttgagttaatttttttcctgctgtcaaagacattgtcatgaggttttacttttaaacaaggtaatcatcatctgttattcacaattctctcttttaaaaaaaaatttttgaagagatttattctgagccaaatatgtgtgaccatggcctgtgacacagccctcaggaggtcctgagaacatgtacccaaggtggtcggggagctgcttggttttacgcattttacggaggctgagacttcaatcaaataacttaagaaatctattggtttggtctaggaaggcagaacaacttgaagtgaagactccacaacctcttatggcaacccagacattcctttctattgattccaggtctttggataaactcaaccaactgtcaaccaaaaaatttttattcacgactctctttgtccttccttgtgatgtttgttagacttgaagcattatttttacctgtctttcatatccaaattttatccaaatttcacttcagttccaatcatagccatcatactcagagttggtatgtattaagcattcataaggtttagattattaggaatagtcttggctgggcgcagtggctcatgcctgtaatcccagcactttgggaggccgaggcgggcagatcacctgaggtcaggagtttgataccagcctggccaacatggtgaaaaccagtctctactaaaaatacaaaaattagctgggcatggtggcaggcgcctgtaatcccagctatctgggaggctgaagcaggaaaatcgcttgaacctgggaggcaaaggttgcagtaagctgagatcgtgccattgcactccagcctgggcagcaagggtgaagttctgtctcaaaaaaaaaaaaagaatgcctgaacctcttctccataaatgtctttggcaggccaggtccaggagctggctccttccacaaargctgaggccaagaggcaggggcagcaatgaggaccgttaggtcagtgcttctcaaaacccagcacgtgtaagaattatctggagagctgtcaaaacagggactcctgggctccacccccggaaattctgactcagtgggtctgaagtggggcctaatgatttgcatttctaacatgttccacgtggtcctgaggctgctagtgttgggcccacgttgggaactactgctccagattaaacagaactacaataataatctagaaggtccaaatattctagcctgctgtccttcccagtcaccaaagggccactgataccttgataaagtttgccctcaagggaaacaggtccctccagggatgaagcctattagatttccaatatctatgcaatattgcttatctctaggaatgcatgattttaaaatcttagacaccaaagattaatagtcactttcttattacttgaacctctggcaaatcatcacagctcatgagcccctgaataaagaagctccagtgttcacaaccaccatttattcagatcaacagagtctgttcaaatactgggtggccctttaagtggccaactggatgagagaagagcccaaaatatgaatgtgccatatttatttaactgttctccctagtaataaacatgtgagtgtctgtcccaagtttttaacaaaaacattgacaaagaatatgacaaaaacatgacaaggaagatactgtgacatactggaatactctgcccacttatctgcatatttctgtgggatagactattagaacaagaaattttaaagtggatcaaaattacattctttatgttgtacagtgccttcaattcttacattccaattttaagtctgaacatcttccaaaaagagacctctgagtaccactccaataattccaccaggctctgggtctgacattttatagattccttaatttacagggtataagactcaaataaaaccagcaaaataccattattttgttataattaatgtgagctggtcagttaacagtgtttattaagtactaccttttgctaatacatgaaagaaatgaaaatatttaaaaagaaagaaaggaaatctggttcctgactacatgccaaagtacattaccattttatctgtagagaaggtgtgtgctccggagtctccggcattttctcaattcttgacacaagctaagcagcctccatctacaggcctttgaacattcttttc

SEQ ID NO: 712903 - DNA, 1331 bp, Homo sapiens
gggcctacgtcgtcctcaatgataagagccaataatgagaacagtattattaatatgtattaatagtattattaataaygtattaatactacttacatgtattgtgagtctattttggtacaggcacttgaggtagcttatctcatttattcttcacgatgaacctgtaagaaggtaatataatctaaatatgtggctcaaataattactgtgtaatctggaacatattaacctcttggtaccttggtttttgcatctaaaaatgggattaataataacgtctatctcagtggtctgttttaaggattatatgagacaatatgaatagaaagcacaatggggtcagacacatcatacacatttaataaatactgggcaaaatcgctgctgattttttaagaatctcacagcctagagtgcagtggtgcaatcagggcttactgcaacctggaactcttgggttcaagttatcctccaatctcagcttcctgagtagctgagactacaggtgcacatcaccatgcccaggtaagtttttaaaattgtttttttagagatggggtcttgttatgttggccaggctggtcttgaactcctggcctcaagtgatcctcccacatcagcctgagtcactgagattataagcgtgagcccctcacccagctactgttgaaattactacattttatggatggggaaatcatgcctgacaaggttaaataacttgcccaaagtcagtagagttcagaacagagatcagaacccagggatatccaaggataaatgccacatgggtaagagctgtagttataagccttccattatactgtctgcattaattgactccaaagatcaaatcctggtctaacgtaccatgatgtctcaggaaaagaatgtttcacagcatacagggctctagaaaatctctagcccaaagtaggaaacaaaaaggcacattactaagctcaagacatctatctgttcccactcctcttgtcttcatcaataagaagataaaagaaatccttgcccattttcttattcatttgctctcatacctatagagcccccattggacaaatgccatgaatactgattcttgtactatggggaataaagaggtactcacacacttattgaaagttaggtataaaacccaatgccaagctttgtgccccgagtccacaggcattttgactgcatgagatttgaatgccatcagatgaggtataaacatgaatattttcgtaagtataaaaatggagaagagaaagtactaatttaaaaatcagaaaacttgtgtatattcatctattcaccaaatatttgat

SEQ ID NO: 712904 - DNA, 693 bp, Homo sapiens
ggtcagtttccggaaacagtgaccctgagaaggcttcctcctgagtatgcataaacattcacagcttgcatgcgtgtgtgtgtgtgtgtgtgtgtgtgtgtgtgtgtgtgtgtatgtttgcttgcactgcataaaaacaattgcaacatcaacagaaataaaaattaaaggaataattctcctccgactctgccgttccatccagtgaaactcttcattctggggtaaagttccttcagttcttgttcatagataggtatatacttcataagtcaaacaatcaggctgggcgcagtagctcatgcctgtaatcccagccctttgggaggccgagctgggcagatcacttgagatcaggtgttcgagaccagcctcaagacctccaacatgggccgggtgcagtggctcacgtctgtaatcccagcactttgggaggccgagacggacggatgatgaggtcaggagatagagaccatcctggctaacatggtgaaaccccatctctactaaaaatacaaaaaaaaaaaaaattagcccggcatggtggcaggcgcctgtggtcccagctactcgggaggctgaggcaggagaatggcgtgaacctgggaggcrgagcttgtagtgagccaaggtcgtgccactgtgctccagcctggacgacagagcgagactctgtctcaaaaaaaaaaaaaa

SEQ ID NO: 712905 - DNA, 1513 bp, Homo sapiens
tagcgttccagtggatggatggaggggctgtttcctgagtttagaatgaaatctgacatgaaactgccttgcttcagctcttcctggctcctgcctactttcaggactcagccctgcctccctccttcctgccgcacttgctgagaggaacacggtgaactactggagcacaacacactgtttctcagggccctttgttcacgttctccctgcagcacccttcttaactacacctggctggcactcactcacctgtcaggactcaggaagccatgcctcagttcgcagaactagcaaggggcttctttgggctcctgccaagcttccatgatgcattcctccatagccctgaaatttgctctttgcttttctttctttttatggatttgtgagatccgtgagaacaaggtctatgcctcgttcgttttggaatcctcagcccctagcacagtgcttggctcagaatggccctcaataatgcagcactgaatgactctaaacaaacagcaagggtatacaatttgtttttggcagaagagcagccaaggtccctctgcacaatggatcctctgtaagccaagctctgctgctgtggatatccagccttctgcatgatcctctcttcagacaaaaatggtgcttgagccggtgcagcaagcaygcccttctgtattcctctcttgaggctgttcgcatttaatatttgtgcctagacgcacccgttcctgctggagggttttaatagcccacttgacattttctattttttggatggttgtttctattaaattgttgtaatgaaacaaatgaacattacttgtttttttttcttttcttcttcaaaatctctttctaaatggactgtatatcaagcttgcaacagcagtagattttttcctgaatgactgagccaggcagtgccttgaaagaaacagcattcaaagtgggcattagaaccaggcccccaagaagatggactccagctgtttcatttcggaggtgaggtaatgagactagagatgaagtaactgctcctcacattgttagtgacagagttggccttataacccaggaacgcttatcatttaagagtttatttattttttaattatcaataacattgtcttgtaataaaggctcttcttaactgctgaagtccaggaataagaataaaaaaattagcccaaattttcagcaccagaaataatattttagtacctttattggtcacttgttctttgtgtacatattttacacttattttaataaacacgtatacataaaacatgtaaagtatgaagaagaaaatgaattacccaaactcaagtccctagagttaagtgctgcaagcaattggatatgtggttttgcaaaatgttgttttctttctctaaataaatataaagtgggatcacactatatatcttgtttggtgacttgcattttgcatcttgctaatatagtgtgaacagcttttaaaccaaaaagtacccacagcctcatttttgatgac

SEQ ID NO: 712906 - DNA, 532 bp, Homo sapiens
cacaactacttaactcatatttctaaatataatctaactccttttctaaaaatatctctagaaattattcttccccctagctgagaatacctgaaatcgtcaagctggtcataaaaaccttatgaatttaacttttgatagaatacatagtatacaatgtctcaaaagaacttcatcagatgtagtttttagttttacccattccaaagacatctggagaggaagaaaggtgactattacactgagttttacagctagaacaccagtgtcatgggagcctataacaagtaagtttctgtactaaagccaaatttcattgcaatcatactgcttcctaggactcacacagacataacattaaaagatctttttcccaaaagggtttttaacaatacaattaaatattgccaccacaattaatatatatactaaataaaagaatataataatttccactgaacatatgcattctatccttcacttctaaagccctactaaaatgrcaagatcaaaagaatgagaaaggagataa

SEQ ID NO: 712907 - DNA, 609 bp, Homo sapiens
atcaaaacttaagcagagaaggggactgtggtaccaccttataaggggataatgaaacgtaggtgctgtccaggaagatggtaacctcacastactcgaccaatgaggaactgagggagggacttgcgtgctaggagatgaattacctgctgtgactgccccaggtgtgccagcctaccagacacccgatattgcaagaacaccattaaaagtcttctttttactgttcctcgtgtttctaagtccattatttgggtttggatgggtgaatatatctctcacaatggagaaaatctctagaagaataaggtgtaaaatttcaagtactgttttcagtattgctaagtaagcttctatcagacttactgtcaggaataaccactgcaaattctagaaaacatccataatcagctacttgaagtcattagagaaaggacaagcagcaaagtctagaaggagagtcaatacttcaatggaggtagaacatggtgtaagttttctgtttttaagctttttacatgaagaacagcatatagttgatcctatgcatggtggataaaatgccaataggaaacatatagtctttctgagatgagaaatcagagaaca

SEQ ID NO: 712908 - DNA, 507 bp, Homo sapiens
tgtctcttccacttttggtacttaaatataatttcaagtgtgcatagtcacttttttttatttttatttttcaacgtcagttccagtttagaatgtattcaactacaaggaacaacaacctgctaaaataggtctaataaaaagtttggaagtagaagatcaagggctgctataagtgttcagtgatgttatcaaagacccaggctccatctatatgtctagtctaccatccacagcacgatgcctttctccctcttggtagcaagacagctgctacaagtccaagcatcacatcaaagctccagacagaaagaagcagggaaaggcaagkgccttctattcataatgtttagtttagtttagtttagttttaatttgacaacagaagacttccacagtaaatggacagaacagggtcagatgacaatctttagaccaatcactgaccaggggacatcatgacggccaaagagctctttttaaaacaaattgcaaatcatgtcttca

SEQ ID NO: 712909 - DNA, 507 bp, Homo sapiens
tgtctcttccacttttggtacttaaatataatttcaagtgtgcatagtcacttttttttatttttatttttcaacgtcagttccagtttagaatgtattcaactacaaggaacaacaacctgctaaaataggtctaataaaaagtttggaagtagaagatcaagggctgctataagtgttcagtgatgttatcaaagacccaggctccatctatatgtctagtctaccatccacagcacgatgcctttctccctcttggtagcaagacagctgctacaagtccaagcatcacatcaaagctccagacagaaagaagcagggaaaggcaagtgccttctattcataatgtttagtttagtttagtttagttttaatttgacaacagaagacttccacagtaaatggacagaacagggtcagatgamaatctttagaccaatcactgaccaggggacatcatgacggccaaagagctctttttaaaacaaattgcaaatcatgtcttca

SEQ ID NO: 712910 - DNA, 667 bp, Homo sapiens
aagtgtaaaatggtacaaccctattgaaacaatttacgacagtttcttctaaaactcaatgcaaatttacccaataatccagcaattctactccaggactttactcaagagaaatgaaaacatatgttcacaaaaaaagcattttacaagggtgtttacagcaattttattcctaatagatttaaattggaagaaaaactccctcaataggaaaatagaaataaatattcaatggaatattactcagtaataaaaacgaattcatacaacaacatgaataaatctcaaaaaactatacacaggaaaaaaaggctaaatataaaatctataatggcaaaataaaattccagaaaagaaaaaaacaatctatgatgaaaaataaagttgattgtgtctgggagaattggagccaaatttgattgtgaagaggcatgagaaaatatwctggagtaaaggcaatattccatatattgatatgagtttgtttcacaggtgtatgtatttttcatgaaaaaagttgcatcaaaactctggacatattaaaattcatttatcgaattgcatgttcagatatttgggataaaatgcactatcatctgcaatgtactctgaagcaaaacataagtttctttgttgaattaagaatagactagtgaacagaaatatg

SEQ ID NO: 712911 - DNA, 583 bp, Homo sapiens
tcagtgatagattggttatggatgtgagggagagggagatgtcaagaaggattcttatgtctctgacttgtacaactttctgttcaataaacatgcactgatgctatgtaccagcctctgtaatcagcattgagaatacaaagtgtaagacacagtcgctgtcccttaagcgcttataatctaggtctgatgcaggaatgtaagcagtaaagtgttagatgctgtgacagcacatgtaactcaaagtcaggagttgtcgagccttgtcctgttccaagagttctgcctgcttctgctgcaactgacatgcrttaagctgtatatcaactgcattcttaaatttgaatgtagccatgtgtccaatttcctttttcctatgtacttcagcaaaaatcatctcctcttattacccaaacagtctaataaagctgaactgcaatggaggtagctttgatcctgtgggatttactgagctacaggctttattaatgtctggccatttgcactctgtttaacaacagaaaaagaaatgccacttcatatggttccagtgtcctacacgaatgagtcatagaaaacatac

SEQ ID NO: 712912 - DNA, 875 bp, Homo sapiens
gaaatggatgaatatttttgcaaaaacatttagcaaatatattttgtagcttaacaactcaaatacaaaacattcatttccacacggatgatcaaaacaagtatttctaaactgaaaatattyttgtttgcaatagacacacatgttctggctgtcaaagcatttctaaataaaacatggttttttgcaaaaggtaatttggcagatatgggcctgtgtagacacagactcaaaataatttagaattatgaatggattcattgggaaataaaaataataacttccaattatttgcttcctctgtagtaggaacggagcaaaagccttatatttttcatctaacctaatcctcattactaaagtaagaaacagagaggaaatctgaggcctagtaaaattaaataatttgttcaaaatttcaccagtagtaaaaagtctgtaataggtggatggcatttagttacaggcagccacaacaaataattttaaaagtcctttttaaaaaacaagagattattttctcatataacaaaaaatactacacgtagggaatccagagccagtacaagaacttgataatgtctgtcaagaatgcaggcccctccctctctctgttccaccctgcttagcttgtaccaggtttactgtcttataacggcaggatggtagctacacctataagcactagacttagaaacaactgcacacaatccaacaggaacagggaggagggagaatagcaggctccaatggctcgggctgacatctttgtgggagaggtgaatcatcaggtccccatagctgcaagggaagctggaaacctgacagaagcagggttatcataacgttcttaggaaagagggtggcaagcattt

SEQ ID NO: 712913 - DNA, 875 bp, Homo sapiens
gaaatggatgaatatttttgcaaaaacatttagcaaatatattttgtagcttaacaactcaaatacaaaacattcatttccacacggatgatcaaaacaagtatttctaaactgaaaatatttttgtttgcaatagacacacatgttctggctgtcaaagcatttctaaataaaacatggttttttgcaaaaggtaatttggcagatatgkgcctgtgtagacacagactcaaaataatttagaattatgaatggattcattgggaaataaaaataataacttccaattatttgcttcctctgtagtaggaacggagcaaaagccttatatttttcatctaacctaatcctcattactaaagtaagaaacagagaggaaatctgaggcctagtaaaattaaataatttgttcaaaatttcaccagtagtaaaaagtctgtaataggtggatggcatttagttacaggcagccacaacaaataattttaaaagtcctttttaaaaaacaagagattattttctcatataacaaaaaatactacacgtagggaatccagagccagtacaagaacttgataatgtctgtcaagaatgcaggcccctccctctctctgttccaccctgcttagcttgtaccaggtttactgtcttataacggcaggatggtagctacacctataagcactagacttagaaacaactgcacacaatccaacaggaacagggaggagggagaatagcaggctccaatggctcgggctgacatctttgtgggagaggtgaatcatcaggtccccatagctgcaagggaagctggaaacctgacagaagcagggttatcataacgttcttaggaaagagggtggcaagcattt

SEQ ID NO: 712914 - DNA, 875 bp, Homo sapiens
gaaatggatgaatatttttgcaaaaacatttagcaaatatattttgtagcttaacaactcaaatacaaaacattcatttccacacggatgatcaaaacaagtatttctaaactgaaaatatttttgtttgcaatagacacacatgttctggctgtcaaagcatttctaaataaaacatggttttttgcaaaaggtaatttggcagatatgggcctgtgtagacacagactcaaaataatttagaattatgaatggattcattgggaaataaaaataataacttccaattatttgcttcctctgtagtaggaacggagcaaaagccttatatttttcatctaacctaatcctcattactaaagtaagaaacagagaggaaatctgaggcctagtaaaattaaataatttgttcaaaatttcaccagtagtaaaaagtctgtaayaggtggatggcatttagttacaggcagccacaacaaataattttaaaagtcctttttaaaaaacaagagattattttctcatataacaaaaaatactacacgtagggaatccagagccagtacaagaacttgataatgtctgtcaagaatgcaggcccctccctctctctgttccaccctgcttagcttgtaccaggtttactgtcttataacggcaggatggtagctacacctataagcactagacttagaaacaactgcacacaatccaacaggaacagggaggagggagaatagcaggctccaatggctcgggctgacatctttgtgggagaggtgaatcatcaggtccccatagctgcaagggaagctggaaacctgacagaagcagggttatcataacgttcttaggaaagagggtggcaagcattt

SEQ ID NO: 712915 - DNA, 875 bp, Homo sapiens
gaaatggatgaatatttttgcaaaaacatttagcaaatatattttgtagcttaacaactcaaatacaaaacattcatttccacacggatgatcaaaacaagtatttctaaactgaaaatatttttgtttgcaatagacacacatgttctggctgtcaaagcatttctaaataaaacatggttttttgcaaaaggtaatttggcagatatgggcctgtgtagacacagactcaaaataatttagaattatgaatggattcattgggaaataaaaataataacttccaattatttgcttcctctgtagtaggaacggagcaaaagccttatatttttcatctaacctaatcctcattactaaagtaagaaacagagaggaaatctgaggcctagtaaaattaaataatttgttcaaaatttcaccagtagtaaaaagtctgtaataggtggatkgcatttagttacaggcagccacaacaaataattttaaaagtcctttttaaaaaacaagagattattttctcatataacaaaaaatactacacgtagggaatccagagccagtacaagaacttgataatgtctgtcaagaatgcaggcccctccctctctctgttccaccctgcttagcttgtaccaggtttactgtcttataacggcaggatggtagctacacctataagcactagacttagaaacaactgcacacaatccaacaggaacagggaggagggagaatagcaggctccaatggctcgggctgacatctttgtgggagaggtgaatcatcaggtccccatagctgcaagggaagctggaaacctgacagaagcagggttatcataacgttcttaggaaagagggtggcaagcattt

SEQ ID NO: 712916 - DNA, 875 bp, Homo sapiens
gaaatggatgaatatttttgcaaaaacatttagcaaatatattttgtagcttaacaactcaaatacaaaacattcatttccacacggatgatcaaaacaagtatttctaaactgaaaatatttttgtttgcaatagacacacatgttctggctgtcaaagcatttctaaataaaacatggttttttgcaaaaggtaatttggcagatatgggcctgtgtagacacagactcaaaataatttagaattatgaatggattcattgggaaataaaaataataacttccaattatttgcttcctctgtagtaggaacggagcaaaagccttatatttttcatctaacctaatcctcattactaaagtaagaaacagagaggaaatctgaggcctagtaaaattaaataatttgttcaaaatttcaccagtagtaaaaagtctgtaataggtggatggcatttagttacaggcagccacaacaaataattttaaaagtcctttttaaaaaacaagagattattttctcatataacaaaaaatactacacgtagggaatccagagccagtacaagaacttgataatgtctgtcaagaatgcaggcccctccctctctctgttccaccctgcttagcttgtaccaggtttactgtcttatarcggcaggatggtagctacacctataagcactagacttagaaacaactgcacacaatccaacaggaacagggaggagggagaatagcaggctccaatggctcgggctgacatctttgtgggagaggtgaatcatcaggtccccatagctgcaagggaagctggaaacctgacagaagcagggttatcataacgttcttaggaaagagggtggcaagcattt

SEQ ID NO: 712917 - DNA, 875 bp, Homo sapiens
gaaatggatgaatatttttgcaaaaacatttagcaaatatattttgtagcttaacaactcaaatacaaaacattcatttccacacggatgatcaaaacaagtatttctaaactgaaaatatttttgtttgcaatagacacacatgttctggctgtcaaagcatttctaaataaaacatggttttttgcaaaaggtaatttggcagatatgggcctgtgtagacacagactcaaaataatttagaattatgaatggattcattgggaaataaaaataataacttccaattatttgcttcctctgtagtaggaacggagcaaaagccttatatttttcatctaacctaatcctcattactaaagtaagaaacagagaggaaatctgaggcctagtaaaattaaataatttgttcaaaatttcaccagtagtaaaaagtctgtaataggtggatggcatttagttacaggcagccacaacaaataattttaaaagtcctttttaaaaaacaagagattattttctcatataacaaaaaatactacacgtagggaatccagagccagtacaagaacttgataatgtctgtcaagaatgcaggcccctccctctctctgttccaccctgcttagcttgtaccaggtttactgtcttataacggcaggatggtagctacacctataagcactagacttagaaacaactgcacacaatccaacaggaacagggaggagggagaatagcaggctccaatggctcgggctgacatctttgtgggagaggtgaatcatcaggtccccayagctgcaagggaagctggaaacctgacagaagcagggttatcataacgttcttaggaaagagggtggcaagcattt

SEQ ID NO: 712918 - DNA, 1552 bp, Homo sapiens
tgaatgggtggacaaattcttacaaatatatagtgaatgcttactttcacagtagaagaatgagaaaatgtattaagaggagatgcagatggagaacctgaagagaaccagagatgcacatattcaatgaggattttctataagtaaaggcaagatcccccaaatcccacactggatcctagattaaacaaaattatagctacatctagacacactagggtggaactttgcacctcaaaaaaaaaaaaaaagaaaagaaaagagaaaaagtccaaaattctgtagaagaaaagatgggttgctgacaataataatggcatttagaatggcatcagatttctcatcagcaaaagcaaatgccacatggtagccagtaatatccacgggcttttccgcagaagttccgtgaaccctcaacagtgccagtgacctaagaagagaattctagaaaggcaaaaacaaaaaataataattttatatttatgatgacagaaaaccttacttaataacctgttttgttttgagccatttgtatggcacgtgagataggcattaatgaaagcaggttattgcataaatttaaagtaagacagcccaaacaacaacttaaccagaaataaaaacttctttcttctgatttctgatttctattgagaatgattccatgatgatgcctaccatctaaatcttctatatcatgtttgcctgtcctgtagctttgtgtttcttcatttctagaccagagatgaggaaaatctatttagactttgtgctttccatgagctctaccttaggcttatccaagcaaataacattgctgtgtgaattttaaagaggcaattaacctcacgttttaaaatcccaaaggccaaatttttataatggaatatatcataggactagatatatgatagttactgaacatttgtatgtactcagtattgggattaacatttaatgtatgctatttcatttaatctctacaacaatgatgtgtgagctattttgtctctcactttaaaaatgacaaaaaagatttcaatagttatttttcaaatgattgtagaaccaggggcagggtttggaatttgaacccagggccatgtcacttaaaagcttatgcctatcaccattgtgttatattaagacttggattttccatgcaattttctagcaagttctcagatggaaagtgcaattacaggacaaacaggttgaaaagagatatccctgcaactgtgttcttcagaccttgtcctgagttccgtgcctagagagcacagcactgccccaaatccactgtgttataaatgtttctctacctcccgatgacctccctctccagtttgcgtctgtaaaatctggcccttcttagcttttgagaatagattccccaccaatggagagaagaatgagatctcaggatatcagataaactaaagatagwtagagaacacctcactgcttctaaaaaagtcaatgtgaaccatcattctcatgtgaactctgattgataatcaccacaaatagacactgacatcagagatcactt

SEQ ID NO: 712919 - DNA, 1889 bp, Homo sapiens
gggttggggggttgtggagaacatttattctccccccattttaacagagacaaggaggtggcagaggccccatcctggcacagaatcaagagcctgtggatcacgtctccgaggaaggcatgaggagaagaatgttttctgtgctttgtcagagttcacgctcactccttggccatcttgagcctgaactattgtggaataaaatacccggaaaatgacggaagagattttgcccaaggttaaggggacatgcctgctctgatcatatctggccatggagggaatgcctatgaaactaagaggaaagtgactgcttagaaaaggagaaacaaagagagagagaaagtgagagaaagagaaaagggataggattctccttttagataaaccagaattactaggacagacttatatgaatttctaaatctcagcagctcttctattcttgccttaattgagtcttttcttgttacaaagaataaagagaaacttcaatgacacttcagttgaacagacatgagataggtaagctagaacataaataaaggcaacacatttagaactggggttcacagagaaatagatgcacctgcatttggaaatcaggccttctagagaagtagaatatcatgaaacattcacccagtcccagtaacctggatatccagtgatctctttagcagctgtcaatcattgctgctgcgtgctctccctttctggctctcagctacttgctggccagcacacatggactgattgctactcaccttagggcttctgccaactgtggcttccacctattcgcttctctctgcttctcacttgctgttccttaactgtcttccagatgttcttccccaactgtcttataggtgctttgagatgctgccaacagatgctgttgtgtctattcaaactccctaaagtgcagatctgaacactcaatggcaaagtttggagccatcaccaactcatcctgctcattcactgggggccagtcaggacagcagggttacagcatttctagagctgtttgcagttgcttgctggagcagcaggggcctgggcatatcagtccatggtctctgcattaggaagacagcataatgcatgggaatgtagatatcatagaaaataagcagatcagtgtcacatgctcagaaaacactattacagtaagagagagtatcatcctcccattagaaagaaaacacacacacacatacacacacttgataataraaggtgatattccaaggatcttggtgtggatagaattgctgtgtacactacagaaaggagaaattttctggttccttcagagatggaggagaaggaaaagaaagaggagtagaagacatgagtagtattaccagactcacaaaatgtttagcgtgagaactctgtgaaactggtgaaggacttgagttcacttgaattcacacctcatttgatgagaagaaacacatacagaaccagaaatagagacaaagagaaagtattttgaacaaacagtgttatacttaacaatttgacaaagtagaagtctccataagacagaatattttattgaacacatactgattactcattaagcatacaatcctctaggaaataccttacattccttgtcataggtaattctcttaaccccatgagatacagatcctgaatttacagaagaatctgaggctcagagcagttacgtaacttgcatgaggtcacatagctgtaagtgttggtgctgtctttatttgtgtcattaaagttctttggcatatggactcactagagatgtctttttttctttgcctttttaatgatataaaatttacagctgaggcgcagtggctcatgcctctaatcccagcactttgagaggtggaggc

SEQ ID NO: 712920 - DNA, 1171 bp, Homo sapiens
gacaaaaaacaaagccataaaaaagaagtaacatgtgaaactataatccaaaagcatattataaaaataaaagaaaaaattaccaaaatattaaaaggactcaccaggtacccgggaaaattggcccacaaaagtcaatccatagatatgtcccagtagaccattagatcttaaatagaataaatcctcaaagcctcctcttcataaaaagaacacatatkcaaggcagcagtaaagatgcattttaaaaaactcaaggaaaaaagtatgaagcaataattttatatccagtcaaggtgtattctaagtatcaaggctatagataagtagttttaaatatgcaaagaattaggaaattctataaccacaagcccttcatgaacaattttctagagtatgagcttcctctaaacaagagatcactgggaaccgtttaacaaaaagaccaatggtgatcatttaatatgtatagtaatagatctaaaattaaaatagaaacaaggataaaagtaaaattataatgttctatgctgtatattatgtgttatatgctgtagtagcatcatattaacaaattacaatggcatttaatcaattaattaaaaaatatttacaatatggctcacagaatataacccaatattatataatgtatacatgttactcatttaaacaaagactttcagaaagactaaaactaaaggaatgagctgctgccactgccacctgtcactaaggctagcaccacagagcatctcacaattaggggcatggggaagctgtccaagaaccaattaattaatgggctacctctccaatgctcagagggagaaagaagaggtaacacagaattaaactggcatttcttcaaggtaaggtgaaatatgtgcactgcaccctgtctctcacaataaatgcagctctaaaacctagatcagcagtgagtttcacattttttttttcaccagtattccacaacctgatctcaatataaaccaaaactcgaaagtgtgtcctagacacaaacggacatctccaggagaagccctctggaactcctctgctttgaggtgtagagaaataactactaacacatagacagtgtgaggaaaaacactgtttttttctcaagtttccttttgtggcaatggtggcagcaacagaagtagca

SEQ ID NO: 712921 - DNA, 557 bp, Homo sapiens
cagaaagtatcctttatctagcaagcttgtgkgatagaacgtgtgcagctggtcatatcttcggacattcttgccaagacgtgtgtccactgagcaggttagatagacgtctttttgaagggttctctctgctgcaggcaatgtctacagaccctactgcagaacaccttggtatgtggggatcaaacactggtcatcatggtgtttttgcttcgagataaatacacagcaacaggctgttctcctactgtgattccaaacctgttggtgaagtctctgtagaagctacagctggggtgggagggtgcaggaagcaaaggttgatgggatgaaggtgaaagttccgatgaatatcggaatgtttgagcagattttatgtgatgtggttgcacctgctgcacctgaatgtgtcatgggggtagatactgcatctggctggcagatgcttcccttaggtcacatgtaaaacagaagacaggtgtattagtccattcttacactgctgatgaagacctacctgagactgggcaatttacaaaagaaagagaggtttaatg

SEQ ID NO: 712922 - DNA, 557 bp, Homo sapiens
cagaaagtatcctttatctagcaagcttgtgtgatagaacgtgtgcagctggtcatatcttcggacattcttgccaagacgtgtgwccactgagcaggttagatagacgtctttttgaagggttctctctgctgcaggcaatgtctacagaccctactgcagaacaccttggtatgtggggatcaaacactggtcatcatggtgtttttgcttcgagataaatacacagcaacaggctgttctcctactgtgattccaaacctgttggtgaagtctctgtagaagctacagctggggtgggagggtgcaggaagcaaaggttgatgggatgaaggtgaaagttccgatgaatatcggaatgtttgagcagattttatgtgatgtggttgcacctgctgcacctgaatgtgtcatgggggtagatactgcatctggctggcagatgcttcccttaggtcacatgtaaaacagaagacaggtgtattagtccattcttacactgctgatgaagacctacctgagactgggcaatttacaaaagaaagagaggtttaatg

SEQ ID NO: 712923 - DNA, 557 bp, Homo sapiens
cagaaagtatcctttatctagcaagcttgtgtgatagaacgtgtgcagctggtcatatcttcggacattcttgccaagacgtgtgtccrctgagcaggttagatagacgtctttttgaagggttctctctgctgcaggcaatgtctacagaccctactgcagaacaccttggtatgtggggatcaaacactggtcatcatggtgtttttgcttcgagataaatacacagcaacaggctgttctcctactgtgattccaaacctgttggtgaagtctctgtagaagctacagctggggtgggagggtgcaggaagcaaaggttgatgggatgaaggtgaaagttccgatgaatatcggaatgtttgagcagattttatgtgatgtggttgcacctgctgcacctgaatgtgtcatgggggtagatactgcatctggctggcagatgcttcccttaggtcacatgtaaaacagaagacaggtgtattagtccattcttacactgctgatgaagacctacctgagactgggcaatttacaaaagaaagagaggtttaatg

SEQ ID NO: 712924 - DNA, 557 bp, Homo sapiens
cagaaagtatcctttatctagcaagcttgtgtgatagaacgtgtgcagctggtcatatcttcggacattcttgccaagacgtgtgtccactgagcaggttagatagacgtctttttgaagggttctctctgctgcaggcaatgtctacagaccctactgcagaacaccttggtatgtggggatcaaacactggtcatcatggtgtttttgcttcgagataaatacacagcaacaggctgttctcctactgtgattccaaacctgttggtgaagtctctgtagaagctacagctggggtgggagggtgcaggaagcaaaggttgatgggatgaaggtgaaagttcmgatgaatatcggaatgtttgagcagattttatgtgatgtggttgcacctgctgcacctgaatgtgtcatgggggtagatactgcatctggctggcagatgcttcccttaggtcacatgtaaaacagaagacaggtgtattagtccattcttacactgctgatgaagacctacctgagactgggcaatttacaaaagaaagagaggtttaatg

SEQ ID NO: 712925 - DNA, 557 bp, Homo sapiens
cagaaagtatcctttatctagcaagcttgtgtgatagaacgtgtgcagctggtcatatcttcggacattcttgccaagacgtgtgtccactgagcaggttagatagacgtctttttgaagggttctctctgctgcaggcaatgtctacagaccctactgcagaacaccttggtatgtggggatcaaacactggtcatcatggtgtttttgcttcgagataaatacacagcaacaggctgttctcctactgtgattccaaacctgttggtgaagtctctgtagaagctacagctggggtgggagggtgcaggaagcaaaggttgatgggatgaaggtgaaagttccgatgaatatcggaatgtttgagcagattttatgtgatgtggttgcacctgctgcacctgaatgtgtcatgggggtagatactgcatctggctggsagatgcttcccttaggtcacatgtaaaacagaagacaggtgtattagtccattcttacactgctgatgaagacctacctgagactgggcaatttacaaaagaaagagaggtttaatg

SEQ ID NO: 712926 - DNA, 1477 bp, Homo sapiens
ggcgcttaaaacaagagtgaaaagcatctgcctgcttatgaattgtacataaggggttcacacgaggtctcttccaaatgcggacctgcaggggccaggtgtcccctccacaatactgactctaacggctctcatgccctctttcgtaaccttttctttttccattattttataagcactgtctcaggaaaggggagctttagcttattttccacccatttctggtcttcttcagggaagagaacacacacacactaggatggagctggcggggcacaggcaccctctgagagggctgcggactccactcctccaggcccttccctcagcctgtggccaccccaaggcactcggccattggggccccctgttctgtgctctctgtgcccgagtcacggccatggtcatgggtcagccgtggtgccagaagccactccgggagcctggagctcactcacctcaggtcagtggcaccgtaccgcccttcaaccagagaggggcaagtggaggagggggtgagagtggccacccctagaggggacatcgacgggtcccggagcagggtgacagacatctcggagagctgcggaggagaggcctttttcaggggacacagggaaggggggtctccggcctctgtgggagctgctccctgtgcctgcgcttaccccacacctgctgcttagggcaccccacccctcctaccagcagccttggctcaaagttggccagctcaagacccccggccccctccagcccctgtggcccctggccggcccctcccatcacttcaggctctggcctgacccaggcagccaccctgccaatgcctcgaggagtgggctgggtaagctctgccctgccgcctcctgcccatgccagcgtgaggtggcgctgggtgatgccatggggacaaggaaggccatgggccagggctggagctccacgcataatgcagcacagcagcagtttcccaggctacaggggtggggtcggtcccaggaggaggagggacagccaagtgggagcttgactgactgggccagaggccacagggtgatggccagacagggtgggggccaggaagacagcagaagcctgcaagygcatgggtgcatccaaggccacaggacccacccggcccctcactcacatccccacctcccatggaccccaggccgacccagggaaaccagccacttaggtatgaggtgtccctctgcactgagacgtgttcctaggaaactcttaactgccttttcccacttggaatgggagttttcctcagggaccactgcctatgggagcccgagccctgcggggcagcctggtgcagcccctctgcacccaccttgctctcgctggcactgacgcagacgtggctgtgtgtgtactctctgttgaatgtgtgcgtgagcaggcgcaagcactgtggacagagcacacgcgtggtcaggggccaggcctcccgggaccc

SEQ ID NO: 712927 - DNA, 1227 bp, Homo sapiens
tgcccctgcccactgctccccaccctccctctccctcactactatgaccagcaagaaacgcccacacttccagtcacctcttgcacttggaagggaggccacagcccaggtctggccacggcctatgtactgcagactctgggggtgctgtggggatggaacacttctgtttttgtgctgcccggaatgcagacacaatgtctggtggtgctgcagccatcttgcatcccaaggacaacacccacacactaagtatggtagagtgagttaactgccattaaaagcacatggaggatgggtgcggtggctcacacctgtaatcccagcactttgggaggctgaggtgggtggatcacctgaggccaggagtttgagaacagcctggccaacatggcaaaaccccatctctactaaaagttcaaaaattagccgggcgtggtggcaggcacctgtaatcccagctacttgggaggctgaggcaggagaatcgcttgagcctgggaagcggaggttgcagtgagactgcgccattgcactccagcctgggcgacaagagtgagactcggtctcaaaaacaaaaaaaaaacagcacatggatttatggatttatggattcaaccttgcagtccagtttttgtttttgttttttaaaaggcacacaaatttaacccagggacttgagaactagagaagtcgtctgggtcatatggggttgtccagagcttacaagaacctcaagcttcaggggctgagtggttttggtggagtgccctggcataggtgccttgcctcgatataagcggagagtgtcatgtagattttctctcgataaggggtgacccggttcagcaggagagagttgtgcatggagctgtcccacgcagcctcaaattggtaaaaggtcctgaaaggaagcagagacaaagtagaagttgatggcgtgggggctgctttcagccaggccrgggacatgcagacagacagagcgacagacaaggggcagccgcaagggagcggctgggggcacaggctggaagcccgggcgcggtgccaggaaggacaggtccctccttactcaggacccagagagtagggtctcttggacgccccgatgagggtgagcccagcattttcccagctccaccacaaatggtgccccagctgtcacgctgaggctggaaggagaggaggcggcagggaatgagaacaagaagggcagagagggaa

SEQ ID NO: 712928 - DNA, 627 bp, Homo sapiens
cataattttccttgcttccatcataatcatatccaccaactgagtgttcttgtccaactgacaagaaagtcacctttcctcataaatccattgaggaagcactgggatggttggagaaggaggcttactgacacccacaaaataggacatttgatctacctcattattgagcgccttctttgcaatggatgccctttgattagcatttctattgacaaatatatattgtcacaattcatgatcatttccccaggcctccttgtcatcaacttttccaccatgtttcttccaactgcctggaagatggtgatctggctaaaccattagctactataaatttgtgtagatctttacctctggccacctttccttacaggcaaagaaaaagactaagtgcgctgcttgaaattctgcttactagwgggattttctttccccactaaccttcagaaccaccctgatgaagctatgctgcagcatttcactttcaaatgatgctcacatgtcatatgggactatctgcatgaatattttcttcctttatatgttgtttagagggaacttcacatgaaactaaagtgtgtccagaagacagatgacaatgcagcaagagtgactgaagtggaa

SEQ ID NO: 712929 - DNA, 647 bp, Homo sapiens
agcacttaaaaagatgtcagaaatagttgaaatcattgaactatgcaattaaataactagcatttccaaccaaacgtatatactaataaaaccaattcagttttaactacatacttccttccttttaaaatattacattaratatattttaacattttttaaagttattttttctctgtattgttacaaaggcatagctgatttgaaaactatgtattttcttaaacttgacagacacgttctatacatgaaaaacattcaacaaataattgtttaaaatgtttacttgaacctcttagggaatttaaaaataatctcagtttctggaatgcagggagttgtttttttatctttttaaagtcactttaaatgatgtagccagttattaaatatttattgtcttgaatagtaattcaagattcaaataaagttacaataatcactaaatttaatctctttcaattccagaacactagttcttttgaactcaataatgagagtaaaggtacctctcgggctttgaccatttgtcaatgcatgtggacgcgcatcttggaggtagataaagtgcaaatgggaggctcgcatgcacgttttccaaaccagctttccaggagacgtggttctccgacagctgggattgtttc

SEQ ID NO: 712930 - DNA, 647 bp, Homo sapiens
agcacttaaaaagatgtcagaaatagttgaaatcattgaactatgcaattaaataactagcatttccaaccaaacgtatatactaataaaaccaattcagttttaactacatacttccttccttttaaaatattacattaaatatattttaacattttttaaagttattttttctctgtattgttacaaaggcatagctgatttgaaaactatgtattttcttaaacttgacagacacgttctatacatgaaaaacattcaacaaataattgtttaaaatgtttacttgaacctcttagggaatttaaaaawaatctcagtttctggaatgcagggagttgtttttttatctttttaaagtcactttaaatgatgtagccagttattaaatatttattgtcttgaatagtaattcaagattcaaataaagttacaataatcactaaatttaatctctttcaattccagaacactagttcttttgaactcaataatgagagtaaaggtacctctcgggctttgaccatttgtcaatgcatgtggacgcgcatcttggaggtagataaagtgcaaatgggaggctcgcatgcacgttttccaaaccagctttccaggagacgtggttctccgacagctgggattgtttc

SEQ ID NO: 712931 - DNA, 647 bp, Homo sapiens
agcacttaaaaagatgtcagaaatagttgaaatcattgaactatgcaattaaataactagcatttccaaccaaacgtatatactaataaaaccaattcagttttaactacatacttccttccttttaaaatattacattaaatatattttaacattttttaaagttattttttctctgtattgttacaaaggcatagctgatttgaaaactatgtattttcttaaacttgacagacacgttctatacatgaaaaacattcaacaaataattgtttaaaatgtttacttgaacctcttagggaatttaaaaataatctcagtttctggaatgcagggagttgtttttttatctttttaaagwcactttaaatgatgtagccagttattaaatatttattgtcttgaatagtaattcaagattcaaataaagttacaataatcactaaatttaatctctttcaattccagaacactagttcttttgaactcaataatgagagtaaaggtacctctcgggctttgaccatttgtcaatgcatgtggacgcgcatcttggaggtagataaagtgcaaatgggaggctcgcatgcacgttttccaaaccagctttccaggagacgtggttctccgacagctgggattgtttc

SEQ ID NO: 712932 - DNA, 606 bp, Homo sapiens
tcccaacttccctcttaacataggcaaaattggacatcccaaagatggcgtagatgaacatgaccaggaaaagaaggaggccgatgttaaacaacgcaggaagggacatcatcaaagcaaagagcagcgtgcggatcccctttgctcctttgatcagwcgtaggattcggccaatcctggcaagacggatcactcggaacagggtaggggacacaaaatacttttctatcagttcagccagaaacattcctgtagaaaatcaacaaataacaaaaatattgttatacttaatagtagcaaatgaaagtttacataagtacattagttttacaaaatgtgaacaggacagttaggtacatgtatatatgcaaataatctgcaatgtttgttgagcaaaatgaaactggtatgtttggtgttataacatttacatctttatattaaatgaagataataagggccatttttcctagttcaaggaaagcatctatcaaaaaaatgactcaaccctggaaggtccaaagacatcatgaagcatacagtggccaagtacagaaattaatttatatgtccaaaatactagttctagtatttgcataagaacta

SEQ ID NO: 712933 - DNA, 681 bp, Homo sapiens
gagaaaaatgacagagtccgaaaatcggaatctgaagacagcataagaagaaaaggtttccgtttttccttggaaggaagtaggctgacatatgaaaagagattttcttctccacaccaggtaaaaatattaaattacatgaattgtgttctcataaattttttaaaaraatatgccagaatttaatggagagaaaaccgccttccacctggatggcacaatgctttcagagtagtgatgattatcaagtgttttggctatcacttcagagaatttgtgagttttgcaactttttggaatcccaggaaggaaattttagatccctctgggtttggaaaaatttgcggttttgaggttttcttaaagactgaaaaatcttggagaaattttccacatcaggaattatcagcagatggttcccatctcttcttaactattgtgcgtggatctagtgaactttgggttttctgagtgacaaattcccagaagtggaccagagactcttttaggccacctgcggggttgttcccataaggtgcaaacatcacttgccaagtgcattcttcatgcctttgtttcaaaggggactgaaacaaaatatctctaaaagtagccaaaactctcagataggcaggtactgagggagatttatgacacgaaataaaaagtggtgtttagttg

SEQ ID NO: 712934 - DNA, 856 bp, Homo sapiens
attttttgaaataaacactacagaaaggaaatagaagaaaggaagtgttttcaacaaaatatcaggaacacataaataaatgtatggaaaataaatgaacctccacttcgatcttatgccaagtgccagaatcaataaggattgtagactaagcagaaaagctaaawcaataaaacatctgaaataaaacacaggagaacatctttgagaccttggggtaggcaaaaatttattggaaaacagacaaaaagtgctatctattatttaaatgtccatgaaatttcaaacaatggagacctactgaacaaaaaagaaaagtctagtaatatacacatgggtgaatttcaatttgaagtattcaagtaatatttggaaaagtcactaagactgtcaggtctctgaggtaaccacctaggtagagagagattccatttactgagttagcaaatatcagaagagaagcaaaactgtggagaaaaagcagtaagatgaattttggacctgttgaatttgagatgcctgggagatagtctttcaaatgtaggtattgaataggcaggtgggtatgtatttctagagactaggaggtatgcttgaacagaaaaatagattttgaaatatgaactattataaaaatgtaacttattataaaaggaaaactaaagtaagaggggtctagacagagagagttctgaataaatccagtatcaaatgatttgttagaggaagaaaatcaggtgagtagcatccagggaggtgtggatcacagaagctaagggcagaaaatatttcaatgaacaaggaacagaaaacaatgcctgaaacttctaaaagggcaagcaagcaagataattgt

SEQ ID NO: 712935 - DNA, 636 bp, Homo sapiens
tacatatgtaacaaaactgcacgttgtgcccatgtaccctagaagttaaagtattaaaaaaaaaagaataggaacgtttgagaattgaaaaaaaaaataaccagcatatttttgctgttggcctttatctaccgaggttgagcatcttggtccagccatgggtcagccaccgttctttatccacagttctcttggaacctcctgttgtggctgattggaaatgtagccccactcggaacacctctgtgattgtttaggtcgtggttctcctcatgctccgcaatctaaatccaagggtcttctcagagtagtttactgaagtcctatcatcaggcaggtaacaatgtgttatagatgaggcagcaaggtctggaaaagagaagtgactaacctgaggcttctaggtgagggagtaggaagtagaccttttcattactctgtgctgtgcttccactgaaaaatggaagagagccagggtcagaagaggggagagttggaggaatagacaaaaacatraaaaatggaagtggctactacttccttttctagcagtaaagacatttatacaaacatacctactattataatatatgcatggtatagtagatatacagctatgcaagccttcccactccc

SEQ ID NO: 712936 - DNA, 771 bp, Homo sapiens
agtgagataataagaggactgagtatggatagtatcaagagactctttataataggtaaaatcccagaggaaagtgagatgtgaatatagaaaaattccagatcaaaggaacatctcacaagcacctgaattctgaccagatgtgaaacatggctgttaaaatctccaatttgtggagaaatgatcccccacatcatacccagtagaagcttgtttgaatcagtgtactattcaccattgttaaatggtgccaagggtgtcacttctttttaggagtgaacttttactttaagttcaatataaagtgctcaatgaatttttacaaagtgagtacactctgtacttgacattcaaatctggaaactaatcatttccaactcccccttctagccctactcatcactcctccaagtgaaaaaaatccygattttttttttttttttttgagaaggtatatcgctctgtctcccaggctggagttcagtggcctcggctcactgcaagctctgcctcctgggttcatgacattctcctgcctcagcctcccaagtagctgggactgcaggcacccgccaccacgcctggctaattttttgtatttttattagagacagggtttcaccgtgttagctaggatgtcttgatctcctgacctcgtgatccgcccgccgcagtgtcccaaagtgctgggattacaggttgtgagccgccgtgcccagccaaaataatttttttaaacctttttctttgttaaggatagagctgtggtct

SEQ ID NO: 712937 - DNA, 541 bp, Homo sapiens
ccagggccaaacagaacacctctctggctgacttgacagattgttagaaagcctcataattagcgttgctcctttgcatgggaagtgatgtttattcatttgtactgtaagttcccacagacgccttcaggacaataggattttctctgattatttgctgtttacctgcttatttagaaagtaaccagcagaactgctgctttagatctaattcttttttttttttttgagatggagtctcccactgttgcccaggctggagtgcagtggcgcgatctcggctcactgcaacctccgcctcccagattcaagcgattctccagcctcagcctcccaagtagctgggactataggtgcatgtcaccacacctagctaattttttgtattttttagtagagacggggtttcaccttgttagccagggtgatctcgatctcctgacctcgtgatccgccygcctcggcctccaaaagtgctgggattacaggcgtgagccaccaggcctggcttagatctaattctaaccaagagagggtgatg

SEQ ID NO: 712938 - DNA, 948 bp, Homo sapiens
tgatcagttaacctgtgtaagtttaagaatatacccaattaaggctgggygcggtggctcacgcctgtaatcccagcacttggatcacaaggcaggtggatcacaaggtcaggagatcgagaccatcctggctaacatggtgaaaccccatctctacttaaaaatacaaaaaattagccaggcatggtcatgggcgcctgtagtcccagctactagggaggctgaggcaggagaatggcgtgaacccgggaggcagagcttgcagtgagccgagattgtgccagcctgggcgacagagcgagactccgtctcaaaacaaacaaacaaacaaacaaacaaaaaagaatatacccaattagaataaaatcataagcttctattatactttaccctgataaatcagagaaaatataactttttcattaagccaaaaataagtctcatttgcaaaatttcactgaaagcatgtaaactcagactctttgaccgtttaagtttctataagattatcatctttaacatatcaaaagtatttattcaatttttttaatttctgggaattttttaaaatattcaattgatagaagcacttatttcaaataaatcaattagaagggctcctttaatctttaaagtttcctctgagcacctcattgattagtcactgcattttttacacagagtcatctctccacatccatgggcttcacattcatggatttaaccaacctcaaattgaaaatattctttaaaaaatgtacatctgtactgaacatgtagactctttttctcttcattatgctctaaacaatacagtataacaaatatttatacagaatttacattgtattgggtatggatatggtttggctctgtgtccccaaatctcatcttgaattgtaatccccacatgtaaagaaagggacctagtaggacatgactggatga

SEQ ID NO: 712939 - DNA, 948 bp, Homo sapiens
tgatcagttaacctgtgtaagtttaagaatatacccaattaaggctgggcgcggtggctcacgcctgtaatcccagcacttggatcacaaggcaggtggatcacaaggtcaggagatcgagaccatcctggctaacatggtgaaaccccatctctacttaaaaatacaaaaaattagccaggcatggtcatgggcgcctgtagtcccagctactagggaggctgaggcaggagaatggcgtgaacccrggaggcagagcttgcagtgagccgagattgtgccagcctgggcgacagagcgagactccgtctcaaaacaaacaaacaaacaaacaaacaaaaaagaatatacccaattagaataaaatcataagcttctattatactttaccctgataaatcagagaaaatataactttttcattaagccaaaaataagtctcatttgcaaaatttcactgaaagcatgtaaactcagactctttgaccgtttaagtttctataagattatcatctttaacatatcaaaagtatttattcaatttttttaatttctgggaattttttaaaatattcaattgatagaagcacttatttcaaataaatcaattagaagggctcctttaatctttaaagtttcctctgagcacctcattgattagtcactgcattttttacacagagtcatctctccacatccatgggcttcacattcatggatttaaccaacctcaaattgaaaatattctttaaaaaatgtacatctgtactgaacatgtagactctttttctcttcattatgctctaaacaatacagtataacaaatatttatacagaatttacattgtattgggtatggatatggtttggctctgtgtccccaaatctcatcttgaattgtaatccccacatgtaaagaaagggacctagtaggacatgactggatga

SEQ ID NO: 712940 - DNA, 645 bp, Homo sapiens
  misc_feature 442, 443, 444, 445, 446, 447, 448, 449, 450, 451, 452, 453,454, 455, 456, 457, 458, 459, 460, 461: n = A,T,C or G
acgaagacaatatttttctgcagtagttcagaaatgagacaaaatcagaatataagaaaatgtattaaactgtatacctggagtataaataattctttgcttaaataaacacagcatgatgcaatcttggtgtgattcataaagcccttcaagactgttcagaaccttaaccactactaggacacatacaatttttgtatgaaacataaagaatgtctgagaggttttttttttcccccgtttcctgacacctaattcttygacaccaagtgtcctgcaattcaattcaattctaacactacctggagttagtgtcagcctccacaggtttagtgggtcggtcccacaagactgccctcccttcagactctagttgcaaatattgcgcttccaggttgccacacttctgtcagctatagatttgggggtcttcacaaatctnnnnnnnnnnnnnnnnnnnntagaatagctcacaggactcaggaggacactttcctcatgtttactgtttgatcataaagggtctgaatgaacagccagtggaagaggtacttggggaagtctggaagtgtcccaagtgcagaagcctctggccccagtggagttgggctataccacagtcctgatgggtagataagttcacca

SEQ ID NO: 712941 - DNA, 2232 bp, Homo sapiens
  misc_feature 27: n = A,T,C or G
ctgtggtattctatacaagcaacacanaaagggcccaagacacaagcatggctggttaaatcctttgccactggtgattaactcaatctccagcctctctcctctctctgcaggtggcagggtggagctcaatgttccaagcttctaatcaaggcttggtctttctagcaaacagcccccatcctgaagccatataggggctggcccaagagtcatctcattagaagcctcacagagaggctcctgtcactcatcactcaggaaattccaggggttttaggagctttgggccaggacccagggggcaaagaccaaatatcttatgatgaaactgcaatatcagattaagttttttgaatgtttgaatagatgggatttgctatgcatttttaattaactgagacttctgtcattgagactgatgaataaaatgttaaaatcttctgaaatgtggaaagtaaaagctaaacagagccaaggtgagatgaagtgatactgtaaacaaccaacagtgatggaaatgtccttctttacattctatttacaatttttattactgaaactgcatataatactttcctgagaacaaacctttcccctctccatttttaggaagatatttaaaattatgattatcatttctacagttttgggaaatagtcattaaatcttttgaccccctcccctccaaattataatagtctctctatattttttggtgtgttttttttccccacaagaaacattgttacctttttttcatttctacttctcctgaggccctaggcccattgtattaacccaccaaggttatgtttaaacagtaaggagccaatttggcaggacatgaagtggtattaggatgaatgatgtatccttgtggcctggaaaaaaatagatgtaacattatacatatttgcttaataaatgataaagcacatgaaccacagatacagtttaaagcaaatgggatcttgccactatctaattttgatcaaagcactttttgcataattacttagattagggattgccatttggttaattacaataaatatataagcaaagtgtaattaaaaggttgcagtgagggtaattttatttctgatcattttatgattttatacttttacaggacaaataaacttatgctttgcattttatgtacctaggtactctgatagttttgtttagggtttccaacatttgcaacctttttttttttcttttgggaagttgtgtgttagggagtcatattctcattaccctggttacaagcttctcagtaaccaccatgttaccttgcttctaagatgcacattttcctattaaaaaatggagcacattttacaatcatacacacacacagacacacacacacttcttggagtgtttctgacttctttgccccacccctaccattgcagttattcagttgatgatgccctttcaaatgagggccattttagaacagagggaatggtctgttgactttgttttaaatggtggcaccatgcatctcccttgggcctgctgggatgttaaatggtgagcccagcagggaggaggcccttgatggtgcccatagcttggtgcaatcaaggtgaagtggatggagagttcctgatgctgattaaaataagcactgaatgcacaacatgtggccatttgtaaactcatttctcatttcacacacgttactgtgctttgccttcctagctgcatttgttggcccagtatgtcctcatttactagatgctgaaacaaagtgatttagtgactgtcagacaaatactggcatagggatccgactccagtcatctgccttctgattccacactgttcttaccccatcaccgttctgccatccctgagatgtagcagggcagccttggccactctcttcttcctgtggattrtactaggtcacccctcatctttaaatgttgaggactcggccgggtgtagtggctcacatctgtaatcccagtacttggggaggccaaggcaggtggatcacttggggtcaggagttcaagaccagcctggccaacatggtgaaaccccgtctgtactaaaaatacaaaaaattctccggccgtgtggcgggcgcctgtagtcccagctacttgggaggctgaggcaggagaatggcgtgaacccgggaggcggagcttgcagtgagccgagatcccgccactgcactccagcctgggcgacagagcgagactc

SEQ ID NO: 712942 - DNA, 1151 bp, Homo sapiens
atggtaaattaatttcactccaatggttgaaatattttaaggaatctgaatgcacattaatttgcatactatttggtactttattgcagtatgtaatgtatctgaagaatgtacgtgattaccacacacactttccctttaagtagtaaattttaatttaaaaagtgctttaaaattcactggagaaagttttgcctttaacttattcttctgtactgtcactgatgtcattaatcttatatgtttcatgtatgttccttacaaaggctgtcctaatattataaaggagatatacaatatcctgggaatcttctgaaaatacacattctgattcagtgtgtacggggtgaggtctgagattctgcagatctattaagctcccagttaatgctaatgcttctgatctagtaattayatttttagtacagtatcaaggtcttctaatttcttgaaatcatcagtactaattgaagttacctgatttctttgttgatggcatccaattgttcctgaagcatcatggctagcgtctgggcatcggaatgaccacttggagagagaagatccattgagctaaaaattgtttctctgtcatcatcatcaatatcagacatttcagtgtcactttcaaaagggtggctgcttagtactccaatctgttgagttctattccactcgtgatccccaagagatttcacctgaatggtgaatgaaaaaatgcagaatatttatcatattgctcattttcaaagcattaatctcaaagacagcaacaacaacaggcatgcttttacaactgaccttgcaaaaactgaaccaattattaacattttaatttatttgcttccataaaatagttccttgacatcttaagtaatgtgagggattgtcagtataaatatcaagattttagtagaaataaagatgataaacttctatatgttttatagttcaatcatattccaaggtaacaattactttaaagcatgtatttgtaatacttttccttatttccaaatataacaatctatttatttgtactcaagcactcacgacttaaactaattagtcttcctatattttcttattataagctcagaccacaaatattatcacataagaaattacacaggaattctcttcccaacatt

SEQ ID NO: 712943 - DNA, 650 bp, Homo sapiens
caatgttttctatttattacagtctgtcttccctggcactggcagcaaccaataattgttttacagagagagtttaacaaccacctgaccatcacctattggttgcctaactacctactctaacaatataaccactaaatatttgaatatgcagacattagagaatgtaagacagtttatgacagattatttttcgggaactggttacagaattaggatgaggatttatgcataattgatatttgtctctattggtcttcacagatataagtgcacatatggaggattttgagacattggtgacccaaagcaattgtctttaactttttttgacttccagttcttagtgaaggcatttcagccagtggagaaaagaaattgtgtgccaatgctaagtcattcacttcttgtgttggtgtactataggtttttaaacattatgattactggtattcatttgcttttttcagcttccttgaatttctaaaacagtgatttctaaatgctttagaataattatatattattatcatgcataatatcatgcccatatcctttggtgtaaacctaaaatgtgtataatrtatcatatatatttagtctaaatttaaaaatatgtaaacatgtttcaatttatattaatcctgtga

SEQ ID NO: 712944 - DNA, 312 bp, Homo sapiens
gccytgtactgagtgttagggtgccaacatggaacaaaaatcaatacagttccatcaacatgaaggtgattgtctaatcaagaagacacagattaatcaattagacacataaataagtggagattagaattgtgataagtgctaccatgaaaaatgcacagtgttctgagagcacagaggaataatgtatgtaaagtgtcttgtatgtagtaggtgctcaataaatcacagtgattattactagctcataaaacccagccctttgggaggccactggaaaattctcaagtgcaaatactcttctccccatca

SEQ ID NO: 712945 - DNA, 561 bp, Homo sapiens
ttaaaaagacttttgaaaaaggagggagagtgtcaaatgttgagaagggttaaggacaagagtatcaatggaaatttttgaatttttgttttytctctctctttttttctgttttttttttttttttttttttaacaaccagaaggatttaaagtgatcggaaaggaatacagttctcaatgtgtgattcagtgttatgccatcctagtgccaaggttcctacactttaaaaaacatgggcataactaagaatatcgcattacagatgaggaatctaaggcccagggatttcatttgccctccaaggcaaaataaatttggttactggttggacaaggattagaatccaggtgtcctgactttgtgggtttccatctcactctttccactaaagtgaccaatcctcagacttaagtggtttgtctagcttctcagaaacagctaacctacagacccctttacagatctgggagaaactgaggccacagagggtcaagaacaagttcaaccccctgctcaccgtcctttctctccaccctctctccatagatgtgacagaca

SEQ ID NO: 712946 - DNA, 647 bp, Homo sapiens
taaactacaaggtacggtgaagcatttggccaagtatcrtcaatccaaaaagctgttctaatgccctgagcattcccagtgcaacgttggtaccttggaaacatgtaaaaggagtatgggtggctcaaccccatctgctacaggtactagaacaatctacagccttactatgcaaaatgagatgtgctgacctgcagagcaccacctccaggttatgtcaaaaatgcagaatgtcaggccctacctcagacctagtgaatcaaatatctgtattttaaaaaaatcacccagccaagtctcacacacattcaagttggacaaaggtgatctatagtacatgtggccccttatacaacaggctgcatctcaatatcttgatagccttaaactatttcacaggtagtcctgtaagtctgccatacatgattctccaaactggcatcttttataaacttcgttggttccttatttttcaaccatttgcaaagttaagtcactcaatcacctatgcaaaccataattaattcctttgacattaatagtccggtgacttctctctcctgttaccccaaagagactgctaattgccctccaattgtttacctttgtattgttttatgagagctcagagaaagatggaagatact

SEQ ID NO: 712947 - DNA, 647 bp, Homo sapiens
taaactacaaggtacggtgaagcatttggccaagtatcgtcaatccaaaaagctgttctaatgccctgagcattcccagtgcaacgttggtaccttggaaacatgtaaaaggagtatgggtggctcaaccccatctgctacaggtactagaacaatctacagccttactatgcaaaatgagatgtgctgacctgcagagcaccacctccaggttatgtcaaaaatgcagaatgtcaggccctacctcagacctagtgaatcaaatatctgtattttaaaaaaatcacccagccaagtctcacacacattcaagttggacaaaggtgatctatagtacatgtggccccttatacaacaggctgcatctcaatatcttgatagccttaaactatttcacaggtagtcctgtaagtctgccatacatgattctccaaactggcatcttttataaacttygttggttccttatttttcaaccatttgcaaagttaagtcactcaatcacctatgcaaaccataattaattcctttgacattaatagtccggtgacttctctctcctgttaccccaaagagactgctaattgccctccaattgtttacctttgtattgttttatgagagctcagagaaagatggaagatact

SEQ ID NO: 712948 - DNA, 594 bp, Homo sapiens
acctgcatggaagctccatgaaggcaagcattttgttttgttgttaatgtattttttttttttttgagatggagtctcactctgtcacccaggctggagtgcagtggtgcgatctcggctcactgcaagctccgcctcctgggttcacaccattcttctgcctcagcctcccgagtagctgggactccaggcgcccgccaccacgcctggctaattttctgtattttttttttttttagtagagacagggtttcaccgtggtctcgatctcctgacctcgtgatctgcccgcctcggcctcccmaagtgctgggattacaggcgtgagccaacgcgcccggccattgttaatgtattttaagctcccacacaacacatagtaggtgttgaaaaaaatgtgttaatgaatcttgtttaagacattatttttgaagttttaaaagatataatggtatattttaaatatatacaaattaatagagagaacagtatgtcaaatgcctatatatccatcatccaatttcaacacttgtaactgtgaacaagcttttgccatgtacacagcctcccatctgcaccctagatgattttgaa

SEQ ID NO: 712949 - DNA, 606 bp, Homo sapiens
ttttgaaacatgcgaattacatgtaagctgctctaaattttgttgtccttctacatttcaggaggcgctatcacacttggtgtgacatcaagataaagagcggaggtggatggggatggaagatgatgctcctatcctccctgcctgaaacctgttctaccaattatagatcaaatgccctaaaatgtagtgacccgtgaaaaggacaaataaagcaatgaatacattttcagtcgtcctatttttatttctggggactctattcagaaggacgtatccagatyagttttcccttggttcataaactcgagagagcctgtttttataaagaaaacctggaatcttaagtaagacataatcattccttctcctttccttatctctaatttaaacatctctatttttcccaaatgttttatctcacggtgttttcagacccttcactttcctatcccccatcctaaataaatttttacatttaaaaaatgaaaaaataattttcaaaatattgtctgataagactagcatcttactaacttcattggtttggcttctgtttcactagaatgctagttcttaagtttgtagttaagctatggccactca

SEQ ID NO: 712950 - DNA, 2278 bp, Homo sapiens
tttttaaacactaagaatttaatattgtaataaagaaacaatttattgaatgttttctctttgccacacatttcattagcattccactgtgtcatgatatctctttaccagattatctaactcctttaaatatgacaataataatcaacagcagccaggataacaatagctaacatttattgagtaattacacgtgctaggtactgctctaaagactttattaattacctgatcttcacaacaaactaatgagatagtatagcagttgaggtcctataaggcaacagatagcatgcctaaatgtggcaaatttaaaaaagtcttctaaaagagacaatttacaaaggtatggatactattaagaaaaatcaataggggttggtgaagagcaacattgatccattagcaacactaggctcatgggtctgaaaaaggagcagttattagaaattagagagaataggcatagatatagcagagggccactcaactgggaagttttcccaaataatcacctaccactactactctttacatgaggcaggaggagagaatgtatttataaacaaatgtagctgttgcaatttcagcttctgtttctggacatgatgtctaggtttataattgtaacttctctatttcaccacccattacactcttgccatctgccagcactttggctgggtaaaattctgtacctggtggagtgagacaaaagcttcagtctcagcatccaagtcctaggtagccctactactctaggatcaaattttcccatcaagacatgaaacagctccctttataacacttacagttatgcctaacttaggaggacagccaacatattgttttcaaaggatgccaatatcccctcatggatgcatttcttaagattttggtaaagagagtgttctctggaatctcttgatgctgtggtgattaagacaggactgaacaggtctattctactattcccatctctctgtatcttctgactccttcccaagtaatggtgccagggaagttctgacattttaacctcattggctttaggatattactgaatccaagtttaaggaatcaaccaaacagatgattaattatattcccctgtcaataaattagttagtgagccccatcmataaatttggctcatagacagttttatattttggcattgttagtctaatacccttaatgttcactcctgtacctgctaccctaactccctcctcctgatataagttggcaatgtcctgaagctgttttggcctatatactatttccttttagatcaggccttatgattctctgttttgactatggtaggatttaccttattgattttgtatttagaatacctgtctctgttaggaagctttaggaatgcaaagttctcagccccatctgtgttctgcctaaatgtagccttccagtgtatcccttaccactccttctccatcactgtcattgtataaacgatgtgatgaggttgaacatttaattggttctcaactcagcatcacttactttcagaccctgggctccattgcagatatatgagccctgtgcatgactatgagactactgcaaagggttcctacaaagttatcatcaaggctttctgattttccacttgagttatgagccgtgaggttaaaaactccaatttgtgctttctctggggtctatcagctctccagggctgtcagaaagagctaactaaccccaacacattctgatcaatactgtcaccatagaaaccacgtgccaaaatcacttgatctcctgatactgtgcttttcatttgcacttcatcccaggacatcttcagtgataacttgtgtaattataataccatcatagctcatggaatactctctttccacttacctcctacaaggacagtatctgtgtcctcaaatatgtgaagggcctactctcagaattctattgtaaggatttgtttcctcaagccttcctttcatatcagctgtggtcaagtgagaaaacaaatgagatattcatatagagtaatgaaaaagatttgaatgaaggaattactgtttacacaattgtgatcacagttagagaaggtaacagagtgggtgaataaactagcaagttagtcgttactgcctctagacctgaagggaccaggacaggaagttgctacagaatctggagagaatagctgtggctgtgagagaggaccatttaactggagctttggtttaggtggagagtggcaggcaaactagtgagatctgataggaag

SEQ ID NO: 712951 - DNA, 2460 bp, Homo sapiens
  misc_feature 1808, 1809, 1810, 1811, 1812, 1813, 1814, 1815, 1816, 1817,1818, 1819, 1820, 1821, 1822, 1823, 1824, 1825, 1826, 1827,1828, 1829, 1830, 1831, 1832, 1833, 1834, 1835, 1836, 1837,1838, 1839, 1840, 1841, 1842, 1843, 1844, 1845, 1846: n = A,T,C or G
  misc_feature 1847, 1848, 1849, 1850, 1851, 1852, 1853, 1854, 1855, 1856,1857, 1858, 1859, 1860, 1861, 1862, 1863, 1864, 1865, 1866,1867, 1868, 1869, 1870, 1871, 1872, 1873, 1874, 1875, 1876,1877, 1878, 1879, 1880, 1881, 1882, 1883, 1884, 1885: n = A,T,C or G
  misc_feature 1886, 1887, 1888, 1889, 1890, 1891, 1892, 1893, 1894, 1895,1896, 1897, 1898, 1899, 1900, 1901, 1902, 1903, 1904, 1905,1906, 1907: n = A,T,C or G
aattgagggcagagaccatgcagtgttcctcacttaattcttaaaccaaggacacagtgggagagatggagggaaggaaggagacatggatgcatggatggataatggacagttgaatattttcagcatccagaggaaagataattctgatgctggtaagttaacacttcttagagaaaatctatttggactgagacttaaaagagtaggtaaggtttcagtagggtgagatcgagaggttagagaggaggaaggtggttgggtaggtgagaacagcctgagctcaggcacagggcaggaaagctcaaggcatcgggcagtcatgggcagtggtctggggtcgacggatcggaaagagggctgtggcccgctgccgctggaaaggcaggtttgagccaggttgtggcaggccttgaaaattgagcaaagtgtctggactcctccatcctgcaggcaacagggcgccacagaaagttttgtaagagagaagtgacctgttctgccctgtgctcgctggcggcgtgtggaagggcgggcaccgggccaaggccagctcggggaggaggtctcaccacttgctgctctctgccgggctctcctgaagagctgctcaggatcagggcgagatgtgggaggctgtggatcctcctgcagggaaggcttccccttcagaaatggctggattggacagcaagccttccaggcctgcctgctgggcatagacccatgaggccagacttaccctccgcattccccagagcaccctcagcagcactgccccagttgccaggaagtgccttagctctgggttaaagtcccggctcttccacggaccctggggtttggactagtccctgtgcctctctcgcagcccctgtgtttcacaacttcaggaagtcccattcacacgggagacaatgaaacaatgtgcccagacttgtgcaacccagcggtcctgcttctaatagcaatttccttggctgtaccgaaaggaggacgaaggttggtgtggatcacctctgcaggccactccaagtctcaatttatagcagtctgagcaawatgatgggctttggtaggaggtagggggccagggcctttgtccagtgccagagacagtggtagagaaggtctaggggctggaggatggccaaacccccaaagcaaccgtgactccctcctcccagggtgagacctggatttgtgtctctgacccatccctactcagttttgcaaccatgtagaatctcacccctctagccaggttttccatgaatgaaccagggaaaagaaaaaatacccctcctagggcgatagtgagcattaaaagagcttatgcatgtcaggcacttagcagggtgcctacaccaaaactgcagctcaggaaactttagatccaccaggatttttgttttcttttgtaaaacaacttaaatgtatctgcttctgggcattcttaccttgacctacctcaagatcacaataaagccctccagggatggccccagagcagaattcgctatttgctgaaagctcgaaaggggttctggggtgtgcgaaaacggagagcaggacacctctcttcccacaaacagaatgaccccaaccttccgatgaacccgttcttctagaggtggacatggcaacccgaggaatctggccaaagtttcagttatagaaatgaagctgtgattattaaatttcaggtaggatatggtttatcttcctggcccctggagtcaggctctgtgggtggcatataggggtttgagggccaaggaacgaaaacgtacgtagagcgtaacaannnnnnnnnnnnnnnnnnnnnnnnnnnnnnnnnnnnnnnnnnnnnnnnnnnnnnnnnnnnnnnnnnnnnnnnnnnnnnnnnnnnnnnnnnnnnnnnnnnnttgagcgcatcgctactgtgctctaaagacctcggttttcacacctgtaaggtgagagtaataccttcttagggtgaagtgagatgacgcgtgcacatagaaggagctcagtttcgctattgttattatcattgttggatcttaggaacagatgtccccatgccctccttctgatgggtggtccgtgagccttccttcacctgcacagcagccctgaccctgaaagggagcactgcgagctgctggctctgctctggacagctctgtcaggggaagttctgatgttgaacccacccttatctatctccctggcagttctctggacgggggctgggtttgtcttgatatgtggggcatcagcctagcccttccctatggtggttcctcagaggcaggtctttccctttgtcctcgctactactccctttctgctctacctcccaaggcagatcccaaattccctccctcagccattccttggagacagagttttgaatgagtatgaccacctggtcactagtccctttgttgatgcctttttgagagtggaagc

SEQ ID NO: 712952 - DNA, 563 bp, Homo sapiens
aaaaagtcatacatgtaaaattgtaaaaaaaaaaaacccaaatatccatccaaaggagactgaaaagataaaagcagtaattatatcacactgtatttatacatcaggcaatatagcagtcagaatttaaaatctaaatatatcatttggggaggcatacatatgtgttaaaagtaaaaaatatgtataggaatgataaactccaaatgtaaggtattgtttacttctttttgtatgggagaatgaggaataggactgggtttcaattatatatatgattcaatcatatatatatatatatatatatatatatatatatatatatayatacacacacacacacacacacacattttgtttattaacagaggtctgtctgaactatttattgcaaaatgttaagatttgtcaaagccagaaggtgttaactttatctctgtagtttctttgtaagtttaaaatataattttttaaaaaaggacttgacatataaacatggaaaatattgccaactcaaaaggatgcataataaaaaatatattctgttcatttcagacccatgg

SEQ ID NO: 712953 - DNA, 563 bp, Homo sapiens
aaaaagtcatacatgtaaaattgtaaaaaaaaaaaacccaaatatccatccaaaggagactgaaaagataaaagcagtaattatatcacactgtatttatacatcaggcaatatagcagtcagaatttaaaatctaaatatatcatttggggaggcatacatatgtgttaaaagtaaaaaatatgtataggaatgataaactccaaatgtaaggtattgtttacttctttttgtatgggagaatgaggaataggactgggtttcaattatatatatgattcaatcatatatatatatatatatatatatatatatatatatatatatayacacacacacacacacacacacattttgtttattaacagaggtctgtctgaactatttattgcaaaatgttaagatttgtcaaagccagaaggtgttaactttatctctgtagtttctttgtaagtttaaaatataattttttaaaaaaggacttgacatataaacatggaaaatattgccaactcaaaaggatgcataataaaaaatatattctgttcatttcagacccatgg

SEQ ID NO: 712954 - DNA, 744 bp, Homo sapiens
ggaagagacaagttataatgtttgacagcagactagggtgactatacttctatacttggcaacaatattatgtatatttcaaaggaactagaagaaagaacttgaaataataccaacacataaaaatgataaacacacaaggtgatgagaccccaattaccctgagttgatcattacacattctttgcatgtaagaaacactcacgtgtacctcacaaatatggaaattattatgtatcaataaaagggaaagaacaaaaagggtaaggtagagcctgtggtaaactgaagagtagcagccctgtctacagacattcaaattcagaatgtttaacaataawgtgatatccaaacaaaacacatctattagtctgggacctgaagaagatcacagctatcaaactctttaataatagtttcccaattccaaatgaaattatacacagaatcccatttttaaaagtagtcatattttatcaacttaaatttattttgttatgtttatatgctttctaaaatattattttatgtgttttaaaatttacttaaaatgtatgtaagtgtatatatgtttatattgccatccaaaagaccaccaggacacaaaatagtagaaaggagaggtttttttaattgttaatttttgtgggtacatagtaggtgaatatatttatgggttacatgaaatattttgatacaggtacacaatacataataatcacatcagtgtacctggggtatccg

SEQ ID NO: 712955 - DNA, 759 bp, Homo sapiens
tatttttataatatacttttttctgattgacccaataattttaacttgaaattgaaaaaatacttttacgatttgctatgtacctttccacaaatcatttgctacattctggtccatagtgcagccaaataaaccacattattatgttagcacctccctgcattgccaaacctaggtatccagtgaatgaaaatcctatcttaacaaaatacgaagttgtgtaacatgaacgataaaagtaatctgcaaaasttactattcctagatcaaagttttctctttctaaggttatatatagtatcataggctcttattaattaccttgtcagaaaaaggaaaagaagcctctcacgtgatgcaggctgatctcgagtactgaaataggagtaaatctgaagagcaaataagacgagccagaaaaccatgaaaagaacagggactaccagttgattccacagggacattcccaaggcgagaaggccatatacctccactacctaaataaaaacgtaagataggaaaacttcttgcatcaccatcaataaacactttaaacacttgagtcaaatcagaagtaaaatattaaatagcttttctttgattgcaagactgtttcagctaaattcctttaaagttagcctatatagttaataaatagcatgttttttaaaacttactaattttgcattattattaacacttgacacacacttatctaatagcacagtaaactgccctaatagttcagggataaggtca

SEQ ID NO: 712956 - DNA, 759 bp, Homo sapiens
tatttttataatatacttttttctgattgacccaataattttaacttgaaattgaaaaaatacttttacgatttgctatgtacctttccacaaatcatttgctacattctggtccatagtgcagccaaataaaccacattattatgttagcacctccctgcattgccaaacctaggtatccagtgaatgaaaatcctatcttaacaaaatacgaagttgtgtaacatgaacgataaaagtaatctgcaaaagttactattcctagatcaaagttttctctttctaaggttatatatagtatcataggctcttattaattaccttgtcagaaaaaggaaaagaagcctctcacgtgatgcaggctgatctcgagtactgaaataggagtaaatctgaagagcaaataagacgagccagaaaaccatraaaagaacagggactaccagttgattccacagggacattcccaaggcgagaaggccatatacctccactacctaaataaaaacgtaagataggaaaacttcttgcatcaccatcaataaacactttaaacacttgagtcaaatcagaagtaaaatattaaatagcttttctttgattgcaagactgtttcagctaaattcctttaaagttagcctatatagttaataaatagcatgttttttaaaacttactaattttgcattattattaacacttgacacacacttatctaatagcacagtaaactgccctaatagttcagggataaggtca

SEQ ID NO: 712957 - DNA, 987 bp, Homo sapiens
ggctctttgggccttggacaatcctgtgacaggatccaagtggtcaggcggttcatggtcatgtaacctggggttattcacacttctgaaggagccccacggttcggtatggaggtaaaggcctgagggaggcagcaggacagacagtgctctaggccccctccctgcatctaatcgatcagcttccatgtaggattccatttcataaagctctctgctgctaaaataaactcacagcgccagcccatcccctcctagaaccagcagggaaactgaggcccagagaggacaaagggtggtcccctaaatgccagcccatcacrcagagccttgtactcggtgtctgacttctgcaccagagctctccgtgctccacccctaccctgcctcaacatacctttttgtaaccttcgcccaacagtctctcgagaagcagcaccagctgggagaaggggggccgaatctcaaacttctcttcccagcacttctgcatgatctcatagctggggatagggagaagggtcagggcctctggcccagggttcaggggacaaggcagggctgggggagcaggaggctgctgcctctcagaacaaggtgagccatggaaaggagctggagggaagtggtggctgggtgtatccagaggtcctgtctctggatattcccttgggaggccctcgcagagcccccattccacatggttccacaggttgactacgcctgggtgagcacaggagccaaccttcgccaacagttttcagccctgcagcttccacggttggttcttgatggcatgtgaccccacctgagcccttgaaggtcagctctgggacttttgctggcactatggagcaagcagtaggacatgagactggcactgctggtagccatttgggcaatgctggcctgaaaatgaggccacacagagcaaagcagagctcagggctagaacaagaggttcctgatgccatcctttgaatggct

SEQ ID NO: 712958 - DNA, 644 bp, Homo sapiens
tgtatatgccatgtttgctgtatttgcttatctattgatgggcattagtttccatatcatgtgtaytgtaaataatgcaataatcaggaaaatgcagacatctcttggagatcttgatttcaattgttttggataaaaatacagaagtgggattgttggattatatgacagacatttttccaaagaagacatacacattgccaaaaggtacatgagaagatgcttaacaacactaactgttagagaaatgcaaatcaaaaccatagtgagatgtcatctcgtctattaggatggctactataaagggaaacaaaaggtaagagttggcaaattcattgggaagtaaaatgattcagctgctgtggaaaattgtacgaagcttactcaaaaattatgaatttttttcccccagaatgcttagctctttttgtaacttttattttaagttcaggggtacatgtgcaggtttgttatataggtaaatctaagtcatgggtctttgtggtacagattatttgatcacccaggtattaagcctagtacccattagttatttttcctgatcctctccctctcacactccaccatccagtaatctccagtgttcattttttccctttttgtgtccatgtgttctcatcatt

SEQ ID NO: 712959 - DNA, 996 bp, Homo sapiens
ccagcctggccaacatggttaaactcctgagatcaggaattcaagaccagcctggccaacatggtaaaacctcatctctgctaaaaatacaaaattagctgcacatggtggcacacacctgtagtccgggctactccagaggctgagacaggagaatggcttgaacccaggaggcagaggctgcagtgagccaagatcgtaccactgcactccaacctggtgacagagcgagaccccgtcctggaaaaaaaaaaaaagaaaggaccatggtgtaggggtagggtggtgagtttagcatgggtagaggtgatgggcatctggtggaagtacctgaaaggtactagaaagggaggttggagcctgattgtgaagggccagaccaggagtaggttctcaggaagcagagcygaagagagggctgccgaccagtgacctagggaagctgggagagtctttcccaaggagctgacccttggggtgcgtttcttttctcatctctgccttaaggctctcttgtctcttttctttcccccgccccacattcctatgcatgccaggcccaaaacatcctcacaggctgctgctctaattacttcatcccattttaattctgctgagttaggagcctgtgaactcaagaggaaattcatgcaaaatacccaacaaattgaatgtgctggtgttttagaacgccaggtctgaccctatctgcccccttcatcctctcttcctgtggccctgctcctgaccaatctcagcttgagaaatcaaaggtagaatgtgctggtgagaagagagggtggcattgattgagaaagatgttgagtttcactgaattgtttgagccattgcttgggatgaggacagggtggaggctttctgatgggaggcttctgtgggaacctttttggaactgatggagtccatctctagagctccaaaataccacgtgtgtttgtgagttgtaatgtttccttgtccctcaagatacttaca

SEQ ID NO: 712960 - DNA, 996 bp, Homo sapiens
ccagcctggccaacatggttaaactcctgagatcaggaattcaagaccagcctggccaacatggtaaaacctcatctctgctaaaaatacaaaattagctgcacatggtggcacacacctgtagtccgggctactccagaggctgagacaggagaatggcttgaacccaggaggcagaggctgcagtgagccaagatcgtaccactgcactccaacctggtgacagagcgagaccccgtcctggaaaaaaaaaaaaagaaaggaccatggtgtaggggtagggtggtgagtttagcatgggtagaggtgatgggcatctggtggaagtacctgaaaggtactagaaagggaggttggagcctgattgtgaagggccagaccaggagtaggttctcaggaagcagagctgaagagagggctgccgaccagtgacctagggaagctgggagagtctttcccaaggagctgacccttggggtgcgtttcttttctcatctctgccttaaggctctcttgtctcttttctttcccccgccccacattcctatgcatgccaggcccaaaacatcctcacaggctgctgctctaattacttcatcccattttaattctgctgagttaggagcctgtgaactcaagaggaaattcatgcaaaatacccaacaaattgaatgtgctggtgttttagaacgccaggtctgaccctatctgcccccttcatcctctcttcctgtggccctgctcctgaccaatctcagcttgagaaatcaaaggtagaatgtgctggtgagaagagagggtggcattgattgagaaagatgttgagtttcactgaattgtttgagccattgcttgggatgaggacagggtggaggctttctgatgggaggcttctgtgggaacctttytggaactgatggagtccatctctagagctccaaaataccacgtgtgtttgtgagttgtaatgtttccttgtccctcaagatacttaca

SEQ ID NO: 712961 - DNA, 620 bp, Homo sapiens
gctttggggacttgaaggtggtcaggtgtggtggctcaggcctgtaatcccagcactttgggaggccaaggcgggtggatcacgaggtcaggagttggagaccagcctggccaacatggtgaaaccccgtctctactaaaaatacaaaaattagccaggcatggtggcaggtgcctgtaatcccggctactcagggaayaggagagagtaggcaggagaatcgcttgaacccaggaggcagaggttgcagtcagccgagatcacaccactgcactccagcctgggtgacagagtgagactccatctaaaaaaaaaaaaaaagaagaaagtatggctacaaggtctcatcttctgatccatataatggctgcctggagttctgtctgaggaagattctgagaccatgtctagggttagtggggaagaaagttgcagtcatttagtgatgtgtgctagagttgtgacaggtgtaacagcatgcaggcagcatcagatatccaccactccttgcctgcaggaaaggccacaagcctaaggatagatggcaagcggtgtttagagagttcactgaatgcttttacttgccgcaagttaatctgcgtggtttatatcaatagtac

SEQ ID NO: 712962 - DNA, 620 bp, Homo sapiens
gctttggggacttgaaggtggtcaggtgtggtggctcaggcctgtaatcccagcactttgggaggccaaggcgggtggatcacgaggtcaggagttggagaccagcctggccaacatggtgaaaccccgtctctactaaaaatacaaaaattagccaggcatggtggcaggtgcctgtaatcccggctactcagggaacaggagagagtaggcaggagaatcgcttgaacccaggaggcagaggttgcagtcagccgagatcacaccactgcactccagcctgggtgacagagtgagactccatctaaaaaaaaaaaaaaagaagaaagtatggctacaaggtctcatcttctgatccayataatggctgcctggagttctgtctgaggaagattctgagaccatgtctagggttagtggggaagaaagttgcagtcatttagtgatgtgtgctagagttgtgacaggtgtaacagcatgcaggcagcatcagatatccaccactccttgcctgcaggaaaggccacaagcctaaggatagatggcaagcggtgtttagagagttcactgaatgcttttacttgccgcaagttaatctgcgtggtttatatcaatagtac

SEQ ID NO: 712963 - DNA, 2962 bp, Homo sapiens
tatatcatactaatacttgtaatctaaaggacaaagaagatgggagaaacaggagttctcatgcattattggtgggaatggagttactccattctttctagtgtataacttgataatatgtataaaaatgcatatttttcttctacacagacattgtatttctaagcatttatcctaaagaagtaattgcacaagtgcaactaaaaagtgaaagaagaaagacacatcacagcatcatttgttataatttgcacaaaactgtagacatcttcaactgcttctgtccttgaacttgacttatttctgacggtataagaaaagaacatttgttttgagaaatatttgaaaagacatccaccaaattgttaacatggttatttttggtgggaggaatctagatgatttttaatttcttctttatacctctctttttcactaattgtattagttttacaatcaggcaacaatttagctgttaagggttaaatcatgttctctccaaaatatgttaaagtcctaactcatagcacctcagaatgtcatcttatttgaaaagagtctttgcgcatgtaatctgaaaaatcaagttaaaatgagatcattctgaattagagtgggccctgatccaatataactgttgtactcataagagagacactcaggaagaagatggccatgcaactggggaggcggagaccggagtgaggcatctacaagccaaagaatgccaagattggcagcaaacaccaaaagctggaagaagcaataaaaggttctcctctacaggtttcagagggtggttgcccctgccaacaccttgatttcagacttctagtccccagaactgtgaaagaataaatgcctgtcatttaagacacctagtttgtgactttgttatggcagccctaagaaaccaacacaaaagctattttaatttggggaggaaatttcatttactatacagatgcaataaaaagtctcttcattctgctatgccacacatggactagcaaactcctctattaactgttctgcatccaatatagtaatctgaaattgaattaattgctcatagaaaaaggaagtggaaaggttctatcaggtgggcacaaaagtaattgcaccaacctaatgttttttagtttttctacagatgacataaatgctgatgtggttctgaacacacccctaagcaacagaagcrtcatttttcaagggccccaaagactcctccttctctgaaccatcacaagtattatgaattatccagagatctgtcttattgatggactaccttaaagaatttcaggccggtttgtcataattttcatgttttccctcaaccatattaaatgtgactataacaatgagctgaaaggaaaattaggtcccaagtgttttggtattttttcagtatcgaaggtcaaccacatagcagttagccagaatgcattgtgaacagacatatggcatttgttggggagaagaaagggtgggaggaggagtgtcctgttttccagctgccttccaaagtcaggcttgattgctataaaatcttattgcatttcatgtagcctcataatcattttctttctaaaatggcctttggtaatcttgagaacaaagaagacaagtctccaggaaactcattccttctgattgtgctaggtcttcagcaatgtaaaatcgaggctctaaatgcaccagcggtggacaaatgtcctagtccagtactaaagtctgaacactagggcaaagaactattcaacaaggaatacttccaggagaaggctacggcttatggaaaatatactaggctgaaatcactcatattctctttagagtaactacactgatactaatttaataaaatcatacctgtttggatgctcatatgatagagaattcagtggaacacagacaactgtggatgcatggggaggatatgtatgcacctagtgtgatttggaagataactaaggggccaaggattagtcaagcacttgggcagtttcaaatgacggaaacccaattctatcaagtttatacgaagaaaaggaaaagggattttgttgggaaatcaaagggtagaggtggcattcagtctctaagggctcattaaatatgtgtcactgtgctccctttttagatatgttctccttgggcagtagccttatgtttttttttttttcccctagcaaatgttcttccatctggacttcttccatctggccagaacaagtaggtataactcctgactggcattcttatggctcacaatccaaaatgaaagcaaaaaagggagaaaaattctcctttctctgtgtccatatataaatattccagagaagttctctgttggatttggaatagatgttcacatttgaatcaactatcctggccaagtagatgtggcgcttcaatcatccaggcctgaatctgcagccaggagggcagggctctgagacttgtagctctattaagacaaagtggagtggaaagatcaacatggagttctgctatccagagaaagaagaaaatgatgcaagaaagacagacagtagatgcccactagaatacttttgttcaccaaatgctaactcatctcttcttgacctagacttccatggcacttgaaatctttgttttactcttttaggttacaactgccatacattatataaaaaataggtgtaggtagatagatactatgtaaatattcaaagattacaaatggctcaaaccttgcagagctgacaaaaagcaatgacaagccaaactctataaacaagtaaataaaacttgattgcaaaataaaacttgtacatgagctgagctttaaattaaggaacagttaggtatataatgttgggaagtataagaacagcttattttttaaaagcaagctatacataaatataaagctaccttgaaaaaaatgtcaaaaaggcaactcactaat

SEQ ID NO: 712964 - DNA, 1124 bp, Homo sapiens
gaagaaaaaaggcaacttacagagcaagaaaagagtggcaatacacacagaattttttttaactcacttcaaaccaaggaagaatcacaatcacacacatactaaatttttaaatgagcaaaagacttccacaggcacatcacaaaagaaaatacacaaatgaagtttttttaaaaaggaaaaatcaaccaaaatactgccacctagggatgaccactggaccattttggtacacagactgaaaactgcatatatgtaagtgaaaattgtttaaaacatgctcttcggttaactgttttttccatgtgtcatgcacatctttccacatcattgtagttctacgttttcatttttaagggctacagttcacttcatcccataatttccttactcaatacaagtagtaacaaacattacattttttactattaaacacaacactgtaatgaaccttcatgcctactctgacaattacctcttggtcaaatttagaaatccatgagatccaaaaggatggctgaactgaatttcctttgcgaattccttgactaataatcatttgttttcatcagaaaagacttcatactacaagttattaaatctaagggtcaattcttattcctcctatttcttcaccgatcagcaaggttgagcacttccatcttcttgatatacttcattcacttggcttccaggactctgatctaattctcaaaccttcactacaagaaacgttaaagttcttcagacaaaaagaaaagaaaamttggatatagtaaaggaatgaagacataactgaaaagaaaaatagtaaaaatgagagtgcatatacattaatttcttttctttaaatttatagaaaatatgactaactgaaaagtataaaatattgcagaaaaaatcaaagagacaaataatagaaaacacaattcatgttcatggattgcaagacttaatattaagatcttcgtaccacccaaaactatctacagatttaatgcaatccctaaaaaaacccaacgatgttttttgcgtaagtagcaaaatcaaccataaaattcattagcaatctcaagggactcagaacagacaacataatcttgaaacacaagaattaaactgga

SEQ ID NO: 712965 - DNA, 2773 bp, Homo sapiens
tcattctgaactgggtagctctgctataaaggaaattatcaggacctctgatgaaacttaaataagggctgagaattagttggcagtaacctgtcagtgctaatttaccgatttgattctcgtattatgactatgtagaacatcctcctttgtaggaaatacacagtaaaatattacagcatgagagaagcattcggtcagctttactttcaaattgagaaacaaaaggttctgtgtgttatactaataacttttctataagcttgagactgtctcaaaataaataaaaagcaatatttcaatggcttgtttacattaattattacctaacacttcaaactatgagctcatatccccaggaataaaggtgctaaaaatcctttgtgacttttaggttgggaaagacgcatgaacctgtagtgtcagtcagtgctagtttgagaatatttgttcattaagatcatgtgattaaaatgtggtggtaaaaaagtcacaaaggatttttagcacacttattcctggggatatgagctcatagtttgaagtgttaggtaataattaatgtaaacaagccattgaaatattgctttttatttattttgagatagtctcaagcttatagaaaagttattagtataacacacagaaccttttgtttctcaatttgaaagtaaagctgaccgaatgcttctctcatgctgtaatattttactgtgtatttcctacaaaggaggatgttctacatagtcataatacgagaatcaaatcggtaaattagcactgacaggttactgccaactaattctcagcccttatttaagtttcatcagaggtcctgataatttcctttatagcagagctacccagttcagaatgatgcattgcctttagttgtcacacttctttagtttttttcagtctggaagagttatttggtctttgcgggacttccacgaccttgacacttctgaagattacagaccagctgtttcacagtctgtcaatttaggtttgttctttgtttccttatggttagatttagtttaaatgaatatcataaaagcgattgctgttttctcattgctattgtgacagctaccacctgtaatcctaacactttgggaggccaaagcaggcagatcacttgrgcccaggagtttaagaccagcctgggcaacacagtgaaaccccgtctctacaaaaaaatccaaaaacactagccaggcgtggtagcacacacctgtagtccagttgctcagaaggctgaggtaggacgatcacctgagcccaggaggttgaggctgcagtgggcagtgatcacaccaccgtactctggcctgggtgacagagtaaggccctatctcaaaaattaattaattaatcaattaaattttttaaatttaattaaaaataaattattatttttaaaaataaggggttcatccatctatctcttttctgtgaactctaccagatgccctgggcaatgtttcttttgacagtctttttctttcaaattaggtgacagtttcttcctatctactatcatcagagctaccattactttaaccctcaatttttcatttcttattgtcttaaagatgaaggatttaacatttgccttctactccaaattaagtaactaagatgcatcctgtaatgtaaagattttacagggatgccaataagtgactgttggttttctaaagagaggaaccttctttatattagggtagacagtgttcatatgcaatctgtctacaacaattggcagcttgttctctgcatgtaacataaggcatgggacatagtaggactcagaaccatggtacataaatatgtccaagatataagagtgattctgttttcttaagtagtttgtgagtaactccattctaagtgaatgatctgaattttgaaatctagttgtagcagccaggcaactcaatggcaggctgttgttaggtgtttggacatctcttgacatccttttcttggccaagcacagcagcacagatcttcttttttagtttttatttttagacagagtctcgctctgtcgccaggctggagtgcagtggtgggatctcagctcactgcaatctccacctcccaggttcaagcgattctcctgcctcagcctcccgagtagctgggattacaggcatgcgccaccacacccagctaatttttagtaaagacagggtttcaccaagtcggacaggatggtctcaatctcctgacctcatgatccgcccgcctcggcctcccaaagtgctgcgataacaggcgtgagccaccgggcatggcctagatcttgttttagtaggccatgccttagctgactcaacatatattcaaactgctcaggggaaagagttgccacttgtaaagaggtttgaatttagagcatgctactaaattatacagagcaacaggcttgctaaagcttttcaaaataaaaatgttcaatcctagtgaaggcataatgagacgtaaacactccgggaaacaatttgacaagatatatatgatgtatctcctggaaatatatcctagctaattcaaaatgaagccaaagatttacgcacaaagatggtgattagctttttggataattaagaataaagactctaagcacccaaagaaatgacaagttatggaaagttcataaaatatataagacaatgtcaaattatgctatgagaaattataggaatacattaatacactcattctattaagtatacaaagcatagaaagtaaaattata

SEQ ID NO: 712966 - DNA, 1247 bp, Homo sapiens
tatatgtaaatgtatacgtatatattatatataatatatacatatatattatatataatataattatatattatatataatatgtatctttatatatattatatataatatattaatatatataattaattatatatattaatatattatatatattatatataagtatatataatataatatacttatatatgtgcattttattgtaggtaaattttacctcaataaacattattgttttgaaaacaaactacatttgaaactgatatgtaacttcattataattcctgcagaaatatagagcttcatatgagtattatatatggccttatttacaaatgagagaaaaaacagaattactttccctgtggaggatcaccaaagatatcaaccaataaggtttccactttggcagtgaagaaagtaaagtaagatggaatttgttcataggcctttaagatctaatacatctgccaaaatcagatgcattactttcttcttattgatgaattaaaatcaaaatccttttttttcccaagattaaaagaaaaatatctcattgaaaacagtagtatctattttaggtgagatttcaacagtccataaaatgagcaacccccacattgtagaatctacatttctagactctcagaaaatcagtaaaagctgataactgtacarcttctgcactctccaattatctcctttcagagccagaacacacaaacacttttttgcatttaattaagtattgcaattccagattatctttgattaatgaagagcgatacagcgtatagctagaattatgtgattatttcacaattgatctttaattattccatctgataataatttcactaatttttcataatgttctcatctaaattcttataaatgagctataacaattaataattttcattaattttccttgaaaatgatgtgaagtttttgatagaacccttaaccttcaaaaactgttttaaaaattttgattaaaggataagccgtactgtcatatggaaaaactgtatgacttcttcagatatagcaagtcaagtaaacattcaaaagtttttctctttttgttgagtttgggacttgttgcttgggtgtgcctaaatctgcctctccctctgcgtgtttaacttggacttcagtgtcagataaatgtaggttttaagccagcttgactacattatatgtgactgtggccaatttagcctctttaaactattgtggca

SEQ ID NO: 712967 - DNA, 553 bp, Homo sapiens
ttgaacccggtaggcggaggttgccatgagccgagatcgcgccattgcactccagcctggacaaaaagagtgaaactccaactcaaaaaaaaaaaaaaaatggagaaaaggatgtttatgtgtcagacttctggaaagacataacacagcaaacattctacaaattatattagagaatcagagttcaaaatctcactctttcaagcaatttccccctcctctggaaaaatggccttcttccgtggtactctctttctcctttgtgttgtcaacaagaatcagaacatagggtagtattcctacattagtaacataaggactaaaatcwtcaccttataagtctacatctagaggtttgtttgacttactcaccatgtgttcactggtggggacagtgcttgaagaatatacaatttcaagagagctttaaagagaggatagatacttcaaatctcacatagtgtttataaacagaagttgatagcatagagatgggacgtacattcatggttttgacagaagactcttggatactcagagaaattaagatata

SEQ ID NO: 712968 - DNA, 1734 bp, Homo sapiens
cactaagatatccattgtgtgtcctatagattctctcaatcaaacaataggggtgctaggaatctcaagggtattgtcccttagtagtctcagcagaatcctaaagtagagaagatcatcctcaaaaaactaaaaattgagctacratatgatcctgcaatcccactgccaggtatatacccaaaagaaaggaaatcagtatgttaggtacctgcactcctatgcttgctgcagcactgttcacaatagctaagatttggaagcagcctaagtgtccatcaacaaatgaatggataaagaaaatgtggtacatagacacaatggagcactattcagccataaaaaaagaatgagatccagccatttgcaacagcatggatggaacaaagatcattacgttaagtgaaaaaagccgagcacagaaagacaaacgtaacatgttctcacttatttgtgggatctagaaatctaaacaactgaattcatggacttagagagtagaaaaatggttaccagaggctggcaagtgtagtgaggggctggtggagaagtggggatgattaatgggtacaaaaaggtatagaaagagtgaataagatctactattgatagcacaatagggtgactttagtcaataataacttaattgtacattttaaaataaagagtgtaactgggttgtttgcaacgcaaagaataaatgcttgaggggatggataccccattatctatgatgtgcttatttcacattacatgcccatatcaaaacatctcatgtagcccataagtatatacaactgctatgtactcacaaaaatttaaaaaataaataaattaattaatttttgaaaagtagagaagcatgtatcttttaagaaattggggggtggcggcttttgtctaatagagtgttctacaataattttcacagaagaccaatatagtttttattcagtgacattgtcaacttgaattcaaaaggacagagacaatgcaaaacaaagaggccatggcgtttcaaattctacgggcagaaagtgggctgagagaatgactcagctacaaacatgttctccttgtcatcaaaaaggaaaaagaacaacaaacccagagcccagatggtgaagctgagggctatggagaattattctcaggccgtaagtcctaatcagtgaacatccaacatttgcttaactggatttcacagcaactgtggaccagtgacatgtttgtgcctcttatcttctcattttcaggtcaagagtacctatagcagttatcttaaacatgttccaccattatatgcatatatatatatatatgtaatgtgagtaatgtttatgcagggggcagaaaatgtacatctttagaatcatagggagaaagaaggaaactgtacttaagggattctacttaagggactaaatccaaagagtcttgtgtatgcctggactcaatttacatgccaagattctggactttgagctgaggctccaatgggatgagactttggtggccttgagaaggatgtgtatattgtctgtgagatgaatgtaaattgaggatctaaggaagatttggcgattttacaaatatgtccatgtatcgtttgatcttcatttttttaagaggcggagcttaattctcttctctttgggtgtggtcttattaggcttcttgagtgtcagtagattgtcctcataaatgaaatatagggaaagctatgagttgtca

SEQ ID NO: 712969 - DNA, 1116 bp, Homo sapiens
  misc_feature 949, 950, 951, 952, 953, 954, 955, 956, 957, 958, 959, 960,961, 962, 963, 964, 965, 966, 967, 968, 969, 970, 971, 972,973, 974, 975, 976, 977, 978, 979, 980, 981, 982, 983, 984,985, 986, 987, 988, 989, 990, 991, 992, 993, 994, 995: n = A,T,C or G
  misc_feature 996, 997, 998, 999, 1000, 1001, 1002, 1003, 1004, 1005, 1006,1007, 1008, 1009, 1010, 1011, 1012, 1013, 1014, 1015, 1016,1017, 1018, 1019, 1020, 1021, 1022, 1023, 1024, 1025, 1026,1027, 1028, 1029, 1030, 1031, 1032, 1033, 1034, 1035: n = A,T,C or G
  misc_feature 1036, 1037, 1038, 1039, 1040, 1041, 1042, 1043, 1044, 1045,1046, 1047, 1048: n = A,T,C or G
gctcagtgcatacaaatacattatgatgacaagttaaaaaattcttattttttaagatgtatwtaggtggccaaatacccacctttcagattgacagggaatatttcatatgttcacacctaaaaccaatgcaaacattgaatgtttattatatatacattgttctttcatccatgaatcactcactgagccagtatttaggaaacacccgtaagtttctggtattgtactaggtgctaaatgtacatcaataaatgcaattgacattattcctaccttgatggagcatctagtctagatgctagacaatgcattattaattttaatgactatacaccctcaacctggtttttttctcaggataaacaccaaaagtcatgattactttaccaatgaccctgtaggtatagccaagcctccttattcttggagttaatgaacattccatgctagaggagaacgatttctgactatctctttaaggtttccatgcagaatgaggatgtatgaaaatgactcaccatgcctgccacttatctctagattcctataacatgaagatgatcacaatctgccatcgtgctgttaaaatgatgcataacccaaccagcactctgaaatgatcgagtattattgcagcctcttacaagttgggcactgagataatttggctagtgttggagaaagaatgttccacaacccctgtggctcaccctgcattgaataaatatggcatgctgctgcttttgttctccttgtgtatgaaagagcaattaatgtgtcaaaaaagaaaaatcacaaaatgtgcatactttttcccctatgaaaattgcaggactatgttcagtctgccttaaaattattgtaaaacattacaggatgttgttatttttgaaatattagataacttgaggttgacattacatttcttttggtgacttcatgattnnnnnnnnnnnnnnnnnnnnnnnnnnnnnnnnnnnnnnnnnnnnnnnnnnnnnnnnnnnnnnnnnnnnnnnnnnnnnnnnnnnnnnnnnnnnnnnnnnnnacttaaatagttgaaatgaaatattttttaaatgcaaacatctgtagtttttagttaagagaaagaac

SEQ ID NO: 712970 - DNA, 543 bp, Homo sapiens
gagcagtggtgggaacccgctttctgtccaccagcctctcctgacccccacaactcctcaatcagctctgcgggctgggaatacctgctttctccccaggtggacttgagaatgggggatagggagaggcrgtgtggggcatgacatagctcagagggtcagtaacgaatggagactcttcactgcccatgactaacttctgagaaaggggaaggcatcagaggtgtggggaactctagtagctaaagatggcatgagggaggggagagggaggaagggagaaatgtatcactcactgagcattatgttggggaggttcctgtgtcaggagatggagttgtactgcattccttttaacgatggtggctaatatttccgggtgcctttttcagctgtgagagttggagggcgtagagacaaagagatggctggaccaatagcgttagagcttctcgccgcttctctttcttcatcccagtgacagcctcagaggtggtaagatcttagcttagactttatcttcccctaagtgcagctccctac

SEQ ID NO: 712971 - DNA, 651 bp, Homo sapiens
ggatgagacgtaatcactctgagtttttgtttccccatcagtaaaatagtggccaaacaggacactggaagtgaatatgttttgaaacatgcgaattacatgtaagctgctctaaattttgttgtccttctacatttcaggaggcgctatcacacttggtgtgacatcaagataaagagcggaggtggatggggatggaagatgatgctcctatcctccctgcctgaaacctgttctaccaattatagatcaaatgccctaaaatgtagtgacccgtgaaaaggacaaataaagcaatgaatacattttcagtcgtcctatttttatttctggggactctattcagaaggacgtatccagatyagttttcccttggttcataaactcgagagagcctgtttttataaagaaaacctggaatcttaagtaagacataatcattccttctcctttccttatctctaatttaaacatctctatttttcccaaatgttttatctcacggtgttttcagacccttcactttcctatcccccatcctaaataaatttttacatttaaaaaatgaaaaaataattttcaaaatattgtctgataagactagcatcttactaacttcattggtttggcttctgtttcactagaatgcta

SEQ ID NO: 712972 - DNA, 1588 bp, Homo sapiens
tgaaagacgtaaaaggatagaaatgatagaggaaaaaggaaggagagaaaaaatggaacagagaggaggaggagcataaggagagggagtaagattgaggcacagaaacaaggcctgcaggactgagccctgcctgcgtcattggcggtcagctctggggtatagctcttcatttgggtcatcaggggaaaaaaaatattcaattttgaacccttggaattccctagatgctttcagtagcccactgatccctcaagttgtctttggctccatctggccatcccaggaggctcccgccagggacctgccagcccccagaccaagatatagtcattgtggaccctctcaagcaaagggcaagtgaaggaaaaacagcctgtctgagaacagcagccactggttttcttcgtttaaaaaaattttttttagtgcttatataattgcagaaaccactgatttttatctttctcagaaaagaccctgtgttcaccatctgtttcctgactaggggcttcaggccctactctctgagacactggcctaacagtatcctaatctgtaggcacagagcagaaacttccctgagctgggagctggggaggcagggctcccagatgccaagccgcagtctgagttccttacagtgatgctgctctttctagaaacctcagctgctcgctcctgaggctgggatgccatctgctgctcagcttaggaaactggctgatgggctgcacagccaaggctgagtctggtgggggctgggcaagaggcccrccctgggtctcaggagagccatgttttttgtttctggataaatccagtactggccttccgggacagagcaaatagtctgtcctcagtcattcttcttagactagacaagatgcctctcttcgacaagaagagacctagggattttagggggatgggtgggtctgctctgcccttcgcaaagttcagtgtcatctcaaggttaaattaccgagagaggtccaggctgcctctgaagttctatagatttcctcaaagggtttatttttgtcttttcttttcttttgcttttttttttttttaatttgcaggtttaactaagattattacaagttgagttaattggctgaatgaaataatgaggccaggcctagaggaagtggggctttgaagaaaaaagcatgctcatgcagaattgaaataaaatcttcagactctcagcagtttttgaagcccctgctctttggactgtcctcgttcaggctcccaacccagatagggttgggaactctagtattttaggggccacatatttgttggtatttctcgaagaaatggttattctaaggaaattttctacaagccagtgtggtaaccagcctccaggatgatccatccccaatgctgtccatgtactgatattcatgcacttgtaaatcccctctcccatatggtaccagggtttgtctgtgtgaccaatagaatatgacagaagtaatcatatgtaacatacaagattaggttataaaagacactgtggcttctttcttggtcactctgtcatctgatcactcactctggggcaagccagttg

SEQ ID NO: 712973 - DNA, 1258 bp, Homo sapiens
aaatgcagaaagacaaagctcagctcccatgtggagtacttaaatgctctagccatgcctggtactcacagccacatttgaaggtctggttcaacgcagccatgctgggtccagatgtaagaacctcaagctgggctaaaaagcagctttcccatgggtgaaccctctggctcagagctcctcaggctggctctgctgctgctccacacatgccacaatttactacagctgttaagagccccagagacaagaaagctcctccttcccacttgttccctgcccttcttcagcacaggctggaaccaagcaccagccaaacctggagagaacctcagaaactatgaccccaccccacaaactgagctcacacaatttttcttgagccacaaactaatttttgttaatcccagagaaacagttcaaacagcaactaacctttttcttccttcacaactattaaacttggacaaatacctyaaaatagtacatgaaccaagagtttaatccttctccccagaggcaaagagaggactatgtgggtaacatgagggtaaaaccctgggtccaccaagtccaggacaaacgggtcctgggtcctcaggcaagggggacagaggggcaataagagcagaagggaggacaacccagggctgaggccccagtgatgggggtagagaagcccttgttcagtcccagcatggagctgaggctggccacagtattcctacagtacagcaggagcgacacctgcctgccacctggctgaagggatctgggcaaactgatgagtccacccccaagcccaagccaattaaaggttatccttatacaattaaaggttgtgtaacatatgtaacaaacctgcgcgttgtgcacaggtaccctagaacttgaagtatttaaaaaaaaaaaaaaaaaaaaaaggttgtgtaagaataaagtggcccagagaatgatcatgaatgctaaacacagaatccaaagggctcatgcccagaaaacccaacagcaacttctgtgtcttattttataataagtaatttaaataattataaatcatgtaagttcatggtaaagaaaaaaaaaatcaagcagtatagaagagtgcaaaatagaaaggaaaagtccctgtttctcagaccatcagaggtaagagcagagttttttcttttttcttttgagacagggtctcgccctgtcacccaagctggagtacagtggtgtgatcacagctcactacatccctgagctcccaggc

SEQ ID NO: 712974 - DNA, 622 bp, Homo sapiens
ccaggatacactaacattccagaaccaaaagctaaatccaaagagctcctcaggaaagcgtgaactcggctgcaacggggtctctctctacaggccagggagagggaaggcagcctttataaaccgttcctcttgggctctcctgcctgtggctgttagcttcacctcccccaacttgccatctgagggccttcattcttcactgtcatgcctgtcaccacctctgtcctccccctttgggcctgctctacagcctccgcactgctctgaaacatcaccactggcaggactgtgcaactgagaacaacaggagatgacctcacggcctttacattctaatgccagctcccaattacttgtactgttgaataaytgaaagaggagaataatccactcagctgatttgggaagccagccaggcacacagattatctcagagtgaattattcacactagggataattgggagttgcccaaacttctatttgtagttcaggcatcacgtggaagaacattcggtatggaaagtatgaaagctggagagggaaggagcccctgtttccgggcctgggtttcctttatgttgcttgggaagtcaatgctcctctctcggtctcactca

SEQ ID NO: 712975 - DNA, 597 bp, Homo sapiens
tgcctccagtcaggatgacaataacaacaatattagaagctaccattactgaatgcttactatgtgcccggtgcatgctcagtattcttatattacctctcttttttttttttttttttttgaggcggagtctcactctgtcacccagactggaatgcagtggcacgatctcagcttactgcaacctctgcctcctgggttcaagtgattctcctgcttcagcctcccaagtagctgggattacaggcacgcgccaccatacctggctaattttttgtatttttagtagagacggggttttgccatgttggccaggctggtctcaaacccctgagctcaggagatccacccgcctcagcctcccaaagtgctaggattaacagrcttgagccaccacgcaggccattacctcccttattcttcattgcaatcctcagaggaagcacatagtagggactcaataaatatttgctaaatgagtaaataaaccaccattaggagttcgtctctataactgatctatgtccttttggtataatttcaactttctatattacgtattactttaacgtttgaaaagcttacactgagaatgta

SEQ ID NO: 712976 - DNA, 478 bp, Homo sapiens
tttactgattaaaaaaaaattggctgaaccaatgaacgcaactgagcaaacgctttgggaggcaacttcaggagatgtttgctaagtaactctgaggaataatattcacattactaatactaaataataattagtaatcacaactaacacgtatataacagttcacagtgaacatgtcctctcatatacgatytcatgtgaccttgacagtaactctgtgacataaatgttacattccccttgtcacagatgaggtaactgagaagcagagagggcagtgaacttgcctgaagtcacacagctaagtggtgtgtccagccagtccatgcatctttgtctaaattccattctttttgcctaagaccactctttgaggcagcttcagagtgtcacgtgaacacaaaagtcagcctgagatgaggtaagtttaatactctgtgcacatgtgaacagcatgctttcttttcgaaagcagagc

SEQ ID NO: 712977 - DNA, 1340 bp, Homo sapiens
acatctttggctccccactgcctggaggaacaaatccacctcagccctccaactgtatcctcattgtcctcggggtatattctcaagactccttcccctaaatctgaaccttcccttgactatcttgtaggctgaatgcccttaggcgaagcactcaaactctctgagtcccagagctccaggagggcaagatcccctatttcattggctcctccagaggccctaagaagagaacgtccctaggcagcagtgccttgctttccatggggctgtgatccctctggcaatgttagcacgtggttttccagtctgcactggcttccccagctgggccctctctgctcacagtgcttgtcctctactgcctgtgacctccctcatgcttggctctcagcttagggtcacctcctccaggaagtccttcctgacttcagactggctcatgtccctgttactgctccaaaaacaagtgtccccttcagaacaccactttgattatctaaactgcagtccctgctcctaagctccatgtagcccagagctatgtcacttctgttgctcctctggccccagcacctcttccagagcctggcacaggatcagagcccaaaaatggatcctgtcattagaatgttggtactcatcagcctgggggaaacaggtggtgtgtccacctctctatcttactcctgttgtctggatggtgcatgtccttctccttctttgtttttttttttyctttggttttttttttttttttgagacagagtctcactcatgtcgcccaggatggagtgcagtggtgcgatttcggctcactgcaacctccgcctcccaggttcaaccaattctcctgcctcagcctcccaagtaactgggattacaggcacccgccgccaggcccggataacttttgtatttttagtagataccatttttagtttcgccatgttggccaggctggtgtcaaactcctgatctcaggtgatccacccgccttggcctcctaaagtgctgggatttcaggcgtgagccactgcacccagcccttctcctttttctctgccagtacacacccctatcccatcttgtcccatttacaaaccttttttctttggatcctcacagcctccctgtgaggcagcaaagcagatttccattggattttagacacagaaactgaggtccaaggagcaaacatgacttgcctgagctcccaaatctaagaagtgtccagaccttgaagcaaactagaacccctattttgaaactcagccctgagttcagctttgagctcctgggctcaagtgatcctcccacctcagcctcagagtagctgg

SEQ ID NO: 712978 - DNA, 584 bp, Homo sapiens
ttctaaaatagaaagaggcatgattatcttgggcagttgcagctaaactcaggtccaggccctgttgctgccacctggtatgtaatttttcctttcccagagagtggctgaccaaaccagttaaccactttttctcatttgttttttcattcattcattcattcatttactcatttgttctttgcacaaatatctaacaggtgcttaccgtgtaccagtgaggaggtagtggggcagaagagagggcmaacagtagtaagggggttgaactgagaaaatacaggcctggacttagggggagcagtaagtatggagagaagcggacagaccggaggtggtggcagcctccgtgcagcacgtccatcaggacaccagacacattgatatttagaccagctcgtggaggggccagaatcctcaaagacaacaaaccacagatggtagactaggcccagggacaccgttgtgttcagggccctgaaagccctgccccaggaccttgtggctttctgccagcctgcagctgcgcatgatggccccaggcctttctccacttcctgctccggctccgctgggacttgggg

SEQ ID NO: 712979 - DNA, 584 bp, Homo sapiens
ttctaaaatagaaagaggcatgattatcttgggcagttgcagctaaactcaggtccaggccctgttgctgccacctggtatgtaatttttcctttcccagagagtggctgaccaaaccagttaaccactttttctcatttgttttttcattcattcattcattcatttactcatttgttctttgcacaaatatctaacaggtgcttaccgtgtaccagtgaggaggtagtggggcagaagagagggccaacagtagtaagggggttgaactgagaaaatacaggcctggacttagggggagcagtaagtatggagagaagcggacagaccggaggtggtggcagcctccgtgcrgcacgtccatcaggacaccagacacattgatatttagaccagctcgtggaggggccagaatcctcaaagacaacaaaccacagatggtagactaggcccagggacaccgttgtgttcagggccctgaaagccctgccccaggaccttgtggctttctgccagcctgcagctgcgcatgatggccccaggcctttctccacttcctgctccggctccgctgggacttgggg

SEQ ID NO: 712980 - DNA, 3088 bp, Homo sapiens
ttaagataattgagagagggtgcacatgtgtcaaaaatgaactgacttggcaggtcagtcctacctcatgctctcctgaagcatttacccttgctcacaattacactcatgcctttgcccaatctgagacgcctggattctctcaaaaatagtgatgatgatcccttcccatcctcccttggaaggcagcaccagcagcagccaggttcagaaaggaagtgaagccctgcaatgactgtttaaaatccacacactgtgttttagggtatgctttttattggtaaaaaaaaaaaaaatcgtcattttctcctgattataggagtgatatatgttagtagtaaagcattcagaaactagagaagataaataagaaaataagtrtctataatcttacctctagtttattaccacctcaactgtttgttgtattttcttccagaaagagggagaaagagaaagctagtggctggctatataaataaaatgtagcaatttttttgcacaaaatacctactgcacaaacagtttaaaattctctgtgtgcctaaccttaattttcaatgggtgcataactgtatttttgcatcatccttcccttactgttgagcattaggttattactcatgttttacttttataaaccaggctctggtaaatgtccttgcattcaaatctttattcacatctctgattactcacgttagaaaggctcttacatgttcaattactctacacaaggtgaattttaattttaatacttttgatatacattcccaaaaagtaaaggttaatggttaaaagagtgtaatttacatgaaaactatctgaacatgtccataccaccacactctcggtagaattgaatatcatcattttttttctttgccatcataacaggcataagtcacatcactttctttgttttcaataaactatattttatttctagtaaggctgaattttttttcataagttcagaaggtttttgcatttattcttatgtgaattacccatttatgtcttttgttatttcattaattgtagcctcagtgcttttctggcctcattgattagctttatatgcattgccacatttattgaagacatttttctaactgttttcttttgtgatttcttatactgatttcatgtttagaaaattctttcctacactaaactcatatacatatttttccatgtttccttctagtattttatggtttgggtttttatgttaagtttgtaaatccacttgtaatttattttgttgtatggtttgatgtaagaatattatgtttttgcacaaacaacaaatgcatccaacaccactttttgaatagcccatcagctcctcattggcttgagatgatgcattctttaatatgcatgatattcttatatgtactacatatgaattatgtactaggattacgaagggagtatgaattgcacttaccagacctccaaattcctacatattctctgcttatctttccaactttacctcctttctccctacatttagagctcactggctttttcttattcttaaaaactaagctatttctagccccagtgctttcaccagagtttgttccttctttctggtctggtcctcccccagattattggatggttcctttgtctcattctggtgtctgttctaaaatccacttctgtgagaggtcttttctgatcacccaaatgagaaatatcccttagatactcaagtgttctctgttctttcatgaattttattatcttcatagcatttattacaatctaacatttccttattatttatgtatgtgtttgcttatttatttatttattgtttatctctcccactaatatgtaggctcaacaagaggaaccttgggaccttgactgtcttgttcagcattataaatattctctgagcctagaacatgcctgaaacatggcagataaccaacaatcatctactacaataataaagaattttaggaatttcatcaatatgtcaatttatacttgtattagtaccagtcttactaaattgttacaaatctaaaatgcatcttagtatttgggggcaaattctcctcatcctatttcttttcaaacttacctttgtctattagtccagataatatctagaatcagtttgtcagattatctgtctcacatatactccattttatgtcccatcccgaggaaaactctggcccccagagtttgcctatgccccccactgacattaattaaaacccatgaatacagtaagatagaatggacactgtctagactcatgggaatattgaattgttcagtattttcataagaccacctgatgcccaaactcaaggaaacgcatggattcttcaatctgaaaagattaacttgcttccttaccaaataagaatttaagttccttggctaggcatggtggctcatgcctgtaatcccagcacttcaggaggctgaggtaggaggattgcttgagcccaggagttcaagaacagcctttgcaacatggcgagaccctgtctctacaaaacataaaaatattagctgggcatggtagcgcatgcctggggtcccagctactcaagagactgaggtaggaggactgcttgagccctggaggttgggactacagtgagtcatgtttatgccactgcactccagcctgagtgatagagcgagactgtgtctcaaaaaaaaaaaaaaaattgagacccacattgatttggccataacatcacattgagcactggctttattttttaagtatctatttcaaaataatggatgaaaataataaagcaaaatttttaatatttttctactttggagaatagaccatttcatagtacaaaaggaagtgataattcagcaatctctggatgaagtggactatggagagtaacaatctatgtaattttgaatgttaggatgaagtttgtatgttcatggcagtgccatggcattgatttcagggcactttagctgacaaaaatgttcaggcttcactgattactcaaaagctcttgagaatttttttcataaaaaagcacaaatatcccacactaaatcaaagctgcca

SEQ ID NO: 712981 - DNA, 1432 bp, Homo sapiens
tttcttttctctaccttttttttaatggtttaccctattaaaaccactctccattctcaggaactatcacattcatatttagtaagtttaaaaatctaaaaaactatttaaaaatggccataaacaataaagtttagaaccatcaatgtcatttaaatcttagggggaaatttttatttttatttttatttttattttttgagatggagtctcgctctgtcgccgaggctggagtgcagtggcgctatctcggctcactgcaagccccgcctcctgggttcacgccattctcctgcctcagcctccsgagtagctgggactacaggtgctcgccatcatgcccggctaattttttgtatttttagaagagacggggttagccaggagggtctcgatctcctgacctcatgatccacccgcctcggcctcccaaagtgctgggattacagtcgtgagccaccgcgcccggccgagaaatttttttttaatgagtgtttttatttctaaactaaagaactgtggcagagatgtagtaatttcaaagacctcaaaccaactccccgaatattaggacttactcttgtgaggacaaaatggaaaaatcatactgcataataaaaggaattgatacatttttaacagtaataagaaaagatgaggatgatgatattcattataatgactttagtaatgcctaacattcattacatgttttagttaccaggtactgtgcaagaacttcacatacattatcttatttattctttataatagccctgtgaaataagtgttcttattattcccattgtatagttgaggagactgagatttagagggtttcactaacatattcaaggtcaagcctgaagtaggaacagccatctgacttccaagcctagtaaagcatgaaaacatgaacaacaacaataccacaacagcaacaacaaccagcaatctatgcctgtgagcatcaggtaaacagggccaaatatggccagcccatccctgtagtcacccatatatctgtggagacctaccacgccttagggtagatgagcaatatatgtgtggttttaatactgaacatcaggttggtgacactgacttttgttagcccatcactatttgctgatcctttgggaggtatcattcaaggatagttttaagagctggaaggtgagggactctctcttttacctgtcattctacactttcatcatgccttcacattcaatagctgaagtgccacatttaatcatctctttattataccacctccatttataattattgataattatgacagaattaattggttaccaagcaatgagagtttttaagactgaatcagtcatagtatatatgaaatatatgtattccttctttatggaaactcagaatattattgtagaatattattattctacaatat

SEQ ID NO: 712982 - DNA, 1432 bp, Homo sapiens
tttcttttctctaccttttttttaatggtttaccctattaaaaccactctccattctcaggaactatcacattcatatttagtaagtttaaaaatctaaaaaactatttaaaaatggccataaacaataaagtttagaaccatcaatgtcatttaaatcttagggggaaatttttatttttatttttatttttattttttgagatggagtctcgctctgtcgccgaggctggagtgcagtggcgctatctcggctcactgcaagccccgcctcctgggttcacgccattctcctgcctcagcctcccgagtagctgggactacaggtgctcgccaycatgcccggctaattttttgtatttttagaagagacggggttagccaggagggtctcgatctcctgacctcatgatccacccgcctcggcctcccaaagtgctgggattacagtcgtgagccaccgcgcccggccgagaaatttttttttaatgagtgtttttatttctaaactaaagaactgtggcagagatgtagtaatttcaaagacctcaaaccaactccccgaatattaggacttactcttgtgaggacaaaatggaaaaatcatactgcataataaaaggaattgatacatttttaacagtaataagaaaagatgaggatgatgatattcattataatgactttagtaatgcctaacattcattacatgttttagttaccaggtactgtgcaagaacttcacatacattatcttatttattctttataatagccctgtgaaataagtgttcttattattcccattgtatagttgaggagactgagatttagagggtttcactaacatattcaaggtcaagcctgaagtaggaacagccatctgacttccaagcctagtaaagcatgaaaacatgaacaacaacaataccacaacagcaacaacaaccagcaatctatgcctgtgagcatcaggtaaacagggccaaatatggccagcccatccctgtagtcacccatatatctgtggagacctaccacgccttagggtagatgagcaatatatgtgtggttttaatactgaacatcaggttggtgacactgacttttgttagcccatcactatttgctgatcctttgggaggtatcattcaaggatagttttaagagctggaaggtgagggactctctcttttacctgtcattctacactttcatcatgccttcacattcaatagctgaagtgccacatttaatcatctctttattataccacctccatttataattattgataattatgacagaattaattggttaccaagcaatgagagtttttaagactgaatcagtcatagtatatatgaaatatatgtattccttctttatggaaactcagaatattattgtagaatattattattctacaatat

SEQ ID NO: 712983 - DNA, 471 bp, Homo sapiens
ttgccacggcctcccgcccctgcgtcacatgccttgttactcacattcaccccccagcccctcccggccataaccgcatccctctttgatttactgcgggagtttcccatcttccttcttgttaatgccctccaacccccacccaacccttgctgcagagaatctgcctccctctggttttcctcctcacggascccctggctccctctcccccaccccaaggaaagtccctgctattgtttctccacccccacccactccaaggtgccgccccactccctgccctgagcactgaggtggttcttaaagcagggatgggtgaagcctgggcgcttccctctgccgggtggtcactcatagaacccctgagtgcccctgcggccacagcagctggcatttccaaaggagcagcttccagtactaccccaggttccggccacagaacttaacctggattcactcacttgatcc

SEQ ID NO: 712984 - DNA, 1662 bp, Homo sapiens
cagcattttgggaggctgaggcaggcggatcacctgaggtcaggagttggagactaacctggccatcatgatgaaactgcatctctgctaaaaatgcaaatattagccaggcgtcgtggcacgtgcacctgtaatcccatctacttgggaggagaggttgcagtgagcagataacatgccactgcgctcaagcctgggccagagacagagactctgtttcaagaaaaaaaaaaaaagcaagcacgggaccacttgagcccaagagatctaggttggaagcgccaccgcactccagcctgggcaacagagaccccatgatgcaaaacaactaaacaaaaacagaaccccaacatcatgcaagtctgatgataagcacgctctgcaaatgtgttaccaagatcagcatcaacttcaacgtggtttttctcaaacagtaacgctccaaaagaaggcactctgctttcagacaacagaaagtgctttcttttggagaatgactgcatgagatcttctcgctccaaaagtctgggttttttgacggaattttcctyacctggttaaaatggacacaaaaataaagatacatttattgactctctctgcatgttttctggaatccagaatataaacccctaaaaggaccatctccagttccttgcttcaaaggctcagcaggttagccttgttcatcaagagacaatcctcctgagttctgtccccaaagagaaaaagcaatgcctaccacacataccttatatttaaccatgagaattgggctggatttctagagaacagcaatggatttgaagccaagtgttcacataagtcccagtacagggacacacagtccccatgcaagcatccaaaatggaatctaagatgatgtttaagaatatacactgttgtacacacattctccaggatagaacacaggctaggccataaaagctcctcaataaattttttttttttttttgaaacaagtctcactttgttgcccaggctgtagtgcagggccgtgatctcagctcactgcaagctctgcctccaggtttccagcaattctcctgtctcagcctctggggtacctgggattacaggcacgtgccacgatgcccacctaattttgcatttttaaaatttttttttcttttttttcttttctttttgtggagaacagggtctcactgtattgcccaggcaggtctcaaactcctgggctcaagctatcctcctgcctctgcctccctaagagctgggattacaggcgtgagccaccgcgcccggctaatttttgtacttttagtagaaatgaggtttcaccatcttggccaggctggtctcaaactcctgactccaggtgattagcctgctttggtctccaagagtgctgagacgacatgcctgagctaccgtgcctggcctgcagacagctattccagaggctgcggtggggcatgggccaagactgcaacactgcactgcagcctgggtgacagagccagaccttgtctcataacacacacacacacacacacacacacacacacacacacacacgaaggaaaaaaaacccaaagtgatacaagagtattctgtgtgtgtagaagagtgttttgtgttaatcattatattatctatagaagatgatatgataaaatg

SEQ ID NO: 712985 - DNA, 668 bp, Homo sapiens
tcaacacacaaatgatactgtagaaaataatctttgaaacaaggctaatctccacactgcataataaaaactcaagcaaactaatcagaagaaggcaaacaagccaatttcaaaaagaaaataaggaggaatcatgatgagaaaatttacaaatctaacccagaccctgaacaaaattagagaagatgtrcaagtcccctcttgttgacgtcctcgactagctctgcctctcctttgtttctggtgttcgtctacagtttctaggaacataggagaaaaatcatcactgccacagcaacagaatgcagaggaacatatgataggtttcccattattcagattgacaactgcatgtcaaataatcaaaagcaaaagatcagacctgtaattccagtactttaggaggctgaggcaggaggatcgcttgaggacagaagttcaggaccagcctgggcaatatagcaagaccccatccccaaataaaaataaacaaaaattagctgagcatggtggtgcatacctgtagtcccagctactcaggaggctgaggtgagaggatggcttgaggctaggagttggaggttgcagtgatccgtgtgcatgacactgccctgcagcctgggtgacagagcaagagcctgtctcaaaaaaaaaaagaaaaaagaaaa

SEQ ID NO: 712986 - DNA, 668 bp, Homo sapiens
tcaacacacaaatgatactgtagaaaataatctttgaaacaaggctaatctccacactgcataataaaaactcaagcaaactaatcagaagaaggcaaacaagccaatttcaaaaagaaaataaggaggaatcatgatgagaaaatttacaaatctaacccagaccctgaacaaaattagagaagatgtacaagtcccctcttgttgacgtcctcgactagctctgcctctcctttgtttctggtgttcgtctacagtttctaggaacataggagaaaaatcatcactgccacagcaacagaatgcagaggaacatatgataggtttcccattattcagattgacaactgcatgtcaaataatcaaaagcaaaagatcagacctgtaattccagtactttaggaggctgaggcaggaggatygcttgaggacagaagttcaggaccagcctgggcaatatagcaagaccccatccccaaataaaaataaacaaaaattagctgagcatggtggtgcatacctgtagtcccagctactcaggaggctgaggtgagaggatggcttgaggctaggagttggaggttgcagtgatccgtgtgcatgacactgccctgcagcctgggtgacagagcaagagcctgtctcaaaaaaaaaaagaaaaaagaaaa

SEQ ID NO: 712987 - DNA, 598 bp, Homo sapiens
ggagttcgagaccagcctgaccaacacgttgaaaccccgtctctactaaaaattaaaaaaaawtagccgggcatggtggtgcgcaccggtagtcccggctactccggaggagaatcacctgaacccacaaggtggaggttgcagcgagccgagatcgtgccactgcactctaccttgggcgatggagcgagactccgtctcaaaaaaaaggtgcaaagtgctcaaagccagctcctgaatttagaaaatgctccgtagcatcagctgtcgtttctctgggctgatcatcaccatcttcatcattgttaccgtcacaccaagttactcccccactgtaaccgtccggtgggttcaccttgcccgctgcctagacagagccgatttatctagacgggggaactgcagtggagaaagagtcattcccgcagagctggctgtgcgggagaccggagtttcatttttactcaaatcagtctccctgagcatgtggggagcagagtttttaaagataatttggcgtgtaggggcttggtaagtggggagtgctgattggtcaggttgaagatggactcacagggggtcgaagggaggttttctt

SEQ ID NO: 712988 - DNA, 598 bp, Homo sapiens
ggagttcgagaccagcctgaccaacacgttgaaaccccgtctctactaaaaattaaaaaaaattagcygggcatggtggtgcgcaccggtagtcccggctactccggaggagaatcacctgaacccacaaggtggaggttgcagcgagccgagatcgtgccactgcactctaccttgggcgatggagcgagactccgtctcaaaaaaaaggtgcaaagtgctcaaagccagctcctgaatttagaaaatgctccgtagcatcagctgtcgtttctctgggctgatcatcaccatcttcatcattgttaccgtcacaccaagttactcccccactgtaaccgtccggtgggttcaccttgcccgctgcctagacagagccgatttatctagacgggggaactgcagtggagaaagagtcattcccgcagagctggctgtgcgggagaccggagtttcatttttactcaaatcagtctccctgagcatgtggggagcagagtttttaaagataatttggcgtgtaggggcttggtaagtggggagtgctgattggtcaggttgaagatggactcacagggggtcgaagggaggttttctt

SEQ ID NO: 712989 - DNA, 598 bp, Homo sapiens
ggagttcgagaccagcctgaccaacacgttgaaaccccgtctctactaaaaattaaaaaaaattagccgggcatggtggtgcgcaccggtagtcccggctactccggaggagaatcacctgaacccacaaggtggaggttgcagcgagccgagatcgtgccactgcactctaccttgggcgatggagcgagactccgtctcaaaaaaaaggtgcaaagtgctcaaagccagctcctgaatttagaaaatgctccgtagcatcagctgtcgtttctctgggctgatcatcaccatcttcatcattgttaccgtcacaccaagttactcccccactgtaaccgtccggtgggttcaccttgcccgctgcctagacagagccgatttatctagacgggggaactgcagtggagaaagagtcattcccrcagagctggctgtgcgggagaccggagtttcatttttactcaaatcagtctccctgagcatgtggggagcagagtttttaaagataatttggcgtgtaggggcttggtaagtggggagtgctgattggtcaggttgaagatggactcacagggggtcgaagggaggttttctt

SEQ ID NO: 712990 - DNA, 867 bp, Homo sapiens
acatttccacacaccttccttatttcaacagtaactgtgttgcagggtaacataaagcatggggcctcatttgtgtaacactagttcacagcaaaggcaaaaagtccaccttctggacttggagacgcatgctgctacttctgggtttctctttagttgacaaagtaataagagctgttacaataaacttctttgttatttcatttaaaatgttgcctttttttgccaggcaaaaaaaaaatttagtataatcatgcatgcatgcctctttatgtatggcaagctacttacttcttttttctagagatcatagggtccagaaaacctttcgatgggttaaatagggtcatttaaaagagaaacttaagtctacattggatggttctggaggagtttccccttccctggagctgctcaccagttaatttaggaataaaatagtctcccaacctagcaaatcccaccaccctacccaggggttttcacaaaattatcttgtyttaatcatgttttagcatggaaaaatgacacatatctcaaagtatacattttgaggtttttgatatgtatatggctaatttaggaaggaatattttaccacactcctggtttaggagataactccagtcacagatgtcacactctggtgacaagtgtgtgccagctcaccactgccaccatctgcctagggcctttcctcttcattcttcaagccaaaagcacagctgatttgttgggtaatgtttcttgatagctctctagccaaaaatatatgtggttcagaagtgttgttactatagctctactcagctgggtctcgtttctggaaaccatatttagttgtcaaacagtataatgtgacagaaa

SEQ ID NO: 712991 - DNA, 1524 bp, Homo sapiens
tgaccaacttggagaaactccatctctactaaaaatacaaaattagcccggtgtggtggtgcatgcctgtaatcccagctcctcgggaggctgaggcaggagaatcgcttgaacccgcgagatggaggttgcagtgagccgagatcgcgccattgcactccagcctgggcaacaagagcaaaactccgtctcaaaaaaaaaaaaaaagcaagcaaccgagcgaggcaatgccagtctaaaatcttgctatcaatgccattctgaaatatttaaaaatgtgaagtccagtgcaatggttcatagttcagactgcaacagtattattatatcaaagagctttttttttttttctctttgagacagagtcttgctctgtcacccaggctggagtgcagtggcgtgatctcagctcaactgcaacttccgcctcgtgggttcaagcaattcttctgcctcactctactgagtaactgggattacagccacagaccaccattcctggctaatttttgtatttttagtacagacgggatttcaccatgttggccaggatggtctccaactcctgacctcaagtgatccgccagcctcggcctcccaaagtgctgggattataggcgtgaaccaccgcgcccagccagaaataaagattttagtaaatattttcaacttaaaggactgtcctttattttattcctatagttttggtgataaagacaatcttgctaattatgaaaaacggaaatggtgaatgatcactaatttaaagatattttccttgacaaaataaaaagttggcaaatacagccgggcatggtggctcacacctgtaatcccagcactttgggaggccagggcaggcagatcacgaggtcaggagttcaagatcagcctggccaacatggcaaaaccctatctccactaaaaatgcaaaaattagccgggtgtgggggcgggcgcctgtaatcccagctactcaggaagctgaggcgggagaatcgcttgaacccaggaggcggaggctgcagtgagccgasagcacaccactgcactctagcctaggcgacagagtgagactccatctcataaaaaaaagttggcaaatacaagttgttcctcaaatgtttctggagacccgggactccaggctcactagtgttgtggagtgcccacagtcctagagtcagaagcctggaatttgcccctgggctctccaacctggcagctttgggacctacagcaaatcacttacctttctggtggtgggtgaaaaatgaggatgaaaataccacctgcctcaggctgcagacagcaaggattaaaggtggcactatggggaaatgttttgtgaactacaatactacaaatgcaatgtatgaagaggattaaattgggtacagttgtgaatgcctgtagtaccagctactcgggagaccgaggcaggaagattcgttgagcccagaagttcaagaccggcctggacaacatagtgagagccagtccttaggaaaaaaaaaagaaaaa

SEQ ID NO: 712992 - DNA, 626 bp, Homo sapiens
aataaataaaataaaatatgtgttgctcttcctggtcaggtcgccagcatcatgctcttctattccttttttcaagtcccttgtgggcatgaatgtggtcatggaactcaagaaagacctgaacatctgtggcaccctccattcggtggatcagtatctcaacatcaaatgagctgacatcagtatcacacaccttgagaaatatcctcacattttatcagtgaagaacttctaggctgggtgcagtggctcacacctgtaaccccagcactttgggaggccaaggcaggtggatcacctgaggtcaggrgtttgagaccagcctggccaacatggcaaaaccccatctctactaaaatacaaaacttagccggatgtggtggcgggcgcctgtattcacagctactcgggaagctgaggcaggagagttgctggaacccgggaggtggaggctgcagtgagctgaaatcatgccactgcactccagcctgggtgacagagcgagactctgtctcaaaaaaagttttttaaaaaggactgtttcattccgggctcagtggtcccatacgtgcagttgccagcaaaggaggtcgacacacagttgccatagcatgcagcaaggaaga

SEQ ID NO: 712993 - DNA, 2282 bp, Homo sapiens
tgtaatcccagctactgggaggctgaggcaggagactcacttgaacctgggaggggtaggttacagtgagccaagatcatgccactgcactctagcctgggcaacagagtgagactctgtctcagaaaataaataaattaattaattacataaaagaaattgaatgatattcagtaagtgaaataggaacacagacgactactgaagatcagaaaaatgaggataaacaagaaaaaatattaaaatagaaaaaaacaaaaattatggatataaaaaatataaaaataacttaaaaatttcttaaaagaaaaaataatgtaaacatgaagaagctgaacaaactaggatacacaaaaagatatttatcacaaacacacctataagcaaaatttcaaaaatcacagataagaaaagaattttgggtgctgcaagataaaaatgatgtgtcatttataagcatagtcttataagataaccagtgaatttatcaaaaaaaatttttgcagaaaataataccatcggcaaaattgtactatcatataaaaaggagtccttccaaaataaccaaatcctaagaaagtatattggcactgcatatgccctacctatcaaagatgctgaaagaagtttcttccactgaaaataacataatacaagaaaacaacacatgatcatatgaaaatacataactttctggagaagatatgcacatacacaaaaatagaattccttacttattatcataatggcacagaaagcacttttagttattctctaaaatgcaaaagatggaagtagaggaattattataaacatctgttaatgaatatataacataagtagaattagcaaaatcaataacaaagttgaaggcagatgtaatgaagaatgtttgcatgcaactgaagttaattttttactgcattaaagtatattgttggatcttttagaggttttatgtaatcccctagataccactaagaaactacctgcctagatacacaaaagaaaataagaaaaaaattaaaagcatatcaatacaaaaataaaaaaaaaacacaaaaagacagaaagagaaaaagagacaaagataaaagaatcaaataaaacaataaaataacgttggccaggcgcagtygctcacgcctgtaatcccagcacattgggagaccaaggcgggtgaatcactggaggtcaggagtccaagaccagcgtggccaacatggagtaaccccatctctactaaaaataccaaaaattagccagcatggtggtgggtgcctataataccagctactcaggaggctgagacaggagaattacttgaaccttagaggcagaggttgcagtgagccaacattgtgccatttcactccagcctgagtgatagaccaagattccgtctcaaaataaataaataaataaatagataacattagtaagtttttctctttcggaaaactatttaaatatatataattatctttccagtcaagaaacatactttcaataaaaaggtttattaaaaaattttatcagcctgatcaacatggtgaaaccccatctctactaaaaatacaaaaattagccaggcgtggtggggcatgcctgtaatcccagctactcaggaggctgagacaggagaatcacttgaacaagtgcactgcagtctgagtggcagagtgagacttcttctaaaaaaaaaaaaaaaaaaaaaattaaaaatcaagatccaacttgcctttctacaagagtcacctgagatctaatgacaaagactgaaagtggcaagacagaagtagaaatttcatgtaaatattaaccaaatgagagcagaagaggtcaaaataatattacacaagctacatcttaaagtcaaaaactgtcatattttataaaatgtactttaagtcaaaacttcaaaaagacgaagaaggacaatatatagatcacctgaggtcaggcattcaaaaccagcccggccatcatggtggaaccctgtcactagtaaaaatacaaaaaaattagccaggtgtggtagcagatgcctttaatcccagctactcagaaggctgacgcaggaaaattgcttgaacccgggaagcataggttgcagtgagctgagatcgcaccatagcacttcagcctgagcaacaagagtgaaattccatcacaaaagaaaataaataaataaataaaattatatataaaaaaatagaatgcctgagtggtttttaaaaagcatacagtacgctgcctacaagagactcattttgcattga

SEQ ID NO: 712994 - DNA, 2282 bp, Homo sapiens
tgtaatcccagctactgggaggctgaggcaggagactcacttgaacctgggaggggtaggttacagtgagccaagatcatgccactgcactctagcctgggcaacagagtgagactctgtctcagaaaataaataaattaattaattacataaaagaaattgaatgatattcagtaagtgaaataggaacacagacgactactgaagatcagaaaaatgaggataaacaagaaaaaatattaaaatagaaaaaaacaaaaattatggatataaaaaatataaaaataacttaaaaatttcttaaaagaaaaaataatgtaaacatgaagaagctgaacaaactaggatacacaaaaagatatttatcacaaacacacctataagcaaaatttcaaaaatcacagataagaaaagaattttgggtgctgcaagataaaaatgatgtgtcatttataagcatagtcttataagataaccagtgaatttatcaaaaaaaatttttgcagaaaataataccatcggcaaaattgtactatcatataaaaaggagtccttccaaaataaccaaatcctaagaaagtatattggcactgcatatgccctacctatcaaagatgctgaaagaagtttcttccactgaaaataacataatacaagaaaacaacacatgatcatatgaaaatacataactttctggagaagatatgcacatacacaaaaatagaattccttacttattatcataatggcacagaaagcacttttagttattctctaaaatgcaaaagatggaagtagaggaattattataaacatctgttaatgaatatataacataagtagaattagcaaaatcaataacaaagttgaaggcagatgtaatgaagaatgtttgcatgcaactgaagttaattttttactgcattaaagtatattgttggatcttttagaggttttatgtaatcccctagataccactaagaaactacctgcctagatacacaaaagaaaataagaaaaaaattaaaagcatatcaatacaaaaataaaaaaaaaacacaaaaagacagaaagagaaaaagagacaaagataaaagaatcaaataaaacaataaaataacgttggccaggcgcagtcgctcacgcctgtaatcccagcacattgggagaccaaggcgggtgaatcactggaggtcaggagtccaagaccagcgtggccaacatggagtaaccccatctctactaaaaataccaaaaattagccagcatggtggtgggtgcctataatmccagctactcaggaggctgagacaggagaattacttgaaccttagaggcagaggttgcagtgagccaacattgtgccatttcactccagcctgagtgatagaccaagattccgtctcaaaataaataaataaataaatagataacattagtaagtttttctctttcggaaaactatttaaatatatataattatctttccagtcaagaaacatactttcaataaaaaggtttattaaaaaattttatcagcctgatcaacatggtgaaaccccatctctactaaaaatacaaaaattagccaggcgtggtggggcatgcctgtaatcccagctactcaggaggctgagacaggagaatcacttgaacaagtgcactgcagtctgagtggcagagtgagacttcttctaaaaaaaaaaaaaaaaaaaaaattaaaaatcaagatccaacttgcctttctacaagagtcacctgagatctaatgacaaagactgaaagtggcaagacagaagtagaaatttcatgtaaatattaaccaaatgagagcagaagaggtcaaaataatattacacaagctacatcttaaagtcaaaaactgtcatattttataaaatgtactttaagtcaaaacttcaaaaagacgaagaaggacaatatatagatcacctgaggtcaggcattcaaaaccagcccggccatcatggtggaaccctgtcactagtaaaaatacaaaaaaattagccaggtgtggtagcagatgcctttaatcccagctactcagaaggctgacgcaggaaaattgcttgaacccgggaagcataggttgcagtgagctgagatcgcaccatagcacttcagcctgagcaacaagagtgaaattccatcacaaaagaaaataaataaataaataaaattatatataaaaaaatagaatgcctgagtggtttttaaaaagcatacagtacgctgcctacaagagactcattttgcattga

SEQ ID NO: 712995 - DNA, 1212 bp, Homo sapiens
ggtgtttgatattatatatgcagtgcagctcttggtagccccatggaagacattccacgtggcatagagaggatgagactaagaaaaggggacatgggacagactctgaggctggcttgtctccaaggacaatcaatgagatctttaagtctagactcttttttcctcttcttctcagtgtctacaaggctctactttgaaaagtccactccatctagcaatctagccatctcatcctctccaaagtgcctgaagaccagccaggctggcagaccccagctctcaaggccaaggagatagccttgataccttggaggtctctgtcagttgggtgaatgaccagcccttgtcctgatagcttttctctgttcttagagtcctaaatttccaagggggtgggtgaggggcagggaggagagggagaaacaaagacagcaaaactctgttgcccgcggactcttgccaggtggggtcagagccaaggctgcctcgccaaagactagaagagttttgctttgccaaagagtcacagccgggtgtgctgggcctgcctacctttttaggaaatgctccatttcagaaagtagaagtcattcataagagccaggcctgagggctgctggctgggtgtggcctgtctgctgctgaattcacaagagctagccagaaggtttggagaacctgccccaaatctcttcctctctgaaaaatcgggcaatttatccccagcacagtggatggcctcttagtgaagaccctgaagtcagcctcatgaggttcctccctcactgctcagagacccactgcccacaaagggttttggtcacagcscaaggaagctggggttggcctgaaattgcatctgatactgacaagcagaaaaccaggaggagctgcgagatggaagagagcagcgagaaagaggccggagcgaggtaggcctccagttgtgggtatttctgaccagtttgatggttttcacacagcctctcctctctgatctgccacactttcattataaatacctgacagcgtttgcacgaaaggatctttttacaacaggtctaatgaagggttcggctccaggtatatgggagaagatgctggacttgatgatggcttctaaatggtatgaatgtgaaaaacctcagaaaataataaacacatttcaagcgttatacctgtttatttcacactttctttaatatacca

SEQ ID NO: 712996 - DNA, 1212 bp, Homo sapiens
ggtgtttgatattatatatgcagtgcagctcttggtagccccatggaagacattccacgtggcatagagaggatgagactaagaaaaggggacatgggacagactctgaggctggcttgtctccaaggacaatcaatgagatctttaagtctagactcttttttcctcttcttctcagtgtctacaaggctctactttgaaaagtccactccatctagcaatctagccatctcatcctctccaaagtgcctgaagaccagccaggctggcagaccccagctctcaaggccaaggagatagccttgataccttggaggtctctgtcagttgggtgaatgaccagcccttgtcctgatagcttttctctgttcttagagtcctaaatttccaagggggtgggtgaggggcagggaggagagggagaaacaaagacagcaaaactctgttgcccgcggactcttgccaggtggggtcagagccaaggctgcctcgccaaagactagaagagttttgctttgccaaagagtcacagccgggtgtgctgggcctgcctacctttttaggaaatgctccatttcagaaagtagaagtcattcataagagccaggcctgagggctgctggctgggtgtggcctgtctgctgctgaattcacaagagctagccagaaggtttggagaacctgccccaaatctcttcctctctgaaaaatcgggcaatttatccccagcacagtggatggcctcttagtgaagaccctgaagtcagcctcatgaggttcctccctcactgctcagagacccactgcccacaaagggttttggtcacagcgcaaggaagctggggttggcctgaaattgcatctgatactgacaagcagaaaaccaggaggagctgcgagatggaagagagyagcgagaaagaggccggagcgaggtaggcctccagttgtgggtatttctgaccagtttgatggttttcacacagcctctcctctctgatctgccacactttcattataaatacctgacagcgtttgcacgaaaggatctttttacaacaggtctaatgaagggttcggctccaggtatatgggagaagatgctggacttgatgatggcttctaaatggtatgaatgtgaaaaacctcagaaaataataaacacatttcaagcgttatacctgtttatttcacactttctttaatatacca

SEQ ID NO: 712997 - DNA, 1483 bp, Homo sapiens
ggcaagagcttacaccaaggtaggcctgagaacagctgccccaagggtcaggcgatactcagcaccttcccctgtggcccaggagacatgagcccagggttaccacaacttctgacttttccagaaattgcctgatatgctctgtaaaatatcctggattttcaatgtgaataagtcttttaaaatatgcatacatacatacatacatatatatatatatatacacacacacacatatatacacatacatatattttacatatatatttttgaatatatatattttgtgtgtatatttatattatatatatacacacagagaaaacaaataaagcaattaaaaggtatttctgggtcccagctctgaggcaagggaaactagatccgcgaggtttccagctcccgccttaccccatgtgtgggcttctgaggattctgctacccccagagcccggagctgttcctagaacaccccaccttgaggctcagaaagccccctctcaaagcctaaacagtaatagaaatgtgggttccacttctgtgcagaggccgccatctactggtggaaggacgtgagtgcagccagtgcctgccgggatccccagcagaggatgggaggagaggggagaaaagagaggagggagtggaagggagggaggaggcagggaaagggagggagaaaagaagagcggacaggagggaacgtgtcggacccggccagcttctgatgtgagaaggaacccagcagcagggcctgagccacctcatcaaagatgagaagcagctcaagcatcctgagtgatgggagactgggaggcagtgcacctgctgctgggagggctgggcctaagctcagaacctcctgggagaccaggtgagccgtgatcagcaagcgagcatgcacacgcatgtctgtggcatgtctgcagataggcaccttctgtctagatcaaccctaaagcaacaaacttggtgtagtcccatcttcatgggtacctaggtgagatgtatcgagggtccctcctcagagccctttggggctgcaggggccccagcctggaccccaggatcccaaataaagtctcccaaaaggggccaccacaggaatcccagacacaccaggaatcacctgtccatgcagtgcaccagaatgtgcaatgtctccagacagtgacccctcctttcctctcagtcctctgatcccctagtgactgtgcctgctgcctagggccccccaaakacccaaaccccaaatctctccacgctgctgctgatccccttaacctgttttctaggagcactttgtccagcaaaagggaaacctggcttgttccctcgagcctggaatggacatggaaagggtgtctttttggcagaagcaaggatctccagatggtttcgaaacagaatttacccagcaccagaccctcctgggccagtcacatggcctttgagtgaccaggatcttcaggagccactttca

SEQ ID NO: 712998 - DNA, 1294 bp, Homo sapiens
tgcttaggagggtgaggcaaaagaatcgtttgaacctgggaggcagaggttgcagtgagctgagatcgagtcaccacactccagcctggcgatggagtgagactctctctccaaaataaataartaaagttatgtttctacactggatgtgcatgtcttcaataatggggacaggggacaaaacacacaactgaaatacagttcagtgggtgggttgctgtctttattgttgggtgatgtgtttatacaaggaaggaagcactgagtgggcctgttgacgatctgggcttgggaaacagctcacaggggaactgctggaactcaaggctctggttctcctgggggatccatgtacaggtctgtgcgtgtcctttgttgccaggattgccctgccaagctaaccgggttgtgcttcgcgtttcagacttctgcctggtgtcgaaggtggtgggcagatgccgggcctccatgcctaggtggtggtacaatgtcactgacggatcctgccagctgtttgtgtatgggggctgtgacggaaacagcaataattacctgaccaaggaggagtgcctcaagaaatgtgccactgtcacaggtgagatggcagtagttggagcttttgtttttttccttttttttttttttttttttttttttgagacggagtcttgctctgtcgcccaggctggagtgcagtggcgcgatcttggctcactgcaagctccgcctcccgggttcacgccattctcctgcttcagcctcctgagtagctgggactacgggcacccaccatcacgcccaactaattttttgtgtttttagtagagacatggtttcaccttgttagccaggatggtctcgatctcctgatcttgtgatctgcctgcctcagcctcccaaagtgctgggattacaggcatgagccactgcgcccagcccctgctttttttttagacagggtctcactgcagcctccacctcctgggctcaagcagaacctcccacctcagcctcctgagtagttgggactacaggcacatgccaccacaccttgctcattttgaaattttttatagaggcgggggtctccctatgttacccaggctggtcttggactcttggcctcaagtgatcctcccacctgggccttccaaagggctgagattacaggcgtgagccactgtgcccagccagattttgctctttagagacaatttattaactggaatgtggatactttcctctctttattagttcttgacagtggaatctgggtgacgttttaaaaagcaga

SEQ ID NO: 712999 - DNA, 1294 bp, Homo sapiens
tgcttaggagggtgaggcaaaagaatcgtttgaacctgggaggcagaggttgcagtgagctgagatcgagtcaccacactccagcctggcgatggagtgagactctctctccaaaataaataaataaagttatgtttctacactggatgtgcatgtcttcaataatggggacaggggacaaaacacacaactgaaatacagttcagtgggtgggttgctgtctttattgttgggtgatgtgtttatacaaggaaggaagcactgagtgggcctgttgacgatctgggcttgggaaacagctcacaggggaactgctggaactcaaggctctggttctcctgggggatccatgtacaggtctgtgcgtgtcctttgttgccaggattgccctgccaagctaaccgggttgtgcttcgcgtttcagacttctgcctggtgtcgaaggtggtgggcagatgccgggcctccatgcctaggtggtggtacaatgtcactgacggatcctgccagctgtttgtgtatgggggctgtgacggaaacagcaataattacctgaccaaggaggagtgcctcaagaaatgtgccactgtcacaggtgagatggcagtagttggagcttttgtttttttccttttttttttttttttttttttttttgagacggagtcttgctctgtcgcccaggctggagtgcagtggcgcgatcttggctcactgcaagctccgcctcccgggttcacgccattctcctgcttcagcctcctgagtagctgggactaygggcacccaccatcacgcccaactaattttttgtgtttttagtagagacatggtttcaccttgttagccaggatggtctcgatctcctgatcttgtgatctgcctgcctcagcctcccaaagtgctgggattacaggcatgagccactgcgcccagcccctgctttttttttagacagggtctcactgcagcctccacctcctgggctcaagcagaacctcccacctcagcctcctgagtagttgggactacaggcacatgccaccacaccttgctcattttgaaattttttatagaggcgggggtctccctatgttacccaggctggtcttggactcttggcctcaagtgatcctcccacctgggccttccaaagggctgagattacaggcgtgagccactgtgcccagccagattttgctctttagagacaatttattaactggaatgtggatactttcctctctttattagttcttgacagtggaatctgggtgacgttttaaaaagcaga

SEQ ID NO: 713000 - DNA, 1052 bp, Homo sapiens
catcttcttcatcattaacaaaacagcagacacttggagctcctctcctctgccctaagcactgtgctcaacattttacaatcattagctcctttaatcctccatctccctgtgaggtcaagaccattatgcccacctcattgcaaattaaaaagtgaggctcaggctgggcrtggtggttcacgcctgtaatcccagccctttgggaggccaaggcgggtggatcacctgaggtcgggagttcgaggccagcctaaccaacatggagaaactccgtctctactaaaaatacaaaattagctggtcgtggtggtgcatgcctgtaatcccagctactcgggaggctgaggcaggagagttgcttgcttgaacccgggaggcggaggttgcagtgagccgagatcgtgccagtgcactccagcctgggcaacaagaggaaaactccgtctcacaaaaaaagtgaggctcagagagggccgggtgtagtggctcacacctgtaatcccagcactttgggaggccgaggcaggcggatcacgaggtcaggagttcgagactggcctggtcaacgtggcgaaaccccatctctactaaagatacaaaaaaattaggcgtggtggtgcgcacctgtaatcccaactacttgggaggctgaggcaggagaatcacttgaacccaggtggtggaggttgcagtgagccgagatcatgccattacactccagcctgggtgacagggcgagactccatctcaaatagaaaaaaaaaaagtgaggctcagagagggtaaaccatttgcctaaggccacacagctaggcaagagttgtgtgtggaacccagctcacctagccctaattccagagcacagcctccgcaccatttctgtttccccaaacagtgggccttgattcaaaacccaggtttccaccaggcgcagtggctcacgcttgtgatcccagcactttgggaggcagaggcagatggatcacctgaggtcaggagttcgagaccagcctggccaacatggtgaaaccccgtctctactaaaaata

SEQ ID NO: 713001 - DNA, 1052 bp, Homo sapiens
catcttcttcatcattaacaaaacagcagacacttggagctcctctcctctgccctaagcactgtgctcaacattttacaatcattagctcctttaatcctccatctccctgtgaggtcaagaccattatgcccacctcattgcaaattaaaaagtgaggctcaggctgggcgtggtggttcaygcctgtaatcccagccctttgggaggccaaggcgggtggatcacctgaggtcgggagttcgaggccagcctaaccaacatggagaaactccgtctctactaaaaatacaaaattagctggtcgtggtggtgcatgcctgtaatcccagctactcgggaggctgaggcaggagagttgcttgcttgaacccgggaggcggaggttgcagtgagccgagatcgtgccagtgcactccagcctgggcaacaagaggaaaactccgtctcacaaaaaaagtgaggctcagagagggccgggtgtagtggctcacacctgtaatcccagcactttgggaggccgaggcaggcggatcacgaggtcaggagttcgagactggcctggtcaacgtggcgaaaccccatctctactaaagatacaaaaaaattaggcgtggtggtgcgcacctgtaatcccaactacttgggaggctgaggcaggagaatcacttgaacccaggtggtggaggttgcagtgagccgagatcatgccattacactccagcctgggtgacagggcgagactccatctcaaatagaaaaaaaaaaagtgaggctcagagagggtaaaccatttgcctaaggccacacagctaggcaagagttgtgtgtggaacccagctcacctagccctaattccagagcacagcctccgcaccatttctgtttccccaaacagtgggccttgattcaaaacccaggtttccaccaggcgcagtggctcacgcttgtgatcccagcactttgggaggcagaggcagatggatcacctgaggtcaggagttcgagaccagcctggccaacatggtgaaaccccgtctctactaaaaata

SEQ ID NO: 713002 - DNA, 1149 bp, Homo sapiens
ctccactgtcctctgcctgaatctctggtgcccggcgactgatgcctgttcctggatgggtccgcaggccactcccagaagagacgggggtggaactgcttggcagcccggtggaagacacatcctgtaagtttccacgtccacagaagggcggaaacaggctcagtgtttccgggtttcagccctgcctggggctgtaactgtagaaatgtcagaggccacacaccgtgggtagaatgttctgtcctggggtctatggtggaagtggccgtggtgggtgagagacacaatggatgatggcgctstcatgaagccagcacgctgtgttgctgtgtgtccctgtgctagtcactcagcctctctgtgccccaatgcctcatctactaaatgtaggtagcgagcttctcgcagagggggcatgtaaggattaaatgaggtgatgccaaatgccctggaggcacaaagtcagcacagccaagggtgcactgggaggctctgctatctggagctctaaacatatacattttaatgtgtaataccttatattagacccaaatatatacattttttgggagaccgggtcacactctgtcatccaggctggagtgcagtggcgtgatcatggctcactgcagcctcaacctccagggctcaagagatcctcctgcctcagccttctgagtagctgggactacaggtgcacaccaccatggctggctaattttggtagtttttgtagaaatgggatctagctatgttgcccaggctgctcttgaactcctgggctcaagccatcttcttgcctcagcctcccaaagtgctgggattacgggcgtgagccaccacgcctggcatgttttttcttcagcagaggaaaaaaatcataatgtatcaggctctgaagccccagatcccggggatgggagtcctgggcggccagaggagagttttagccgtaacctggcgattgcaacgtgcctccggaggcagggaaagggcccaggttggcaccgtggggagaggtggggtctggggaggacctggcagccagccccacttaacgacattcagttaagcagaatatggaaaataaacctgtgagggccaaacaaaatttttttggagacagagcctcactgtatcgcccag

SEQ ID NO: 713003 - DNA, 1149 bp, Homo sapiens
ctccactgtcctctgcctgaatctctggtgcccggcgactgatgcctgttcctggatgggtccgcaggccactcccagaagagacgggggtggaactgcttggcagcccggtggaagacacatcctgtaagtttccacgtccacagaagggcggaaacaggctcagtgtttccgggtttcagccctgcctggggctgtaactgtagaaatgtcagaggccacacaccgtgggtagaatgttctgtcctggggtctatggtggaagtggccgtggtgggtgagagacacaatggatgatggcgctctcatgaagccagcacgctgtgttgctgtgtgtccctgtgctagtcactcagcctctctgtgccccaatgcctcatctactaaatgtaggtagcgagcttctcgcagagggggcatgtaaggattaaatgaggtgatgccaaatgccctggaggcacaaagtcagcacagccaagggtgcactgggaggctctgctatctggagctctaaacatatacattttaatgtgtaataccttatattagacccaaatatatacattttttgggagaccgggtcacactctgtcatccaggctggagtgcagtggcgtgatcatggctcactgcagcctcaacctccagggctcaagagatcctcctgcctcagccttctgagtagctgggactacaggtgcacaccaccatggctggctaattttggtagtttttgtagaaatgggatctagctatgttgcccaggctgctcttgaactcctgggctcaagccatcttcttgcctcagcctcccaaagtgctgggattacgggcgtgagccaccacgcctggcatgttttttcttcagcagaggaaaaaaatcataatgtatcaggctctgaagccccagatcccggggatgggagtcctgggcggccagaggagagttttagccgtaacctggcrattgcaacgtgcctccggaggcagggaaagggcccaggttggcaccgtggggagaggtggggtctggggaggacctggcagccagccccacttaacgacattcagttaagcagaatatggaaaataaacctgtgagggccaaacaaaatttttttggagacagagcctcactgtatcgcccag

SEQ ID NO: 713004 - DNA, 445 bp, Homo sapiens
gggttgcgtgtatactgtatcacctaagccatcagaacacagaaggtagctgtgctaaaatgtataagcacgttaattcaaatcaatgacagaagcctctactgaagcttagcaatcacctatttgaacaacataaacattcaatttctcctctggaaggtaattttaatagcaagcataatattcaagtgattttccacgtctgatggaagaatacaatggagaaagaaagaagagaaagagaaaagaaggaagagctagcaggcagaggrgtggagtgtgtccagaagtttgtactagcctggatcgctagccaagtccagccgctttaactgagccctggcaatcaaaacaccactgaggatgaaggaagcaaaagaaaagatcaaataaaaattaaatgctccattctgggaaatcagcaggtcatagattctttccctaa

SEQ ID NO: 713005 - DNA, 624 bp, Homo sapiens
cacacacatatttatttattcacaacctaacacttctcacctcctccactgccagcatcctgctgcagccacagacacttcctgcctggagtactgtagtcaactcctcactgggtccctggcttccaccttcaccccccgccgtctgcaccccaacaccctgttaatgcctgagtcagatcatatccctcytctgctcggagccctcttgtggcttctgtcttagctctggatcctgccggcaccctcgtggtgtaccacgcttgctctccccaccccagccacacaggcctcctcgctgatcctcaggcgcgatgcctggcaatcccttcttgggctcttgcactttcggttccctgtatctgcctgtatctcctttccctccgtgagtttcaaggtggccaccttgcttttcccactgctggatctccagcccccagaaactgcctgccatagagaccaatgagaattcatgaatgagctgggcatggcggcgcatgcctataatcctagcactttaggggctgaggctggaggatcactagaggtcaggagttcgagagcagcctggccaacatagtaaaaccccgtctgtactaaaatacaaaaatcagccggacgtgg

SEQ ID NO: 713006 - DNA, 590 bp, Homo sapiens
tagcccttatcacattttataatcccatatttaacttattgtttacgtgtctgcctcctcatctaggtagggaaccccagggccaggcctgtcctcagcactgctcggcacaaggccaggtacagaacaggcgcataataaatatttattgaatggatgacatcagaaataactctcatttgaaaccaaagatctaggtcttggaccagaaaagtctcagccttggccgggcacggtggctcatgcctgtaatcctagcactttgggaggccaaggcaggcagatcgcttgaggccaggagttccagaccggcctggccaacatggcaaaaccccgtctctactaaaaatacaaaaattagktggacatggtggcacacgcctataatctcagctactcgggaggctgaggcaggagaatcacttgaacctgggaggcggaggttgcagtgagccgagattgtgacactacactccaggctgggtgacagagcgagactctgtctcaaaaaaaagaaaagtctcagccttgttcctgcgcaggaccaccgcttgggcagtgtctgtcactgatgccatcctccctaaact

SEQ ID NO: 713007 - DNA, 1060 bp, Homo sapiens
tgtgcgctctcttagccaacagggaacaggtttcaagacacaaatgaaaaaagcaaggtgcagaacggtatgctcatgaatgctaccctttatgcaagaagtggggaaagccgggtgcggtggctcacgcctctaatcccagcactttgggaggctaaggtgggcggatcacaaggtcaggagatcgagaccatcctggctaacacagtgaaaccttgtctctactaaaaatacaaaacattagtcaggcgtggtggcgggcacctgtagtcccagctacttgggaggctgaggcaggagaatggcgtgaacctgggaggaggagcttgcagtgagmggagatcgcgccactgcactccagcctgggcgacagagtgagactccatctcaaaaaaaaaaaaaaaaaaaaagaaggggaaaataaaaaatctgtgctcctcatttaaaagcaaatgaacacagagatggagtagccagtgaagcagccgggaaccaggaacaaagagggaccccaggcccttctccgggcttcctggcagcccctaaagcccctcctggggcggcggcctccttcaaacagcaaggttgtgcggggtgctggggggtggagctggctcttctctgagcaccacacccaccacctctcatgtgtgcagagccacaagagacacagccctacctggccactttcccagtggtctgatcctgggcctggggcagatgacagtggaggacagagggtgccggcttggggctgagtgttcccactgtttcacaagcaatgtataggtaaaatgatagctatcttagagctgctgcaaaataatgcaggtgagagtggcatggagataggcaggaacagattggccatgtagtcatcaattctgaagccagaaagtgggtcggtccatcagactcattatactcctactttcttgtgtctgaaaatgtccatcaaaacacagttaaacgggccaggcaccgtggctcatgcctgtgatcccagcactttgggaggccaaggtgggcagatcacctgaggtcaggagttcgacaccag

SEQ ID NO: 713008 - DNA, 1060 bp, Homo sapiens
tgtgcgctctcttagccaacagggaacaggtttcaagacacaaatgaaaaaagcaaggtgcagaacggtatgctcatgaatgctaccctttatgcaagaagtggggaaagccgggtgcggtggctcacgcctctaatcccagcactttgggaggctaaggtgggcggatcacaaggtcaggagatcgagaccatcctggctaacacagtgaaaccttgtctctactaaaaatacaaaacattagtcaggcgtggtggcgggcacctgtagtcccagctacttgggaggctgaggcaggagaatggcgtgaacctgggaggaggagcttgcagtgagcggagatcgcgccactgcactccagcctgggcgacagagtgagactccatctcaaaaaaaaaaaaaaaaaaaaagaaggggaaaataaaaaatctgtgctcctcatttaaaagcaaatgaacacagagatggagtagccagtgaagcagccgggaaccaggaacaaagagggaccccaggcccttctccgggcttcctggcagcccctaaagcccctcctggggcggcggcctccttcaaacagcaaggttgtgcggggtgctggggggtggagctggctcttctctgagcaccacacccaccacctctcatgtgtgcagagccacaagagacacagccctacctggccactttcccagtggtctgatcctgggcctggggcagatgacagtggaggacagagggtgccggcttggggctgagtgttcccactgtttcacaagcaatgtataggtaaaatgatagctatcttagagctgctgcaaaataatgcaggtgagagtggcatggagataggcaggaacagattggccatgtagtcatcaattctgaagccagaaagtgggtyggtccatcagactcattatactcctactttcttgtgtctgaaaatgtccatcaaaacacagttaaacgggccaggcaccgtggctcatgcctgtgatcccagcactttgggaggccaaggtgggcagatcacctgaggtcaggagttcgacaccag

SEQ ID NO: 713009 - DNA, 1204 bp, Homo sapiens
ggccggctgctgcttcttgagggatgtaagggaggggtctgtcccaggcctttctccttggtttgtagatggcaacttcatattcacacagcattctccctgcacgcatacctgtgcccacattgtccccctgccccttcgtttttttgtttgttttgagawggaatcttctcactctgttgcccaggctggagagcaatggcacgatttcagctcactgcaacctccgcctcccaggttcaagggattctcctgcctcagcctctggagtagcttggattacaggcgcccacgaccacacccagctaatttttctatttttagtagagacagggttttgccatgttggccaggctggtctcgaactcctgacctcaagtgatcccccccgcctcagcctcccaaagtgctgggattacaggcatgaaccacattgtccccttttataaggtcatcagtcgtattagattagagcccaccctactccagttacatctgtaccacctccagtacattcggaggttctgaggggtgaggacttcagcatataggttttttgggggagagacgatgtaacccataatgccggccaatgagagacccttgtctctttgtctgtctgtctctgttagggtgtccctgagcgcctgtctctgtctctttgtttcggtctgtctctgattctgtgtgtccgtgtctccaagctcattcccaccactggtccttggtacgtgctgtcctctctgcttggaaactcctggcgctttgcacttctggctccttctcaactcagatggcccctcctcagtcacaccctccaatccccctctactgtctccttgctgtttttgtttttgtcttgttttttgagacagggtctcgctctgtcacccaggctggagtacagtggcgtgatcatagctcactgcagcctcgacttcctgggctcaagtgatcctcccacatcagccttggagtgcactaccaggtctggctaatttaaaaaaaaaaagtatctatctatttatttatttatttgagatagagtctcactctgttccccaggctggagtgcagtggtgtgattttggctcactgcaacctccgcctcccgggttcaaacgattttcatgcctccacctcccaagtagctggcattacaggtacccgccaccacgccctgccaattttttttttttttttt

SEQ ID NO: 713010 - DNA, 1204 bp, Homo sapiens
ggccggctgctgcttcttgagggatgtaagggaggggtctgtcccaggcctttctccttggtttgtagatggcaacttcatattcacacagcattctccctgcacgcatacctgtgcccacattgtccccctgccccttcgtttttttgtttgttttgagaaggaatcttctcactctgttgcccaggctggagagcaatggcacgatytcagctcactgcaacctccgcctcccaggttcaagggattctcctgcctcagcctctggagtagcttggattacaggcgcccacgaccacacccagctaatttttctatttttagtagagacagggttttgccatgttggccaggctggtctcgaactcctgacctcaagtgatcccccccgcctcagcctcccaaagtgctgggattacaggcatgaaccacattgtccccttttataaggtcatcagtcgtattagattagagcccaccctactccagttacatctgtaccacctccagtacattcggaggttctgaggggtgaggacttcagcatataggttttttgggggagagacgatgtaacccataatgccggccaatgagagacccttgtctctttgtctgtctgtctctgttagggtgtccctgagcgcctgtctctgtctctttgtttcggtctgtctctgattctgtgtgtccgtgtctccaagctcattcccaccactggtccttggtacgtgctgtcctctctgcttggaaactcctggcgctttgcacttctggctccttctcaactcagatggcccctcctcagtcacaccctccaatccccctctactgtctccttgctgtttttgtttttgtcttgttttttgagacagggtctcgctctgtcacccaggctggagtacagtggcgtgatcatagctcactgcagcctcgacttcctgggctcaagtgatcctcccacatcagccttggagtgcactaccaggtctggctaatttaaaaaaaaaaagtatctatctatttatttatttatttgagatagagtctcactctgttccccaggctggagtgcagtggtgtgattttggctcactgcaacctccgcctcccgggttcaaacgattttcatgcctccacctcccaagtagctggcattacaggtacccgccaccacgccctgccaattttttttttttttttt

SEQ ID NO: 713011 - DNA, 1204 bp, Homo sapiens
ggccggctgctgcttcttgagggatgtaagggaggggtctgtcccaggcctttctccttggtttgtagatggcaacttcatattcacacagcattctccctgcacgcatacctgtgcccacattgtccccctgccccttcgtttttttgtttgttttgagaaggaatcttctcactctgttgcccaggctggagagcaatggcacgatttcagctcactgcaacctccgcctcccaggttcaagggattctcctgcctcagcctctggagtagcttggattacaggcgcccacgaccacacccagctaatttttctatttttagtagagacagggttttgccatgttggccaggctggtctcgaactcctgacctcaagtgatcccccccgcctcagcctcccaaagtgctgggattacaggcatgaaccacattgtccccttttataaggtcatcaktcgtattagattagagcccaccctactccagttacatctgtaccacctccagtacattcggaggttctgaggggtgaggacttcagcatataggttttttgggggagagacgatgtaacccataatgccggccaatgagagacccttgtctctttgtctgtctgtctctgttagggtgtccctgagcgcctgtctctgtctctttgtttcggtctgtctctgattctgtgtgtccgtgtctccaagctcattcccaccactggtccttggtacgtgctgtcctctctgcttggaaactcctggcgctttgcacttctggctccttctcaactcagatggcccctcctcagtcacaccctccaatccccctctactgtctccttgctgtttttgtttttgtcttgttttttgagacagggtctcgctctgtcacccaggctggagtacagtggcgtgatcatagctcactgcagcctcgacttcctgggctcaagtgatcctcccacatcagccttggagtgcactaccaggtctggctaatttaaaaaaaaaaagtatctatctatttatttatttatttgagatagagtctcactctgttccccaggctggagtgcagtggtgtgattttggctcactgcaacctccgcctcccgggttcaaacgattttcatgcctccacctcccaagtagctggcattacaggtacccgccaccacgccctgccaattttttttttttttttt

SEQ ID NO: 713012 - DNA, 1204 bp, Homo sapiens
ggccggctgctgcttcttgagggatgtaagggaggggtctgtcccaggcctttctccttggtttgtagatggcaacttcatattcacacagcattctccctgcacgcatacctgtgcccacattgtccccctgccccttcgtttttttgtttgttttgagaaggaatcttctcactctgttgcccaggctggagagcaatggcacgatttcagctcactgcaacctccgcctcccaggttcaagggattctcctgcctcagcctctggagtagcttggattacaggcgcccacgaccacacccagctaatttttctatttttagtagagacagggttttgccatgttggccaggctggtctcgaactcctgacctcaagtgatcccccccgcctcagcctcccaaagtgctgggattacaggcatgaaccacattgtccccttttataaggtcatcagtcgtattagattagagcccaccctactccagttacatctgtaccacctccagtacattcggaggttctgaggggtgaggacttcagcatataggttttttgggggagagacgatgtaacccataatgccggccaatgagagacccttgtctctttgtctgtctgtctctgttagggtgtccctgagcgcctgtctctgtctctttgtttcggtctgtctctgattctgtgtgtccgtgtctccaagctcattcccaccactggtccttggtacgtgctgtcctctctgcttggaaactcctggcgctttgcacttctggctccttctcaactcagatggcccctcctcagtcacaccctccaatccccctctactgtctccttgctgtttttgtttttgtcttgttttttgagacagggtctcgctctgtcacccaggctggagtacagtggcgtgatcatagctcactgcagcctcgacttcctgggctcaagtgatcctcccacatcagccttggagtgcactaccaggtctggctaatttaaaaaaaaaaagtatctatctatttatttatttatttgagatagagtctcactctgttccccaggctggagtgcagtggtgtgattttggctcactgcaacctccgcctcccgggttcaaacrattttcatgcctccacctcccaagtagctggcattacaggtacccgccaccacgccctgccaattttttttttttttttt

SEQ ID NO: 713013 - DNA, 1204 bp, Homo sapiens
ggccggctgctgcttcttgagggatgtaagggaggggtctgtcccaggcctttctccttggtttgtagatggcaacttcatattcacacagcattctccctgcacgcatacctgtgcccacattgtccccctgccccttcgtttttttgtttgttttgagaaggaatcttctcactctgttgcccaggctggagagcaatggcacgatttcagctcactgcaacctccgcctcccaggttcaagggattctcctgcctcagcctctggagtagcttggattacaggcgcccacgaccacacccagctaatttttctatttttagtagagacagggttttgccatgttggccaggctggtctcgaactcctgacctcaagtgatcccccccgcctcagcctcccaaagtgctgggattacaggcatgaaccacattgtccccttttataaggtcatcagtcgtattagattagagcccaccctactccagttacatctgtaccacctccagtacattcggaggttctgaggggtgaggacttcagcatataggttttttgggggagagacgatgtaacccataatgccggccaatgagagacccttgtctctttgtctgtctgtctctgttagggtgtccctgagcgcctgtctctgtctctttgtttcggtctgtctctgattctgtgtgtccgtgtctccaagctcattcccaccactggtccttggtacgtgctgtcctctctgcttggaaactcctggcgctttgcacttctggctccttctcaactcagatggcccctcctcagtcacaccctccaatccccctctactgtctccttgctgtttttgtttttgtcttgttttttgagacagggtctcgctctgtcacccaggctggagtacagtggcgtgatcatagctcactgcagcctcgacttcctgggctcaagtgatcctcccacatcagccttggagtgcactaccaggtctggctaatttaaaaaaaaaaagtatctatctatttatttatttatttgagatagagtctcactctgttccccaggctggagtgcagtggtgtgattttggctcactgcaacctccgcctcccgggttcaaacgattytcatgcctccacctcccaagtagctggcattacaggtacccgccaccacgccctgccaattttttttttttttttt

SEQ ID NO: 713014 - DNA, 897 bp, Homo sapiens
ctcacaattcacacaaacgtgagctcatgtgcacaggtgcatgcacacacaaacatagacacatgtacacacacgcgtatccatacaaatgccctcgcacatgcacctgctggctgggagacacagcatccctcggtgcctctcgtcctctccctcattctctctctcgctccctctctccctccctcagagccatttaaacgattacaaagatgctatttttatatagaggaaaattcagttatagacattgacctttaagcttttttctaggctcacgtgtcgctggcccagggtgcgaaaggcttgcgtgaacgttctcggaagaaaaacttcctcaaactagggaactgagggtgtgagagaaggagcagagccagggatgggggcccgtgtgcagcaaacgggaggcaagtccacgcttcaggatgcctgaagaaactagtggctcagagtaggaggcaaggaaagcccagacggaaaggacttcctttttttgttttttgggattttttttttggaaacagagtctaactctgtcacctaggctggagtgtagtggtatgatcatagctcattccagcctcaacctcctgggcccaagtgatcctccaacctcagcctcccgagcagctgggattacaggtatgcaccaccatgcccagctaatttttaaaaatttttttagagatggggtcttgctatgttggtcaggctggtctcaaactcctggactcaagtgatcctcctgtgtcatcctcccaaagcgcagggattacaggcatgagccactgcaaccggcagacttcctttcttgttgccacattttggaggtgatccgccwttctgaactggtttggggtgtggtctctgcatgggtttagccactttctcttt

SEQ ID NO: 713015 - DNA, 624 bp, Homo sapiens
cccctgccccgccgggctcagcctcccatgcgctcgcgcttgcctgtgtcccgggcttgtctgtgaagtgggcgtgaagatcgttgccaccttccaacctacctcacaggggtgttgtggggacaccatgatctctggattgttcatrtcgtcgtgctgcgccgggagccaccgccctccggagacagggcagctcccctacgaccctagcgcctccgccctccgcggcccctctcctctcttcctgctctgtccctccttctccatcagggagcagcgtgacttcagcgagtcccgcgagcacctggctagacagttaacaagcacgtccttccagcctgagccagcgcaggtttgggagggggcttcctggccccccccacggtgttccagcccctcctctcttccgccccctagtctcccacccttccctccccgtagtgaccaattcctatctcttccctctccgcaggctcaatgaatcgaatgaatgtgaacttcttcatctgtgaaaaatcttttttttttccattttgttctgtttgggggcttctgttttgtttggcgagagagcgatggctgccgtggggagtactggggagccctcgcggcaagcagggtggg

SEQ ID NO: 713016 - DNA, 708 bp, Homo sapiens
tcctcaatcaatcctcacatttgacttccaataaacctttattgaattatttctgcctcaaagccttaatttcagtcaacactgccaacctggtgttcctgtctgatggaggaagccaacagatcataagaccaaatccaatggtgacggtgatgaaagaaattacaagagtgagatgagatagaaagggaccaagggggccgttctggacacggtgatcaggcaggggacccccaggaggtgacctttgagcagaaacctgagtgacgtggaagagtcacctgtggataagaaccagcccatgaaatcatgccaggtgtgtaaagacccagcaccaggaggagtaaatgagtggccaaaaagtttgtccattcttgcatccttctttagttgtaccaagataaacagaaacttcagcaatttcccttggggtgcatggggtaaacaggaacgagtcgtcctgcaaacttgcccgtggtgctgataaaatttggcccgatagtcaagccaaagtgcttcctgagtgccatttaccacaataaaggtcatgaatcatagccagcytcccaaggcatgtccagagctagactgactggctagcaccttgccagaggcaacaggagatcagatgagctggagaaaaacagccccaggaaagtttcagaaaagtccagatgacccataagagttggtatcaacccctcatgg

SEQ ID NO: 713017 - DNA, 846 bp, Homo sapiens
ctcactttgtcacccaggcaggagtgcagtggcataatcatagctcactgcagcctcgatctcctgggttcaagcaatcctcctacctcagcctcctgagtatggaggactacaggcatgcaccaccactcctgtctactttttgtatttttggtagggatggggtttcaccatgttgcccaggctggtcttgaactcttgggctcaagtgatccacccgcctcagcctcccaaagtgctgggattacaggcatgagccactgcgcctgactcatctctccttgttgataaaacttggacctgattctccaaaccccagatggccaggtcacaataatgaacgtgatggcagcaccaacrgtaatgagagatatcattgatcaaaggcttactatgtgcctggaagattgcagccccatgaggtgggtaaatagggcttctgtcttaatggatgaagaaattgaggctcagagaggtgcagacactcacccgaggtcgcacagcaaagaggcagacctttatagaatcttttctgaggctcatgtccaggtgtggccacacttgggatggtgggcagaaacaattacaaccctgcaatggtctagattattagtggttttaaaacttctttttctgccaggatcccctttgggccaaggaaattattagcaaaaggtttgaatatgatcaaagctgcgataggactgtctcctttaccacatttgccaacttggccctgccctcattagtcataaatgactctgaagctctttctcagaaccttagaaatttagagtgctgagtggagactgaagacctagaagccaggctgagtgtggtggctca

SEQ ID NO: 713018 - DNA, 846 bp, Homo sapiens
ctcactttgtcacccaggcaggagtgcagtggcataatcatagctcactgcagcctcgatctcctgggttcaagcaatcctcctacctcagcctcctgagtatggaggactacaggcatgcaccaccactcctgtctactttttgtatttttggtagggatggggtttcaccatgttgcccaggctggtcttgaactcttgggctcaagtgatccacccgcctcagcctcccaaagtgctgggattacaggcatgagccactgcgcctgactcatctctccttgttgataaaacttggacctgattctccaaaccccagatggccaggtcacaataatgaacgtgatggcagcaccaacggtaatgagagatatcattgatcaaaggcttactatgtgcctggaagattgcagccccatgaggtgggtaaatagggcttctgtcttaatggatgaagaaattgaggctcagagaggtgcagacactcacccgaggtcgcacagcaaagaggcrgacctttatagaatcttttctgaggctcatgtccaggtgtggccacacttgggatggtgggcagaaacaattacaaccctgcaatggtctagattattagtggttttaaaacttctttttctgccaggatcccctttgggccaaggaaattattagcaaaaggtttgaatatgatcaaagctgcgataggactgtctcctttaccacatttgccaacttggccctgccctcattagtcataaatgactctgaagctctttctcagaaccttagaaatttagagtgctgagtggagactgaagacctagaagccaggctgagtgtggtggctca

SEQ ID NO: 713019 - DNA, 2448 bp, Homo sapiens
tgttgtgacatatggctgggatcaaaacctaagtgatgcaactcttcgacctgggccctgccagcaggggtattatgacatctttttgttcatcacttaggtgttgtgactcttttcttctgtctgggtcctgacagaaaaaggggattggggcatgtcccttgaccgagcacctaggtgatgtgactgtcttatttgcctgggccttgcatatttggggtattgagacatatggctgggccctacatcaatgggacttaaggctcctgccttggtcttgctaacagaaaactttttacatatccctgaatccatcacctaggatatgtgactctcctcttctgccggcattctgcccacaggaaagactgggacatattgctgggcccaccattgagatgatgtgtctttcctgcctgggtactgtccacagggagcattgtgacatatcactgggcccagcacctaggtgatgtgagtatgcatcgtgttccctgctttcaggaaggcattgtaaaatatccctgacttagcatgaagggatgtgactcttctagctggtctttgtcctcagggaagagtgtgatatatgccttgtccagctcccagttgatataaccctcctgctcactctctacctataggtgggattatgacatatcttggcccagctcacaggtagggtgctgaccctctttcctcgaaccagtcaatataagatactttcatagctagacttagtgaaatgggtaagatcctgggtctcctctgtgtattaaagtcatagagaactaccactttcttatatcttatataaagtcctccagtggtagagaagatgtcatcacagggcccagaacacaagcgagattgtgtttctcatatgctcacccagccaactgttaggattgtcaccctcacatctaaacagagcccactggtgaaatgctgaatctcacatgcagacgcagtctgcagttaaaattctgactgtcataagtgaacacttggccacagctgtgctggtgactcattcctaaacccagctcatagagaggtcaggactctcccatctagactcagccaataggagagatgttgagtctcatatgtggacttagyggcacaggtacaatcatgggtgcataacagcatgaaggtctcagagcagatgttgactctcatacatagcatatatagcccctgaatggtagagagactgtcctcacagagcccagcaaacaggtaaaattatgacactcttttgcacaggtggccaatagtaaagattgtcatccttccacatgaacacagcccaccgttgaggttctgaatctcccacctggaggcagtggaaagttggagaattaactctcatacatggatcttgtccctaggttggttggtgaatctcagaccaagattccccacatctgtgaggctgtgactgcactaaggggaaacagtcttcagaaggagttaagtctcttttgtacagatccagtttatttttgagattgtgactcatatacttagaccaaaccaacaactgggacatgtgtgggactgttaatcctgtccctggaccttcctgtaggtgtgattctgatgtatctctgcccagaatctgagtgatttgaccctcttgcctgagtctatgctccagtggagattatgacatgtcatttttttccatacttagctgatgtgatctattctcctgtcttggctgtctccatagaagacattatgatatatttacaggccctgcacccagtttatgtgatttctggctatcgcctgcccacattggctattttgacatattgcacagtccaacacccaggtgattttactcttctgcctgggcccttcctataggggacattattaaatatttttgtgccctttatctgtatgtctgtgtgtgtgtggtgtgtgttttgagacagagtctcactctattacccaggctggagtgcagtggcatgaccttggctcactgcaacctgcacctcccaggttcaagcaattctcatgcctcagcctcccaggtagccgggattacaggtgcctatcatcacgcctgactaatttttgtatttttagtagacagggtttcatcatgttggccaggctggtctcaaactcctgacctctggtgatccacctgcattggcctcccaaagtgctcagattacaggcatgagtgaccgcgcctcatcatatacatgtgttttgactctcttctcctacgtgatttctgttgatggggagattgacatgtctctggcctcagcacccagctgatgtgactcgtctctttttcctatattttgtgcaaacaaaagatagtgacatatcactaggtcaaacaaggtgatattactcttgatttggtcctgctctcaaaaggcattgtgacatattgatgagcccagcacaaaa

SEQ ID NO: 713020 - DNA, 1483 bp, Homo sapiens
gaggcacctgtgagagagagggttagggactggactccaagggtttagcaagaagtggaggcttggggaccaggacttgtgagtcccaaggaaggtgctgagggcctggactcctgggtcctttggagagtgtgggtctgggggcctagactcttgagtcctcagacgaaaaagcgatcaggaaaaagactcttcgatccaaggaaaggtggtggggctgggtgcccagattcgtgggtctaaaggaggagggagctggggtcctggacttctgagtcttagagaaaaaggaactggagccccagacccttaggtctcccaggaagaagaggcttagcgccccaactcctggattctataagaggcatatgccaaactcctgaaacccttaaagcatcgggaactaccaatcccaagaggtttcagggcaaatcttcccctaggtccgcgcttcttcgccgcgcagcctgctgtgaggtgtagttccaaatctccgacccctgctggaatctagaggaccctggacccttggatatcagagaagcgggactggggtgcccaccactggatcccggccccctcctcttccctcctcaccccacccctcgtcaacaccccgctgacctggtccggggccccaccgccgcctcctccactcaacttgcggtctcctccactgaactcgtacaaactttattagttcaactttcccgcgcctgcgcactgggmcgggtcgataaccggcccagcgtagaaagggcggaacgctgggtgcacgctcaatttgcatgtgacgctcccagcatgcctctggccggaaacccaaaaaagggcataggggcgggaacagcccagcgggccgtcccatcggcttttgggtctgttacccaaagaatgataaagttggttttatttcaagaagtcgatcaaaaagaaagccccagcgctctagagctcagctgacgggaaagggggtgcgcagcctcgagtttgagagctacccggagctccaagacaggggtgggttccagctgcccgcacgccccgaccttccatcgtaggtaacgcggaagagcccgggagagcgttggtggcgtccgagagcgaggagcgggaaagaggatgggtctgcacggagagtggaaaggcaggctgtgtactctggggaaagtggagcaaggaaggagctacagtggccgacgctggaggtcggctgcagaaaaactagaaaaagtagggaggaaagaggaaaagaggaggcgtctacactgagggggttctagagagggaggggtggactccgtagatgggggtagttcagtctcgaaacctggggcgtgctctgtcctggaggagggaggcgggcagtcggaggggaattgaatggaagttctgtgttggaaatgttttgggagatcttctgtagggggactgtggaagggggtctacattggggtaagtgcaggaggtagaggcttacacg

SEQ ID NO: 713021 - DNA, 1365 bp, Homo sapiens
ggctggcatctccctaggtactgttagtgccagaaattatgtattcggttcctcccctcccctgagctctggcaggccctagcaacgattctaaagctttccaggttttgatgtccccatctttttttttttttttcaagacggagtctcactctgccgctcaggctggagtgcagtggcgtgatcttggctcactgcaacttccatytcccagactcaagcaatttttttgcctcagcctcccaagtagctgggatgacaggccccggcaagcatgcccgactaaattttttttttttttttttttgagacagtgtttcactcttgttgcccaggctgcagtgcaatggcgcgatctcggctcaccgcaacctccgcctcccgggttcaagcgattctcctgcctcagcctcctgagtagctgggattacaggcatgcgcaccaccccggctgattttgtattttcagtagagacggggtttctccatgttggtcaggctggtcttgaacttccgacctcagatgatcgtcccaccttggcctcccaatttgctgggattacaggcataagccactgtgcccggccatacccgacaaatttttgtatttttagtagaggcagggtttcaccatgctggccaggctggtctcgaaatcctgacctcaggtgatccatccacgttggcctcccaaagtgctgggattacaggtgtgagccaccacgcccggccaatgtccccatctttatctttctctgtgtctctttgttttctgtcatgttgtggacctctgttaagcttctctagatctcctgctacaggtcacaggagctgcaggccaggtgctccaaaccggttgtcttccttcattttgacaaaagcccatttaatggatggcaaaggtgaagatggggtctgttacccaatctgcctggttagtgctgcagctgggattctaatctgggcagctggatgccaaaggccaaccacaaggtgattctgtccctaaagggatgattcctgacctcactgtccacgctcacaacactccactcccggccgagcgcggtggctcatacctctaatcaatcccagcactttgggaggccagggcgggtggagtacctgagatcaggagttagagaccatcctggccaacatggtgaaatcccgtcactactaaaaacacaaaaattaattggacctggtggcacgtgcctgtagtcccagttactcaggaagcttgaggcagaagaatggcttgaacccaggaggcggaggttgcagtgagccaagatcatgccactgcacccaagcttgggtaacaaagcgagactctgtctcaaaaagaaaaaagaaaaagaa

SEQ ID NO: 713022 - DNA, 1365 bp, Homo sapiens
ggctggcatctccctaggtactgttagtgccagaaattatgtattcggttcctcccctcccctgagctctggcaggccctagcaacgattctaaagctttccaggttttgatgtccccatctttttttttttttttcaagacggagtctcactctgccgctcaggctggagtgcagtggcgtgatcttggctcactgcaacttccatttcccagactcaagcaattyttttgcctcagcctcccaagtagctgggatgacaggccccggcaagcatgcccgactaaattttttttttttttttttttgagacagtgtttcactcttgttgcccaggctgcagtgcaatggcgcgatctcggctcaccgcaacctccgcctcccgggttcaagcgattctcctgcctcagcctcctgagtagctgggattacaggcatgcgcaccaccccggctgattttgtattttcagtagagacggggtttctccatgttggtcaggctggtcttgaacttccgacctcagatgatcgtcccaccttggcctcccaatttgctgggattacaggcataagccactgtgcccggccatacccgacaaatttttgtatttttagtagaggcagggtttcaccatgctggccaggctggtctcgaaatcctgacctcaggtgatccatccacgttggcctcccaaagtgctgggattacaggtgtgagccaccacgcccggccaatgtccccatctttatctttctctgtgtctctttgttttctgtcatgttgtggacctctgttaagcttctctagatctcctgctacaggtcacaggagctgcaggccaggtgctccaaaccggttgtcttccttcattttgacaaaagcccatttaatggatggcaaaggtgaagatggggtctgttacccaatctgcctggttagtgctgcagctgggattctaatctgggcagctggatgccaaaggccaaccacaaggtgattctgtccctaaagggatgattcctgacctcactgtccacgctcacaacactccactcccggccgagcgcggtggctcatacctctaatcaatcccagcactttgggaggccagggcgggtggagtacctgagatcaggagttagagaccatcctggccaacatggtgaaatcccgtcactactaaaaacacaaaaattaattggacctggtggcacgtgcctgtagtcccagttactcaggaagcttgaggcagaagaatggcttgaacccaggaggcggaggttgcagtgagccaagatcatgccactgcacccaagcttgggtaacaaagcgagactctgtctcaaaaagaaaaaagaaaaagaa

SEQ ID NO: 713023 - DNA, 1365 bp, Homo sapiens
ggctggcatctccctaggtactgttagtgccagaaattatgtattcggttcctcccctcccctgagctctggcaggccctagcaacgattctaaagctttccaggttttgatgtccccatctttttttttttttttcaagacggagtctcactctgccgctcaggctggagtgcagtggcgtgatcttggctcactgcaacttccatttcccagactcaagcaatttttytgcctcagcctcccaagtagctgggatgacaggccccggcaagcatgcccgactaaattttttttttttttttttttgagacagtgtttcactcttgttgcccaggctgcagtgcaatggcgcgatctcggctcaccgcaacctccgcctcccgggttcaagcgattctcctgcctcagcctcctgagtagctgggattacaggcatgcgcaccaccccggctgattttgtattttcagtagagacggggtttctccatgttggtcaggctggtcttgaacttccgacctcagatgatcgtcccaccttggcctcccaatttgctgggattacaggcataagccactgtgcccggccatacccgacaaatttttgtatttttagtagaggcagggtttcaccatgctggccaggctggtctcgaaatcctgacctcaggtgatccatccacgttggcctcccaaagtgctgggattacaggtgtgagccaccacgcccggccaatgtccccatctttatctttctctgtgtctctttgttttctgtcatgttgtggacctctgttaagcttctctagatctcctgctacaggtcacaggagctgcaggccaggtgctccaaaccggttgtcttccttcattttgacaaaagcccatttaatggatggcaaaggtgaagatggggtctgttacccaatctgcctggttagtgctgcagctgggattctaatctgggcagctggatgccaaaggccaaccacaaggtgattctgtccctaaagggatgattcctgacctcactgtccacgctcacaacactccactcccggccgagcgcggtggctcatacctctaatcaatcccagcactttgggaggccagggcgggtggagtacctgagatcaggagttagagaccatcctggccaacatggtgaaatcccgtcactactaaaaacacaaaaattaattggacctggtggcacgtgcctgtagtcccagttactcaggaagcttgaggcagaagaatggcttgaacccaggaggcggaggttgcagtgagccaagatcatgccactgcacccaagcttgggtaacaaagcgagactctgtctcaaaaagaaaaaagaaaaagaa

SEQ ID NO: 713024 - DNA, 1365 bp, Homo sapiens
ggctggcatctccctaggtactgttagtgccagaaattatgtattcggttcctcccctcccctgagctctggcaggccctagcaacgattctaaagctttccaggttttgatgtccccatctttttttttttttttcaagacggagtctcactctgccgctcaggctggagtgcagtggcgtgatcttggctcactgcaacttccatttcccagactcaagcaatttttttgcctcagcctcccaagtagctgggatgacaggcmccggcaagcatgcccgactaaattttttttttttttttttttgagacagtgtttcactcttgttgcccaggctgcagtgcaatggcgcgatctcggctcaccgcaacctccgcctcccgggttcaagcgattctcctgcctcagcctcctgagtagctgggattacaggcatgcgcaccaccccggctgattttgtattttcagtagagacggggtttctccatgttggtcaggctggtcttgaacttccgacctcagatgatcgtcccaccttggcctcccaatttgctgggattacaggcataagccactgtgcccggccatacccgacaaatttttgtatttttagtagaggcagggtttcaccatgctggccaggctggtctcgaaatcctgacctcaggtgatccatccacgttggcctcccaaagtgctgggattacaggtgtgagccaccacgcccggccaatgtccccatctttatctttctctgtgtctctttgttttctgtcatgttgtggacctctgttaagcttctctagatctcctgctacaggtcacaggagctgcaggccaggtgctccaaaccggttgtcttccttcattttgacaaaagcccatttaatggatggcaaaggtgaagatggggtctgttacccaatctgcctggttagtgctgcagctgggattctaatctgggcagctggatgccaaaggccaaccacaaggtgattctgtccctaaagggatgattcctgacctcactgtccacgctcacaacactccactcccggccgagcgcggtggctcatacctctaatcaatcccagcactttgggaggccagggcgggtggagtacctgagatcaggagttagagaccatcctggccaacatggtgaaatcccgtcactactaaaaacacaaaaattaattggacctggtggcacgtgcctgtagtcccagttactcaggaagcttgaggcagaagaatggcttgaacccaggaggcggaggttgcagtgagccaagatcatgccactgcacccaagcttgggtaacaaagcgagactctgtctcaaaaagaaaaaagaaaaagaa

SEQ ID NO: 713025 - DNA, 578 bp, Homo sapiens
caccaaatgctctctgggcctcggttttctcatctgtaaagtgggtttaattgcaaaatccaactgggaaggctgtgatgatgaacatatcagagcaggcatggaagaccccactgtgggatggggcagagcaggagggcctgcagaggaaggaaggatgtcgagtgagttggaggtcgccgtggggacagcagggggacaacgtttcccatggccacgctctcgaamctttctcccacctggagcagttggagctgcctctggcaccccctgcctgaaaactcatatccacagccgtcacccccagcatctccccagtcaccttgtgccccctgtcccctcccagagaacagcgcagcctctgtgtctaggcgtgaggtttgccagcgttgcccagagacgactgggtagcaggcgactcccgccccctgcatgcagaccccggcccgcccagcctccaggaccccctcaccaggacaatggacaggccaggggaggagggggacaggcagggctcggggccttggggagcctgggaacgaggcggctctgagttggcgtgcagagagggggctccg

SEQ ID NO: 713026 - DNA, 591 bp, Homo sapiens
tttaaattttrtctttaaaaatgatgtatttcttatgcgcacgcgtgtgtgtgtcacattgctgcagtagcatgcaatttacaaataactagctaaccctccttgaagactctgttgaaaatgttattactaaaatagttgagtgaaatagagtcagagaatgactaactcgtttctaaggtcataggctggtacctcagctgcctcatctctaaaacggacatcagagcatgggccaccctcagagatgtgtcaagcaagggcacagccctggtctttttaaagcacagactatgggggattgctgcctgacattgaaccccagatctgctgctgaccagctgggtgaaggtgcacaacttactgccattcctgtccttccatttcctcatacgaaaattgagataatattagaacatacctcaaatgagcctcagtgactgaatggtacagagtaagtgctataatactgtttattaaactaaacataatacataatttttaagatcacggagtggactcaactttggcagacatgggaacagacaggcatgcaggaatgtttcccagaaggtaccacgagccctccta

SEQ ID NO: 713027 - DNA, 591 bp, Homo sapiens
tttaaattttgtctttaaaaatgatgtatttcttatgcgcacgcgtgtgtgtgtcacattgctgcagtagcatgcaatttacaartaactagctaaccctccttgaagactctgttgaaaatgttattactaaaatagttgagtgaaatagagtcagagaatgactaactcgtttctaaggtcataggctggtacctcagctgcctcatctctaaaacggacatcagagcatgggccaccctcagagatgtgtcaagcaagggcacagccctggtctttttaaagcacagactatgggggattgctgcctgacattgaaccccagatctgctgctgaccagctgggtgaaggtgcacaacttactgccattcctgtccttccatttcctcatacgaaaattgagataatattagaacatacctcaaatgagcctcagtgactgaatggtacagagtaagtgctataatactgtttattaaactaaacataatacataatttttaagatcacggagtggactcaactttggcagacatgggaacagacaggcatgcaggaatgtttcccagaaggtaccacgagccctccta

SEQ ID NO: 713028 - DNA, 591 bp, Homo sapiens
tttaaattttgtctttaaaaatgatgtatttcttatgcgcacgcgtgtgtgtgtcacattgctgcagtagcatgcaatttacaaataactagctaaccctccttgaagactctgttgaaaatgttattactaaaatagttgagtgaaatagagtcagagaatgactaactcgtttctaaggtcataggctggtacctcagctgcctcatctctaaaacggacatcagagcatgggccaccctcagagatgtgtcaagcaagggcacagccctggtctttttaaagcacagactatgggggattgctgcctgacattgaaccccagatctgctgctgaccagctgggtgaaggtgcacaacttactgccattcctgtccttccatttcctcatacsaaaattgagataatattagaacatacctcaaatgagcctcagtgactgaatggtacagagtaagtgctataatactgtttattaaactaaacataatacataatttttaagatcacggagtggactcaactttggcagacatgggaacagacaggcatgcaggaatgtttcccagaaggtaccacgagccctccta

SEQ ID NO: 713029 - DNA, 617 bp, Homo sapiens
tgcaattttttttttttttttttttggtagagactgggtttcgctctgttgcccaagctggagtgcagtggtgactcggtgaatagtattaccatccaaaattcatccattcctgcctctgtccttggctattaccctaatcgtagcctcctatcatgtccacagcccactcttgacctagtggccacacagcccagagaagtccctgagcaaatatttgttcttgaagattgcttcagcctcgacctcctggcctcaagcaagcctcccatttcagcttccaaagtagctgggactasagatatgcaacaccatttctgactttttaaaaattttctgtagagatagagtctttctatcttgcctagtctggtcttgaactcctggtctcaagtaatccacccgcctcagccttccaacatgctggtattacaggtgtgagctctctcacgcagcttgtaattatttaatggttcactccccacccccacagaatattagttttaaaaatgttgaaaaaaggaaaaatagctatattaaactcgcaatgtcttatgttaattttatgtgttaaaaatagaatttattataattttattttcccggcctcagtggaa

SEQ ID NO: 713030 - DNA, 599 bp, Homo sapiens
ttgttgttgttgtttttgagacggagtttccctctgttgcccaggctggagtgcagtggtgtgatcttggctcactgcaacctccacctcccgggttcaagcaattctctgcctcagcctcccgagtagctgggattacaggcgcccaccaccayacctgactaattttttgtatttttagtagagacgggggtttcaccatgttggccaggctgatcatgagctcctgtcctcatgatccacccgcctcggcctcccaaagtgctgggattacaggcatgagccaccgtgcccaaccctaactaattttttaagtttttggatttaggaggtctcactatgttgcccaggccggtttcaaactcctgggctcaagtgatcttcccacttcggcctcccaaagtgttgagattacaggtgtgagccaccacgtccagccttacatggatttcatatatgtacacagatatctctaggcaagaaactagtcacggagttgcctttgggagaggttactgagattctaggggttagaaatgtgagggagacttaattgatacttacatcctctatggacattggagtttttcattatgtgc

SEQ ID NO: 713031 - DNA, 624 bp, Homo sapiens
ggtgtgacccagtgggaccaagtagacagttgtagggtttgcaaactatgcttttaaatgtgctcaaatgtcctcctcaaaggccggccatggtggctcatgcctgaatctccagcacttagggaggctgaggtgggtggatcacgaggttaggagttcgaaaccagccagtttgagaccagcctggccaacatggtgaaaccttgtccctaccaaaaatacaaaaatcagctgggcatggtggtgcttgactgtaatcccagctacttgggaggctgaggcaggagaatcacttgaatctaggaggcagaggttacagtgagccaagactgcgctattgcactccagcctgggcgacagagtgagactccgtctcggggtgggtagggggtggaatgtcttcctcattattatagtaataagtgtccctgcctgtcatgggtgagattgggrtttgtggggtatgattccccaacagggaggttgaaaaggtaccttttggctaggtgtggtggctaatgtctgtaataccagtattttgggaggctgaggcaaaaggagttcgaggccagcctggacatcatagtgacatagtgacaactgatttctacaaagaaaataata

SEQ ID NO: 713032 - DNA, 1017 bp, Homo sapiens
atcgcctgaggccaggagttggagagcagcctgggcaacatgggaagagcctgtctcttgcgggggggggagaagaaagttcttgtctcaggctagctttggggaccaaatgaagcactcccatgtaggcactcaaatggaactatgtaaaccttaggcaaggcacctctgcctcagtttcctcatctctaaaatggggtgatggtagtatgttagcagagtggttgtgaggagtgaacgggacagtccgtatgtgggttatatgtatatattcccaggtgcttgctgttaccaggccatatgggttattcacagattgaaatatcttagctgggcacggtggctcacccctataatcccagcactttgggagaccgaggcgggtggatcacctgaggtcaggagttcgagaccagcctggccaacatggtgaaaccctgtctctactaaaaaaatacaaataaattagctgggcatggtggtgggtgcctgtaatcccagctacttgggaggctgaggcaggagaatcgattaaacccaggaggcagaggttgcagtgagcygagatcacaccattgcactccagcctgggcgacagagtaaggctctgtctccaaaaaaaaaaaaaaaaaaaaacaaaaaaaaaaccagtttgactttatctccctcgccctgcctccatccccacattgccccccactatcccagtctctcctactccagccttcatctagtgctaactgattaaatattctaagatgaccttctctggtgtgtgtgatgataattaaaaggcattcagaactgtgtggaccagactgaacctctgcactctagatttttttttttttgaagcctctacaaaggataattaaaatttacaccatgactctttgtcctggggtgcactgtctgtaagccggtggagttatttcccaaaatccttggtccttcccagcttgaggaagtctgcaggactgagggaggggacctgtgcttttttttttgtttttttga

SEQ ID NO: 713033 - DNA, 1109 bp, Homo sapiens
gggacgcctgcattctcatgggacacctgtgccctcatgggatgcctgtaccctcatgggacgcctgtgcccctcatgggatgcctgtgttctcatgggatgcctgtgcccctcatgggacgcctgcattctcatgggacacctgtgccctcatgggatgcctgtacccttcatgggacgcctgtgtgtggttgccatgattactacctgagactgtcactacgacagttactattgttactacttgagaccatcattacaagactgaacgaagggacgaatgtagaaatgaaaacttaagacagaagaaactgttttaaaggaagggaccaggggaagaaaaagagagctccctgcttctagtgagcaaaggcagccccccaagcttctacagcccttcgtacttattgggtagaaagcagggggaggaaacgattggccagctgcttgattgttcacacgttcacgttattgctaacaggtttcagatttgcctacttgcaagaaacacttgtgcctggggcgtgactgccctcagcattccttctgggcggcagacgcagtttgtcagtttgccaacagcctgctttcatgagaacagtttgctgtttactcacgtagcctccagtggtatactgagttgatcacaaccctcattctttcggccttcaacacctgagccctcacgggacatctgtgcccctcatrggacacctgtgtcctcgcagtacacttgtgacccttccaggacaccttactggtagaattagtgtagctgcccccaccctgaggccaaggacaccattgtctcaggaaggctgaagaccacaggctcctggggggacagagggcaggtggggcccctcaggaccctccttggtggtaagtgggcctggcctgggggtgattgcaggcgggaggaggctcccagcagggacttatcctgggtcctactcacacttctggggcctgcattatttcccaaatcaccccacaccccaaggccttctggatggggacgagtggggggtcacagacactgggggagctggagagcagagacctcacactccatccgtgacagatgatgtccaagcccctacatgccc

SEQ ID NO: 713034 - DNA, 891 bp, Homo sapiens
ctctgcgtgaacacaagatgcacaagatcacatcttcctggggcaggggggtggtggaggaaagtcaaatcacaacaaacagtacatcgtacctacagtgcaactggcaagaagtcttaaggtaacttctttcacactctaccactgctttcaaagccagcttgtggcaaatccattctcccagcaattaaaatttggagttgtccccttgggcagactccacccaccacccagtcactcaggaaagcctgttggttctgccattaaatatatctggagcccaaccactcctcacacctccactggccacactgtcctctactgggatggaggtctccaaactatattctctgctttcactcgtggactcaaagttcactcagagtgaagcccatcctctcctaaccccagaggcccacacactgcctgcagacccaagcatcccatccccacttcagcctgctcactctgttccagccatactggcctcctggccgtgcctccaacacactaggaccctccccactttgaggtctttttatgttttaaacaaaatcctagttctgtcatttcatctatcaattaactattcaatctgcatcccgaattgaaaacgacctttaaaaaacgactgtcagccgaacacggtagctcatgcctgtaatcccagcactttgggaggctgaggcggggtggatcacttgaggtcaggggttcgaaaccatcctggccaacatggcgaaacctcgtctctactaaaaatacaaaattagccrggcatgatggcatatgcctgtaatcccagccacttgggagggtgaggcaggagaatcgcttgaacctgggaggcagaggttgcagtgagctgaaattgagccactgcactccagc

SEQ ID NO: 713035 - DNA, 591 bp, Homo sapiens
ctgggcgacagagccagaccttgtctaaaaaaaaaaaaagaaaagaaaagaaaaagaaaaccactatgtcccctgtcaagttctgagctccaagcctgcctataatcccttgggcccatgggagttgctgcactggggagctgtctgccaggccggtgtgtggctgagtccacagatgctgggtgaaaaacaaaatgcccagtgaccccgcctgaggtacccaactggaacaagagagcgggcatttctttgccaatcatttcagattggaaatgtgcaaagcatgctaattatggcttggtcaagtgctcctgaatagagtaaggggaaagggggtaaacaactatctggtgctcccacctcattcacctctaaacaggccatctcctttgcacatgcacctgtgtgacctgtgaccacaaagcacagagtcctsttgggatgactctaataaaggggaggggagggaacagccgaatggccaggaccagtcaaaataaaaaaatttgggaggatcccaaaaggctccatctggcagaagacactgcctccatcataggagaatgcacacagaaggttctaatgacagcc

SEQ ID NO: 713036 - DNA, 933 bp, Homo sapiens
ataaagaaaaccaagctcctcaatctgagtgttacattatatgtgataactgagatatgaggtgttcaagaatcactgtgtagttgacatctggggggagaaagctttttggctctgaggtaaatggagaggcaaaggctggaatacccctgactgcttgtagacactttccacttgtcctcacagcatcctgttaggtcaaagatgctgtctccgccaacatmagaggccaggtgatcaggtgacccacccaacgctgaagagtggtaaactgcatatcgtcagtgacaaagccagatctgtccaactccaagctggctggagagctgtcagtctgaaaggcaagtccaggaggatgagattcaccctggcgctcccagacaccactgcaagtaccatcaaaccacctacttccagcctccacccagagtccactcagtgacagggacccctctcagttctctaaggaaggctcccatgacagatctgcccggcaaacagcttcccatctcacagatggaagtccggatgctggcttccacaagccctgggccaggaaagaggctgcctcctggcttggggcacaaccaacccaggcattcagtatcgtcaagaaggccccaaggcagtggaaaaaatagacaacgtctgaaatcagaaaggctgggttgggtcccagccgccgaataatgagcaaggtgactatggcaagtatcacctcctgtggggaactttgccttcttcacaggaacatggagagaggggaataggctggggcacaaagctgaggcatgcgccccagtgtggctccaaagggggcatgcagacagtgacagtttgccatgagggtggtgtcatcccccacagaagaggtggggcagttgttaatgcttgtgaactctggctcatctgttacagtcataacagtactca

SEQ ID NO: 713037 - DNA, 1148 bp, Homo sapiens
tcgatgccatatttgtaaaattagctaattatacttgtcatttattgattgattgagacaagggtcacatcctgtcacctaggctggagtgggaggggcacagtcatagctcactgctgcstcaaacgtctgggcttaagtgatcctcccgcctcagcctccccggtagctgggactccaggcatgcagcaccatgccttgctaattaaaaaaaatttttttagtagagacaaggtctccttatgttgcccaggctggcctcgaactcctgagctcaagcaatcctcccactttggcctcccgaagtgctgggtttacaggtgtgagccatggcgcccagcctattattgtcttgtagaattttcagtttaaaaacatttgacaggctgggcacagtggctcacacctgtaatcccagcatttttgggaggccgaggtgggcggatcacctgaggtcaggagttggagaccagcctgaccaatacggagaaaccccgtctctactaaaaatacaaaaagttggccgggcatgcctgtaatcccagctactcaggaggctgaggcaggagaatcgcttgaacccaggaggcagacgttgcggtgagccgagatcgcgccattgcactccagcctgggcaacaagagcgaagctccgtctggaaaaaaaaaaaaaaaaacaatcgacagagctaagtataagaggtggcagataacaggccttcaaaactgagaggttaaattactatgtttacatcaagatatgtgagttaaggttaagattctgtgttccttgtgcttaactttcttcatttgtatgatgggagggaagctgggaacaggaggtgcaatgagatggtaagtcatattaatctctgcagtacttaacatcgagaaattgacagaatttcatttgctttcctcattaacaaaatgcaaagctattggccaggggtggtggctctcaactttaatcccagagctttgggaggctgaggcaggaggattacttgagtccaggagttccagaccagcctggtcaacatagtgagacctcatctctacaaagaaacaacgccccccaccacacgcacacagaaagctattacattttcttctctttcctgtgagcccatttggtggaagtgcaa

SEQ ID NO: 713038 - DNA, 1148 bp, Homo sapiens
tcgatgccatatttgtaaaattagctaattatacttgtcatttattgattgattgagacaagggtcacatcctgtcacctaggctggagtgggaggggcacagtcatagctcactgctgcctcaaacgtctgggcttaagtgatcctcccgcctcagcctccccggtagctgggactccaggcatgcagcaccatgccttgctaattaaaaaaawtttttttagtagagacaaggtctccttatgttgcccaggctggcctcgaactcctgagctcaagcaatcctcccactttggcctcccgaagtgctgggtttacaggtgtgagccatggcgcccagcctattattgtcttgtagaattttcagtttaaaaacatttgacaggctgggcacagtggctcacacctgtaatcccagcatttttgggaggccgaggtgggcggatcacctgaggtcaggagttggagaccagcctgaccaatacggagaaaccccgtctctactaaaaatacaaaaagttggccgggcatgcctgtaatcccagctactcaggaggctgaggcaggagaatcgcttgaacccaggaggcagacgttgcggtgagccgagatcgcgccattgcactccagcctgggcaacaagagcgaagctccgtctggaaaaaaaaaaaaaaaaacaatcgacagagctaagtataagaggtggcagataacaggccttcaaaactgagaggttaaattactatgtttacatcaagatatgtgagttaaggttaagattctgtgttccttgtgcttaactttcttcatttgtatgatgggagggaagctgggaacaggaggtgcaatgagatggtaagtcatattaatctctgcagtacttaacatcgagaaattgacagaatttcatttgctttcctcattaacaaaatgcaaagctattggccaggggtggtggctctcaactttaatcccagagctttgggaggctgaggcaggaggattacttgagtccaggagttccagaccagcctggtcaacatagtgagacctcatctctacaaagaaacaacgccccccaccacacgcacacagaaagctattacattttcttctctttcctgtgagcccatttggtggaagtgcaa

SEQ ID NO: 713039 - DNA, 1471 bp, Homo sapiens
tacaggcatgagccaccgtgcccagccccttctttcattcttacagtaaacgtgtaagtttcatagggctgctacagcagtaacccaaaactgggtggcttaaaacaatagagatttattctcttacagttctggagccctgaagtctgaaatcaagacgtcagcagggctctgttcactctggaggctctaaaagggaatccattcttgcctcttccagcttccgctggctccaagcgttccttagctcgtggcagtgtcacgccaagctcagcctccatccacacatgccattgtattctgtatcttctgtcttttataaggacatttgtcacgggatttaggatctaccagagtaatctagggtaatctcattttgagacctttaatttaattgcatctgctaaagccttgttctaaayaagataccattctcatggttcagatactgatatgcatctatcttttgggggcccacaatgtaactcattacagtacacaaaaattaatagcctgattttttggaaaaatccttaattttaaggaaaatatctagaaagccagattatgtgctatgttgaggaagacccaattctcctgcttgcatgtttccatgaagggatttctatcccattccctagaagagagcaggactgggtgcttctggtcctctgcgtacccccttacccactcattctgatgggagggtcacaggctaatctgtttgggaagagtagggaaggttcaacatcccctgggctgctgaccaagaatgggtgagcattcagagtaacaccattcctcccccggatgatggctccctgggtagctggagaccctctgctgtctgggaacttgcttggactaactcctgaaaaccaagttgctgaagataggttcaaagtctagatttaagggttacctgtaaaaacactcgctttgacctcaggcctaagctgtgttctccagcacagctaataggagaccctaaatatgaaaggattggacactgtccttgctcattaatataatacatctgatgtttcacttgacagtcccctggttcttcaagtctgtgttcaactggataagagtttagaggggagaagagggaggagtagaactcttaaatctccaaaatgccacttttctcttcttttcttttcttttgagacggagtctcactgtgtggcccaggctagtgccatggcacaatcacagctcactgcaacctctgcctcccagattcaagtgattcttgggcctcagcctcccaagtagctgggattacaggcatgtgccaccatgcccagttatttctttggtatttttagtagagatggtgttttgccatgttggccaggctggtcttgagctccttacctcaagtgatctgcctgccttggccttccagagtgctgggatcacaggcatgagctacagtgcccggcccaaaatgtcattttcatat

SEQ ID NO: 713040 - DNA, 613 bp, Homo sapiens
ggggagtttattaaggtgtattgcctcacacgatctcaaggtgaggtcctacaataggccgtctgcaaactgaggaacaaagaagccagtctgagtcccaaagctraagaacttggagtccaacgtttgagggtagcaagcatccagcacaggagaaagatgtaggtcagaagactaagccaacctagtctttacacgttcttctgcctgcttttattctggcctcacgggcggctgattagatggtgcccacccagactgagagtgggtctgcctttcccagtccactgactcaaatgttaatctcctttgccaatacccttacagacacacccaggaacaagactttgcatccttcaatccaatcaagttgacactcaaaattaaacatcacagaagctgtgtacaaggatagttaggttttatctaaataatagatactttatatttaataatgatttattattaaagtaattattaaattaacatattaaattattattatatgttatatattaaattattgtatatattatatataataaattaaattattattatataagttaaattattaaattattattaaattaacccaaactatatatctata

SEQ ID NO: 713041 - DNA, 1224 bp, Homo sapiens
ggaagaaagacgggtttagaataggcttgtgtgtggcgtttgggtggggaaggtcataggattatcgttttcaccttcagtctctcttgttctcaaattcaaatattaacaagcatcttaaaaaaggctacagggtaaaactgactcttgagtggaacttcaagtttttaggatctaaagaacacacacacacaaatccacgttaaatagatcactgcagtccaacttcatggggctaaatgccttgmatgcattatcttatttatctacaactctgtctgagtagggactgtttattatctccattttataactgagaaaactgatacccaaagaggtcaagtgccttgcccctagttaccaactcataagtggcagaactggaatctaagccaacttcagatgccaaagtccatgcttgcaaactctgtgctatacctccccaaagatatcttttccgtaacgtgagaagaaaacatcacctccttaaccactagcaggaatggaaggtgaagtgaattcagtgttgttacatctgtgcttcagaagttaggaaaggcaaggatacttaaaccctgctgtaatctgtcttcctccactagccagctcctcaacttgttttgacaaaagttgtgggttaggaagtagatggctatgtcagaggttaaacagcctccagattatgaaaatctgactgtggcccgagagttttaaccttaacaccaacctaaaggtgtggaaccaatcagggttttgaggttgctagtcacagaagccaagtcaggccatgcttagaaaatcaagggggtttagttggaggaaactggtaactcactgagctaaaggggacttgagagaagtacagaaaccaggaccacaccgtcaccataatggccaatccctttggacacagcctttgtcctgtgaccggcctagcttggaccctgtgcccactcctgtagtgggtgggagtaaagggtggacagtgtgtgcattctgctgtctacaagagcttcataaaatggtagaaatttcctgaaataaatataggggcttttttccagaaaagaaaaggaagaaggctaaatgttagacaagcgaaatcaattaaggtccaaggcagataccttcaagtggcccaattactctggaaggcataaagttaggagttgttcatcatttgatccatctctatcttgaaaatctagcacagaacatggcaca

SEQ ID NO: 713042 - DNA, 1224 bp, Homo sapiens
ggaagaaagacgggtttagaataggcttgtgtgtggcgtttgggtggggaaggtcataggattatcgttttcaccttcagtctctcttgttctcaaattcaaatattaacaagcatcttaaaaaaggctacagggtaaaactgactcttgagtggaacttcaagtttttaggatctaaagaacacacacacacaaatccacgttaaatagatcactgcagtccaacttcatggggctaaatgccttgcatgcattatcttatttatctacaactctgtctgagtagggactgtttattatctccattttataactgagaaaactgatacccaaagaggtcaagtgccttgcccctagttaccaactcataagtggcagaactggaatctaagccaacttcagatgccaaagtccatgcttgcaaactctgtgctatacctccccaaagatatcttttccgtaacgtgagaagaaaacatcacctccttaaccactagcaggaatggaaggtgaagtgaattcagtgttgttacatctgtgcttcagaagttaggaaaggcaaggatacttaaaccctgctgtaatctgtcttcctccactagccagctcctcaacttgttttgacaaaagttgtgggttaggaagtagatggctatgtcagaggttaaacagcctccagattatgaaaatctgactgtggcccgagagttttaaccttaacrccaacctaaaggtgtggaaccaatcagggttttgaggttgctagtcacagaagccaagtcaggccatgcttagaaaatcaagggggtttagttggaggaaactggtaactcactgagctaaaggggacttgagagaagtacagaaaccaggaccacaccgtcaccataatggccaatccctttggacacagcctttgtcctgtgaccggcctagcttggaccctgtgcccactcctgtagtgggtgggagtaaagggtggacagtgtgtgcattctgctgtctacaagagcttcataaaatggtagaaatttcctgaaataaatataggggcttttttccagaaaagaaaaggaagaaggctaaatgttagacaagcgaaatcaattaaggtccaaggcagataccttcaagtggcccaattactctggaaggcataaagttaggagttgttcatcatttgatccatctctatcttgaaaatctagcacagaacatggcaca

SEQ ID NO: 713043 - DNA, 1224 bp, Homo sapiens
ggaagaaagacgggtttagaataggcttgtgtgtggcgtttgggtggggaaggtcataggattatcgttttcaccttcagtctctcttgttctcaaattcaaatattaacaagcatcttaaaaaaggctacagggtaaaactgactcttgagtggaacttcaagtttttaggatctaaagaacacacacacacaaatccacgttaaatagatcactgcagtccaacttcatggggctaaatgccttgcatgcattatcttatttatctacaactctgtctgagtagggactgtttattatctccattttataactgagaaaactgatacccaaagaggtcaagtgccttgcccctagttaccaactcataagtggcagaactggaatctaagccaacttcagatgccaaagtccatgcttgcaaactctgtgctatacctccccaaagatatcttttccgtaacgtgagaagaaaacatcacctccttaaccactagcaggaatggaaggtgaagtgaattcagtgttgttacatctgtgcttcagaagttaggaaaggcaaggatacttaaaccctgctgtaatctgtcttcctccactagccagctcctcaacttgttttgacaaaagttgtgggttaggaagtagatggctatgtcagaggttaaacagcctccagattatgaaaatctgactgtggcccgagagttttaaccttaacaccaacctaaaggtgtggaaccaatcagggttttgaggttgctagtcacagaagccaagtcaggccatgcttagaaaatcaagggggtttagttggaggaaactggtaactcactgagctaaaggggacttgagagaagtacagaaaccaggaccacaccgtcaccataatggccaayccctttggacacagcctttgtcctgtgaccggcctagcttggaccctgtgcccactcctgtagtgggtgggagtaaagggtggacagtgtgtgcattctgctgtctacaagagcttcataaaatggtagaaatttcctgaaataaatataggggcttttttccagaaaagaaaaggaagaaggctaaatgttagacaagcgaaatcaattaaggtccaaggcagataccttcaagtggcccaattactctggaaggcataaagttaggagttgttcatcatttgatccatctctatcttgaaaatctagcacagaacatggcaca

SEQ ID NO: 713044 - DNA, 1224 bp, Homo sapiens
ggaagaaagacgggtttagaataggcttgtgtgtggcgtttgggtggggaaggtcataggattatcgttttcaccttcagtctctcttgttctcaaattcaaatattaacaagcatcttaaaaaaggctacagggtaaaactgactcttgagtggaacttcaagtttttaggatctaaagaacacacacacacaaatccacgttaaatagatcactgcagtccaacttcatggggctaaatgccttgcatgcattatcttatttatctacaactctgtctgagtagggactgtttattatctccattttataactgagaaaactgatacccaaagaggtcaagtgccttgcccctagttaccaactcataagtggcagaactggaatctaagccaacttcagatgccaaagtccatgcttgcaaactctgtgctatacctccccaaagatatcttttccgtaacgtgagaagaaaacatcacctccttaaccactagcaggaatggaaggtgaagtgaattcagtgttgttacatctgtgcttcagaagttaggaaaggcaaggatacttaaaccctgctgtaatctgtcttcctccactagccagctcctcaacttgttttgacaaaagttgtgggttaggaagtagatggctatgtcagaggttaaacagcctccagattatgaaaatctgactgtggcccgagagttttaaccttaacaccaacctaaaggtgtggaaccaatcagggttttgaggttgctagtcacagaagccaagtcaggccatgcttagaaaatcaagggggtttagttggaggaaactggtaactcactgagctaaaggggacttgagagaagtacagaaaccaggaccacaccgtcaccataatggccaatccctttggacacagcctttgtcctgtgaccggcctagcttggaccctgtgcccactcctgtagtgggtgggagkaaagggtggacagtgtgtgcattctgctgtctacaagagcttcataaaatggtagaaatttcctgaaataaatataggggcttttttccagaaaagaaaaggaagaaggctaaatgttagacaagcgaaatcaattaaggtccaaggcagataccttcaagtggcccaattactctggaaggcataaagttaggagttgttcatcatttgatccatctctatcttgaaaatctagcacagaacatggcaca

SEQ ID NO: 713045 - DNA, 3202 bp, Homo sapiens
tgaaggcaggggatgtattcatcttgctcatcaccatgactctatcacctagtggcctggaatatgggatatactcaatgcggatttaaataaatgaccacatttctcaatatttcctctgtgatgacttaactaatttcttttgaatgtatacatgtatacatatgttcaatgtatatatgtgtacatatactatcagaatcagtctgtttttgtttttttttcctgaggaattgtcttgtgagtgctgttgattgcctaccctgaatccattatccctttatttatttctaatggatccctgattttgttcaggaattcactcttccctatgaagcccatgattcaagagaaactgactcttcctctatcgccagggacttgattggttcaattagtcctaatgaaagtgtttctattcttagcaatgtttggcttcagtatggacatgcaatttaggtcaatttcaactgagatgttttccaggggcttctgcgaaaatctccccttgtttgcctagagagcctttctcctacagtagcggttctcaatcttgggctattttgcaatatctggagacatttgtgattgtcacatttgggggatgctacttacatctagtgagtcaaggccaagatgatgcagctaagcatcctacaatgcaaaatacatccttcaaacaaaaactaattattcagcccaaataagaatcaagaatgtacaagctgagaaaccctgatctaacataaaggagaaagcatgtagctctttctgttggctccttccaccatacaaccacagaaaaactagctttaggataaagctcaacactgcagattatagaagaaagagagaaagattgtagattcttgataacttctccaaatgcatagttggatcaaatatttttgaagctgaccttggctgtggactcccagtgatctgagccaatatgtctcctatttgctgtgtcagtttgagctagattatttttaaatagccattaaaagcattctatgtaaactgatatatatttctttattaaataataggaatccagttactgatttcattttactttggttttcaacaagttaaaagctaatttatagtccaatctgaataactataattttttctatctgcatatctgcattcaaattttttacatagtcttttatcttcgttctatttatgtgtatttttgctctgaatttattttgtacatattcttataagtctttttatcaatttcattgaatgatgtaggtgagataaagtgccttatacctcataggaaactaaagatatatttgtggaattaagaataaaggtgtaccaaacaaacaatgtttatttaaatattaatacaacttatatttagctggtctttgaaaattgtacaataccagctgaaataatttggagtcaacatgggaggcaaaataccatttgtaagctagtgtttgcagagattgaaatctataagtttagtgctctttctctttcatcacttgcatatctagccattctctccttggacaaaaacaaaaatagcagaattatgtgaattttcttacacattttttaaaacatctttaaatatttgttaaaaaggtcaatcaaagcctcaggattttgagtttttatcctatgattttgttcaaatccacagaaaccagtgttatttagctcatgatatctttaaaataagaatggttgtagagacctacaaaaaattaaaataggaattacttggcacaaacagttatgtaacattttatgaagctcaagagcttaataatactaagtaagagacaaatggtaactgggcaaagtttttgagaaatataactgcaaattactgaaatctcatttaaaaaagctaagatttcactttgttaatgggtaatagttaaatattttatgctgaccatatatttgcgcttgcaggagaaactaccacattgtcyatttgtttgttaagtcacatgttctggtattttagtcataatctgaaagttacttttatatataattaatgaaacatgagagggtttgagttgatttaatctattttttcagtctccctttcctagtgatttcagaggtcagaaataacctagcttttcagacaagacagtttcctctaccaaaacaattagtgtctagctgcagaacgaaggaaatagaggtttagaaaacacaagtttttgatgctcataggtcacctgcggactgtaggggtaaaagggagccttttagcatgttggcctgtgtagaagaaagcagcacttgggaggaagggcattccagagccttaggacctgacctagggactttctagttcttagaagatcagtcctaaaatctgccaattgcagtgggacactagctggggaggaaactatggggttagagcgttaaaaggtttcttggcagggtgagtattagacccttgaagttgaaggtaacagtttcaaatggtgtcaggagccactgatttgtgaactttgtccttgcttgtgcttgacccctctgacctttgtccaggctggcctgcacaagtgtgtaagcagctgccagtggagtgtgatttgaagggcatcaagaggcccacttggccctgattatttccccctgggtctggcataactttcctattacttagcacagcatctggctcaataaatcttggatggttggatggatggatggatggatggatggatggatggatggatggattcatcacatatatttattacatgccaggtattatacaaaatgcacaggacccacaaataaacacaatcattatgttcctacttttcatgaggcccactgtctagttaaacagaaaagaaggtaaaataaatacaagaattctaagtgagggttccgaaactttagaaagaaataaagtgctaaagataatggacttcagaaaagtcttcaaaaaaaaaaaggcatttttcatatgaaaatgaccataattaaaatgcaaatatatgttcaggaaaaaatattataatctcattggccctgacttggtgtttagagagtctgtctatgaaaaggtaaaagtagagcagtaagaaaattagggacttttgatggggagaaaacttctcaaggaagggataactgagagcccagactgctgttcaagctgaactgatttgagcagagatgaacagac

SEQ ID NO: 713046 - DNA, 287 bp, Homo sapiens
caccactgatgctcaatgtaaggttgcgatcaaatccagatgcttttttccacttgtaaaatcatattaaagaaaggataatgtacaacattaatcatgtcattttacttgataaatcataaggggttctcctaaataatcaaaggcactaaataagctaaaaacataaatgccattaaaagaaaataagtgaaattctcccatgggttaagagttcaattaaaatggatatgcttcatcarcacctgcagtttgcaagatgagtagattagggaacatcatccatg

SEQ ID NO: 713047 - DNA, 911 bp, Homo sapiens
ggggcttttcccccttttctcggcacttctccttcctgctatcatgtgaagaaggacatatttacttccctttttgccaygattgtaagtttcctaaggcttccccagccatgtggaactgtgagtcaattaaacctcttttctttataaattacccagtctcaggtatgtctttattagtagcatgaaaacagactaatatagtgactctttccacccctattcctaaacaattaatatcgtgagcatcttgggcaagcctgtagaggataactctacaaaatttggatttattccatgacaattagagactgtggatgttaagtagaaaagtgaaatagttgacagtttttcagaagttgataaagaatggcatggtgcagtagaggctactgcaggaagtcaaaactgatgaagacttcatacattgtcaaaagcaaggtctaaagaggagaggcaaaattttacagatttttttaaaatacaattcatgtagtcttgtgaagagatggatcgatgtgatgagtggagaaagccagagaaaaaaagtgaaatatatttttgtgtttatagcttggtctcagtgttatagctgaacagcataattcaaaacatggtattgacaggtagtataaataggaggctggggctgaggattttacaagacctaaaatgcataccttttgagtattttttaatgtttgaaataattatgagacataaaagtggaaatatcctgtagacaactataattctgcaaataaatgacatggagaaaatttatagaatcatcaccatttagacattagtagaagctgtaggaatattctcaatccaccgggaagaaattatggatcagaaagaagaggtcttttttattgttgaaggcttataaataaacactcttagga

SEQ ID NO: 713048 - DNA, 940 bp, Homo sapiens
aaacagtgcatgtcttttgacttgtaaacattgatttagatcctgcttaatttcataatcttttcaggccactactgttcacttagacgatatccccttagcttggatttagccatgaaccattgatcatttacttggtttctcttggagttcaatgtagtcattctggtttagttcaaaaggacattatgtttgggtaagagaatgtattttgttatacccttgcttgttactactccctctaccagttctgctcttcctttctcccttgcatcagtgtaaggctatgtctttaagcccaacactttccacagcatcacgcttcctctaccattgtaagttcacatgtacacttagccatcactctctcccatgtgctacaacactaggcacatgctgctattgcagcactctccatatttgggagctcctttgagacaataaccaactggttaatgttcatccatcctacttaatatctactatagttcttaacactcartaacacacagttggcaaacatctgttaattgttgtcatattgcaagatgtaaacgctatatctttagtcacatcaattttcatattttgtgtctagactccttatgtcacaggagatgttcttataaatcctaaaaatatgaaaaaaaagggaaccccaaaggtagttaaccagtcttttgagatagaacaaacaataaaacaaatatggaaaatgcaaatttttacagccctcatagcaaatgtccagctctaggactggtagagtcacgggcagttaggtagacatatattcatgtgttataccctttgctcagagactctgagcactttttcaaagccattttttacgtaataaaataactgatattggtacacctgatttcagcatacgagtcatgaaatcactatcagaaaaataggtttccatttccatgtt

SEQ ID NO: 713049 - DNA, 940 bp, Homo sapiens
aaacagtgcatgtcttttgacttgtaaacattgatttagatcctgcttaatttcataatcttttcaggccactactgttcacttagacgatatccccttagcttggatttagccatgaaccattgatcatttacttggtttctcttggagttcaatgtagtcattctggtttagttcaaaaggacattatgtttgggtaagagaatgtattttgttatacccttgcttgttactactccctctaccagttctgctcttcctttctcccttgcatcagtgtaaggctatgtctttaagcccaacactttccacagcatcacgcttcctctaccattgtaagttcacatgtacacttagccatcactctctcccatgtgctacaacactaggcacatgctgctattgcagcactctccatatttgggagctcctttgagacaataaccaactggttaatgttcatccatcctacttaatatctactatagttcttaacactcagtaacacacagttggcaaacatctgttaattgttgtcatattgcaagatgtaaaygctatatctttagtcacatcaattttcatattttgtgtctagactccttatgtcacaggagatgttcttataaatcctaaaaatatgaaaaaaaagggaaccccaaaggtagttaaccagtcttttgagatagaacaaacaataaaacaaatatggaaaatgcaaatttttacagccctcatagcaaatgtccagctctaggactggtagagtcacgggcagttaggtagacatatattcatgtgttataccctttgctcagagactctgagcactttttcaaagccattttttacgtaataaaataactgatattggtacacctgatttcagcatacgagtcatgaaatcactatcagaaaaataggtttccatttccatgtt

SEQ ID NO: 713050 - DNA, 940 bp, Homo sapiens
aaacagtgcatgtcttttgacttgtaaacattgatttagatcctgcttaatttcataatcttttcaggccactactgttcacttagacgatatccccttagcttggatttagccatgaaccattgatcatttacttggtttctcttggagttcaatgtagtcattctggtttagttcaaaaggacattatgtttgggtaagagaatgtattttgttatacccttgcttgttactactccctctaccagttctgctcttcctttctcccttgcatcagtgtaaggctatgtctttaagcccaacactttccacagcatcacgcttcctctaccattgtaagttcacatgtacacttagccatcactctctcccatgtgctacaacactaggcacatgctgctattgcagcactctccatatttgggagctcctttgagacaataaccaactggttaatgttcatccatcctacttaatatctactatagttcttaacactcagtaacacacagttggcaaacatctgttaattgttgtcatattgcaagatgtaaacgctatatctttagtcacatcaattttcatattttgtgtctagactccttatgtcacaggagatgttcttataaatcctaaaaatatgaaaaaaaagggaaccccaaaggtagwtaaccagtcttttgagatagaacaaacaataaaacaaatatggaaaatgcaaatttttacagccctcatagcaaatgtccagctctaggactggtagagtcacgggcagttaggtagacatatattcatgtgttataccctttgctcagagactctgagcactttttcaaagccattttttacgtaataaaataactgatattggtacacctgatttcagcatacgagtcatgaaatcactatcagaaaaataggtttccatttccatgtt

SEQ ID NO: 713051 - DNA, 907 bp, Homo sapiens
aaatccaccagaaatgtatcagtccttgtttaacatgaccttttwatctttttattcttttcattaattgcttttaaagttgtatcaatctattagactggtattttaaactttttagatggtgtctctttttttctttaaattttacctgtatctttccacaaggaatttcacaggcatgaaatgatgtcctctgacagtgatgacttctccctacttccagaaaaatctcttcattcttggcctccatagccctaatttctcttggttttcctcttacctctctgagcaatttttctaagtctgctttgctgaccttctcttgtaataggctctgaagtgccaatgttccccagcgtcttaatcatggcatattcttgcattgcacacttctatggttcaagtactactcatatattagaggttcccaattctataatattatcagtcttggaactctcttcgaagattcatgccttagtgcttgtattattctgaactttttttcacctgaacaaccccgaagaaacaaacctgtacaaacttcttttatttcctaaatctcttttgtccctcatcccacctttatccaaccacaaattctatatactctacatgctaaatatccttcgtgtccatcttttatttgtaatctccattcccactgtcccttattcagcagtcatctgtatgattgcaaaaatccaaagagaaacaaacaagcaaacaagaactttctaaatgatcttcctgcttttaatttcatcacatttccattgtactactgcttatgtgatttttctaatatatgtaacatagccactttcctattctacatcttaaagtggcttttctttccttaagtcaatacccacatccttagcaggttataggaagccattcatgt

SEQ ID NO: 713052 - DNA, 907 bp, Homo sapiens
aaatccaccagaaatgtatcagtccttgtttaacatgaccttttaatctttttattcttttcattaattgcttttaaagttgtatcaatctattagactggtattttaaactttttagatggtgtctctttttttctttaaattttacctgtatctttccacaaggaatttcacaggcatgaaatgatgtcctctgacagtgatgacttctccctacttccagaaaaatctcttcattcttggcctccatagccctaatttctcttggttttcctcttacctctctgagcaattyttctaagtctgctttgctgaccttctcttgtaataggctctgaagtgccaatgttccccagcgtcttaatcatggcatattcttgcattgcacacttctatggttcaagtactactcatatattagaggttcccaattctataatattatcagtcttggaactctcttcgaagattcatgccttagtgcttgtattattctgaactttttttcacctgaacaaccccgaagaaacaaacctgtacaaacttcttttatttcctaaatctcttttgtccctcatcccacctttatccaaccacaaattctatatactctacatgctaaatatccttcgtgtccatcttttatttgtaatctccattcccactgtcccttattcagcagtcatctgtatgattgcaaaaatccaaagagaaacaaacaagcaaacaagaactttctaaatgatcttcctgcttttaatttcatcacatttccattgtactactgcttatgtgatttttctaatatatgtaacatagccactttcctattctacatcttaaagtggcttttctttccttaagtcaatacccacatccttagcaggttataggaagccattcatgt

SEQ ID NO: 713053 - DNA, 1323 bp, Homo sapiens
tggaaatcttcatggaaaggagtaaagaggttactgggaaaaaaagaaaggagagaaaagttgtttgaaggatcttcaggagacttttcagacaagtttaggtgtgcctcttgaagttttacttgcataagggctcaacacactcctggtgagaacagctagaaactctttagaaataattgtgagctccgggactgagatgtttagacaaaggggagggatagaagtcacctcttcacctcttggggagtgtttccacaaaacagaagaaactcatcttgagtcatggtatgttacagagctgtgtccttgtccagagaaagtggtcaacacaaggatcacaagggagcataacatggagtgcaatattgcctggattaattcactgttccctctgattcagtccttgagggaaatttgctaagttcctcataatagaaaagcattaaaaagaaataaaagagtaattcaaattgaagagtcaaaacattaaaggcaaagggaaaaaataagagaagtttctctacagaacctatcaaaagattgtaatgcagcacagaagcctgttagcgcaaaactctttaaaattatgagaacagaaaaagagagcaaattacatgaaagattcacttctcccaaatagtctaagttaattgttccagttttaaagttttctcctcagccaagtttctgtagaatttccacttttagttcatatatatttttcttgctaaaactgaggcttcagtatatgcctcttgacctgggttcacattttatagccgaaaaaatatatgaaacctckaaggaaatcatagccaaattgttgaattttagttggtttaggtcagagggcaagaatccatagagctttatgtactttctacctgaaataaagaaagacccaagtttgcctaaaacttggccaaaatccaccaatttatctggggccaaagttttcagttaatctggcacaaatatggagtttttaatgatacctgacaccagatgaattttttaaaatgattttaagactaacattcataaggctatagaaaacaaaaattttccattgcccaaatattcatttaatagttaagaacagaaaataaagtttcttagagtaagctatcacacaatacaattcttttatattttaaactggtggttttcccaaagtaggcagataataatttcatgctttcatgtggctgaagtctcagttaagactttgtctgaaacataaaatcaaagttcaaatattcctctcctagttagtgattctttccacccaaattgcataagccaaggtcaacaagaata

SEQ ID NO: 713054 - DNA, 818 bp, Homo sapiens
gtgagttcaccaccacagacaataaatcctatctgtagtgagggacaaaaaaaggtctcattctcggagaaatacagaggtaaaagaaagaaagttaggcctaagggaaattactgttgctgggtgtccataaagcttggctgcatccctctcttttaatgcttgctttgttcagaacttcactggattctatgagccaataaattccctatttttcttaaactagttgaagttgggtctcagtcacatgcaattcaaggagttctaactcatataattgccctcatttttttcatacacctattcccctttcaccaattgcaagcttctgggatgcaggtatattaggctgttcttgcattgctacaaaaaattcctgagactgagtaatttataaagaaaagaggtttagttggctcacggttctgcaggctttagaggaagcatggtgctagcatctgctcagcttctagggaggtcgcaggaagcttacaattatggcggaagacaaaggggaagcaggcacatagcgagaacaggaacaagcaagagagagattggggtgggggtgccacrcacttttaaatgagcagatcttataagaactccctattccaaagacagcagcaagccatgagggatctgcccccatgatccaaacacctcccaccaggccccaactccagcattggggattacaattcaacatgagatttgggtgggggcaaatatccaaactatatcaacaggggacattttttacttatccacagtccttaacatgatttgtggcacagagtggccatgtaaataaataa

SEQ ID NO: 713055 - DNA, 818 bp, Homo sapiens
gtgagttcaccaccacagacaataaatcctatctgtagtgagggacaaaaaaaggtctcattctcggagaaatacagaggtaaaagaaagaaagttaggcctaagggaaattactgttgctgggtgtccataaagcttggctgcatccctctcttttaatgcttgctttgttcagaacttcactggattctatgagccaataaattccctatttttcttaaactagttgaagttgggtctcagtcacatgcaattcaaggagttctaactcatataattgccctcatttttttcatacacctattcccctttcaccaattgcaagcttctgggatgcaggtatattaggctgttcttgcattgctacaaaaaattcctgagactgagtaatttataaagaaaagaggtttagttggctcacggttctgcaggctttagaggaagcatggtgctagcatctgctcagcttctagggaggtcgcaggaagcttacaattatggcggaagacaaaggggaagcaggcacatagcgagaacaggaacaagcaagagagagattggggtgggggtgccacgcacttttaaatgagcagatcttataagaactccctattccaaagacagcagcaagccatgagggatctgccccmatgatccaaacacctcccaccaggccccaactccagcattggggattacaattcaacatgagatttgggtgggggcaaatatccaaactatatcaacaggggacattttttacttatccacagtccttaacatgatttgtggcacagagtggccatgtaaataaataa

SEQ ID NO: 713056 - DNA, 3490 bp, Homo sapiens
tgaactgactatataagtttgctatgargagagaggttcaggtatgcataaagtgaatttaggttgttgatggactcaggatatagagctagccgatgatcatttcaaaatacttttctatagcttaggaaggagtagggagttgtaggtttggatagctacaagagtgttatttgattccacaatttttattttttatttaccaagacgagataggtgataaagaggaaacaaaatacttgccttctgaggacttaaagagcaagagaaaaataaataggaaacaaaattgactgaaaagtatcttccataaatgtagaagctgttttagcagagtatggtgtctgaacactaaaggaaaagatttcacaaacacaggccaacattgttttactggcaaagtggatataaactttcatcattccacacatgaaaatgtgctatacatttactgcttaattagtgttaataatttacgtttaacattaaatattaccttagtggaaataatctaaaatgatagttgatactctataaagattgacccatgtcgttagagtaaaataatgttcacaccaactgaagtcacagatcttctagtacagaaatcattggacaagtattgtattggtaaaagggtgttcagggtcacgttttcagtaactgtattgtactgcagctcttggccactaactctactgggcccctgagagggtcagcattagaaccaagtgataagatttcaggatcaagtaaaattatctataattttatacataaagtgcaaaggcaatttaaatatatgtttagtatcaattaagaatatattgtaaattacatggagagaaactggaagcaaaatttgccatataattaataaaaacttgaataatgtatgcattgttcaggcttactgccacgtcaggatcagtctgcatacctttagacaaaaaacagatctaaagttactagtcacaaaccatgatggatagatggatttggagaatgcaagaaatgtgaagctacaatatattgtaaaaaatttcgctttctctcgcactgttgaactgataaatttagaaaactaactttccaaattccattaaagttaactaaggccttggctgaactactgttacaaaatagaaatatattgaatagtgccgggcacggtggctcacgcctgtaatcctagcactttggggggccgaggagggcagatcacaaggtcaggagttcaagaccagcctggccaatatggtgagaccccatctctactaaaaaatacaaaattagccgggtgtggtggcatggcctgtagtcccagctactagtgaggctgaggcagaagacttgcttgaaccccgggaggtgaaggttgcagtgagctgagatagcaccactgaactccagcctgcatgacagagtgagactccatctcaaaaaaaaagaaagaaagaaagaaagaaatatattgaatggtacaagcaagtgtttatatgcttgggtaccagaagtaagaaaaaaaaagaactattgaatgaaagagcaaagaagagattgattttaatgatctctcttgtttgtgaaatctataatttaaaaatcaaggcattttcccctttctattttatctaagggtttcttataagaaaaacaatcaaaatggcaagattaacaaaatatggagctgtatcttttttttcttgatagatatagacgtatgtccattgtcaaatggatgactcttcttttttatgttattggctcttattagtccatgcattaattatgttatatattcatttaacagtcatttaagtcttctactgtagacattgctctgagttacacaaaaactcaaaacgggggcctgtgaaagacatattatgcctacataattgaaaggcttttacctgtgtccattactttcctgggacaagttattgtttattacactaccctcatccttcctgatgataagaaccccagtcactgtttcagacatacttatgtgtgtttggggtagttgacagggagcgtggttgccacataggtcacagagtttagctgttctagggacataggtagacagagcactggttgaaagagctccgtgagctgtaaagggaggcattgatagatgtcctacctcagtcagaagaaagaacaccacatgtgtcttctcagcagaggctatgggtatgttcgctctaacaggaaaagataatctgctgatatgtgctcaggaatgctaaaactgccactgcaaaattgtaactgagatatgacctaaccaactccatcttgcttctagcctccaagctgttcttattcattcctaggtgtaggctgaactaactttgggaggaacttgatttatagtttatagtttaacagccctttcccaaaacaaactccttcttgcctgggaactagactgcctttgtaggactaacaaattagccacaagattagaaattatggtttaggagtcacacagctggagcctacaagattctgaccctccctaaattggtcctaagatcagtgcttgagactttttgtggaccctgtacttgatggatcagctggcaccacccagatcaagaaactggctcatctgatcttctgggccccgcccaggaactgactcaacacaagaagacagcttcaattccctatgatttcacctctgacctgaccaatcaggccttccgggtcactggcccaccaatttgaccttaaaaaccttgatccccaaatgctcagggtgacctggtttgagtactaataaaactttgggtttcccacacagccagctctgtgcaaattactctttctcgatttcaatttccctgtcttgataaatcggctctacctaagcagagagcaaggtgaacccattgggcagttacaatgctgttccagaatcctggggcccagtgtccttgtcaatactggctcttttcattccaagggccactctgggttagctgtttctccaggtcctaatctactgtctttaggggcaatccactctactccgggctgcctctgagcactggggcaaatgggggagatcatagcgatgtcaaccctgctccacatgccatcttaggcctagcaagtacctggagcccctgtcccaggcagcaagggggtgcagtcagggctgcatgctccatggaactagagggagctgggcacagctgcaactgcccaagtcaaggttgtggacctgggcctccatgtgctcttgggggtctcaggaagtctcccctctacccttgcaggcttggaagtgcctgataccactacctgacttctccctgctgttagcacccactctgacctgagatcaatgtggggccaaagctgagcattgttgcagtccagctggggggggcatatgcttggggcagtgcagaaacaccagtcccctgccaccttggtcccctccagactttgggtgcccacagcccggtgc

SEQ ID NO: 713057 - DNA, 3490 bp, Homo sapiens
tgaactgactatataagtttgctatgaagagagaggttcaggtatgcataaagtgaatttaggttgttgatggactcaggatatagagctagccgatgatcatttcaaaatacttttctatagcttaggaaggagtagggagttgtaggtttggatagctacaagagtgttatttgattccacaatttttattttttatttaccaagacgagataggtgataaagaggaaacaaaatacttgccttctgaggacttaaagagcaagagaaaaataaataggaaacaaaattgactgaaaagtatcttccataaatgtagaagctgttttagcagagtatggtgtctgaacactaaaggaaaagatttcacaaacacaggccaacattgttttactggcaaagtggatataaactttcatcattccacacatgaaaatgtgctatacatttactgcttaattagtgttaataatttacgtttaacattaaatattaccttagtggaaataatctaaaatgatagttgatactctataaagattgacccatgtcgttagagtaaaataatgttcacaccaactgaagtcacagatcttctagtacagaaatcattggacaagtattgtattggtaaaagggtgttcagggtcacgttttcagtaactgtattgtactgcagctcttggccactaactctactgggcccctgagagggtcagcattagaaccaagtgataagatttcaggatcaagtaaaattatctataattttatacataaagtgcaaaggcaatttaaatatatgtttagtatcaattaagaatatattgtaaattacatggagagaaactggaagcaaaatttgccatataattaataaaaacttgaataatgtatgcattgttcaggcttactgccacgtcaggatcagtctgcatacctttagacaaaaaacagatctaaagttactagtcacaaaccatgatggatagatggatttggagaatgcaagaaatgtgaagctacaatatattgtaaaaaatttcgctttctctcgcactgttgaactgataaatttagaaaactaactttccaaattccattaaagttaactaaggccttggctgaactactgttacaaaatagaaatatattgaatagtgccgggcrcggtggctcacgcctgtaatcctagcactttggggggccgaggagggcagatcacaaggtcaggagttcaagaccagcctggccaatatggtgagaccccatctctactaaaaaatacaaaattagccgggtgtggtggcatggcctgtagtcccagctactagtgaggctgaggcagaagacttgcttgaaccccgggaggtgaaggttgcagtgagctgagatagcaccactgaactccagcctgcatgacagagtgagactccatctcaaaaaaaaagaaagaaagaaagaaagaaatatattgaatggtacaagcaagtgtttatatgcttgggtaccagaagtaagaaaaaaaaagaactattgaatgaaagagcaaagaagagattgattttaatgatctctcttgtttgtgaaatctataatttaaaaatcaaggcattttcccctttctattttatctaagggtttcttataagaaaaacaatcaaaatggcaagattaacaaaatatggagctgtatcttttttttcttgatagatatagacgtatgtccattgtcaaatggatgactcttcttttttatgttattggctcttattagtccatgcattaattatgttatatattcatttaacagtcatttaagtcttctactgtagacattgctctgagttacacaaaaactcaaaacgggggcctgtgaaagacatattatgcctacataattgaaaggcttttacctgtgtccattactttcctgggacaagttattgtttattacactaccctcatccttcctgatgataagaaccccagtcactgtttcagacatacttatgtgtgtttggggtagttgacagggagcgtggttgccacataggtcacagagtttagctgttctagggacataggtagacagagcactggttgaaagagctccgtgagctgtaaagggaggcattgatagatgtcctacctcagtcagaagaaagaacaccacatgtgtcttctcagcagaggctatgggtatgttcgctctaacaggaaaagataatctgctgatatgtgctcaggaatgctaaaactgccactgcaaaattgtaactgagatatgacctaaccaactccatcttgcttctagcctccaagctgttcttattcattcctaggtgtaggctgaactaactttgggaggaacttgatttatagtttatagtttaacagccctttcccaaaacaaactccttcttgcctgggaactagactgcctttgtaggactaacaaattagccacaagattagaaattatggtttaggagtcacacagctggagcctacaagattctgaccctccctaaattggtcctaagatcagtgcttgagactttttgtggaccctgtacttgatggatcagctggcaccacccagatcaagaaactggctcatctgatcttctgggccccgcccaggaactgactcaacacaagaagacagcttcaattccctatgatttcacctctgacctgaccaatcaggccttccgggtcactggcccaccaatttgaccttaaaaaccttgatccccaaatgctcagggtgacctggtttgagtactaataaaactttgggtttcccacacagccagctctgtgcaaattactctttctcgatttcaatttccctgtcttgataaatcggctctacctaagcagagagcaaggtgaacccattgggcagttacaatgctgttccagaatcctggggcccagtgtccttgtcaatactggctcttttcattccaagggccactctgggttagctgtttctccaggtcctaatctactgtctttaggggcaatccactctactccgggctgcctctgagcactggggcaaatgggggagatcatagcgatgtcaaccctgctccacatgccatcttaggcctagcaagtacctggagcccctgtcccaggcagcaagggggtgcagtcagggctgcatgctccatggaactagagggagctgggcacagctgcaactgcccaagtcaaggttgtggacctgggcctccatgtgctcttgggggtctcaggaagtctcccctctacccttgcaggcttggaagtgcctgataccactacctgacttctccctgctgttagcacccactctgacctgagatcaatgtggggccaaagctgagcattgttgcagtccagctggggggggcatatgcttggggcagtgcagaaacaccagtcccctgccaccttggtcccctccagactttgggtgcccacagcccggtgc

SEQ ID NO: 713058 - DNA, 3490 bp, Homo sapiens
tgaactgactatataagtttgctatgaagagagaggttcaggtatgcataaagtgaatttaggttgttgatggactcaggatatagagctagccgatgatcatttcaaaatacttttctatagcttaggaaggagtagggagttgtaggtttggatagctacaagagtgttatttgattccacaatttttattttttatttaccaagacgagataggtgataaagaggaaacaaaatacttgccttctgaggacttaaagagcaagagaaaaataaataggaaacaaaattgactgaaaagtatcttccataaatgtagaagctgttttagcagagtatggtgtctgaacactaaaggaaaagatttcacaaacacaggccaacattgttttactggcaaagtggatataaactttcatcattccacacatgaaaatgtgctatacatttactgcttaattagtgttaataatttacgtttaacattaaatattaccttagtggaaataatctaaaatgatagttgatactctataaagattgacccatgtcgttagagtaaaataatgttcacaccaactgaagtcacagatcttctagtacagaaatcattggacaagtattgtattggtaaaagggtgttcagggtcacgttttcagtaactgtattgtactgcagctcttggccactaactctactgggcccctgagagggtcagcattagaaccaagtgataagatttcaggatcaagtaaaattatctataattttatacataaagtgcaaaggcaatttaaatatatgtttagtatcaattaagaatatattgtaaattacatggagagaaactggaagcaaaatttgccatataattaataaaaacttgaataatgtatgcattgttcaggcttactgccacgtcaggatcagtctgcatacctttagacaaaaaacagatctaaagttactagtcacaaaccatgatggatagatggatttggagaatgcaagaaatgtgaagctacaatatattgtaaaaaatttcgctttctctcgcactgttgaactgataaatttagaaaactaactttccaaattccattaaagttaactaaggccttggctgaactactgttacaaaatagaaatatattgaatagtgccgggcacggtggctcacgcctgtaatcctagcactttggggggccgaggagggcagatcacaaggtcaggagttcaagaccagcctggccaatatggtgagaccccatctctactaaaaaatacaaaattagccgggtgtggtggcatggcctgtagtcccagctactagkgaggctgaggcagaagacttgcttgaaccccgggaggtgaaggttgcagtgagctgagatagcaccactgaactccagcctgcatgacagagtgagactccatctcaaaaaaaaagaaagaaagaaagaaagaaatatattgaatggtacaagcaagtgtttatatgcttgggtaccagaagtaagaaaaaaaaagaactattgaatgaaagagcaaagaagagattgattttaatgatctctcttgtttgtgaaatctataatttaaaaatcaaggcattttcccctttctattttatctaagggtttcttataagaaaaacaatcaaaatggcaagattaacaaaatatggagctgtatcttttttttcttgatagatatagacgtatgtccattgtcaaatggatgactcttcttttttatgttattggctcttattagtccatgcattaattatgttatatattcatttaacagtcatttaagtcttctactgtagacattgctctgagttacacaaaaactcaaaacgggggcctgtgaaagacatattatgcctacataattgaaaggcttttacctgtgtccattactttcctgggacaagttattgtttattacactaccctcatccttcctgatgataagaaccccagtcactgtttcagacatacttatgtgtgtttggggtagttgacagggagcgtggttgccacataggtcacagagtttagctgttctagggacataggtagacagagcactggttgaaagagctccgtgagctgtaaagggaggcattgatagatgtcctacctcagtcagaagaaagaacaccacatgtgtcttctcagcagaggctatgggtatgttcgctctaacaggaaaagataatctgctgatatgtgctcaggaatgctaaaactgccactgcaaaattgtaactgagatatgacctaaccaactccatcttgcttctagcctccaagctgttcttattcattcctaggtgtaggctgaactaactttgggaggaacttgatttatagtttatagtttaacagccctttcccaaaacaaactccttcttgcctgggaactagactgcctttgtaggactaacaaattagccacaagattagaaattatggtttaggagtcacacagctggagcctacaagattctgaccctccctaaattggtcctaagatcagtgcttgagactttttgtggaccctgtacttgatggatcagctggcaccacccagatcaagaaactggctcatctgatcttctgggccccgcccaggaactgactcaacacaagaagacagcttcaattccctatgatttcacctctgacctgaccaatcaggccttccgggtcactggcccaccaatttgaccttaaaaaccttgatccccaaatgctcagggtgacctggtttgagtactaataaaactttgggtttcccacacagccagctctgtgcaaattactctttctcgatttcaatttccctgtcttgataaatcggctctacctaagcagagagcaaggtgaacccattgggcagttacaatgctgttccagaatcctggggcccagtgtccttgtcaatactggctcttttcattccaagggccactctgggttagctgtttctccaggtcctaatctactgtctttaggggcaatccactctactccgggctgcctctgagcactggggcaaatgggggagatcatagcgatgtcaaccctgctccacatgccatcttaggcctagcaagtacctggagcccctgtcccaggcagcaagggggtgcagtcagggctgcatgctccatggaactagagggagctgggcacagctgcaactgcccaagtcaaggttgtggacctgggcctccatgtgctcttgggggtctcaggaagtctcccctctacccttgcaggcttggaagtgcctgataccactacctgacttctccctgctgttagcacccactctgacctgagatcaatgtggggccaaagctgagcattgttgcagtccagctggggggggcatatgcttggggcagtgcagaaacaccagtcccctgccaccttggtcccctccagactttgggtgcccacagcccggtgc

SEQ ID NO: 713059 - DNA, 672 bp, Homo sapiens
taaaaaataagtagaaaaaaaaaacttaaatggttaggtttgatgtcagttcacaagcttaactcaatttttctactgctgcctatataaaaatttttagaaatttttaaaatacagaaaacaattgatagaacaaatatctgaccaccagctactcagaattgatgactgttacaatttactttatttgtttcaagacctaagaaatacaatgttaattaatgagcatagaagggtaacacaatgaaatttgagcttcagtggtcataaaaattatttgaatctgtcattgcttcagtgtagaaaccctggacattttactatggtacagaccaataaacaatgtttccaaggaaacagccctctgcagccacccacttttagggaaaatgccaakggatgccaaatcttctggttttctagaagcctcaatgagccacagttaaagttctggtcattttctccagggaagagagttctttgacccaaatccctctttttcagttaggtcatggaataagtaatatggttgatgttcatccatccatactcccttcttcctttaaatatattcttcgttgaataaggtcttctgctgaaactgtaactcatgcatgtttaaatttggaattctcttaaatgtaaaagagaaagcttactagggtataacaa

SEQ ID NO: 713060 - DNA, 2825 bp, Homo sapiens
tttaagattaatgactgttcatggtagaaaattcaaattgcatgaaaagactctttatagtgaaaaagcagaagttcctcttccccacaatgtccattcccactcactacaggtaaccattgttaataactttcctggccattcttctagaacttttgtatgtatctataagaaacattctcacctacacatgagcatacacacacacttctgtgttttttctgacttctgtttcattgtaagagggataatatacatactgttatataatttgctttctttgcttaatgtatcctaggcatttttccacagtgaaacatatcttcttaagtgaatctttttcaacttaataaagtaattctgaagtatatgtaagaataaagagtcaagaatgacaaagaacattctggaaaaaactactgaagaaggacttgcaataccagatacgagaatgcattattaaaatattgtgataaacgtggaagaatagagaaatcagtggagcagaaattaatctcaggagaaaactacagaacataaaagcttcagctgaatttaaaaatattaaaatcagtaggaagaagtgtattattcaataaacatgcaggaacaattgcttaacaatagaaaaaaaccgatcaaatcctctcctcacatgataaaccataattagttgcagatttattaaagcattaattgcataaaatgaaaaacaaagcaaatcatcaaatatgtaaaataaaaatgaatattgaacattttgtgaggaaggttttctaattgtacaagcaaatatagaaactttaatgaaaacacttgagaaactgacaatttaaaaatgaaaaattcagtaacaaaacatgataaagattagctggaaagatacttgtaaaatgcatgacacaatgttatcctaattttatataaagaattctcttcatataaaatttaatacaccccaacagaaaaaaaaatgaatgatgtgtaggaataaataaggtataaagcaataatgtaaatggtaaataaatatatgaattatttcaaaattttcaggtaagcaaagtaacaaagggtaaaagaacaatcttttttcacatatcaaattagagattattaaaaacttgatataataacatttagtgttggcaaagataaagatagacactcacatatacttccattgtggaagatagtttagcctatgtatgaaaacttgtaaaaaaaaatttgaccctgaaattctccttttggaaatttaactagagaaaataactctaattgtacgcaaatatttgtctacagaaatgttcacatagcattgtttacratgtagacaaagttattgttaaagaaattgttaaatgaattatggtgcatttatgctatggaatactatagttagtatttaatgacacgggaaaatgtgatacattttaaatgaagtgtcactcacaaataagtaatgtcatatatcctaattatttttaatacatactagtgcataggaaatgtgtgtaaggatatagtctaaaagtttaacagaggtttaaacagttatatgtgatttttattttattatttttatttccataatgttcacaatgaacatatattacttttataataaaaagtaatgttcaaaaaataaaatacttttaaaaagtgtaaaaaatgtgagttccatttcaaccaataaatcatatttattctagcatagctctaataatccaggtgtgagtccattgtatattggatttgaaatacataagacttgaagttgtcctgtgctttatcaagttcgtatcttgaattcatttaaaataaaaatccttgtagagtgcttcaatctccatggagaaagaagacctatattaaatattagattaatgcatgttgttatatagatgcactgtcaacaactttgggaaaacagtgaacattcaaggatggctagaaatgaactgcatttactaagctaatattttcctttgaagaaacattttggtcaatatttgatgccctgtagatttgagcaagaaagataaaggcatttaggtttgtgattgctcttggcaagaaagctagtgtctgtaagaaattaattacaaccaaaaaaaaaaaaaagaaagaaaaaaccaaaaccttaatgggtggagctcataggtgaatgaggacctctgcaaattgacatggatttcaggtttaactttcttgtaatggaaataaaatacaactgaacatgctctcattttttaactctgtacaaaatacctactcaaggcatctttgtattttggttccaggttctcatcagagaattaccgaaagtcaactctgagcagttaccaatggatagttttaagcaaatcatatatcagagaaataatgtaataggcattttaattagccattctcctggattccctaaacttagtccctgcattaagaaagatcattaggaaataatattcctgaacccatttcatttccctgaagaaatatcttccctgagtaatgccttaaagttttcttctgcaacttttataaacaacagatatataaaactccactttgaacaaaatggatgtgccctgtgcaaaatcccaattgaaaacttcacaggatctgttaccctatatctcttaaagagtcgcatagttgatgcctctttgaattcgtaccactgaagtatgtcactgcagatgagcttgtatgatttctattagtaggcagcatgaagtcatcatgtcttccattttgcccaacgtaccagaacacccagaattaaaacagtatattaattaatgaaattaatatgcctg

SEQ ID NO: 713061 - DNA, 560 bp, Homo sapiens
gggaaagacttgctcccatgattcaattacctcccactgggtcccttgcacaacatgggagaattcaagatgagatttgggtggggacacagcmaaaccataataccacccagctttcatgttgaattttaatccttgatgttggaggaagagcctaatgggtggtgattggatcatggggacagatttcccactttctcttctcatgatagtgagtgagtcttcataagatctggttgtttaaaagtgtgtagcacccacagttcctaacacagagaaatgacaaatgcttgagacaatggataccctaattatgctaatttgatcattacatattatattgctgtatgaaaacatcacatacaccctgtaaatatatacacctattatggactcataataattaaaaattaaatgaagaattaacttcaaaataagacactatacccaggtcattgaaatgtgaattattttagactttcaaaccaaatgaaaggtaagctctcactctatctaaacaactacagaacgtcaaaggaataaatgctgctcaatctcaa

SEQ ID NO: 713062 - DNA, 560 bp, Homo sapiens
gggaaagacttgctcccatgattcaattacctcccactgggtcccttgcacaacatgggagaattcaagatgagatttgggtggggacacagccaaaccataataccacccagctttcatgttgaattttaatccttgatgttggaggaagagcctaatgggtggtgattggatcatggggrcagatttcccactttctcttctcatgatagtgagtgagtcttcataagatctggttgtttaaaagtgtgtagcacccacagttcctaacacagagaaatgacaaatgcttgagacaatggataccctaattatgctaatttgatcattacatattatattgctgtatgaaaacatcacatacaccctgtaaatatatacacctattatggactcataataattaaaaattaaatgaagaattaacttcaaaataagacactatacccaggtcattgaaatgtgaattattttagactttcaaaccaaatgaaaggtaagctctcactctatctaaacaactacagaacgtcaaaggaataaatgctgctcaatctcaa

SEQ ID NO: 713063 - DNA, 560 bp, Homo sapiens
gggaaagacttgctcccatgattcaattacctcccactgggtcccttgcacaacatgggagaattcaagatgagatttgggtggggacacagccaaaccataataccacccagctttcatgttgaattttaatccttgatgttggaggaagagcctaatgggtggtgattggatcatggggacagatttcccactttctcttctcatgatagtgagtgagtcttcataagatctggttgtttaaaagtgtgtagcacccacagttcctaacacagagaaatgacaaatgcttgagacaatggataccctaattatgctaatttgatcattacatattatattgctgtatgaaaacatcacatacaccctgtaaatatatacacctattatggactcataataattaaaaattaaatgaagaattaacttcaaaataagacactrtacccaggtcattgaaatgtgaattattttagactttcaaaccaaatgaaaggtaagctctcactctatctaaacaactacagaacgtcaaaggaataaatgctgctcaatctcaa

SEQ ID NO: 713064 - DNA, 697 bp, Homo sapiens
cccttctctgagttgtaatggaaataaggtcatattaamatatttgatcaatctatattttactaaaacattccaaggactactaagctccttggcctagaatgcaatttatggaggaaaaaataatttgtttaaaatgttatattaaaatttagagacaaagttatttttggatgttcttctttactagaatttataattttatttgcattctgttttttttttcaagtaggttttattttgtagagtagttttaggtttacagctaaactaagcagaaggtacagagatttcccatatagcctctgcccacacacaggtgtagccttttctattatcaacatctgccaccagactggtgcattgttgcaactgatgaacctacactgtcacattatcatccagagtccataatttacattagggctcactcttggtattgtatattctgtgggtttggacaaatgtacgacatgcaccaacattgtaggatcatacagagcagtttcactgtcctaaaaatcctctgtgctttgcctattccttccttcttcctccgaaattctggcaacccttgatcttttttactgtctccatagttttaggttttccagaatgtaacattgttggaatcatacagtatgtagctttttctgattggcttcttttacttagtaacatgcatgtaagtttcctc

SEQ ID NO: 713065 - DNA, 697 bp, Homo sapiens
cccttctctgagttgtaatggaaataaggtcatattaacatatttgatcaatctatattttactaaaacattccaaggactastaagctccttggcctagaatgcaatttatggaggaaaaaataatttgtttaaaatgttatattaaaatttagagacaaagttatttttggatgttcttctttactagaatttataattttatttgcattctgttttttttttcaagtaggttttattttgtagagtagttttaggtttacagctaaactaagcagaaggtacagagatttcccatatagcctctgcccacacacaggtgtagccttttctattatcaacatctgccaccagactggtgcattgttgcaactgatgaacctacactgtcacattatcatccagagtccataatttacattagggctcactcttggtattgtatattctgtgggtttggacaaatgtacgacatgcaccaacattgtaggatcatacagagcagtttcactgtcctaaaaatcctctgtgctttgcctattccttccttcttcctccgaaattctggcaacccttgatcttttttactgtctccatagttttaggttttccagaatgtaacattgttggaatcatacagtatgtagctttttctgattggcttcttttacttagtaacatgcatgtaagtttcctc

SEQ ID NO: 713066 - DNA, 690 bp, Homo sapiens
tgcatacaaataaattaaccaagaaaaaaacattacatggtacagaggacttacacattttgtggaagagatattgagggtgtgcctctccttggttttgatcttagtataagtcaaaaaaaaaaaaaaagaaattttaaagaaacacttttcagtattacagttttatgtcctggaaatttgaactagtctgagtagttagtcagcttttagtcttcagtctgtccctaggtagttttatgatttgaaagatttgaacttctttgatgatttgaacttttttgagcattgggctttttatttgcaaaatgtgagtttttcatcttatcttctgttcattgagtctaaatgtaagtatctaaatccttatagattaagtaggatgraaaagaagccatttgcaactgaagcaatgcaatttgtgctcccatgaaaagtgtcttctctgttaaattttaatcattttactaattcctgtattatgaaactatgtctttcctgttagattttaatcattttactaattcctgaattagttatatatctaaatgtaacagttttaaatacagaattcttgcacaccagtggttgtctcatatttatcattttatccttaggtcaaagcctattgctttacagtagaaggttttgaatatatttattcctcatagataaatacactattaattg

SEQ ID NO: 713067 - DNA, 491 bp, Homo sapiens
agaatactccaagagtacattttcatattatccaatcagaagagtgggggggggggcagaagtaataaatagcaacacagaagtatatgaaagtataaaactcattgatgaaaataaatatatgtaaaaatacaaaatattgwaacattgtaatgatattgtataaataacttccaattctgttttaaaagtttaattaaaacatataaaaataaccaaaatataaaaaataaaaaatatttccatagataaatgatataaaaagatgtaacttgtgatattgataccatgaagtgtaggagggatatgaaagtggagagttactgtatgtgattaaagttaaatagttatcaacttaattttaaattgtaactataaaatgttttaagtaagctccatagtaacctcaaaaatacctataagatgctagaagaaaatgagagagaaatccgaacatatcactaaataaactcaataaaacaaagaggatg

SEQ ID NO: 713068 - DNA, 605 bp, Homo sapiens
tttttgcccacatattttttaggggttgaaaaaaatcaaataactacaaatgagtatagttgagaaaacattaattcagtacaaagaataatatttgtgatgtgaaaattgtatgaaattcaaaattgtgtccataaataaagttttattagaatgcatagccatgccatttgtttgcatattgtttatgggtttgtttgtttgtttgcattgccagtgagaagttgccataaaaattgtatatgacactcccctcactgcactgctgcagtgatagttataacctaacaatgttaataagtgacatgtgtatcactatactgtggtatttcattttatttttattactggtgcatcctcattatgtcaaaacaagaaaagaaaagtggactttgaatgtcttgcttttgaaacayaatgtactgtagattattttgttattaaattagatgataattagctttattacacaatggcattatagacatgctaaaagagcataatatatgtcaatattaccaaacacttaacatttatcacaatattcccagctcacagacaagaaacagtcagaaaaattagaaaatttaaaatcaaagatctca

SEQ ID NO: 713069 - DNA, 442 bp, Homo sapiens
  misc_feature 2, 3, 4, 5, 6, 7, 8, 9, 10, 11, 12, 13, 14, 15, 16, 17, 18,19, 20, 21, 22, 23, 24, 25, 26, 27, 28, 29, 30, 31, 32,33, 34, 35, 36, 37, 38, 39, 40, 41, 42, 43, 44, 45, 46,47, 48, 49, 50, 51, 52, 53, 54, 55, 56, 57, 58, 59, 60,61: n = A,T,C or G
  misc_feature 62, 63, 64, 65, 66, 67, 68, 69, 70, 71, 72, 73, 74, 75, 76,77, 78, 79, 80, 81, 82, 83, 84, 85, 86, 87, 88, 89, 90,91, 92, 93, 94, 95, 96, 97, 98, 99, 100, 101: n = A,T,C or G
tnnnnnnnnnnnnnnnnnnnnnnnnnnnnnnnnnnnnnnnnnnnnnnnnnnnnnnnnnnnnnnnnnnnnnnnnnnnnnnnnnnnnnnnnnnnnnnnnnnnnctatgayagtttttactctacagtctaagggctcagcaaggaacttgcaccaactaccaagtgcctttattctgattttacatttggaggttaggaaaataaccaatttactgggcttaatgcattatcatggccttactatatgactgggggtacaatgggactaagtaataaatgcagccctgttcaaaaccacccacccagtttctaggtcccattcaaatctgacaacctttcaaatcacctgataaatgcgtaatgctttaagccaagtaaattggttattttcccaaaccctgaatgtataatcaaaatagatgcactttggaccaatatagacc

SEQ ID NO: 713070 - DNA, 1426 bp, Homo sapiens
gatgaatacttaggttgattctatactttggcgattgtgggtaatgctgcaattatcattgaaatacaaatatctcttcaacctatcaattttatttcctttgaatatgaaaatcctgatgacatatttatttcttagaatacactgactttaaatgttgtatttctactcactatttctaatacatttttataagtgtgtattatatgctataccttcagattagtattcctttctcaacatagttgttcagtcagaatgaagagtcagaagagaaaatgtccgtgaaaaagacttaaaaaaacaagcaaacaaacaatatggtttgactgtgtccccacccaaatctcaacttgaattgtatctcccagaatttccatgtattgtgggagggtcccagggsgagctaactgaatcatgggggctggtctttcctgtgatagtcttgtgatagtgaataagttcaagagatctgacgggtttatcaggagtttctgcctctggttcttctatagtttctcttgccactgccaggtaagaagtgccttttacctcccgccatgattctgaggcctccccagccatgtggaactgtgagtccaattaaacatctttttattcccagcatagggtatgtctttatcagcagcgtgaaaacagactaatacaaactgaaccaaaaaagccagatttagaacagaagcccccaaaagggcaaatcttataagagttagagatgaggccgggcgcggtggctcaagcctgtaaatcccagcactttgggaggccaaggcgggcagatcacgaggtcaggagatggagaccatcctggctaacacggtgaaaccccgtctctactaaaaatacaaaacatttgctgggcgtggtggtggtcgcctatagtcccagctactcgggaggctgaggcaggagaatggcgtgaacctgggaggtggagcttgcagtgagccgagatcacgccactgcactcctgcctgggctacagagccagactccgtctcaaaaaaaaaaaaagagttagagatgcagtgactgaataaaagaaaatccaggagagtgtgcattaaaaaagaacaggtgtttcaggataaaaggtgtgatcaacaatgccaattgctcccaaaggtggtaaatatccactgtgtttagctatagtgaggttagtgctgatatttttataacaatatcaggaaagcagtatggaaataagtcagaaagcaattatctggggggctggtaaatgttgaaaatctggaaaacatgagtgaatgtttaaaaacaattattttggaatgtatagcttggtagggagaaaagggttagggtggtttttaaaagactccataatactgacagtgattactttttgatatagaaggaacatgcttaaatttcagtttagtaa

SEQ ID NO: 713071 - DNA, 577 bp, Homo sapiens
ccatcctcacttggtactgtatagtgagttctcaagagatctggttgtttaaaagtctgtagcacctccctgcctctctcttccaccttctccagccatgtgaaatgctggcccctcatttgccttccaccaygattgttaagtttcctgaggcctccctagaagcccagtagatgctgctatgcttcctgtacagcctgtggaaccataagccaacgaaacctcttttctttataaattatccagtatcaggcatttctttacagcaatacaaaaacagactgatacactaagtaacccaacttacatgacaatcaagaggcagagctgggatgcaaacccaggttcttgtacttttaatgagcacattagaacaatggcccagaagcagggaggagcacatgttggaaggaaatcaagacaggcaggtggttcaatggaagggaagtttggtctaacggagcaactaactgggaaccaggctgggaaggcagaagggccaagcagtgaccgccttgaacagtgggtgatgggatttgggcatttactcttgaaggaaggaaaagccattgaacat

SEQ ID NO: 713072 - DNA, 795 bp, Homo sapiens
tcccacctccaacagctattaaagcaatactctatttaaaaagaaatacatgcagtgtgctgtttatttgaatctttgcctgcagatgggcattaactcaccactagacagaaatgaacattcttctctctactggactgcattccttgctgaaacaatatcagacactccagtgagagatttatgtggaccctgaatgggtyaggagctccaggcacaatcctgaggcacccttagagacagatgatcacttttctttttcctttctcccttaggcaaatattaactcagctggctcttagaatttatttgtgcttaagataaattaacaagaaccaaagagcctttctcaggtgttggtaccaggctagagtgccctgaagacagcaatccatttcaattccaatatcactgcctttcaggccacatgctgggagcccacagagtttgccacggtactcgggccaagtaccttgcaggcttctggagctgggagcccctcacactttgaggctttaatatagatttctctgcctgctcacctgtatataattgtgaggggcattagagcaagaaagaataatgtgaccttcaggggctgtgaaaacaattgtgtcctctatgaatttgtaggttgagtgatgaggcaaattagggctttagctttttcttcagggtgaagcacctgagaccttgagttaccttgataatatttcatcattatttcctattactcagtaagagctctgtcctgccccttcttaattaaagaattcagaagtccttgaaataaaa

SEQ ID NO: 713073 - DNA, 795 bp, Homo sapiens
tcccacctccaacagctattaaagcaatactctatttaaaaagaaatacatgcagtgtgctgtttatttgaatctttgcctgcagatgggcattaactcaccactagacagaaatgaacattcttctctctactggactgcattccttgctgaaacaatatcagacactccagtgagagatttatgtggaccctgaatgggtcaggagctccaggcacaatcctgaggcacccttakagacagatgatcacttttctttttcctttctcccttaggcaaatattaactcagctggctcttagaatttatttgtgcttaagataaattaacaagaaccaaagagcctttctcaggtgttggtaccaggctagagtgccctgaagacagcaatccatttcaattccaatatcactgcctttcaggccacatgctgggagcccacagagtttgccacggtactcgggccaagtaccttgcaggcttctggagctgggagcccctcacactttgaggctttaatatagatttctctgcctgctcacctgtatataattgtgaggggcattagagcaagaaagaataatgtgaccttcaggggctgtgaaaacaattgtgtcctctatgaatttgtaggttgagtgatgaggcaaattagggctttagctttttcttcagggtgaagcacctgagaccttgagttaccttgataatatttcatcattatttcctattactcagtaagagctctgtcctgccccttcttaattaaagaattcagaagtccttgaaataaaa

SEQ ID NO: 713074 - DNA, 795 bp, Homo sapiens
tcccacctccaacagctattaaagcaatactctatttaaaaagaaatacatgcagtgtgctgtttatttgaatctttgcctgcagatgggcattaactcaccactagacagaaatgaacattcttctctctactggactgcattccttgctgaaacaatatcagacactccagtgagagatttatgtggaccctgaatgggtcaggagctccaggcacaatcctgaggcacccttagagacagatgatcacttttctttttcctttctcccttaggcaaatattaactcagctggctcttagaatttatttgtgcttaagataaattaacaagaaccaaagagcctttctcaggtgttkgtaccaggctagagtgccctgaagacagcaatccatttcaattccaatatcactgcctttcaggccacatgctgggagcccacagagtttgccacggtactcgggccaagtaccttgcaggcttctggagctgggagcccctcacactttgaggctttaatatagatttctctgcctgctcacctgtatataattgtgaggggcattagagcaagaaagaataatgtgaccttcaggggctgtgaaaacaattgtgtcctctatgaatttgtaggttgagtgatgaggcaaattagggctttagctttttcttcagggtgaagcacctgagaccttgagttaccttgataatatttcatcattatttcctattactcagtaagagctctgtcctgccccttcttaattaaagaattcagaagtccttgaaataaaa

SEQ ID NO: 713075 - DNA, 591 bp, Homo sapiens
tgctgggactacaggcacacaccaccacacctggctaattttttgtatttttagtagagacggggtttcacaatgttggccaggcttgtctcaaacccctgacctcaggtgatccacccacctcagcctcccaaagtgttgggattacaggygtgagccacagcacccagctagtttatcctcttaattttccttctttaatctttctcatcactcattcttaacaggaactctttaaaaaaatttaagaaacctccaaaaatatatgcaaaagaggagtcaaagaagaaaaataagcaaacagcaatgaaaaaggaaagcatagactggaagggcagataggcagaaaggcatgtatgtaattgcacttagaagggatgcagtacatgttttaatggggtgggagctgtcccagagacttcctttcacacagtctgtctccccagcttccaaatataaacatgcacatggctgctgcttcctctctttcaggggaactcaaaccaaaaacaggaatcatccttgctaattagtgctgagtggatcagggactaaccagaatcaggcaacaagaaaatgtaagtcaaaact

SEQ ID NO: 713076 - DNA, 687 bp, Homo sapiens
caacttctgcttaagggagaagaactattaaaagaaaaaactcacccctggtattcgacagaatagtacactgtttctccaggcgcgatcactgggctccacatcaagagatgcttcatgttggttgagagtacagagaggttctgaggggcaggcagaatggccacttcatctaggatcaaggcagatagcctggctgacaggtgggctcatagtgggggaatgccatagcttcaaattagtgtctaatgaagggcctcactggcggaggttgcagtaagctgagattgcaccactgcactccagcctagacaacagaatgagactctgtctcaaaaaaaaaaaagcctcacatgtttataaaccagaaacaactctaattttatcatgcttatgttaacrctaaattttgggtaccaccattataattctgactttgttgataaatgacatatcaatattaataataataatgactaatatttatctaatacttaccatgttctatctagaccatgtgctggattgttacatgactgtcttattgaattctcatgaccatactgggaggtaaagaccattagtttttccattgtacaaatgagaaaactgagtcacattatttatgactcttctgttagactggctaggatccagtgactctgccacttactatgtggctttaag

SEQ ID NO: 713077 - DNA, 619 bp, Homo sapiens
tctcacttcgtctcaataataactctggagttcaggcatatagtgaactaatgcatagtaccacacttgaaagatgaaggggccacagatgattacttacagagggctgactacataaaataataaagtaaagcagttaatatatgcaaaatgcttagaaccgtacctggcatgcaaaaaggcctgtgaggtatactgatcaccagcactgtcatcatcataatcactgctgcagcaacgaccacgtctctgcaactctaccaagtttttgggctccatactaaatgctctctaaatacaacctcatttaatttttagagtgactctctgatgtcactgtttctacacccattttactaatgagatcrtgaaggcttagaaacatcactagagataacttcaacactgaacattccccgtactgaatactatggatacttagtactagagagatgcagtttaaataatagctgtaaatgtgagggcctgtttaattgtggatttgttagattttgtttttgaatcagttattactgatgttctaatgtaactctgaagtaggagggtggaagttcactaagaagattgcccctgccccctaaatatttagagaaaacac

SEQ ID NO: 713078 - DNA, 1236 bp, Homo sapiens
gagtagaaatgatacaactttttaaagcagaatcccagctgacctatgatgggaacataatgtgagggaggaataagtgactgttttcttgggcatggggaatttggagctgtctgttactgcagcacaccatagtgtgaccccgtgtgtgattttctgtgtgaccctatgtgtgacaactatttgtgattttgacrtgtgacagaattatccaggcttcatgttcaaatgcaatggcccttgccccatctccaaatgtactgatttggaacctggactgaggctggaacacgacatttttaataagttctttaggtataccatacctaccacatttcgaggactagtgaggcacccaacgttgattaattggaggcacctaagatacatttgtgagactggaaacaaggcatagtgcaaccatgacttgccaaaaaaattggtagctttcttctctggcctgaaacaccccgtgccagggtataaatcttggcaagatttcagctactatgggccctcgtgcagggcacagaagtcctatttcaagaggttattaaagtatattctttcatctaagaaggtacatttttcaaaaattgtcaggatatgcagtattctaatattgtatcaaatggacacctgagtaacatgacctgacatgttaattcatgtcaaagttttattatgtctagaattatggtgagattcttgattaacaattcaaggtaatattggttggcaaatctttctattattggtgtaggaataagggctgattctgtctataatcaaaataactatgtttcattacactgcaatttaaagtaggtttatataattcaaaattctcagcattttatatgaaatgtacataaaaatattaattatgtgagcctcctttcctcctcacaaggatgacactatttaagttatttcaacaaaatgctaattattatgaatacattttaaattttacggaacttgaaaaatactttaatagttatctcaacaatggtacggggtaaaaggtgaagtttataaagaagcagttttctcatagtaaacctgatcacaaattggtaaaaacaaatgataaaaagtgaggtgaaatgatttgcaaaaagaagtactacactgccatcttctgttcaaataagtcatatgcttcaattgctatctgatcttaatgtgcattgtacttgggagtggaggggcggagaaaagagaaacttgtga

SEQ ID NO: 713079 - DNA, 1236 bp, Homo sapiens
gagtagaaatgatacaactttttaaagcagaatcccagctgacctatgatgggaacataatgtgagggaggaataagtgactgttttcttgggcatggggaatttggagctgtctgttactgcagcacaccatagtgtgaccccgtgtgtgattttctgtgtgaccctatgtgtgacaactatttgtgattttgacatgtgacagaattatccaggcttcatgttcaaatgcaatggcccttgccccatctccaaatgtactgatttggaacctggactgaggctggaacacgacatttttaataagttctttaggtataccatacctaccacatttcgaggactagtgaggcacccaacgttgattaattggaggcacctaagatacatttgtgagactggaaacaaggcatagtgcaaccatgacttgccaaaaaaattggtagctttcttctctggcctgaaacaccccgtgccagggtataaatcttggcaagatttcagctactatgggccctcgtgcagggcacagaagtcctatttcaagaggttattaaagtatattctttcatctaagaaggtacatttttcaaaaattgtcaggatatgcagtattctaatattgtatcaaatggacacctgagtaacatgacctgacatgttaattcatgtcaaagttttattatgtctagaattatggtgagattcttgattaacaattcaaggtaatattggttggcaaatctttctattattggtgtaggaataagggctgattctgtctataatcaaaataactatgtttcattacactgcaatttaaagtaggtttatataattcaaaattctcagcattttatatgaaatgtacataaaaatattaattatgtgagcctcctttcctcctcacaaggatgacactatttaagttatttcaacaaaatgctaattattatgaatacattttaaattttacggaacttgaaaaatactttaatagttatctcaacaatggtacggggtaaaaggtgaagtttataaagaagcagttttctcatagtaaacctgatcacaaattggtaaaaacaaatgataaaaagtgaggtgaaatgatttgcaaaaagaagtactacactgccatcttctgttcaaataagtcatatgcttcaattgctatctgatcttaatgtgcattgtacttgggagtggaggggcggagaaaagmgaaacttgtga

SEQ ID NO: 713080 - DNA, 1421 bp, Homo sapiens
attccaggtataatttttgggagaattttagaatgcacaaagtttagtttgctttttatcctcatatgttggtctttgtactcattacacaatcacatggcccatacctgcaaaatatttagtcaatattttttagatcaaaattagatctttatttccacttcagtgaaattaagttttacaagtttaagatgtggaaaactttttttaaaatggtaatacatagaaatgaaatatattcaataatattatttctttccttgaatgtgtggttatagttactactacattgtcttgataattacttaatttatagtctaaaatgatgttagtcttttagggtgtatctgtattatcctcccttaagttccatagaaattttcataaagtagataatatagttggttagatatcagtaatactgtgtatttgccagtcagttcctcagagaagcacatcatgttccagtaacattagctcattaatcctcactactcctttgggagggctgtggtccatgatggtgtcagtcttatatgtcataaagagaaactgggaatctcagagtttaatgacctcacccagatgccatgggctgagtcatatggaaaaaaggccagaaatcttcagtctttttgactgctcctctcactcataagtcattttttattaccccaaagatacacaagattgattattaatgctctcttcttgtaagaatgggactgtactaagaaagcatctatggccaggtgctgtggctcatgcctgtaatcccagcactttgggaggccaaggcgggcagatcacaagatcaggagtttgagaccagcctggacaatatggtgaaactgcatctctactaaaaatataaaaattagccaggtgtggtggcacatacctgtaatccctgctacttgggaggctgaggcagaaaaatatcttgaacccgggaggtggaggttacagtgagttgagatcatgccactacgctccagcctgggtgacagagcgagactctgtctcaaaaaaaaaaaaaaaaaagcatttaaaattggtctttgaggagcaaacgacatgtcatttagtaattaattgactagaggaaggaagtagtcacaggatttggatctaggctgacagttacattcccaatatgtcccatggtgtctcctattatcttgatgtgtcagagatctaatcactactgacacagccagtgaagtttaagaacattcattcactgagtatggttctgtatggatcatcctgcggaaaggagttagactccaggtttttcccagtttcacaatcagatagtattgtgaatgaattaccagaccccctccagagatgtactagaaataattcctatctacatgataatggtcagagrgacataatttgaaaaaaaaaaaaaa

SEQ ID NO: 713081 - DNA, 1032 bp, Homo sapiens
taaaagtgaaaacatatttgcatgacaataaaattttaaacactagttttcagtctatattattcagtggatgtgtttaattttctttacttgatgttagctagaaaaggtcggttttttgtttgtttgactttttattcagcctttcttatttgtgatgtggatgagaaggttagaggtggtctttaaaatgatgggatgtctgctaagacgtcatttatgatctaatggctctttgagttagttaacttcagttagggttgtcagcggggaaatttgattgggatattatgtttgatttctccttgtagttcacctgaggacagaatcccaatgccttctttgtcagacactaaagcaggaagaatgtgagtcgtttcctccgggttccctgatctttcactctgatgggtctctatctcaaacttgcttttgtttccttcaacgagaaggaaaataaagctactctaacctgaagttactaagtccccaaattatacacgttcttcactacctgtaggcttcttagttttctttcaagttggttcttcccccttccttgcctcttttcccattttgagttcattttaatggttttcttatgaataaaactaaccttgctcaattcttcatttkttttttgcattttagctttcatttacaattgagtgatgcatttttgagtgagctctgaaagatttgtgcaagatttgcctcccagttttacacagcagattgtttaagtgtaggagagcttttcatgcatattattttgtagtcatcattttgcttgtatcctaaaagacgtttcagcacagtggttaagaactccgaggacagtattcaaatcctgactcagggcacttgcttgctgcacaaagttacttactttctccattcctaaatattcacatctgtaaagtgaggataataacagtacctatctcatttacctattcggaggagtacctaaggtaatagttacaaaaggcttagagcaatgcctggccaagtgtaagtatttattactac

SEQ ID NO: 713082 - DNA, 1087 bp, Homo sapiens
tgctgataatgatggttttcagcttcaaccatgtccctacaaaggacatgaactcatcatttttatggcttcatagtattccatggtgtatatgtgccacattttcttaatccagtctatcattgttggttccaggacatttgggttggttgcaggtctttactattgtgaatagtgacacaataaacatatgtgtgcatgtgtcttcatagcagcatgatttataaycctttgggtatatacccagtaatgggatggctgggtcaaatggtatttctagttctagatccctgaggaataacactgtcttccacaatggttgaaccagtttacagtcccaccaacagtttgaaagtgttcctatttctccacatcctctccagcacctttttttggcatttttagtagagacggggtttcaccatgttagccaggatggtctcgatctcctgaccttgtgatccgcccacctcggcctcccaaagtgcaaacattcttgaaattctgcttagctagactgttatgtgcaagttgattctgatccctttgcagagaggccattcaggatcaagtccagtcttgttgaaacaaagttaagtgatttttggttttggtgttgatgaagtacccatgtgaaatatattggcaagataaaggagtgtaattacctcatttaccgaaaaaaatatttttttaatttacttttaaaaatattactgttgtccaaactcagcaatgctaatgtttgtcaccagataaacacagtaaatgccactggttggatttatttttaaatggagtcatttctttatctgaattgaggtagacttcatgttagctgctgtgttatagtaattaaagttcacatttatctgtgagtgttaaaattttcactttttatcgtgccatcaaactcactaaatagtttcagagtcaaaggataagacataaaaaattcctgaaaaattaatgccatttatatatcttctaaaaccttaaatttattgatgtataagtatgcgtccctgttttccaatattcattttgtatttagttaaaagctgttctgaagatttatggcacgcga

SEQ ID NO: 713083 - DNA, 1087 bp, Homo sapiens
tgctgataatgatggttttcagcttcaaccatgtccctacaaaggacatgaactcatcatttttatggcttcatagtattccatggtgtatatgtgccacattttcttaatccagtctatcattgttggttccaggacatttgggttggttgcaggtctttactattgtgaatagtgacacaataaacatatgtgtgcatgtgtcttcatagcagcatgatttataatcctttgggtatatacccagtaatgggatggctgggtcaaatggtatttctagttctagatccctgaggaatarcactgtcttccacaatggttgaaccagtttacagtcccaccaacagtttgaaagtgttcctatttctccacatcctctccagcacctttttttggcatttttagtagagacggggtttcaccatgttagccaggatggtctcgatctcctgaccttgtgatccgcccacctcggcctcccaaagtgcaaacattcttgaaattctgcttagctagactgttatgtgcaagttgattctgatccctttgcagagaggccattcaggatcaagtccagtcttgttgaaacaaagttaagtgatttttggttttggtgttgatgaagtacccatgtgaaatatattggcaagataaaggagtgtaattacctcatttaccgaaaaaaatatttttttaatttacttttaaaaatattactgttgtccaaactcagcaatgctaatgtttgtcaccagataaacacagtaaatgccactggttggatttatttttaaatggagtcatttctttatctgaattgaggtagacttcatgttagctgctgtgttatagtaattaaagttcacatttatctgtgagtgttaaaattttcactttttatcgtgccatcaaactcactaaatagtttcagagtcaaaggataagacataaaaaattcctgaaaaattaatgccatttatatatcttctaaaaccttaaatttattgatgtataagtatgcgtccctgttttccaatattcattttgtatttagttaaaagctgttctgaagatttatggcacgcga

SEQ ID NO: 713084 - DNA, 1087 bp, Homo sapiens
tgctgataatgatggttttcagcttcaaccatgtccctacaaaggacatgaactcatcatttttatggcttcatagtattccatggtgtatatgtgccacattttcttaatccagtctatcattgttggttccaggacatttgggttggttgcaggtctttactattgtgaatagtgacacaataaacatatgtgtgcatgtgtcttcatagcagcatgatttataatcctttgggtatatacccagtaatgggatggctgggtcaaatggtatttctagttctagatccctgaggaataacactgtcttccacaatggttgaaccagtttacagtcccaccaacagtttgaaagtgttcctatttctccacatcctctccagcacctttttttggyatttttagtagagacggggtttcaccatgttagccaggatggtctcgatctcctgaccttgtgatccgcccacctcggcctcccaaagtgcaaacattcttgaaattctgcttagctagactgttatgtgcaagttgattctgatccctttgcagagaggccattcaggatcaagtccagtcttgttgaaacaaagttaagtgatttttggttttggtgttgatgaagtacccatgtgaaatatattggcaagataaaggagtgtaattacctcatttaccgaaaaaaatatttttttaatttacttttaaaaatattactgttgtccaaactcagcaatgctaatgtttgtcaccagataaacacagtaaatgccactggttggatttatttttaaatggagtcatttctttatctgaattgaggtagacttcatgttagctgctgtgttatagtaattaaagttcacatttatctgtgagtgttaaaattttcactttttatcgtgccatcaaactcactaaatagtttcagagtcaaaggataagacataaaaaattcctgaaaaattaatgccatttatatatcttctaaaaccttaaatttattgatgtataagtatgcgtccctgttttccaatattcattttgtatttagttaaaagctgttctgaagatttatggcacgcga

SEQ ID NO: 713085 - DNA, 1087 bp, Homo sapiens
tgctgataatgatggttttcagcttcaaccatgtccctacaaaggacatgaactcatcatttttatggcttcatagtattccatggtgtatatgtgccacattttcttaatccagtctatcattgttggttccaggacatttgggttggttgcaggtctttactattgtgaatagtgacacaataaacatatgtgtgcatgtgtcttcatagcagcatgatttataatcctttgggtatatacccagtaatgggatggctgggtcaaatggtatttctagttctagatccctgaggaataacactgtcttccacaatggttgaaccagtttacagtcccaccaacagtttgaaagtgttcctatttctccacatcctctccagcacctttttttggcatttttagtagagacggggtttcaccatgttagccaggatggtctcgatctcctgaccttgtgatccgcccacctcggcctcccaaagtgcaaacattcttgaaattctgcttagctagactgttatgtgcaagttgattctgatccctttgcagagaggccattcaggatcaagtccagtcttgytgaaacaaagttaagtgatttttggttttggtgttgatgaagtacccatgtgaaatatattggcaagataaaggagtgtaattacctcatttaccgaaaaaaatatttttttaatttacttttaaaaatattactgttgtccaaactcagcaatgctaatgtttgtcaccagataaacacagtaaatgccactggttggatttatttttaaatggagtcatttctttatctgaattgaggtagacttcatgttagctgctgtgttatagtaattaaagttcacatttatctgtgagtgttaaaattttcactttttatcgtgccatcaaactcactaaatagtttcagagtcaaaggataagacataaaaaattcctgaaaaattaatgccatttatatatcttctaaaaccttaaatttattgatgtataagtatgcgtccctgttttccaatattcattttgtatttagttaaaagctgttctgaagatttatggcacgcga

SEQ ID NO: 713086 - DNA, 1087 bp, Homo sapiens
tgctgataatgatggttttcagcttcaaccatgtccctacaaaggacatgaactcatcatttttatggcttcatagtattccatggtgtatatgtgccacattttcttaatccagtctatcattgttggttccaggacatttgggttggttgcaggtctttactattgtgaatagtgacacaataaacatatgtgtgcatgtgtcttcatagcagcatgatttataatcctttgggtatatacccagtaatgggatggctgggtcaaatggtatttctagttctagatccctgaggaataacactgtcttccacaatggttgaaccagtttacagtcccaccaacagtttgaaagtgttcctatttctccacatcctctccagcacctttttttggcatttttagtagagacggggtttcaccatgttagccaggatggtctcgatctcctgaccttgtgatccgcccacctcggcctcccaaagtgcaaacattcttgaaattctgcttagctagactgttatgtgcaagttgattctgatccctttgcagagaggccattcaggatcaagtccagtcttgttgaaacaaagttaagtgatttttggttttggtgttgatgaagtacccatgtgaaatatattggcaagataaaggagtgtaattacctcatttacygaaaaaaatatttttttaatttacttttaaaaatattactgttgtccaaactcagcaatgctaatgtttgtcaccagataaacacagtaaatgccactggttggatttatttttaaatggagtcatttctttatctgaattgaggtagacttcatgttagctgctgtgttatagtaattaaagttcacatttatctgtgagtgttaaaattttcactttttatcgtgccatcaaactcactaaatagtttcagagtcaaaggataagacataaaaaattcctgaaaaattaatgccatttatatatcttctaaaaccttaaatttattgatgtataagtatgcgtccctgttttccaatattcattttgtatttagttaaaagctgttctgaagatttatggcacgcga

SEQ ID NO: 713087 - DNA, 1087 bp, Homo sapiens
tgctgataatgatggttttcagcttcaaccatgtccctacaaaggacatgaactcatcatttttatggcttcatagtattccatggtgtatatgtgccacattttcttaatccagtctatcattgttggttccaggacatttgggttggttgcaggtctttactattgtgaatagtgacacaataaacatatgtgtgcatgtgtcttcatagcagcatgatttataatcctttgggtatatacccagtaatgggatggctgggtcaaatggtatttctagttctagatccctgaggaataacactgtcttccacaatggttgaaccagtttacagtcccaccaacagtttgaaagtgttcctatttctccacatcctctccagcacctttttttggcatttttagtagagacggggtttcaccatgttagccaggatggtctcgatctcctgaccttgtgatccgcccacctcggcctcccaaagtgcaaacattcttgaaattctgcttagctagactgttatgtgcaagttgattctgatccctttgcagagaggccattcaggatcaagtccagtcttgttgaaacaaagttaagtgatttttggttttggtgttgatgaagtacccatgtgaaatatattggcaagataaaggagtgtaattacctcatttaccgaaaaaaatatttttttaatttacttttaaaaatattactgttgtccaaactcagcaatgctaatgtttgtcaccagataaacacagtaaatgccactggttggatttatttttaaatggagtcatttctttatctgaattgaggtagacttcatgttagctgctgtgttatagtaattaaagttcacatttatctgtgagtgttaaaattttcactttttatcgtgccatcaaactcactaaatagtttcagagtcaaaggataagacataaaaaattcctgaaaaattaatgccatttatatatcttctaaaaccttaaatttattgatgtataartatgcgtccctgttttccaatattcattttgtatttagttaaaagctgttctgaagatttatggcacgcga

SEQ ID NO: 713088 - DNA, 1122 bp, Homo sapiens
ccccaaagtagaaaatctggccctttttctcaagaagagtttagtcttcctgggaaaatgaaatatacaagcaatgtacatgaagtggttaaatagtgaagcaaggcaaatgaaatcaatggtgcagatcagaaaactgtagagaggcagagaactgaaacgggaacaaaagygtcaagggggaaaatagcagccagtactggtagctagggagatcgtgatgtgttgaccatgtgacttgtgccaggcagcatcagtgtctaaattcagaagagtaacagagtgtcacttcatcataggtcttgaatgcctaaaggataatccagaatagtgccatgagtataggtatggaaattctgggaggtccagatgagcagatattttgttgctaaatattaacttgaaagataattgaaaattcacatggatctggaaagaaaagtccatagttgatgttcagaaaacctaaagaattggcttcaatgaactattagtcaccctaaactggtttgaaaatataaatactgtgtgacacatttaataaatggtgtataaatattttatgtcctgttccttatcaaactgacattctttaatctctttcagatcatccatttgctggtgatgttgtcttccccagggaaatcagttttaccaaccttcaaccaaatcatactgctgtgtaccagtgtgaagcctcaaatgtccatggaactatccttgccaatgccaatattgatgttgtgggtgagtgtgcctgggagctgacttaacatgctattttcctaaggaaagtggtcaaggtcatgttcagaagtgtattaactcttgacacataatatatggagggaaaaatcaaactacttttcaccatacatttgagttttagacttcacactgaaattgtactttcttttttttttttattatactttaagttttagggtacatgtgcacaatgtgcaggttagttacatatgtatacatgtgccatgctggtgcgctgcacccactaactcgtcatctagcattaggtatatctcccgatgctatcccgccccccctccccccaccccacaacagtccccagagtgtgatgttccccttcctgtgtccatgtga

SEQ ID NO: 713089 - DNA, 1061 bp, Homo sapiens
ttcattaacaccctctctgctgtctcctctcaaacttctcactccataaccgctgcccttatatccgggttcaggtagcaccaaggagcagctgctcatctcaaatgaagacgctggaggactcagaccccaaagcagacatgagaacgtggggggatgccctggctgagaccctcttagacacgacaagcctttaggtaaatcgattttgtattttttatcccataattcatatgagagtcaaaccaaggagtggggagagtacagagttgtggagcgtgggtgtgggtctcggtgcaccagagtggaacactgtgaggagtttttacccactgaacctctaaaccacttagctagcccaacacatgaattttagcatttgcgtattaaacccaattatgaaatgcaaaactcccatgcaaattagcagatgttgttatttttgagtggggactttggttattttcatatcagaatggcaaccttgccacgaggctaggagtagtgcacctggcttcagcagggtggccagagaacagctcctggtaactccaagcgkgtcagtactttctccttcggcaggtggttggggctgataatccccttgggatgtctgatgactcgttctcagaatcctggggtgtgcgggtgtcttgagttaaaatcagaattatctgtggctctgggcttcttcagtgccgtcactgaaatctctcaggggtgatgtccatgttaagataaccttctgcctcccccatgcaggctggtttctccaaaaatccagcccactaatcctagcggaagcttagctttaaagcaaggtcttttatttcttcctgattggctccctgttatatctcatccactgatctatcctacatcccttaccctctcaaggtcccttgcctggcttcaccctttctcccttctcccttgcagctgatcactttgagtcatagtttaatgaggacatgaactgcatgatagaaacactgacacatccctttcctccattacaaatctgcttatttctttacgtttcttattctttgtgaatccga

SEQ ID NO: 713090 - DNA, 1061 bp, Homo sapiens
ttcattaacaccctctctgctgtctcctctcaaacttctcactccataaccgctgcccttatatccgggttcaggtagcaccaaggagcagctgctcatctcaaatgaagacgctggaggactcagaccccaaagcagacatgagaacgtggggggatgccctggctgagaccctcttagacacgacaagcctttaggtaaatcgattttgtattttttatcccataattcatatgagagtcaaaccaaggagtggggagagtacagagttgtggagcgtgggtgtgggtctcggtgcaccagagtggaacactgtgaggagtttttacccactgaacctctaaaccacttagctagcccaacacatgaattttagcatttgcgtattaaacccaattatgaaatgcaaaactcccatgcaaattagcagatgttgttatttttgagtggggactttggttattttcatatcagaatggcaaccttgccacgaggctaggagtagtgcacctggcttcagcagggtggccagagaacagctcctggtaactccaagcgtgtcagtactttctccttcggcaggtggttggggctgataatccccttgggatgtctgatgactcgttctcagaatcctggggtgtgcgggtgtcttgagttaaaatcagaattatctgtggctctgggcttcttcagtgccgtcactgaaatctctcaggggtgatgtccatgttaagataaccttctgcctcccccatgcaggctggtttctccaaaaatccagcccactaatcctagcggaagcttagctttaaagcaaggtcttttatttcttcctgattggctccctgttatatctcatccactgatctatcctacatcccttaccctctcaaggtcccttgcctggcttcaccctttctcccytctcccttgcagctgatcactttgagtcatagtttaatgaggacatgaactgcatgatagaaacactgacacatccctttcctccattacaaatctgcttatttctttacgtttcttattctttgtgaatccga

SEQ ID NO: 713091 - DNA, 1620 bp, Homo sapiens
catccatccatccatccgcccatccatccacccagccacaccccaaccatgagttttcttcccaatatgctaggaagctttcttcaatgctcctggaacatatcagtttatggtggaaagagcagtgtccagaggtcaaaatatctcattctaatcctggctccaccacttaggagttgtacgactttagaaactcctccaggcctccatttcatcacctggaagtgaggacgttaggtgtcccacctcatcactgagctagcaggacctggtgagatagtgggtatgaaggtgctttgcaaactgtcaaatactgcactcatgtatggacttagtacatctgcctcctctcatcaactcacctccctggatcaccctcctttctctcttccttgctctgggcctgcccccatgaccctgtggagcctgaaacttcctctccacatcctgctcactcttcagccttcaagactcttgcccttgctcctcccttgccctgaaggctctccccaccctatctgcctggcaagatatctgcctgcccaagatgagttggtactcatctttcaagaccgtgccctgccaaggctttcttgatcacattttagtaaagattttagtaaagcaacaatgtgtataatgaatttagattttgaataacattcagctgttgtttaattcttgggctctcaaggccccaacccctatctccctgatggaattgccaggaaacgctaataagtggcttgtcttcgctgttgttactttcgttaaattaggaggtcataaatcacttacacgccaagaaaggttgaaccattatccttcaactccaagcttttaaagtttctcctcctaaaaccaaagccaataaaaggcaacaggctcattgtgatttttgttttaaaaaccattcattggccgggtggctcatgcctgtaatcccagcactttggaaggctgaggtgggtggaacacctgaggtcgggggttcaagaccagcctgatcaacatggagaaaccccgtctctactaaaaatacaaaattagctgggtgtggtggtggcacatgcctgtaatcccagctactcgggaggctgaggcaggagaattgcttgaacccaggaggcggaggttgcggtgagctgaggtcacgccactgcactccagcctgggcaaccagggcaacaagaacaaaactccgtctcaaacaacaacaaaacaacaacaaaaccattcatctaytgatctgaggaatccagagtaaatttcctggttatattggtttggatagctgtctggacacagaagatgaaatcaacttgacaggtaatagcaaaagtcattcattttggtgaattctgcaaatccagactagtagcatcccaaggattctaataaaaggatggtcattgctgaagtaccattcagtgccccagtactacaggcacatgtggccttacagtcatggggaataagctatacaatatatctcattcatctatgcatccctcagaccttcttctagtatctcatacattaatagaagcttaacactcaaagttttaatttttattttttgccgttgttgaactgaactgttagactgaacaccaggta

SEQ ID NO: 713092 - DNA, 1226 bp, Homo sapiens
ataaaaaattatgtatgttagtgtgcttaacattttgttttctcacatagatcatctatttagatatcaaacaaacttgtgtggtagaagttatcctaattaatattttatagatgaaggaactgggataaagaaaggtcagcaaattatccaggataacataaccaagcagtggcagaatggatactattaactgaataatcttatttctttaatctatgacccattctctttcaataaacagttattataataattattataattcatgtttatagaattatatactaaatactacaccaccatgtacaatacatattagaatcatatactagatttactatccttttcagctttatccaaatatttgatcaacttgccactaatctcctcatcttatatattatcaaaatgttgaactagttagtacagggttaatgagaactgttgaactgacatcctttaaaatatctccttccaaaggggcatgtgcccattaacttttggcctttgtaataaccaccaaagaagttcgcttcttcaatgtcctattctctagttccatgtctccattttgcctacaggaatattttgtgaaactttgttaaatatctattgaaatccagatgcactatgttataagaatttttctgacctttgagaatrgcaagctaacaaataagataaaataaaataaatcaaacacgtctgttcttactgagcctaagctagccaccttcttataattaaatgttacatttttagccttcaaatttttttgtttgttgttgttgttgtgtttttgagacacagtcttgctctgtcagccaggcttggagtacagtggcgtgatctcagctcaatgcaatctccacctcctggattcaagtgattctcctgcctcggcctcccaaatagctgggactataggtgtgcgccaccacagccagctaatttttgtatttttagtaaagacgaggtttcaccgtgttggacaggatggtctcgatctcctgacctcgtgatccacccgccttggcctcccaaagtgctgggattacaggtctgagccaccacacccggcccaaaaatatttttaatggccatatctagaataattcctggtattaacttaaacttcatcagtttataatgtgcaaatccaccttcttttttctgaacaatctaaatctaatttgtttgtctctagtaagccagttcctctc

SEQ ID NO: 713093 - DNA, 1226 bp, Homo sapiens
ataaaaaattatgtatgttagtgtgcttaacattttgttttctcacatagatcatctatttagatatcaaacaaacttgtgtggtagaagttatcctaattaatattttatagatgaaggaactgggataaagaaaggtcagcaaattatccaggataacataaccaagcagtggcagaatggatactattaactgaataatcttatttctttaatctatgacccattctctttcaataaacagttattataataattattataattcatgtttatagaattatatactaaatactacaccaccatgtacaatacatattagaatcatatactagatttactatccttttcagctttatccaaatatttgatcaacttgccactaatctcctcatcttatatattatcaaaatgttgaactagttagtacagggttaatgagaactgttgaactgacatcctttaaaatatctccttccaaaggggcatgtgcccattaacttttggcctttgtaataaccaccaaagaagttcgcttcttcaatgtcctattctctagttccatgtctccattttgcctacaggaatattttgtgaaactttgttaaatatctattgaaatccagatgcactatgttataagaatttttctgacctttgagaatggcaagctaacaaataagataaaataaaataaatcaaacacgtctgttcttactgagcctaagctagccaccttcttataattaaatgttacatttttagccttcaaatttttttgtttgttgttgttgttgtgtttttgagacacagtcttgctctgtcagccaggcttggagtacagtggcgtgatctcagctcaatgcaatctccacctcctggattcaagtgattctcctgcctcggcctcccaaatagctgggactataggtgtgcgccaccacagccagctaatttttgyatttttagtaaagacgaggtttcaccgtgttggacaggatggtctcgatctcctgacctcgtgatccacccgccttggcctcccaaagtgctgggattacaggtctgagccaccacacccggcccaaaaatatttttaatggccatatctagaataattcctggtattaacttaaacttcatcagtttataatgtgcaaatccaccttcttttttctgaacaatctaaatctaatttgtttgtctctagtaagccagttcctctc

SEQ ID NO: 713094 - DNA, 1226 bp, Homo sapiens
ataaaaaattatgtatgttagtgtgcttaacattttgttttctcacatagatcatctatttagatatcaaacaaacttgtgtggtagaagttatcctaattaatattttatagatgaaggaactgggataaagaaaggtcagcaaattatccaggataacataaccaagcagtggcagaatggatactattaactgaataatcttatttctttaatctatgacccattctctttcaataaacagttattataataattattataattcatgtttatagaattatatactaaatactacaccaccatgtacaatacatattagaatcatatactagatttactatccttttcagctttatccaaatatttgatcaacttgccactaatctcctcatcttatatattatcaaaatgttgaactagttagtacagggttaatgagaactgttgaactgacatcctttaaaatatctccttccaaaggggcatgtgcccattaacttttggcctttgtaataaccaccaaagaagttcgcttcttcaatgtcctattctctagttccatgtctccattttgcctacaggaatattttgtgaaactttgttaaatatctattgaaatccagatgcactatgttataagaatttttctgacctttgagaatggcaagctaacaaataagataaaataaaataaatcaaacacgtctgttcttactgagcctaagctagccaccttcttataattaaatgttacatttttagccttcaaatttttttgtttgttgttgttgttgtgtttttgagacacagtcttgctctgtcagccaggcttggagtacagtggcgtgatctcagctcaatgcaatctccacctcctggattcaagtgattctcctgcctcggcctcccaaatagctgggactataggtgtgcgccaccacagccagctaatttttgtatttttagtaaagacgaggtttcaccgtgttggmcaggatggtctcgatctcctgacctcgtgatccacccgccttggcctcccaaagtgctgggattacaggtctgagccaccacacccggcccaaaaatatttttaatggccatatctagaataattcctggtattaacttaaacttcatcagtttataatgtgcaaatccaccttcttttttctgaacaatctaaatctaatttgtttgtctctagtaagccagttcctctc

SEQ ID NO: 713095 - DNA, 1226 bp, Homo sapiens
ataaaaaattatgtatgttagtgtgcttaacattttgttttctcacatagatcatctatttagatatcaaacaaacttgtgtggtagaagttatcctaattaatattttatagatgaaggaactgggataaagaaaggtcagcaaattatccaggataacataaccaagcagtggcagaatggatactattaactgaataatcttatttctttaatctatgacccattctctttcaataaacagttattataataattattataattcatgtttatagaattatatactaaatactacaccaccatgtacaatacatattagaatcatatactagatttactatccttttcagctttatccaaatatttgatcaacttgccactaatctcctcatcttatatattatcaaaatgttgaactagttagtacagggttaatgagaactgttgaactgacatcctttaaaatatctccttccaaaggggcatgtgcccattaacttttggcctttgtaataaccaccaaagaagttcgcttcttcaatgtcctattctctagttccatgtctccattttgcctacaggaatattttgtgaaactttgttaaatatctattgaaatccagatgcactatgttataagaatttttctgacctttgagaatggcaagctaacaaataagataaaataaaataaatcaaacacgtctgttcttactgagcctaagctagccaccttcttataattaaatgttacatttttagccttcaaatttttttgtttgttgttgttgttgtgtttttgagacacagtcttgctctgtcagccaggcttggagtacagtggcgtgatctcagctcaatgcaatctccacctcctggattcaagtgattctcctgcctcggcctcccaaatagctgggactataggtgtgcgccaccacagccagctaatttttgtatttttagtaaagacgaggtttcaccgtgttggacaggatggtctcgatctcctgacctcgtgatccacccgccttggcctcccaaagtgctgggattacaggtctgagccaccacacccrgcccaaaaatatttttaatggccatatctagaataattcctggtattaacttaaacttcatcagtttataatgtgcaaatccaccttcttttttctgaacaatctaaatctaatttgtttgtctctagtaagccagttcctctc

SEQ ID NO: 713096 - DNA, 1080 bp, Homo sapiens
catggtgtgtccctgagcaagttatggaacccttggtgtctcagtttccttatctgccatagacgcctgataatagttcttgcttcatggaatgagatgatccatttgaaacctttggatcaatgctaagcagaaaataaatataacctgccattttcattattgatattctcctgtgaaactgttgtgacttcagaggactgatcccaaagcctgccaggaagaccctgctgagtgtcccgctctcctgaatagcccatgtcctcactatcacaggttctattcgtgtcgcaacaaggaaccacacatccaaggcagccaagccaggagggccctgggtgtgcgggagtcagctctgtggagatgccgtccatgcccggtctgacgggaaccccagctctgcgtttctccttttcatgaagccagtgagccaaaaccaccctcctgggctggcccagtttaagagcctgggctccagggacgcagggaggcccctcagcccaattataaatcaatctagcagcactcactgaggccattgccataaatggctctaaaagctcagcctctttcggcccaataggctcagggctccaggattaatgagcatcagctgccggcaggctggtggggacagatgccgacctaatgagcacagtggcccagccctcgccagctcgaggtggacagggctgatgagcaggtgtcattgtcatgatgcccctttgccaagtgtcactttgaaaggsagggctgttgtcatcaagtggcatcttattaccccacctcaggacacccacaggagattctaaaggctgtccacaaagatggcctttgtggctgccacctccactcctcagctggccctggcaccaggtttttctcaaggcctctcaaccacagggctggataagggttttagaatcctgggcatcccctcccatcccatgccatctgattggtgctgcattaaagtacagaggtccctgctagaatttccctcagtcacgtctctattacacccacgggcttcaagtttgcctggagtatttacacacagttctgcagattcaaatggat

SEQ ID NO: 713097 - DNA, 485 bp, Homo sapiens
ccttcctaccagggctcctgagagctggatttgggcatttctgggatagcaatggcttctcaccaaatttgaaggtttaggaaacaaacttaagggctcatctcattgaagtctatgtctggttcatttaactgctccttcaataagctgagagagctcagcagtgagtccataaaaagcactagtgaataatggtcccttgagtacactgcagaaggtgtcccttcaggggtttccatgccctgctcccccggtctttcctacggcccgcgtgtgtgtgtgtgtgtgtgtgtgtgtgtgtgtgygtgcgcgcgcatgcatggggcaagagtgtgatggtgagtggggttaggctgaaagtcagaaaactggattctatgctcacctctgtcttcagcaagaccctccccctttgggggctcagtttcctcatctctaaaataaaagttgtacagtttcatttctggaatgacttgtggttcaat

SEQ ID NO: 713098 - DNA, 1525 bp, Homo sapiens
ttttgaaattattaaggaagattgggatagtttgttattattgccatttgttcactgccctgtctgtaagaatatatttttctactaaaatgatataaagcttcaccatttcacttatttttcaccagtgaaatcagcagtaatgcaagccacatccaagcagaagcctttagagtcattatatggttgttttttgttttttgtttttctttttttttctcttccatgggaacatcatgtccaagatactgacagctccttagactgagtcaaacaatgggaaaacttgtgaaacagaatttcagccatccagaagccaacagtacgagaattacagatgaccacaaagatgatgatgtaacttaaggaaaaaagaaaacttgggtgtgtgaagccactaatgtgctaggatcatttttatcacaacccaacctaacaaaaattgattaataatatttatgagaggtattgcatttaataaaatatccatagaagagccatttcaatttttccaaaagtgaaaaagaatattgcctaataatggtgaattctaatgagtgtaatagatatcttttacttgtgaattactaatagataatagtatttatggattactaacatataatagcattatgtattttgaacagcctgcttatattttaatcattttccatgttagaatcctgcttctctgggatagaattcagaacgtatcctttcagtgcagatgcagacatgtgacctatgtcctgcaaatcagacacaaccatataagacttgaatttgaaatggagcaatgatctacagaagcttcattcagggtacctgatctgtatcaggcttggaacagaaacacctggtgcttcagaaatggtagttagttggatgctctgcattctgttctgagtgtaaggagctaggcagccgtgtccctgaggagatcctcccatgtggtcctacactgtgcctggtttcaaagcttcagagtccatctctctgtaccttccaaatggactttaatgaattcgttttaaaaaaaacaaattaaacaagccagagagaactctgttgtttaaaagtaggtatcaaaacaaacatatatgtgaagagaaaaatactgtatttggctacaatttgtacacaagtggagaatgattcatatttctaatgtaaatcaaagtctcctggaacataacactctccaccaccatcaaaggtacaaattcaaggagaggaacttcatcacaaaattggatagccttaaatttcttgactatttctagaaagsgttgctacacatacttatagtttcttggttcccacatctcttttcttaacttgcattcaatctctccaatcttaagccctaatcaccacttccaagcactaatgcaatgattttccctgcctctaattttttaacaattggatccaatattcacattgctgccaggacagatccttttcctacacaactcaagaactacccatggactataggaaaaatctaccacaatatattccc

SEQ ID NO: 713099 - DNA, 1219 bp, Homo sapiens
agtttatggggatgtctatcatgttagggcaggaactgaaggcagtgcaagggagaggacagacaaggagctggagaagtatatatgtagatgcatcatgtgttgttctggaaggcaaaagaaagtaaagtaaatatgagatagttaactgtcaaatatcgagataaattaaaaataaatctaaggaaaagattctgaaattctctgggagatcatgggtgaccaatgatagtggttttaattgggaagtgtaggaaggggtttgcagatgattgtggtgtctgatgaagaaaacgagcccattattatattgaacacatactacgcagcaagcatatttattttgttatctatcaatattaaaaaatatatgtcagttgagttggcaaatagaggggaagaataagctggtctaggcaatctcccactccacttacttcacctattgttctcctgcaagtgaggagagtggggaatgaatgctttgtgctaattccactagtcagccctttactctctggagtggtagatacagaagttcaatcctatcctatatttttcttctcctagagagcctgtcagtaacaattatttgttctctccaatattagaaaaatattattcgctcattctctccaagaacagttaatgtagttattgaatccaataatcttcaaaccaaatggcttcttctatcatcacattctacaatactgatcctcttctcctttagtttttcatgagaagacactgacctcattcttaacctttgtctccccggttccctttttatttatttctttgtcctctcttcttgcctcttcactatggatattatccaagatctgattctcagaactgaaactcaattctactcttggcaggcttgactttccagtatagatcaaycaatggggaaggggaagaagcttgatggaatcttgagggttaaccatgaatcagacatctgatccttgtgagggaaaatggatagttcaaattggagtgtccagtatgcatgatgcatttttcctcaattccaatgagtatttatactcaaaaggttcataggtaggatgtcagcaagatggtaaaataggaatttttttagccctcacgccttccatagaaacactgattttaataactacccacagacaacagtacttttataggagatcaggagtcagaagaaaggacccaacatcccattggagca

SEQ ID NO: 713100 - DNA, 1219 bp, Homo sapiens
agtttatggggatgtctatcatgttagggcaggaactgaaggcagtgcaagggagaggacagacaaggagctggagaagtatatatgtagatgcatcatgtgttgttctggaaggcaaaagaaagtaaagtaaatatgagatagttaactgtcaaatatcgagataaattaaaaataaatctaaggaaaagattctgaaattctctgggagatcatgggtgaccaatgatagtggttttaattgggaagtgtaggaaggggtttgcagatgattgtggtgtctgatgaagaaaacgagcccattattatattgaacacatactacgcagcaagcatatttattttgttatctatcaatattaaaaaatatatgtcagttgagttggcaaatagaggggaagaataagctggtctaggcaatctcccactccacttacttcacctattgttctcctgcaagtgaggagagtggggaatgaatgctttgtgctaattccactagtcagccctttactctctggagtggtagatacagaagttcaatcctatcctatatttttcttctcctagagagcctgtcagtaacaattatttgttctctccaatattagaaaaatattattcgctcattctctccaagaacagttaatgtagttattgaatccaataatcttcaaaccaaatggcttcttctatcatcacattctacaatactgatcctcttctcctttagtttttcatgagaagacactgacctcattcttaacctttgtctccccggttccctttttatttatttctttgtcctctcttcttgcctcttcactatggatattatccaagatctgattctcagaactgaaactcaattctactcttggcaggcttgactttccagtatagatcaaccaatggggaaggggargaagcttgatggaatcttgagggttaaccatgaatcagacatctgatccttgtgagggaaaatggatagttcaaattggagtgtccagtatgcatgatgcatttttcctcaattccaatgagtatttatactcaaaaggttcataggtaggatgtcagcaagatggtaaaataggaatttttttagccctcacgccttccatagaaacactgattttaataactacccacagacaacagtacttttataggagatcaggagtcagaagaaaggacccaacatcccattggagca

SEQ ID NO: 713101 - DNA, 583 bp, Homo sapiens
gctagagcacagtggctattcacaagcatgatcataatgcactgcagcctcaaactcctgggctcaagtaactctcccaccttagccttccaagtagctacaggtgtgtaccaccaagcctggtcccaagaatattttttgagaccagtgggttacataaatcttttgtttataaccagagaaagaggaagattttggtacagggccaggagaagaggggaagtgagagagaaagatactaaaaagcaaaagtatgaaatggtttctgtcccctttcyagcccctgtactactatcctgcctccctagtatttagaagggtgtgggcagagaagatattatgctgagacacattttttggagactctcgtcaaaaacaatgttcatctagagccaagttgacaaatcttggcacagagtggaaaaaaagtcatctttgtcacctctactttgaatctaccaccactttggcatttgatggtctagtcactctgtaattgggagatagcactccaagcatggtcactgttattctcacatgggcacaaaagcagtggcaatgagataagcagcccacaataaat

SEQ ID NO: 713102 - DNA, 583 bp, Homo sapiens
gctagagcacagtggctattcacaagcatgatcataatgcactgcagcctcaaactcctgggctcaagtaactctcccaccttagccttccaagtagctacaggtgtgtaccaccaagcctggtcccaagaatattttttgagaccagtgggttacataaatcttttgtttataaccagagaaagaggaagattttggtacagggccaggagaagaggggaagtgagagagaaagatactaaaaagcaaaagtatgaaatggtttctgtcccctttccagcccctgtactactatcctgcctccctagtatttagaagggtgtgggcagagaagatattatgctgagacacattttttggagactctcgtcaaaaacaatgttcatctagagccaagttgacaaatcttggcacagagtggaaaaaaagtcatctttgtcacctctactttgaatctaccaccactttggcatttgatgrtctagtcactctgtaattgggagatagcactccaagcatggtcactgttattctcacatgggcacaaaagcagtggcaatgagataagcagcccacaataaat

SEQ ID NO: 713103 - DNA, 1515 bp, Homo sapiens
catctaacttactgaacatcatagcttaatttaacttatcttacattagcttacagtttggcaaaatcatccaatacaakcctatttcataataaagtgtttaatatctaacataaattttggataaggtactgaacatgaaaaacgaaatggttgtatgggtactcgaagtagtttctactgaatgtgtattgctttgcactaccataaaatctcattcaccctgatttgttccttttggattcgaaacaggtgcttctcatcagttctcactccctattccatttctgctatctctcctaatggggtctaatcacagtattggcaatggtaagggcaatctaagacgccaaattctacaatgtccctgatcctaaaacaagttaaaaagaatatggaaacaataagcttcagtatttccccagttctaaggttcctcacagactgacaaaaaaacttggtgatataatacagttataaaaccaaataaacgaagtcagtaagacaaagtcttacatgaatactatgagtacataagcttaagttaatctttttgaaaatttcccaatttttttacttcatgataaccccctctcaaatttctaagaccttctcccagggtaaaattagctagtagaccctaagtatctctccttgtaattatagcttacttccttgtgtgagtatgtgtgttctctttttctcatcataaagccattggaatggggagagagcctcattgcttgaacaattgagaattctacctgttcaattctgtcacagtaaatgttctattcagtttgatccaaaacagctctgtctaaggctcaattaaattgtatggccattttgtctgatttccacaaggtgtcagagatctgtgatttattaattcactgatttcataaatacatttctacaaatgtgatggttaattttgtgtcaacttgactgggtcactggaggcccagatatttggacaaacattactctcatgtctctgtatttttggatatgattaacatttgattggaaaactgagtaaggcagattgccctccccaatgtgtgtgggcctcattcaatctgttgaaagccttaataaagaaaaaaaggtgaataagagaattgtttctgcctgacagcctttgaactatgacatttacatttttttctgtcatgattcaaactaaaacatcttctcttattgcatctcaagcctgctggactccagactggaaatgatcctcaggcctttggacttggcctggaactataccaatggctctcctgggtctccagcttgctgactcaccctgcagatcttaggacttgccatcccataattgcttgagccaattctttacaataaatctctctctctctttaaatatatatattataataattaaatgtatattaattaataatgttcaacctataatgggtttatcaggatgcaacaacattagtcaggttttatacatataatataaaacctctatacataaaaatt

SEQ ID NO: 713104 - DNA, 1515 bp, Homo sapiens
catctaacttactgaacatcatagcttaatttaacttatcttacattagcttacagtttggcaaaatcatccaatacaatcctatttcataataaagtgtttaatatctaacataaattttggataaggtactgaacatgaaaaacgaaatggttgtatgggtactcgaagtagtttctactgaatgtgtattgctttgcactaccataaaatctcattcaccctgatttgttccttttggattcgaaayaggtgcttctcatcagttctcactccctattccatttctgctatctctcctaatggggtctaatcacagtattggcaatggtaagggcaatctaagacgccaaattctacaatgtccctgatcctaaaacaagttaaaaagaatatggaaacaataagcttcagtatttccccagttctaaggttcctcacagactgacaaaaaaacttggtgatataatacagttataaaaccaaataaacgaagtcagtaagacaaagtcttacatgaatactatgagtacataagcttaagttaatctttttgaaaatttcccaatttttttacttcatgataaccccctctcaaatttctaagaccttctcccagggtaaaattagctagtagaccctaagtatctctccttgtaattatagcttacttccttgtgtgagtatgtgtgttctctttttctcatcataaagccattggaatggggagagagcctcattgcttgaacaattgagaattctacctgttcaattctgtcacagtaaatgttctattcagtttgatccaaaacagctctgtctaaggctcaattaaattgtatggccattttgtctgatttccacaaggtgtcagagatctgtgatttattaattcactgatttcataaatacatttctacaaatgtgatggttaattttgtgtcaacttgactgggtcactggaggcccagatatttggacaaacattactctcatgtctctgtatttttggatatgattaacatttgattggaaaactgagtaaggcagattgccctccccaatgtgtgtgggcctcattcaatctgttgaaagccttaataaagaaaaaaaggtgaataagagaattgtttctgcctgacagcctttgaactatgacatttacatttttttctgtcatgattcaaactaaaacatcttctcttattgcatctcaagcctgctggactccagactggaaatgatcctcaggcctttggacttggcctggaactataccaatggctctcctgggtctccagcttgctgactcaccctgcagatcttaggacttgccatcccataattgcttgagccaattctttacaataaatctctctctctctttaaatatatatattataataattaaatgtatattaattaataatgttcaacctataatgggtttatcaggatgcaacaacattagtcaggttttatacatataatataaaacctctatacataaaaatt

SEQ ID NO: 713105 - DNA, 600 bp, Homo sapiens
ttgaatcatgggggtggttacctccatgctgttctcttgatagtgagttctcccaagatctgacggttttataaggggcttttccccttttgcttggcacttctccttgctgctgccrtgtgaaaaaggatgcgtttgcttccctttccgccatgattgtacgtttcctgaggcctccccagccatactgaactgtgagtcaattaaacctctttcttttataaattacccagtctcatgcagttcttgatagcagcatgaaaacagactaacacacccccccaaaaggaatagtttattatgtgattttgacaatgattatttctttttaaacattgcagggtttcttgagacctctatgtgcaaagttctgagaaataagtatatgagtttattcatctttgaagatttattgccaatctacggatgcaaaggatccaacatcacactattgccattaaatttttagaaatactacccacgcagtaagattttctgaccttgcaggctaataaaatgttttaatgtatcagaatcagcagagcatgtgggcggataagtcactgagctaattagtcaaccctctcccaagagctgtgt

SEQ ID NO: 713106 - DNA, 600 bp, Homo sapiens
ttgaatcatgggggtggttacctccatgctgttctcttgatagtgagttctcccaagatctgacggttttataaggggcttttccccttttgcttggcacttctccttgctgctgccgtgtgaaaaaggatgcgtttgcttccctttccgccatgattgtacgtttcctgaggcctccccagccatactgaactgtgagtcaattaaacctctttcttttataaattacccagtctcatgcagttcttgatagcagcatgaaaacagactaacrcacccccccaaaaggaatagtttattatgtgattttgacaatgattatttctttttaaacattgcagggtttcttgagacctctatgtgcaaagttctgagaaataagtatatgagtttattcatctttgaagatttattgccaatctacggatgcaaaggatccaacatcacactattgccattaaatttttagaaatactacccacgcagtaagattttctgaccttgcaggctaataaaatgttttaatgtatcagaatcagcagagcatgtgggcggataagtcactgagctaattagtcaaccctctcccaagagctgtgt

SEQ ID NO: 713107 - DNA, 1981 bp, Homo sapiens
cttgtgaagaaggggcctgcttccccttcaccttctgccatgattctaagttccctgaggcttccctagtcatgctgaactgtaagtcaattaaacctctttcctttataaattatcctctcaggcagttctttgtagcaatacaaaaacgaactaatacactgatgaatatagttttccatttaccctggataagacctcagaatccatcttaacacagcatgtcagaaagccatgccaaatagatgattaccactctgtgagccctagttgccaactctgtcatagattattgatctgaggagagaaggagaaagaagtttcacagatacaacatttggcattcctgaaataggccttgctatttgcccaacatataactaagacgtgaaattctagtaggtctgaggaaatagtggcacctgttggtgccattccagaccaagacatagacttcattcaggcttggatgataaatggtctattgcagataaagatatgtatttcaaacaaagcgttttttatttactgaaattattaaatttataacttctgatttgaaaataagaatcttatctatcacacttttatcttatgggcattactgtcaagcctatctttatgttacatagatgcactgagcttttggccagataccattaaatgtttgacttctgaaactcacctgcatttctgatttcctgatcaccaaatatttgcatgtttgtttgctcccctttccttacagggggagaatgcactgagcatgcatgctaatgtggccattctgctttacaaaagctttcttttctctttcattgtatgctaatctattgcaagtctgataattttcattcccttaaaacttagtttttcacaatctgacaagtaatttttctgagttttttttctgacaatggtagatccagagtctcaataaacttcacccagaatcaaatttctggagtagccatctgcttctttcattataatcttggtataagcagtatagctcggtggttaagaacaaagaatttggatcagacaaattggatttttgcaactttctggttgtgtgacctttggtgaatctcaaaacctctttaagcctcagttttggcatttgtgtaacagtagtactggtatgtatttgtgatgctgtaagcttgttgtgaagatggtatgaaatgatgaatagatatggtcagtagtcctgtttgttagcaattggtatatattagttgttattattccttgtttaaaactccactgacattaaatagccacatgaagagcatggtgacatgtgaacagtatcatcttcctaatgattttatgctcatgaaacctaaacttacttttgtgacttaaaattgctacaccatcaacagttgaagcttcttgatggtgagaaatctattttatgtagaattacttaaaaggacattttaactatagtagcaatttcaattgacttcctgtcatttccaagtcactcagtgtcagcctacattcctcttcagggaactagttcctcccaagacttctcatgtcaggttggcctagcatgatcggaaaaaaatcacaagttggctgtcaatcatccaaaagcatctcttcagcacctaaaagggcataatgctatgctaactactgtgmgaagtacattacacagacatagccatagtaatccagcaacttctattctccaggcagaaagagaaaggatctttgtgcttaataaaaagtggtatgctgtggtgaaaggagcattctcttgtgttaagagaccaggcttccccaggtttgtccttcagcaatgcattttacatttctgaatatatttcttcattgaaaagcagaattataaaatctgcgtacccccagtgttcttaatcctttaaaaaatgtttgcaatgtgccatgaatatatacatatatatattaaatataaacatatttaatatattaaatataaaca

SEQ ID NO: 713108 - DNA, 621 bp, Homo sapiens
tgaaataacatatttgcagattgaaagaaaaaagctgagagaattattgcctgaataaactaatgggtgtgcttcagacacaaggaaggtgataccagatgaaaaaagtgaactataagaataaataaataatgccagaaaggtgaatataaagggaatataaatgagtattaactgtttaaaaggacagcaataatgatgtcttatgggtttataatgtatatacaataatatatatgggaacaataatataaagtggggaggaaaatagagtgtcttccattgattagggaacagtaactgtattaagtcataatttaagaaaccatataatctctagaacaattattgaaggaataatagaagaatgtaaaaataaaaatctaatrgagcaggaaaatgagaaaaatggattactcaaaagaagtcaaaaagaaagaattaagaaacaaagatgagacatagagaaccaatggctagattatacaattcaacttgtatatcagtaattacattaaaaagttattttagaaaactctacctgagggaggagccaagatggccgaacaggaacagctccggtctacagctcccagcgtgagcgacgcagaagacgggtga

SEQ ID NO: 713109 - DNA, 614 bp, Homo sapiens
gagttagaaaaggaaactaatggcctcagtctactccatgaagcaaaacgtctgggctttctagtgtgtatgtttccttctttgaaagttggtggcttgagagtaaaaattagaaaacamaatacaacttaataaaagaaatgagaaaaaatctcatgagtttcactgagatcacataacaagaaattatggcagaatcagaagaaattgtagtaatatttttaaaattgtcttaactgtcagtatttagcaaataggaatggcatttactaagtggcatttactaaatttactaagtgagcagtatagattaggatgatggaagatgaagacggttgattaattcagggagatgatagttgaattgcctaaccttggagcctgggcagaatagaagacaagaaaaggtagcacaagatgtggactagggaataagagtttaagaaaacaagagttgccataaagacccacaggactccatggaaatatgggatgcagaaggactgaaggaatcatcctcattttccggttgcctcaataatctgccctgacccttttaagttcttggcacatagcagataatgtactctctctctccatcatttgttgaataa

SEQ ID NO: 713110 - DNA, 614 bp, Homo sapiens
gagttagaaaaggaaactaatggcctcagtctactccatgaagcaaaacgtctgggctttctagtgtgtatgtttccttctttgaaagttggtggcttgagagtaaaaattagaaaacaaaatacaacttaataaaagaaatgagaaaaaatctcatgagtttcactgagatcayataacaagaaattatggcagaatcagaagaaattgtagtaatatttttaaaattgtcttaactgtcagtatttagcaaataggaatggcatttactaagtggcatttactaaatttactaagtgagcagtatagattaggatgatggaagatgaagacggttgattaattcagggagatgatagttgaattgcctaaccttggagcctgggcagaatagaagacaagaaaaggtagcacaagatgtggactagggaataagagtttaagaaaacaagagttgccataaagacccacaggactccatggaaatatgggatgcagaaggactgaaggaatcatcctcattttccggttgcctcaataatctgccctgacccttttaagttcttggcacatagcagataatgtactctctctctccatcatttgttgaataa

SEQ ID NO: 713111 - DNA, 963 bp, Homo sapiens
attgtgattgctcagtattatatcacagtcatatgtattttaagatgaattgctggggttttaattaacatgtaggaaataaaacagtggaaaataattttaaacatatttataacatatatgataatacacctgcttttaataagtcagctgaattacatttttgtatgtaaaagttaattttcctatttcatagatatggaagtttgatttgttttctaatttttctttaactccttgcattagatgaatcctatatctccaagtactatatttagtcaagtagatttcctttttaagtgaaaaatgggttttgagatagaaaagagctttgccttaatatgccaattatacagctctttttaactctaacttgtagtctgagagatggtaagatttttcagttcagttgctctcaacaactgagatattgactgactcaagtttgagttacaaataaatctacataaaaactttcactttattgattcttttcaaaaacttctaattatgctttcaggtggttaaatggcaaaatctaactgcatctatgacaaagtgagctatattaaaactgtgggataaaggagaaaatgactactaaccagtgggcaactgtcaacaatacttccctaaaacaactgttgacaagctgctagacaaatgtcaacttagatgagttcaataaaagtagatcctgcagaatgagagggagtccctgtgttggcagagaggagcctgtctttgttagagacagaatactaaaactgtgctgatcttgggtggctgtacccaagaattcatcctttcactggacagtttccaagttattgtactttataaaataattggcattatcatgtttccatatactaagtcaatataagtgcattttcagaacagckatgggatcagatttcactcagaatccctctgtcagaagaatccagaactcacaaaatc

SEQ ID NO: 713112 - DNA, 609 bp, Homo sapiens
tgttccatatcatactataatggcagatacatggaattatatactcatccaaacccatggaatgtacaacagcaagagtgaagcctaatgggctggatggtgatgtgtccatgtcggttcatcaattgtaacaaatgagccattctgcagggatgttgatagtggaggaggctgggggcaagggaggcagagggacacagaatgcacaatttgtgcattctgctcaattttgctgagaatctaaaactgctctttaaaargtttttaaaattaaaataaatgaataaatgtggttccagtctaagtgatttgtccagattgtccccgacaggaagtgatgaaacataaatgcaagtgtcaatgttcttgtcctgattcccaggcccttcccatggcaaccatgggttgaagaagatatggggcagcaggccagttaggaaatcctaaatgtgactagaaggcactgggtttcttttgaaatgttgaaaagattgaggcatatgaaaaaaaagcatctaggacacaaatgcatgtcatcatttggggattctgtcatttgaccccgtcacagatcttgagggttatcccctggacccagtaattgcattt

SEQ ID NO: 713113 - DNA, 609 bp, Homo sapiens
tgttccatatcatactataatggcagatacatggaattatatactcatccaaacccatggaatgtacaacagcaagagtgaagcctaatgggctggatggtgatgtgtccatgtcggttcatcaattgtaacaaatgagccattctgcagggatgttgatagtggaggaggctgggggcaagggaggcagagggacacagaatgcacaatttgtgcattctgctcaattttgctgagaatctaaaactgctctttaaaaggtttttwaaattaaaataaatgaataaatgtggttccagtctaagtgatttgtccagattgtccccgacaggaagtgatgaaacataaatgcaagtgtcaatgttcttgtcctgattcccaggcccttcccatggcaaccatgggttgaagaagatatggggcagcaggccagttaggaaatcctaaatgtgactagaaggcactgggtttcttttgaaatgttgaaaagattgaggcatatgaaaaaaaagcatctaggacacaaatgcatgtcatcatttggggattctgtcatttgaccccgtcacagatcttgagggttatcccctggacccagtaattgcattt

SEQ ID NO: 713114 - DNA, 609 bp, Homo sapiens
tgttccatatcatactataatggcagatacatggaattatatactcatccaaacccatggaatgtacaacagcaagagtgaagcctaatgggctggatggtgatgtgtccatgtcggttcatcaattgtaacaaatgagccattctgcagggatgttgatagtggaggaggctgggggcaagggaggcagagggacacagaatgcacaatttgtgcattctgctcaattttgctgagaatctaaaactgctctttaaaaggtttttaaaattaaaataaatgaataaatrtggttccagtctaagtgatttgtccagattgtccccgacaggaagtgatgaaacataaatgcaagtgtcaatgttcttgtcctgattcccaggcccttcccatggcaaccatgggttgaagaagatatggggcagcaggccagttaggaaatcctaaatgtgactagaaggcactgggtttcttttgaaatgttgaaaagattgaggcatatgaaaaaaaagcatctaggacacaaatgcatgtcatcatttggggattctgtcatttgaccccgtcacagatcttgagggttatcccctggacccagtaattgcattt

SEQ ID NO: 713115 - DNA, 609 bp, Homo sapiens
tgttccatatcatactataatggcagatacatggaattatatactcatccaaacccatggaatgtacaacagcaagagtgaagcctaatgggctggatggtgatgtgtccatgtcggttcatcaattgtaacaaatgagccattctgcagggatgttgatagtggaggaggctgggggcaagggaggcagagggacacagaatgcacaatttgtgcattctgctcaattttgctgagaatctaaaactgctctttaaaaggtttttaaaattaaaataaatgaataaatgtggttccagyctaagtgatttgtccagattgtccccgacaggaagtgatgaaacataaatgcaagtgtcaatgttcttgtcctgattcccaggcccttcccatggcaaccatgggttgaagaagatatggggcagcaggccagttaggaaatcctaaatgtgactagaaggcactgggtttcttttgaaatgttgaaaagattgaggcatatgaaaaaaaagcatctaggacacaaatgcatgtcatcatttggggattctgtcatttgaccccgtcacagatcttgagggttatcccctggacccagtaattgcattt

SEQ ID NO: 713116 - DNA, 2626 bp, Homo sapiens
tgtcctttagagggggagaaggggagagaaacttcaggtggtagaaggtctgtgctgaataaaggttactgaggatgtgtgtatgtacaagtgtgcacgtgtgcgtgtgtgcgtcgagttatttaaacacacgcactagggtttgagtcctgattctgtctctaacaacattgggtaagttttccaaactcttagagcctcattttccatatctgtaaaatggggataatattaaccaccctcagagtgctgagaaaattagatgagacaggcatgtaaggtgcctgtaatgtagctagcattcaggggagctgggaaaatgctctttctctacatcaacagccccctstctgtaattgctggatttttcaagctgtaagtcatgcactccttcaggaagccgtaaaaatgatgcccagagtctggtaacatgctcctggaggcctccctgtgttggggacaccgtgttcctcctgcacctgtttgtgcattcacagttaacttatcctggggttgcaatcatgattttccccacaatccctcctgcacctggtgacgcactgtcatgcacgtcacgctggtctgggtttgccctagatttcccaggcactcccgcctagcacaggtgagcagagggtgctggaaacctcccaactccgataacccggggaagggctggggactgcaggcttaacgaatacccagcattttcaaatgcccagcatggtttgggaagcagcaggctgaactgtttgagagcctgcgtgatcgttcttatcagacgtcctgtggaaatgcctgccactgtcacgagcacacaggctcaactcatacaacaccagctggcctgaaaagtcatggccacaagaagcagaggccgcagaccagactccagcacaaaggtgcgggctccttggctttgactcactggcatctcttccgtcctttcacttctgcttctccttagtaacacgactcttcctatgttttacaataatctaataagcgccagtagcggtcagtgtgcagtcaacagacagaactgtggctgttatactgataggcagattttaaaatgaagagatgttgccttggccagtgcagacgggggacacctgcgcacacggaggagcccgtgaggccgctgccgccctgtgggatgggaaacggggaaggctttgggggggcctctggggaggaggccccacccagctggtgctggggtcctgagtgctgagcaggggttccaggggctgagacagagagctctgaggaaggaactggccagcttgtgcgggcgtctgaaggagaacgagaggctgactctgcaagtgttgagaaaaccgccaggcggatccagtgctggaacaaactgcactggggtgggggcaggaaactcagggaacaggaagagaaggagctgcccagagccaccctccagggcgcccctgttcagagcctccctgggggctgctgactgcgcggccatgacgtttcaggccagctggtgttggcagagctgagccgggtttgctcagccagcgcctcagagctgggggtggaggagtggaactgggggtgaggcatagttgacgggatcacggcgccccatgggccctccaccccaaacaagaccttggtgcttggtagcagtcagcctagggccctgcagccccagctcagacctcacgcagaccttcttccagccccacaattgccatctgccgccccacgcgcaacacgtcctgctctccttttcaagtaatttattgcatctgcgataaataaaatcaaataaaagtatattttaagtgttcgtttttaatctttgtggaaaaaggtagagtgttggaagcaatcttgggagttcgttcttggaatttaagattatgtcctcaggactcaggaggcttcttcctgccgtgcctgttttctttggctgggctgtgttcccttctgcctgttccgccctctgcccctctcctcttctgcggacagtccggcacctgtgatgctctgaccttgaacacatctccctggacgttcagggatttctcaacgcgacagaccaggacatagcactgcagcccaccaggtgcctgccttcactgcagggagatccctccacacttgcacagtgggttcacatctttgtcgctgcttggtgtagtcagctgccttcatttctgcaactgaccaggtgtcagttcgtgtccattgtcaccgtggtttgcacccccggctccctggcgaccatcggagcacatcctcctgggcctgtgggccgtggacatttcctcttcagctcaacgtctgccgtgcccacttttctacggggctgtgtttttcctgttgatttgtgggaactccttatatgttcttgccaccaaccctttgccaattctgtgaatcatttcttctattgtgtcacttgctcttgcattttcttatctgacaaatatgactcagctacgatgtacactgtacatatttggggatcacgccactttgtttctgattcttagcaggagaggaatagaaggaggccgagcaaccttcacttcccttcactgggggcccacaggcccggcacgttctgcagagaagcccttgggtaagtggagga

SEQ ID NO: 713117 - DNA, 640 bp, Homo sapiens
aggaggacccttcataaaggggatcagattgcatcttcctgaaagggracccaggctacctggtttatgagtgagaacagccaggatgaagagtctcggagctctctaggacctgggcgtgctttcatttctcccagctagctgtcttgcatggccctgctagggggactcagaaaggggctgggagaggttcgggatccatgcacagcatgagggggaccggaggtgggaagtgggtaaagtgggcatacagtgaggacactgaaaagaaagaccacaaagaaaacatcaggatagttgggaggtgacatgactgctgtgtaatgtcacgaagtcacaggatccccggggcatggcaggggttcgcagaatctacctgatggggatgaggagagggcagagggctgggctgccccatctctgggtcccccttctgtaccccagccgcctcggccagatccacccgaaactttccttattggcatgaggtgacagatggaagtcagggcatccagaagcttctctgtagccctggccctgaggctgtggctccaggagtcatcaagtttggttctagaggggctcagctactccctgcgctcttgactggaatgacacatggacctacctaggctttgtg

SEQ ID NO: 713118 - DNA, 640 bp, Homo sapiens
aggaggacccttcataaaggggatcagattgcatcttcctgaaaggggacccaggctacctggtttatgagkgagaacagccaggatgaagagtctcggagctctctaggacctgggcgtgctttcatttctcccagctagctgtcttgcatggccctgctagggggactcagaaaggggctgggagaggttcgggatccatgcacagcatgagggggaccggaggtgggaagtgggtaaagtgggcatacagtgaggacactgaaaagaaagaccacaaagaaaacatcaggatagttgggaggtgacatgactgctgtgtaatgtcacgaagtcacaggatccccggggcatggcaggggttcgcagaatctacctgatggggatgaggagagggcagagggctgggctgccccatctctgggtcccccttctgtaccccagccgcctcggccagatccacccgaaactttccttattggcatgaggtgacagatggaagtcagggcatccagaagcttctctgtagccctggccctgaggctgtggctccaggagtcatcaagtttggttctagaggggctcagctactccctgcgctcttgactggaatgacacatggacctacctaggctttgtg

SEQ ID NO: 713119 - DNA, 847 bp, Homo sapiens
atcctcccgcctcagcctcccaagtagctgagattacagtcgctcaccacaacaccagggtaatttttttttttttttttttttttttttggtagagacagggatttgccatgttgcccagacttgtctcgaattctggactcaagagatctgcctacctcggcctcctaaaacgctgagattacaggcatgagccattgaacctgacctcttgataactttttaatatttacatttctaaggagatctctaatcaagcactatgagccacgtgaacttttaaatcacgtatttattcaattctgagccctgttaaaagtatatgatttgctgggcgtggtggctcacgcctgtaaccccagcactttgggaggcagaggcgggtgcatcacctgaggtcaggagtttgagatgagcctggccaacatcgtgaaaccccatctctactaaaaatacaaacgttagccaggcgtggtggcaggtgcctgtaatcccagctacttgggaggctgaggcaggagaatcacttgaacccgggagacagaggttgcactgagccgagatcatgccattgcactctagcctggcaacagagcgagactctgcctaaaaaaaacaaacaaataaacaagcaaaaacaaattatatgatttaatatattgttctagtcacaaaaatccaaattctcaagactgcacatactgtacagaacttgagcgatgatggatgtattttctcagacttttgtttaggagcagactgtggactagaaattttaaacccagagccatamtgacttaatggcaaactacatatttctaggtgacttcttggccataagttactt

SEQ ID NO: 713120 - DNA, 935 bp, Homo sapiens
tgacggttcccaggagaaacatcttcacacacaccattagctcatccctctgaggtgatattttatggctaaggtgaagcaccacagttagaagcagccataaaaataaccctcaaggtgaagcacttaatcttggaagagtgaattgttaggttgtagtctggtactgttgggaaacctttcataaaagcccctcttatgaattttggtttcacacgagggagacaatgtttgtcatctttttgttttctttgtctaaaatctatatgggactagaggagtttatttcatgttacctttttagtcaaggcaatgcctgaaaagcatatctaccttgaatttagtggtaagaaaaccattgggtgaaggtatatctggtatgctttcaagtatccagattatatcacccaattatataataaatgtaaaagcacttttaaaactataaatagccatgtaaatgaacggtattactatgttggtacataaacatagactttcacatagtacttgatgagcactcttgttttgttgtttttccacttttcagaagtawgatgatctcacttgtaagttccattgtatgcttgtcattttgtgtatgtcatggagtgatgagcactctttaacgaaagcaaaaggaaactaataccacttgattattctgttaaagagtgagagtaattattcttccttttaaattttcacattgaaaaacgcagctatttgatttaaaatccccacgtttgtgggtatatataatgaatttcctaatgtgtttcatgttaaatgcactggaagctgtggttttccaagaattgagatggttcttcctgtaagttccagtgaggaaacataagacttgacatcaaagcgctgatgtgtttgcatacattgctgaaagtggcggggaaataatcatagaaggtggacac

SEQ ID NO: 713121 - DNA, 1537 bp, Homo sapiens
ggtaacaggtggaagtggtagcagacaggtgtggatgagctcccttcctccttctccctctgaggatctcactggttcctaagcccagaagcatccctctccacaaagatgaaatcaatggattctgatttgagaagaaccaccactcccccagcaatcctaaatttatatataaactaatagctaataagcactatttttctaggcactatgttaatgcctcacatatgttgaaatttgtctaagcgataattccttcaagtagtttcyattattgtattttatatttaagaaaattaaggcttagaaacttatttacccacaaaccatatacccttgataaagcaggaattcaaatccatgtctgtgtgactctacgtaaactctgtcatgctgcatgttcctatacttcctgttcccatagtctacgtatttccagatacccattactcagttgccatgcccaacgattatgtgttctatttgccacaatatttcctgttatttcccctacttctgtggcttcccaccttcttcaacagatatttttgcaacctcgacccttcctgtctgctccaacctgctcttgtcaaccagaccacatccagtcaaaccccagggtacaacacctctattccaaaaagatatgcttaggatagaaaaattatgatgcataaaaagctgtccaccatgcttcactgcccatgagaatgactagtaatgcttttatataacactttacagatagcaattcaatttaacattaccttatttaatatgaacaaatagttcaagtttcaaatagcaaaattattctctgcaagtaagcctgtctatatacaaactggcacttgagacattctccagtaaaggagggaaatgtctaagccaacaataaagtgcatttaaataaattcgtaaaagtcatttttgtttctttcttcaattcaaaatttacatttgcactttttcacaaacctggtttatttgtatttcacaagtctactgctttgtaacctagaacaagtctccattaacttatttttattgaacagacaaggcagtggtttatcaaataagcaaataattactgtgttggttcattttcatattgctataaagaactgcccgagactgggtaatttataaaggaaagaggtttgactcacaggtcagcatggctggggaggcctcagcaaacttacaatcatgacggaaggcaaagggaaagcaaagcaccttcttctcaaggcagcaggaaggaaaaatgctgagtaaagagggagaagccccttataaagccatcagatctcatgagaactcactcattatcacaagaacagcataagggaaaccacccccaagaatcaattacctccacctggtctctcccttgacacgtggggattgtgggaattataattaaagatgagatttaggtggggacacaaagcctaaccatatcaattacctcgggtctaaaagtactattttaggccaatattttgcagatatgctgttattctttcctagagtg

SEQ ID NO: 713122 - DNA, 1369 bp, Homo sapiens
tccaggagttgtagatcagcccgggcaacacagtgagaccccatttctacaaaatatacaaaaattagccaggtatggtggcaygtgcctgtagtcccagttactcaggagactgaggtgggaggattgcttgagcctaggaggttgaggctgcagtgagccatggtggagccactgcactccagcccaggtgacagggtgagaccctgtctcaaaaaaaaaaaaaaattatttaaaaacataattgtctattttagcatccagatgatttttgtattctccatggagtaaaagtatacacatcaaatcattttaggctggggtggaattcctcccttcagtgggaaaaaaatttttctacggaaaatttttcttgattttctgtaaatggtacattggagtctgttttaaggtttgagttaattaactcagatgcttttttgtactttttatttgaggcacattcatttggaatcctatctacctaaatttttttttgaaaaaggacaaaatataaacaaacagtatattcacctagaccctaaagcataaggatagcatttagaaacatctcagaggccggatgcggtggctcatgcctgtaatcccaacactttgggaggccgaggagggcagatcacccaaggtcaggagttcgagaccagcctggccaacatggtgaaaccctgtctctactaaaaatacaaaaattagccagggagccgggcacggtggctcacgcctgtaattccagcactttaggaggccaaggtgggtggatcacctgaggtcaagagttcaagaccagcctggccaagatggtgaaaccccatctctactaaaaatacaaaaattagctgggcatggtggcaggcgcctgtaatctcagctactcaagaggctgaggcaggagaattgcttgaacccgggtggcagaggttgcagtgagccgagatcgcgccactgcactccagcctggccgacagagtgagactgcctccaaaaataaaataaaaacatcccaggcccttgagagcgttgatatgtctgtctgtgactagagacttcaaaatatcaccttgaaagtgaggacttcggtgaagggcagggtgtgatttcttctctcttttgcctgctagccgctgtgattggaaccaggctgcatgctgctgtggcaattgcttgtgttgtaatggccttttacgtcctgtttataaaatgaattccaaagcacccaagtcatcaactgccaaccaaggggacggggatgaagaacctgttggagacctgaacccagtgtaggagagttcagctgaaatcatcggtcccgaggatgacaccacagcatctgcccctgctatatgtgggg

SEQ ID NO: 713123 - DNA, 622 bp, Homo sapiens
aagtgtgaccttagcataaatactcatgttatttggagcttctgaaaatacaaggtagctcatgtccatttttgtttcctcaacacttagctcagttcctggcacataaaggtttgctggcagtgttgaatggatggctctgtatggttggagtgacttcagtttacaaaatatgaatatctgtatcctaccaaagactgctgttgtgtcctaaatcttcatcagcaagatatgattttccaagttgcaaatataccccaaaggactagtttctacgagatgggyaatttccttcccgtgttttaagagtagtcaagtggaggccgggcgtggtggctcacacctgtaatcccagcactttgggaggctgaggtgggtggatcatgagtcaggagttcaagaccaccctggccaacatggtgaaaccctgtctctactaataatacaaaaattagccaggcgtggtggcgtgtgcctgtagtccctactactcaggaggctgaggcaggagaatcacttgaacccgggaagcagaggttgcagtgacccgagatcgtgccattgcactccagcctgggcgacagagcgagactctgtctcaaaaaaaaaaaaaaaaaaaaaa

SEQ ID NO: 713124 - DNA, 962 bp, Homo sapiens
cattctaatgagctccaaatgccctttccacccactgtacaattcactaaaatgcaattattacgaaaaattcacattttctttcagcagtgcatcaggttagcatattactggtttgggtgtttctaatatactaaaccttcagatgtttacctaattctgaatccttgtgttagccagaagcttataatccgattcaccaactttcaacaatctactggtccatgaatgataaattactatcttcccctaacaatagaaaaagctgattcctttaccactccccaaatctaaacttggtttccacttaaaagttactcagttgagaacacttaatatcaattacaatcattagtttaagttgcactgatactaccattatatcacagtgcacacaacacgagatgaagtctattttttttacattaattagttctacacaaatagattccctagcgaatttgtttcagaccaattgacaactatctgtgaacataactaaacttaaacatttgtcttattttatacctgtactttaagtaaggttttaagttgaaatgtcattatttccttatctgaaggattaaaggaaacaggaacccagtggcttggtggtttgggaagaacacttggtgatggcggctcactaaatttggcaccagcatagttctgattagcttgagatttaaaaagtaagctgggacctgagaagctagaattccaactttgattatttggaaaatttttgttcttccccccattttkcatggcctgccaggcacctgctgatgagttataaccatgtcctctttcttttttcttatgaacaatcttcatctgggaattctgttccttggtcttctgtctgttaagctgttgttggttcttactaacatttctagattgaggggctggaatgttatacctctctccaccacccatcttcagcttctttgtcacct

SEQ ID NO: 713125 - DNA, 797 bp, Homo sapiens
tccctctccggcagctctctttcttagcacccaaggctgggccaggctgaaggaaccagggagggatggtttccactccccagtttctcaccccagtaaatgcttgagacatcctgatgaaaaagagttcggcctggagcccgggcagccaccctgctggaaggagcggagcctgctttcctggctgtggaatgacggggtcaaagcgagttcaggctttgctttaattgagtagaagatagttcttccttaagggagccctgaaacagtgcttcggcagagcagaatgacttcccatattgtcagaagggattagcctggctggtttgtaaataaagagtgatccttctttcccctctaggacaaacagatcmtattttcttcagatcaccagggccggggctccctctaatcaagtccttgacatttcagtaagactcaaggagttacatgttttccatgattgtgcctttggtaattacccattttcctaaacgattgctattttccaaattcaaaacgttttgaggaagtgggaaaatgaaatgtctctccaatgacgtgaagatgaaggggagggacagaggtggaggtgcggaaaggagcaggtctcttgaggctgggacaacatcatcctaataagcaccagggaacagatccctggaccactgaggtgctttctaatctattcatttttccattcctttgggaaacaatagtttctgaagcccttgccaggtgccagacgtcatgctggccaccgagggcagagtaagacctgtttctgcccactccaa

SEQ ID NO: 713126 - DNA, 1579 bp, Homo sapiens
tgctttttaactcggagccgagcggcgcggcaaaatgaggctaaacacagcaaagttattttgatttatttcctaacgtcggaatttggagcttgctgcggggattcagccacgagaagacaaactgatgaaaatgtatttttccctgtcgttactcttttaaatagatgggtgttttattcttcctttttgccactttgctgtgctagactgagctttatggcaccccggcatgccgtcgctttgcttctcccctcagaagaggccgccccactctgggattctctcctccctgatgcagagacctgcaagaccccttggacagttttgactttgggtctggcatttccctcttcaggagccagttttaaggtctaatagcccctttgagagtggaggggatgcaccaaacctcaggcgacatgagactgtagcatcctttcatctctgaatgagtcaaggtggaactaggggagagagttattaaggagccagaaggacagaaaagagagaaggtgagtttgaagacaaccatttgccatcagccagactaaacttgccaaacgctggatttgacacctgaagccacttctggttaccagctgggaggtggcctccatagatctctacctgcagagtagcattcagtgcaacctgcatccctcccctgtcttagcctgtcctccaaattccggctaactcctgagtgcttggtggggcgcagtcctccaggccccgctgcctctaggctcccatgacgagggctgcacgggaggcaagatgcggatgatggggtgtctgggagtcaccctggggtaccatgccctccctctagctgcttctccgccctccctcaaatgcttgctgggacagctscacattctcttccctcatctctgcagaacagcctccctcctgtgaaaaggtttccctcctaccccaaacacatccacagagttttcttaacagaaaattgttctctctcttagatgaattccagtgccagctgctagggtgtttccactttgtgtgggtacaaaatgagttcctgcacagtcctaacccagaggcctggccttgcgaggccacatgagagctgcagaacctctgctctgcccccatgccctcgctttggggcggcagcccccgggggtgcttggaaggaaagagggctgggaaagaacatagggacttggggaggggctttccccagggaaatgcctcatctgtccacagccgcccatccccctgagtggcctcctgccacaactgggccaggtcaccactgatgccttgtgtggctttctttcctcttgtagacccagcctgtgctgaagccagttggggacacctccagccccacgtgcgctggtgagcttgaggccttctttaaggctaagcagaggaccagtcctcctcctggggagagtgggcagggagggcactgttctgggagttatctagctatgccacctcctatgtgtgtgactttggggtggccaataagcacccctgagcggcagcttcctcatctggccaatgtctgtgttgactgtgatcctagtgcccggctcagctc

SEQ ID NO: 713127 - DNA, 1866 bp, Homo sapiens
tcgagacatgtgaagtaagatcgatgtgttattagttgcatgatcatttatcatcagctcctaacacaaatattaggaaatatggccttttctatttctgtggtcacactaaaggaggccgattgtcttcttgcggaactgagtgagggtaggagaataatgggatacagcctgtgtactcacaggatgctgcttatcacattgctaatcacattctgagaaactttatttttatacgttttccttgctgtagttatgagaacaccgtctttgtgccaagtgaagttggcttgaaagtgactttgtcacttttcaactgttatgacttcagacgagcttcttgcctgctgccagcctcagtttctccaatttgtaaaatggaaacagttatgccaaccttgcagagctattaggagagattaaatgaaatgatgtgtacagcttgcctgacagagtgcttggctgaaagtacttaatacaaattaccttctttgtctgttttccacatttgtggttgacaaccctttccaaacagacacttactcttccgaatatcagtgtataaaatgattttatggaagcacagtgattttatgggttaaaaagtgacatctattcctggggctggaatcttcagaccacaggttagattctgtagtttagtgcagcagaaagaacccaatgaagtttcacagaaccatagactactagagcaatgggggacattgctccggaaaactgaggcatgatgaagagaagtgacctacccacagtcttatagctagtggcatgtgtggtgggtgggattcacagcacgtttaaggaagaagctctacaaattgtgtgggatgttatctgatccttaggaaagctgcctaggatgggatgagagctctckgttaaatgtgttagcctctgggacagtaaatcccttctgaatcttaggtgcttagcttagttgatcagtatgtttatgtactatctccccatatgtgtacagggaatttaaaatcaaactcttgagtgttaggaagggtaatctttccaaaaccaaagaggtgacgcaggcagccacactggctgcatttctgagaattctgggttgctgtccatctccatgaaaccattctgaagccaatggacaggtaggccacttttgttcaaactaaacaattaactcatgtgtttatttgattcatttattaattccttcaccaaaagctcattgagtccaggcaattaatcagacactttaagtatggaagttatagaaatgcacaaaacacatcctttttctgtggagatcatggtctgctcttttcttaatcctaattccttccttgaaactcttctagggtccggcctgaacttagcctgagactccccagactgaggcaacacagcttaccacctgttgagggctgatctagccatagtgctggaagacagggtgacagttctatagctccttccttcattttcatgttacctggatgtgacaatttctccataggtgctgtttctattctcatccctacttctaatcctgtgtctgcatcacctaagcagggcttagcaactctcttcactccacctctctcccttcccacatcagctccattcttagtgagttttaaattttttagttgaatattttatattggagatggaagggaaagttaggttatatcacacatcacccaaaatacttcataaacacttttagttgaccatgctcttttccataacatctcttcccctggctacatactgcctatgtctctcttccccttcggtctcaattatcttccccagacaccatatctctccaagttcattaatgttagttctttttcttccatctta

SEQ ID NO: 713128 - DNA, 666 bp, Homo sapiens
aatcaattatgtggataaacaagcaaactttccttagcaattagaagcagaatgaagtcttttatttttgagatagtacaacattactatgaagtagaagtgaaagcaatgtacacagctgtaccataaacagttttccttcacagaccattcccataaatgccattcccaaaaacacatccccaaggtaacccatttcctggtttccctctcagatgtttctttatgcaactatatacaagtatcaatataaattaagttgtactttgttcttacaaaaaggaaacaaacattttctcttcttcacttttcttactcaacagtgtatcttggagatatacttttttttttttttgagatggagtctcactctgttgcccagactagagtgtaatggcaccatctcagctcactgctacctgctgcctcccgggttcaagcaattctcctgcctcagcctcccaaagtgataytcaagctgggattacaggtgcacgccaccacgcctggctaatttttgtatttttagtagagacggggtttcaccatgttggtcaggctggtgtcgaactcctgacctcgtgatccacccatctcagcctcccaaagtgctgggattacaggcatgagccactgcgcccggcccactttctttttattgataca

SEQ ID NO: 713129 - DNA, 621 bp, Homo sapiens
ttttaaatacccccaaacttgtgtgggagtgccaatcggccacatttaattggccagattgttagcctcggcgatgcagctctcttcagaaaattaaacatagacacgattgttactttgctctgttattgtggctacagaatggcaaaccaatctgtcgaaactgaaaaatccagccgctcaattatctgtcgggcttacacagctaaatacccccaaagtggattttttttcctacttgaggcacattttgagtgaatatgttgctttcttgacactgtgcatggtcaaggctcaaggtcttcctaacagcctgccaactgcttaggaaaaggctggtctkagaaatatagactcttattcattaatttactcatttgttcacttaatctgtaagcactgacacatacctactttctgccagaaactgtgttgggtgctgggaataagaaaaagttaaataaccattagtcaaataaacaaccagtcagaggtaaggcaggaatagaatttaggtttctgactctaaagcaatggttcttaaccaggaaggcaattttgccctttcccatcaggagacatttgccaatatctgtagatatttttgataatcatgactga

SEQ ID NO: 713130 - DNA, 1332 bp, Homo sapiens
tagacaggacactactttttgactttatactctcttgttctgcttgatttttttaacaatgtgcagattttgtcagtttaattaattaaaaaataagaaattaaaaatttcttaattttaaaggagaacctgtggctctaggtctaacaacagtacaccccaaaaccggagtccttgtgtgtgggtgggtggggaggtataatgccattgctgttagcctgaatcacctttcccaagaccccaagaaaacagcaactctagccaggagcaggccagcaggctgcagactctctggccactccctaacttacaaactctcaagccactgtttacgagaagccagtgttattaaaagaaaagaaaaatcaattaaccatcatggtgagggctttggagtcagcctaggaagctctggattctggtgatgcctccagcagctgtgagatcgccagaagagtcatatcaaagcccccacatcttgtttcctcactagtgaaagcagggatcacactgcccccactcacaatgggctggggatgggctcacatttatccagcacggatcctgtgcagactctgtgccaagcacatcacaggtcacaggctctaccgcatttagtccgtaaggcagctgaactgttattgtcatctttccgatggagaaattgaagcttagggagccataaatcaatcatccaaggtcacagggttactaagtagccgtcagtgcacaaatccaggtctgtctgtttcagcctgcaacaactattatattctgcctttaaattaaatgagatagaatgagttcatccacctaaaatgccctcttagatagtggttactcaacacatgccattcatttcaatgtgacacagactcccggggtgccagggtaaaggtggccaatggtcaggacccaccgggcccagcttccacgtagccccgtgcacttcccccactggtatggctggctacrgtagcctaagttgcctgctcttggcccaccaggcccttctcagacaagtagagcatgcccagctgaggaccctgggcactgcagcagcgcccttgtgccccttcttggcctgaccattaattattctagctcttctaccagcaagcagaggcctcagctttaacacccacgccaattgttcctccatcctttctgtatacagatctgcagtccctctccgtctatatctatctctgtgtgtgggcgtctctttctctgtctctcggtctctctctttctaccttctcgtgctgtttgtctgtgctatctctatctccctgtgcctctgtctccaattctgtccctctttcttattct

SEQ ID NO: 713131 - DNA, 1332 bp, Homo sapiens
tagacaggacactactttttgactttatactctcttgttctgcttgatttttttaacaatgtgcagattttgtcagtttaattaattaaaaaataagaaattaaaaatttcttaattttaaaggagaacctgtggctctaggtctaacaacagtacaccccaaaaccggagtccttgtgtgtgggtgggtggggaggtataatgccattgctgttagcctgaatcacctttcccaagaccccaagaaaacagcaactctagccaggagcaggccagcaggctgcagactctctggccactccctaacttacaaactctcaagccactgtttacgagaagccagtgttattaaaagaaaagaaaaatcaattaaccatcatggtgagggctttggagtcagcctaggaagctctggattctggtgatgcctccagcagctgtgagatcgccagaagagtcatatcaaagcccccacatcttgtttcctcactagtgaaagcagggatcacactgcccccactcacaatgggctggggatgggctcacatttatccagcacggatcctgtgcagactctgtgccaagcacatcacaggtcacaggctctaccgcatttagtccgtaaggcagctgaactgttattgtcatctttccgatggagaaattgaagcttagggagccataaatcaatcatccaaggtcacagggttactaagtagccgtcagtgcacaaatccaggtctgtctgtttcagcctgcaacaactattatattctgcctttaaattaaatgagatagaatgagttcatccacctaaaatgccctcttagatagtggttactcaacacatgccattcatttcaatgtgacacagactcccggggtgccagggtaaaggtggccaatggtcaggacccaccgggcccagcttccacgtagccccgtgcacttcccccactggtatggctggctacagtagcctaagttgcctgctcttggcccaccaggcccttctcagacaagtagagcatgcccagctgaggaccctgggcactgcagcagcgcccttgtgccccttcttggcctraccattaattattctagctcttctaccagcaagcagaggcctcagctttaacacccacgccaattgttcctccatcctttctgtatacagatctgcagtccctctccgtctatatctatctctgtgtgtgggcgtctctttctctgtctctcggtctctctctttctaccttctcgtgctgtttgtctgtgctatctctatctccctgtgcctctgtctccaattctgtccctctttcttattct

SEQ ID NO: 713132 - DNA, 1300 bp, Homo sapiens
tcaagaacagaaaaccaaataccacatgtactcacttataagtgggacctaaacattgagcacacatggacatggacatagaaacaatagacactgtggacttacttactagatgggggaagaaggaagggggatcatgagttgaaaaactacctgttaggtactgtgctcactacctgggtccaatatactcatgtagtgactctacacatataccacctgtatctaaaataaaagctgaaattaaaaagaaaaaaaaactcagtaaactaacaaccaaaaaggtcatgggttatgatattttaaggaatgtggctttgtaacctttagctgactgacattttgtactaaattttattatataatatttcttctctactgaaacctccctatgtatgtaatgatagatattccaaacccacaagataattcactcaccgattaaaaggcaggtcaatcggctcaatgacttaacagcaattctagagttatgtttagagcaatttatgacactgttggcactcttcccaatatagctcaataactacagacaccaaaacaaatttctgtttttattgcaattattgaccaacaaataattctggaattggcaattctattttataactgtgtattttccacttcaaaacttgcattagtatcattcataattgctaagttgtttctagtccctaaatatttgctaatgtataactaaaataaatccctttgtcatgggaactctgttaatacatgcttttccaaaaataaaaagttcaatgtaacctcaggctgtgcatcttaactggaggaagacaatgatttgccagtgagtgtccaaagccaaagaataaaaatgatgtgtcttcttggaacactgattgtaccccgaaattcagttaaaatatctgaacttttatcctcttaaaaaacatccccgctgggtgcgatgtctcaagcctgtaatcccagcactttgggaggccgaggcaggtggatcacctgaggtcrggagttcaagacaagcctgaccaaaatggtgaaaccctgtctctactaaacacaaacaaatagccgtgtgtggtggcacatgcctgtaatcccagctactcgggaggctgtggcaggagaattgcttgaacctgggagtcagaggttgcagtgagccacgattgcaccattgcactctagcctaggcaatgagagcaaaactccgtcaaacacacacacacacatatatatctcacatatatatatattgcatatatatatctcgcatatatattgcatatatatatct

SEQ ID NO: 713133 - DNA, 1518 bp, Homo sapiens
atattttccttcccaaacttgttgtgaaccaatcgttgttctgctttctccatggaaactggaaattattgaagcattgagtgctagtatttaaatggtcactccactagcttaatgaaataaccttaataaatatcttcattttacagctttagaaaatttcagaaatgctgtgagttttctaggaatagagggccctaaaattagtgtcataacttagctgtggcatctaaacattcatgcttaatgatacctattaatatatgtttattttaagttaaagtgctcttgtcttaaacatttttaaatcttaaattttgaaaactaaattttgaatcataaatatagaaattattcttaagcattctaagtgaaaaataatattatttaaatagagatcttcaagtcagtgaacatatctcttaggtgtgagaatcaggcatttagaatgcttaaatagttataggcttcaggattctccagaagcacatccatggacgttgaaggagcaggacccaatcattagtactttgtgaaaatcaattcaggagaatgtatatgaaaacataggaaaatctgacatggggtaatctattmtggaggcattatctaattcctttctaaggctaataaaatgtaattgcctatccatactctttatctttgattcttatctctaggacttcatgggtaccactaacttaggatttcacttttttttttttggtcaaaaacagagaaaatgaatgaacttggcatttgcaattaagtacatcctacaacctttactaaatacctctctaaatcttttccccagcacatagattttatattaacctaaaaattattataactatagcaaaatactaccactcttttagacccaatcaaatcatgacattaccttatcttaggcaatacataaaacaaatgaaacatcaccttaatagaaagatgatatttaagcctttctggaaatcacgtttagaaaatttatcatgattatgacttttgtcttatgtaagaaaacctctatgggtttgtaggggttggggaattggctatggaatcaaaaaccaacttcaccaccttgtgtaatcagcaacctccagagggctgcctgggaggcagttgagcattactgctttgtgcagtggtggcctcacagtgctgtattcccagcactcttcccatcacataagaccataaagataattgggtcttacacagaactttctaggcccaagttcctctgtttgcagaatgtggttattggatctatgttttctcacagagctgctttgcgtgtttatgagatcatgactactgcttcctttgagttctttgaactaaggaactctataaataaaagacgctattatttcaccactcttgttactcattaaagaaatggtccctgaaaatagagcctttcacttgctctgtgtgtaaaatctctgctgcctgcaatgggagggcttacgcgatgtaattacaggaatctgcctgttctgcaga

SEQ ID NO: 713134 - DNA, 1518 bp, Homo sapiens
atattttccttcccaaacttgttgtgaaccaatcgttgttctgctttctccatggaaactggaaattattgaagcattgagtgctagtatttaaatggtcactccactagcttaatgaaataaccttaataaatatcttcattttacagctttagaaaatttcagaaatgctgtgagttttctaggaatagagggccctaaaattagtgtcataacttagctgtggcatctaaacattcatgcttaatgatacctattaatatatgtttattttaagttaaagtgctcttgtcttaaacatttttaaatcttaaattttgaaaactaaattttgaatcataaatatagaaattattcttaagcattctaagtgaaaaataatattatttaaatagagatcttcaagtcagtgaacatatctcttaggtgtgagaatcaggcatttagaatgcttaaatagttataggcttcaggattctccagaagcacatccatggacgttgaaggagcaggacccaatcattagtactttgtgaaaatcaattcaggagaatgtatatgaaaacataggaaaatctgacatggggtaatctattctggaggcattatctaattcctttctaaggctaataaaatgtaattgcctatccatactctttatctttgattcttatctctaggacttcatgggtaccactaacttaggatttcacttttttttttttggtcaaaaacagagaaaatgaatgaacttggcatttgcaattaagtacatcctacaacctttactaaatacctctctaaatcttttccccagcacatagattttatattaacctaaaaattattataactatagcaaaatactaccactcttttagacccaatcaaatcatgacattaccttatcttaggcaatacataaaacaaatgaaacatcaccttaatagaaagatgatatttaagcctttctggaaatcacgtttagaaaatttatcatgattatgacttttgtcttatgtaagaaaacctctatgggtttgtaggggttggggaattggctatggaatcaaaaaccaacttcaccaccttgtgtaatcagcaacctccagagggctgcctgggaggcagttgagcattactgctttgtgcagtggtggcctcacagtgctgtattcccagcactcttcccatcacataagaccataaagataattgggtcttacacagaactttctaggcccaagttcctctgtttgcagaatgtggttattggwtctatgttttctcacagagctgctttgcgtgtttatgagatcatgactactgcttcctttgagttctttgaactaaggaactctataaataaaagacgctattatttcaccactcttgttactcattaaagaaatggtccctgaaaatagagcctttcacttgctctgtgtgtaaaatctctgctgcctgcaatgggagggcttacgcgatgtaattacaggaatctgcctgttctgcaga

SEQ ID NO: 713135 - DNA, 1336 bp, Homo sapiens
ctcttcttttccttcccttggacatcagaaatccaggctttctagcctttagactccaggacttaacaccagtggtccccagggttttcaggcctttggccttggactgagaattacaccattgacttccctggttctgaggcttttggacttggacagagccatgctactggcatcccagggtctgaagcttgcatacrgtctattgtgggacttctcagcctccataattgcatgagctaattcccctaataaattccctcttatatatcttatctattctgttggttctctctctctgtagaatgctggacaatgatacacaattcaaatgttagttggggaaatttgaaagttcttcacttttattgtacagtggcacaaatatttttctcaatttatctccctctttctctctctttgtgtgtgtgtgactgacatatgacacctttgctaattgataaacaataaggtactgaattgctattttcaccagtttagtctttttagtaacaaatgccttaatgatttaggattctggaatcctgagtaaggtgaacattcttctttgacaatacaactagctaggaatttcttagctagctgagcaaagattcaaccaagcaacacttttgtaatgcgtatgttaaaagaaaaacttctgataaattaaatttaatagagtttacctgagcaaagaatgattcatgaattaagcatcactcagaacccagagaggtctgagagctcagtgcagcaaagtgagcacatagtatttatagacagaaaaatgaaatgacatgcagaaacagcttgattgacaggtgagcatttgccttctttgggcatggtctgatcagttggcagtctgtgattggctaaagcttggctgctgtgtatgtctgagactcagctacttgctaggagaatgtactcttaagtcggctgcagtttgctgcagataaactcaaggtatggagacagctttaggacatatttaatttaatttaatttaatgagtgtattttttaataagtaaaaacaaactgtattttagccttgaattcaaaattaggttattgatccatatcttgacaaattattagccagctgtctattattaaaacccagaaagaaaatcacagcactggaataatgcagtaccaaagtgggcaacttagtaaaccttgtacattgcaagacagtctgctctacagaaagattcggatgcacagagaaaaaagggatgaatgttagaattgctgcttacagcaactcacctttcagaaaccaatgcaaattttcagaaatcacaaaatatgtttccaagacaaag

SEQ ID NO: 713136 - DNA, 1245 bp, Homo sapiens
gtagagctaagtagtggtgacagagaccttatgcttaaataaatcttcccaaatccaaacaatctttaaaaaaaaaaactcgagttacctgggtcaacattcttaatagatgattacaaagatatagcacagttggctttttttttcagacttctttagaagtttccttttcattttttcaaggctgttttaatagttttctcagtattttttcagtctctactaacatttcttttctactgtcatccacctcaaagccaaagccacatattttatgtttttatatggtagcactccttttttggaacccatttctgcatcagttatctactgccacaattatggtacataacaaatctgtgcaaaaattaatgatgccaaccaatgagcatttatttatctcatctggctgtgtttcaccatttagaatgagtagctcttcaggttttaatctggctcactaatctttctggattttagtagactgtcaactgggataccaggggatactgggacacctgtgtttcatttgtcacataygagctaatacggtgatcataacagtgttagagaacaagaatgagcgtggaaccacatgcttttttaatcctatacatggatcacgtctgctgacatcccttttgtcaagcacataacttggctgaactcagaatcaagggactcacaattacactttgcctcactggtgaaaagaactaggaagttacatggcggaaagtgtagttacaagcccattgctaggatttgactgtatcccctaaaagtccatgtggtgaaaactcaattgccaatgtaacagtatcaagtggtggggcttacagggtgactgggtcatgggggcagagctctcatgaatgaattaatgctttcatctgggggctgagttagtcctcacaagaataaattagttctcctggggaggggttagttatcacaagtgcagtttgttgtaaaagtgagtgtggcttcctgagatttctcttactccttctcttgtcatgtgatcccttccatttttctgccatgttatgaagcggcacagagctctcaccagatgcagacaccaaatcttggacttcccagcctctaactggactaaataaacctctattctttatgaaagacccagtctcaggtattttgttactccaacagaaaatagactaagacaaaaagttggtcccaagaagtggtgttggtgccaaaacaatacctgaaaatatg

SEQ ID NO: 713137 - DNA, 1245 bp, Homo sapiens
gtagagctaagtagtggtgacagagaccttatgcttaaataaatcttcccaaatccaaacaatctttaaaaaaaaaaactcgagttacctgggtcaacattcttaatagatgattacaaagatatagcacagttggctttttttttcagacttctttagaagtttccttttcattttttcaaggctgttttaatagttttctcagtattttttcagtctctactaacatttcttttctactgtcatccacctcaaagccaaagccacatattttatgtttttatatggtagcactccttttttggaacccatttctgcatcagttatctactgccacaattatggtacataacaaatctgtgcaaaaattaatgatgccaaccaatgagcatttatttatctcatctggctgtgtttcaccatttagaatgagtagctcttcaggttttaatctggctcactaatctttctggattttagtagactgtcaactgggataccaggggatactgggacacctgtgtttcatttgtcacatacgagctaatacggtgatcataacagtgttagagaacaagaatgagcgtggaaccacatgcttttttaatcctatacatggatcacgtctgctgacatcccttttgtcaagcacataacttggctgaactcagaatcaagggactcacaattacactttgcctcactggtgaaaagaactaggaagttacatggcggaaagtgtagttacaagcccattgctaggatttgactgtatcccctaaaagtccatgtggtgaaaactcaattgccaatgtaacagtatcaagtggtggggcttacagggtgactgggtcatgggggcagagctctcatgaatgaattaatgctttcatctgggggctgagttagtcctcacaagaataaattagttctcctggggaggggttagttatcacaagtgcagtttgttgtaaaagtgagtgtggcttcctgagatttctcttactccttctcttgtcatgtgatcccttccatttttctgccatgttatgaagcggcacagagctctcaccagatgcagacaccaaatcttggacttcccagcctctaactggactaaataaacctctattctttatgaaagacccagtctcaggtattttgttactccaacagaaaatagactaagacaaaaagttggtcccaagaagtggygttggtgccaaaacaatacctgaaaatatg

SEQ ID NO: 713138 - DNA, 1923 bp, Homo sapiens
agcgattctcctgcctcagcctccctagtggctgggattacaggtgcctgccaccacacccagccaatttttgtatttttagtagagatggggtttctctattttggccaggttggtcttgaactcctgacctcaggtgatccacccacctcaaccttccaaagtgtttttttttttttgttcccccacataaaatcatctctaacacagttcacaattgtaggttaggaactatgatttaccactaggctattattctattcatgcaaagcagaacgaaaatctctatgaccatatttaatgcacaagaatatgagatgacgtgatcaaaaataattatcagttttatttttgttcttcttcaccagtccgtccaacaggcactctagttttaccttttgattatttaaatagatgactttttttttttaaatcttcttgactattgtcatggttctggtttctatcatttattatcttggcttctgtaataatcttctaatttcagttcttcccatcacttagaaaactttcctcaaaggtataattstaacccaaaatatcagaatgtttgcttcttatgtgaaagaaaatttagaagcaaaaacataaagaatgagctaaaaaaaagatccaaaattctcaatcatagtttcattggccctcctgacctggccttgcccatatctctagttttctccttggctaattcctataggcacgctctgctggaaacactcctctgtacattgtattctcctgaaatttgtttttttccatatgtgttcctttgctttctgttacctgatattttattttggaaacttcctctttaatattcatgtttatcccataaatttgttacgtaactttccactataacattcattactttttctatatatttgtttgtttttctttttttcttttttttttttttttgagacggagtctcgctctgtcgcccaggctggagtgcagtggcgggatctcggctcactgcaagttccgcctcccgggttcacgccattctcctgcctcagcctcccaagtagctgggactacaggcgcccgccactacgcccggctaattttttgtatttttagtagagacggggtttcaccgttttagccgggatggtctcgatctcctgacctcgtgatccacctgcctcggcctcccaattgtttgtttttcttgacttttagaccatgaaatattaagtgcaggagatctgctttatctttgtatcctaagggttaacaaccgtataaggcatgtaaataggtcctcaatattttttgaagaaggtgagaataaaatcttccagagtcaccaggccgcatcatacagatcatatttgtatttttatagcactaatgacttcttctattgtagaaaatgtttacaaagtaatgtaatatattgtttaagtgtgtatgtgtgttcttcattagacagttaccttcttttgtaaaaaactgtcttatttatctgttttaccaagtacttggaagggtgcttaacactaaatagtgatattcattgattattgaataattgctcaaattctttgattattatagcaattctgaaatttgcttaactggattcacaaattatagaacaagaatttcttctttgcttgtgtaaagttggatatcttttatttgcagtttctgttagaattcccaagctgattaattccatagacatacatatacataatatatataaatatatataaaaatatataaaaatatataaatatatataaaaacataaatatatatatatataaaatcaggctccctactttaagtagtattgagtaaaaagttcatgattctttaggacagttataatcaagtccctcttcaaataaaaatgtctacatttctttcaaatacagtataattaca

SEQ ID NO: 713139 - DNA, 1923 bp, Homo sapiens
agcgattctcctgcctcagcctccctagtggctgggattacaggtgcctgccaccacacccagccaatttttgtatttttagtagagatggggtttctctattttggccaggttggtcttgaactcctgacctcaggtgatccacccacctcaaccttccaaagtgtttttttttttttgttcccccacataaaatcatctctaacacagttcacaattgtaggttaggaactatgatttaccactaggctattattctattcatgcaaagcagaacgaaaatctctatgaccatatttaatgcacaagaatatgagatgacgtgatcaaaaataattatcagttttatttttgttcttcttcaccagtccgtccaacaggcactctagttttaccttttgattatttaaatagatgactttttttttttaaatcttcttgactattgtcatggttctggtttctatcatttattatcttggcttctgtaataatcttctaatttcagttcttcccatcacttagaaaactttcctcaaaggtataattgtaacccaaaatatcagaatgtttgcttcttaygtgaaagaaaatttagaagcaaaaacataaagaatgagctaaaaaaaagatccaaaattctcaatcatagtttcattggccctcctgacctggccttgcccatatctctagttttctccttggctaattcctataggcacgctctgctggaaacactcctctgtacattgtattctcctgaaatttgtttttttccatatgtgttcctttgctttctgttacctgatattttattttggaaacttcctctttaatattcatgtttatcccataaatttgttacgtaactttccactataacattcattactttttctatatatttgtttgtttttctttttttcttttttttttttttttgagacggagtctcgctctgtcgcccaggctggagtgcagtggcgggatctcggctcactgcaagttccgcctcccgggttcacgccattctcctgcctcagcctcccaagtagctgggactacaggcgcccgccactacgcccggctaattttttgtatttttagtagagacggggtttcaccgttttagccgggatggtctcgatctcctgacctcgtgatccacctgcctcggcctcccaattgtttgtttttcttgacttttagaccatgaaatattaagtgcaggagatctgctttatctttgtatcctaagggttaacaaccgtataaggcatgtaaataggtcctcaatattttttgaagaaggtgagaataaaatcttccagagtcaccaggccgcatcatacagatcatatttgtatttttatagcactaatgacttcttctattgtagaaaatgtttacaaagtaatgtaatatattgtttaagtgtgtatgtgtgttcttcattagacagttaccttcttttgtaaaaaactgtcttatttatctgttttaccaagtacttggaagggtgcttaacactaaatagtgatattcattgattattgaataattgctcaaattctttgattattatagcaattctgaaatttgcttaactggattcacaaattatagaacaagaatttcttctttgcttgtgtaaagttggatatcttttatttgcagtttctgttagaattcccaagctgattaattccatagacatacatatacataatatatataaatatatataaaaatatataaaaatatataaatatatataaaaacataaatatatatatatataaaatcaggctccctactttaagtagtattgagtaaaaagttcatgattctttaggacagttataatcaagtccctcttcaaataaaaatgtctacatttctttcaaatacagtataattaca

SEQ ID NO: 713140 - DNA, 1923 bp, Homo sapiens
agcgattctcctgcctcagcctccctagtggctgggattacaggtgcctgccaccacacccagccaatttttgtatttttagtagagatggggtttctctattttggccaggttggtcttgaactcctgacctcaggtgatccacccacctcaaccttccaaagtgtttttttttttttgttcccccacataaaatcatctctaacacagttcacaattgtaggttaggaactatgatttaccactaggctattattctattcatgcaaagcagaacgaaaatctctatgaccatatttaatgcacaagaatatgagatgacgtgatcaaaaataattatcagttttatttttgttcttcttcaccagtccgtccaacaggcactctagttttaccttttgattatttaaatagatgactttttttttttaaatcttcttgactattgtcatggttctggtttctatcatttattatcttggcttctgtaataatcttctaatttcagttcttcccatcacttagaaaactttcctcaaaggtataattgtaacccaaaatatcagaatgtttgcttcttatgtgaaagaaaatttagaagcaaaaacataaagaatgagctaaaaaaaagatccaaaattctcaatcatagtttcattggccctcctgacctggccttgcccatatctctagttttctccttggctaattcctataggcacgctctgctggaaacactcctctgtacattgtattctcctgaaatttgtttttttccatatgtgttcctttgctttctgttacctgatattttattttggaaacttcctctttaatattcatgtttatcccataaatttgttacgtaactttccactataacattcattactttttctatatatttgtttgtttttctttttttcttttttttttttttttgagacggagtctcgctctgtcgcccaggctggagtgcagtggcgggatctcggctcactgcaagttccgcctcccgggttcacgccattctcctgcctcagcctcccaagtagctgggactacaggcgcccgccactacgcccggctaattttttgtatttttagtagagacggggtttcaccgttttagccgggatggtctcgatctcctgacctcgtgatccacctgcctcggcctcccaattgtttgtttttcttgacttttagaccatgaaatattaagtgcaggagatctgctttatctttgtatcctaagggttaacaaccgtataaggcatgtaaataggtcctcaatattttttgaagaaggtgagaataaaatcttccagagtcaccaggccgcatcatacagatcatatttgtatttttatagcactaatgacttcttctattgtagaaaatgtttacaaagtaatgtaatatattgtttaagtgtgtatgtgtgttcttcattagacagttaccttcttttgtaaaaaactgtcttatttatctgttttaccaagtacttggaagggtgcttaacactaaatagtgatattcattgattattgaataattgctcaaattctttgattattatagcaattctgaaatttgcttaactggattcacaaattatagaacaagaatttcttctttgcttgtgtaaagttggatatcttttatttgcagtttctgttagaattcccaagctgattaattccatagacatacatatacataatatatataaatatatataaaaatatataaaaatatawaaatatatataaaaacataaatatatatatatataaaatcaggctccctactttaagtagtattgagtaaaaagttcatgattctttaggacagttataatcaagtccctcttcaaataaaaatgtctacatttctttcaaatacagtataattaca

SEQ ID NO: 713141 - DNA, 1923 bp, Homo sapiens
agcgattctcctgcctcagcctccctagtggctgggattacaggtgcctgccaccacacccagccaatttttgtatttttagtagagatggggtttctctattttggccaggttggtcttgaactcctgacctcaggtgatccacccacctcaaccttccaaagtgtttttttttttttgttcccccacataaaatcatctctaacacagttcacaattgtaggttaggaactatgatttaccactaggctattattctattcatgcaaagcagaacgaaaatctctatgaccatatttaatgcacaagaatatgagatgacgtgatcaaaaataattatcagttttatttttgttcttcttcaccagtccgtccaacaggcactctagttttaccttttgattatttaaatagatgactttttttttttaaatcttcttgactattgtcatggttctggtttctatcatttattatcttggcttctgtaataatcttctaatttcagttcttcccatcacttagaaaactttcctcaaaggtataattgtaacccaaaatatcagaatgtttgcttcttatgtgaaagaaaatttagaagcaaaaacataaagaatgagctaaaaaaaagatccaaaattctcaatcatagtttcattggccctcctgacctggccttgcccatatctctagttttctccttggctaattcctataggcacgctctgctggaaacactcctctgtacattgtattctcctgaaatttgtttttttccatatgtgttcctttgctttctgttacctgatattttattttggaaacttcctctttaatattcatgtttatcccataaatttgttacgtaactttccactataacattcattactttttctatatatttgtttgtttttctttttttcttttttttttttttttgagacggagtctcgctctgtcgcccaggctggagtgcagtggcgggatctcggctcactgcaagttccgcctcccgggttcacgccattctcctgcctcagcctcccaagtagctgggactacaggcgcccgccactacgcccggctaattttttgtatttttagtagagacggggtttcaccgttttagccgggatggtctcgatctcctgacctcgtgatccacctgcctcggcctcccaattgtttgtttttcttgacttttagaccatgaaatattaagtgcaggagatctgctttatctttgtatcctaagggttaacaaccgtataaggcatgtaaataggtcctcaatattttttgaagaaggtgagaataaaatcttccagagtcaccaggccgcatcatacagatcatatttgtatttttatagcactaatgacttcttctattgtagaaaatgtttacaaagtaatgtaatatattgtttaagtgtgtatgtgtgttcttcattagacagttaccttcttttgtaaaaaactgtcttatttatctgttttaccaagtacttggaagggtgcttaacactaaatagtgatattcattgattattgaataattgctcaaattctttgattattatagcaattctgaaatttgcttaactggattcacaaattatagaacaagaatttcttctttgcttgtgtaaagttggatatcttttatttgcagtttctgttagaattcccaagctgattaattccatagacatacatatacataatatatataaatatatataaaaatatataaaaatatataaatatatataaaaayataaatatatatatatataaaatcaggctccctactttaagtagtattgagtaaaaagttcatgattctttaggacagttataatcaagtccctcttcaaataaaaatgtctacatttctttcaaatacagtataattaca

SEQ ID NO: 713142 - DNA, 719 bp, Homo sapiens
ttttgttccacaaataatcactatttttaaaatacataaatcatataattaagaagtgctaataacaaaaacgattatttgtgtttactaattggtatgctcaaaatatctataagtaagtttgcaggccagtaaaagctttaaagggcccgacactaaaattttctaaagatattctcctctttaatattttcactaacattaatttattgcccatctatccacaccatgctggacacatcttcaaattttatgcaatttaatttttacaagtgcaagatatgattgctatctcaattattttacagatgaaaaaactaagattttataagagtaaataatgtaccccaaattcaaacctaaatatgttgttctgccatgttttttcttacacataaatttctttggtaaaatttagaaggatatacacctaataacaacgaagattaccaacagccttctaatcagtggaaactatatctagtgctttatattcagcactgtacattcctatcacaactcagaaaaaaaaagtacttttcacatttgaaataactgaggctcagaaagtttgtacaacttgcccacatagtagcacagtttaccaagaacctataaagtgcagtccttgttgccactgtgatatatttatttaaaaatagcacktcacagtgatatttatttatttaaaaaataaataatccgggagcatgaattag

SEQ ID NO: 713143 - DNA, 1295 bp, Homo sapiens
tatactattaattgatacattttcctctcattctcctcctctgtcacaattctaaattcatatatacaaagtttcagtgaagaactggaaagaaagcacatggagaagatcacaaaagtggacacgggctggacgcggtggctcatgcctgtaatcccagcactttgggaggccgaggtgggtggatcacgaggtygggagatcgagaccatccctgctaacacggtgaaaccccgtctctgctaaaaaaatacaaaagattagccgggcgtggtggtgagcgcctgtagtgccagctactcaggaggctgaggcaggagaatggcgtgaacccaggaggcggagcttgcagtgagccgagatcatgccactgcactccagcctaggcgacagagcaagactctgtctcaaaaaaaaaaaaaaaaaaaaaaaaacaaaaataaaaaggggacatgggctggaccagtggtatgttgtatccatatccaggcaggtgaagtctccacaattaaaatactcttggtatgacagagtcaagaaaatccctggcaataatttatctagaattcttaaaaacttttcattcgttcataaaatcagagagccaggtaatagatacggaaaactttaagtggaccagatttgctttaaaaacagaattgtccagctttttagttttagaactgaggaagagattgagataccacccaaagtcacaggagggagagagagaaccattactaaaaacaaccaataaggttttggtcaggcagaatttactctatttgaagaaaaatgtaggaaacaaaaacaaagtaactaaaaacatggggataaagggaaaacaatatgtaaggaaaataaagtagcattttatccttgaaaccaggaagagaaagtgcatgcctttgaaaataatctattgcaggaaacagaataaagtatttttatagacagaaaaatttaataacagcagtataggaaacatgaagagcaaaatcgctaaagtgagttaagatagagtatgaattaataaggaagaattgctagaaaactaacaatgaatgaacttcattaaattttacattggaggaagtgcacataataccactggtattatgcactggttatatgcaggagaaacttgagctattttagactacagagatgatataaaaaagaaaactatgagatagaaggtactatttttgaatagattgggggcttagtatgtgtcaggttttgtattagtccgttttcgtactgctatgaagacatacctgagagtaggtaat

SEQ ID NO: 713144 - DNA, 601 bp, Homo sapiens
ttttctaagtgtcagcagttttggccaccattgcttatgctccatcagtgcgaatctcgaagcagtgaaaaaggcatattatgtcttaatattattataaaatagctttgattttagactccctgaaaagttattggtgttctccagggattcatgggacacaatcagggaactattagtctagtttggtactggagactttcctctgtgggccttcttttttctctctsagctctaatccagagattttccttggtagttctgcattacagctgttgctttcaggattccaggttatctttttgttgtttcttacctctttgttttcttacagcacaaaatttatatgttagtaaatttttctgagtccttgcatatataaaagttcattcattccatctttacacatgaagggttagctgaacatggaattatagtttgaaaataatttctactaaaaatttctcattgctctgttgtcttctagtgctcactgttgctattttgtcggcaagaagatgattctatttttatttttatttttatttttttttttttgagaccaggtctccctctgtcacccaggctggagtgcagtggc

SEQ ID NO: 713145 - DNA, 1291 bp, Homo sapiens
ctttggttgaagcaaaattgcatattttgagttttctcagttttcccaacctgacatttaaggcgcacacctaacaacactgagcccttaattccctggatattgtgaatgcttcgaagacatcatggccttctctcaaaggtttgataacttgcacttcactatataattcctcttgcttgtcagaagtgcaattcagctggtcacttcctctgttatttataattaaatgacttaccatacattccttaaaagagacttccagatgccctgatagaaaatgccaatgtcttcccacttccttgtgtgtgtccacctttgactctccattcgtggcgcccccaagatgaccttcatcgtctaggggtcttatctctaggacctcccaggccgtacgattcctgcagtccctccgtctgtgtttaagtcttgcttgtgctccacaaaatccttctgccttaacagccctacagctgcacggcctcctcttctgttcccttctgtctgtcttgccctgccctgccactgagcactcagattttataacatcttgccttgccaactggttttgtgagtatcatataagtatctgttaattatagatcttttacaaataacatatacctgatacagctgaaggagactgaaatgtccccactcttacaaatccatgttagtgctgccctagactacccttaaaaagaattttgtgtatatttgtgaaatccacattttctacttttactctctctatatatatctcaataacctatgtattactttgtgcttttaaacataaagataatcatagtgttgtatcattttattctatgctttttatactcacaattatgttttaagattcagttttgttaatatatgcaaagcttttagaacagtgcctgtaaacaccatataagtattagctactattattttcagtattattattattgttattttgaggcagcatctcattctrtcacccaggctgagtgcagtggcatgatcacagctcactacgcctcaacctcccagggtcaagtgatcttccaacctcagcctcctgagtagctgggactaactacaggcatgcaccccatgtccagctaatttttgtatttttggtagagatgagatctcaccatgttgcacaggctggtctcaaactcctgggctcaagcaatctgcttgcttcagcctcccaaagtgctgggattacaggtgtgaaccaccacacccagcctattattttcaatattattaataaatgtatttacatcattccttg

SEQ ID NO: 713146 - DNA, 1291 bp, Homo sapiens
ctttggttgaagcaaaattgcatattttgagttttctcagttttcccaacctgacatttaaggcgcacacctaacaacactgagcccttaattccctggatattgtgaatgcttcgaagacatcatggccttctctcaaaggtttgataacttgcacttcactatataattcctcttgcttgtcagaagtgcaattcagctggtcacttcctctgttatttataattaaatgacttaccatacattccttaaaagagacttccagatgccctgatagaaaatgccaatgtcttcccacttccttgtgtgtgtccacctttgactctccattcgtggcgcccccaagatgaccttcatcgtctaggggtcttatctctaggacctcccaggccgtacgattcctgcagtccctccgtctgtgtttaagtcttgcttgtgctccacaaaatccttctgccttaacagccctacagctgcacggcctcctcttctgttcccttctgtctgtcttgccctgccctgccactgagcactcagattttataacatcttgccttgccaactggttttgtgagtatcatataagtatctgttaattatagatcttttacaaataacatatacctgatacagctgaaggagactgaaatgtccccactcttacaaatccatgttagtgctgccctagactacccttaaaaagaattttgtgtatatttgtgaaatccacattttctacttttactctctctatatatatctcaataacctatgtattactttgtgcttttaaacataaagataatcatagtgttgtatcattttattctatgctttttatactcacaattatgttttaagattcagttttgttaatatatgcaaagcttttagaacagtgcctgtaaacaccatataagtattagctactattattttcagtattattattattgttattttgaggcagcatctcattctgtcacccaggctgagtgcagtggcatgatcacagctcactacgcctcaacctcccagggtcaagtgatcttccaacctcagcctcctgagtagctgggactaactacaggcatgcaccccatgyccagctaatttttgtatttttggtagagatgagatctcaccatgttgcacaggctggtctcaaactcctgggctcaagcaatctgcttgcttcagcctcccaaagtgctgggattacaggtgtgaaccaccacacccagcctattattttcaatattattaataaatgtatttacatcattccttg

SEQ ID NO: 713147 - DNA, 1291 bp, Homo sapiens
ctttggttgaagcaaaattgcatattttgagttttctcagttttcccaacctgacatttaaggcgcacacctaacaacactgagcccttaattccctggatattgtgaatgcttcgaagacatcatggccttctctcaaaggtttgataacttgcacttcactatataattcctcttgcttgtcagaagtgcaattcagctggtcacttcctctgttatttataattaaatgacttaccatacattccttaaaagagacttccagatgccctgatagaaaatgccaatgtcttcccacttccttgtgtgtgtccacctttgactctccattcgtggcgcccccaagatgaccttcatcgtctaggggtcttatctctaggacctcccaggccgtacgattcctgcagtccctccgtctgtgtttaagtcttgcttgtgctccacaaaatccttctgccttaacagccctacagctgcacggcctcctcttctgttcccttctgtctgtcttgccctgccctgccactgagcactcagattttataacatcttgccttgccaactggttttgtgagtatcatataagtatctgttaattatagatcttttacaaataacatatacctgatacagctgaaggagactgaaatgtccccactcttacaaatccatgttagtgctgccctagactacccttaaaaagaattttgtgtatatttgtgaaatccacattttctacttttactctctctatatatatctcaataacctatgtattactttgtgcttttaaacataaagataatcatagtgttgtatcattttattctatgctttttatactcacaattatgttttaagattcagttttgttaatatatgcaaagcttttagaacagtgcctgtaaacaccatataagtattagctactattattttcagtattattattattgttattttgaggcagcatctcattctgtcacccaggctgagtgcagtggcatgatcacagctcactacgcctcaacctcccagggtcaagtgatcttccaacctcagcctcctgagtagctgggactaactacaggcatgcaccccatgtccagctaatttttgtatttttggtagagatgagatctcaccatgttgcacaggctggtctcaaactcctgggctcaagcaatctgcttgcttcagcctcccaaagtgctgggattacaggtgtgarccaccacacccagcctattattttcaatattattaataaatgtatttacatcattccttg

SEQ ID NO: 713148 - DNA, 1291 bp, Homo sapiens
ctttggttgaagcaaaattgcatattttgagttttctcagttttcccaacctgacatttaaggcgcacacctaacaacactgagcccttaattccctggatattgtgaatgcttcgaagacatcatggccttctctcaaaggtttgataacttgcacttcactatataattcctcttgcttgtcagaagtgcaattcagctggtcacttcctctgttatttataattaaatgacttaccatacattccttaaaagagacttccagatgccctgatagaaaatgccaatgtcttcccacttccttgtgtgtgtccacctttgactctccattcgtggcgcccccaagatgaccttcatcgtctaggggtcttatctctaggacctcccaggccgtacgattcctgcagtccctccgtctgtgtttaagtcttgcttgtgctccacaaaatccttctgccttaacagccctacagctgcacggcctcctcttctgttcccttctgtctgtcttgccctgccctgccactgagcactcagattttataacatcttgccttgccaactggttttgtgagtatcatataagtatctgttaattatagatcttttacaaataacatatacctgatacagctgaaggagactgaaatgtccccactcttacaaatccatgttagtgctgccctagactacccttaaaaagaattttgtgtatatttgtgaaatccacattttctacttttactctctctatatatatctcaataacctatgtattactttgtgcttttaaacataaagataatcatagtgttgtatcattttattctatgctttttatactcacaattatgttttaagattcagttttgttaatatatgcaaagcttttagaacagtgcctgtaaacaccatataagtattagctactattattttcagtattattattattgttattttgaggcagcatctcattctgtcacccaggctgagtgcagtggcatgatcacagctcactacgcctcaacctcccagggtcaagtgatcttccaacctcagcctcctgagtagctgggactaactacaggcatgcaccccatgtccagctaatttttgtatttttggtagagatgagatctcaccatgttgcacaggctggtctcaaactcctgggctcaagcaatctgcttgcttcagcctcccaaagtgctgggattacaggtgtgaaccaccacacccagcctattattttcaatattattaataaatgkatttacatcattccttg

SEQ ID NO: 713149 - DNA, 1882 bp, Homo sapiens
gaaatcatggaggggtcaggaagcaatcatgacggatgaggggtctggcatcttcactggctggatgcagtgatctgatgagtttcagtttcttacctgagagtcagtttcctgaggaaggaactcagataaaacaatgtaagtttcaagttttaagatcaaggagagtcaatttctgtttatttaaaaaaccataaacatcagttctatgggacaattgggccagtatcaacaaaaaggtcagtcaacattatgggaacacaagaagtatgggtaagataagccatgaggttgatacaaatatgtaccataaagagtagtattttaggatataggctttggagtcagatgagtatttgaatattaatacttctcctttaatgctatgtggcttggattgattaatcttctgagccatagtttccttatcagtaatacatggataattctgtatctgttactgagatgctgaaagaatttattgagaaaatataggcaaaatttttagcacagtcccagacacatagaagcactaaataaaggcagttattattacagttatttcttcccaagtgtaccttatgtttgatcctgtactatcttttgaatctcctggcatatatcaatttatgaatatgtaatgtgggggccataggctcttggccccctaaaggttcactgaaaatcactaacatgaggcagattgcttagtaggagaaaaagcatacaaatctatttgccatgtatacacgggagccttcagaatgaaggcccagctactcagtgtggtacagaagcttataaaccatcttgaggttacagaaggaatgggggcttggatcctggtaaaacaggttatagaagagggggaagaggaattctattaaggggcaatgcaggattaacttgtaaatagttctgtttggaatttaaatgataaaggggtctgctcaggtgtggttatatcttggtaagaaaaaacaattgttcttggtgggtctgcatcttaggcagctaaagaaacttcagcttcgcttggacgggggcagggaaggtcagagagaccctgacgcttcttcagctcaggaaggcaaaacatcatattctggggtattggtttttgagccccaacagttatcaataattgtatgttgagttccaggaagttttcttgtatttaagtctggattttttactgaccaaacttctgaaatagctgaatcaattttctaatccacaacttttttctataacgataaaaggagattctacctagactgcttgtttaattttggggatataaaacttaagttttcttttttttaagtctcctgaagtcttgaatggttgtaagactcacacaataaaaaggagtattagcatttaaatatcagttggcaactgagtaggctgtactctcatagaactggaggtttcttacctttttctcttagaaagtaagtacttttcttacttagtaagaattttstcttgctggagtggcacaaagggcggtgggtggattcaatttcagtcatgtcaaccttctctttatttccctcctctccctacagataattaaggactacgtggtgtgtataaatagcttcagttgagaacatcctcttatctttgcccctctcatcaccaagtagggcccctaactgatgttgcaattagagtactgatttagctctgagagacacattgcaaatgatctgctgaggaggatggtatttatatcagtactgactgatgaagactttgtcaactgtacctttggcagatcatctgatggcatgcccctgggttaatctacttctcattataaacgatgacccatgatgatgtgttttctgaaccactcatcttgcatagagtg

SEQ ID NO: 713150 - DNA, 630 bp, Homo sapiens
tccaatctaaactaaaacgcagcgcccctcccaaatgctttctcagccatccctattccagagcaggaacaaagacgctgggaccagctcaagacacagacgtctggacagccttactggagacggtggggacttggaggccagggagggcgaggggccggggggacaaggaggggcggaggaggggaagctttggtccagcctggcagcctgaggtccagtcctactctgcctaccccgccgttaggcgagtccagccctgcaggagtgccctaagcactaaagagatttccccagcttgccagctttcaccccggagctcagcagatggctgtgactgcctatggtggggtctccggcagcttgcttcccgcaaagctccttccagggctcagggcttccttcggggtttcctgctacggtacgaactcactcgagcctcatcacacccatttcacaggtgggctcagagagacgcctgcyggggcacacggctagacagcagcaggctgagctgagaatatgcccaccgggggtggggcggcagggctggaggtgccagggctgctccccaggtggggtgggaccgggagaagagacatcgatacccctgtggatgcctgaggtcaa

SEQ ID NO: 713151 - DNA, 627 bp, Homo sapiens
ggctgatgtggggggcatttgggagcactggggtgatgaaaatattctaggtcctaatggtggcagccacaccactgtggacatctcatgccaactgtcaaactgcccggagtgaaggtaacagtatttccaaatccaatcataagcactgtggctctgggtatggacarcagacaacttttgaaagaaactccaactccgatcagggaaaactttggtcactacgttgcccttgtaagtgtcatttcagtcaaactctgagaaataaattgggccttttgttgtctggactcaatctaagcacgtctaagaacaaactcattaaagccctgttcctataacctgtaaaaataccttctattcatgattcctgctctcctgctgaacacagaccagggcttacagttttacgtgaactctgtaatgctcagggtcaataaaggttactttcatctggtgagggtcagtttgccacagcctaaccacttactacaactctccccatttcagtcagcatttctggaggtttatatggaatctatggaacagacacccctacaactttggaaagcgaccttcaatatgcactacatatattgtgtagtaaagtacatacgcagacaggtc

SEQ ID NO: 713152 - DNA, 1103 bp, Homo sapiens
ttggttcccacagcacatggtggggctgagaaaacatctgatgagagacacatatatatttacatgctttggtcttaacatcttttcctttatatactgtggatattgctttggttataaagcaggaaagatgggaagcttcacagccgcctgcaggctttctagctaaagagcaaatggcaacaaaatgcaatttttgcagtttctcacaatagcaatctgcatagtgaatcacaatctaaatgtctccagcaatacccttcaactgctctggggactaatcttatttcagcagtttaaaaaaaaaaatcacacaccaaagagtagctaaacaatatttaccactttgggactctttctgacttaacaatcgtaatgtccccactgtgaagctgccagaatggtatgcagcagataagagtgtccttcattagtggctgtttaggggttgggggtctttgggggcagtttcagcacggggtgcagggtttcttcttggattaaggaaaatgttctaaaattgattgtgatggttgtacacctctgtgaatacactaaaagccactgaattgtacacatttacactgttgaatcagaaagaagcmcaaagtggtaaatattatttaattaacaattcacatggtgaactgtagggtatgctaacagttgttaaaggaaaaaaaaaaaatagtgtccttcaggaccctgtccctccccccacccccaaaataattaactgtgacagcaatatcctcaagagtctccaaatgacttgtcctaagtacaggttgcatatctcttatctgaaatgcttgggaccagaagagtttcagattccagacttttttcagattttggaacatttgcatatgcaaactggtagtgcattcctaatctgtaaaatctgaaatccgaaatgcttttgagcatgacctttgatcatcaagtcagtgctcaaaaagtttcggtcggatcttagagcattttgcaatagggatgctcaacctgtacaaaggtaaatttacccaacctctcttttcttggcctaaatgcatccaaaaggcagtttttgagacacacaaaagattctgagtcatggcttg

SEQ ID NO: 713153 - DNA, 1103 bp, Homo sapiens
ttggttcccacagcacatggtggggctgagaaaacatctgatgagagacacatatatatttacatgctttggtcttaacatcttttcctttatatactgtggatattgctttggttataaagcaggaaagatgggaagcttcacagccgcctgcaggctttctagctaaagagcaaatggcaacaaaatgcaatttttgcagtttctcacaatagcaatctgcatagtgaatcacaatctaaatgtctccagcaatacccttcaactgctctggggactaatcttatttcagcagtttaaaaaaaaaaatcacacaccaaagagtagctaaacaatatttaccactttgggactctttctgacttaacaatcgtaatgtccccactgtgaagctgccagaatggtatgcagcagataagagtgtccttcattagtggctgtttaggggttgggggtctttgggggcagtttcagcacggggtgcagggtttcttcttggattaaggaaaatgttctaaaattgattgtgatggttgtacacctctgtgaatacactaaaagccactgaattgtacacatttacactgttgaatcagaaagaagcccaaagtggtaaatattatttaattaacaattcacatggtgaactgtagggtatgctaacagttgttaaaggaaaaaaaaaaaatartgtccttcaggaccctgtccctccccccacccccaaaataattaactgtgacagcaatatcctcaagagtctccaaatgacttgtcctaagtacaggttgcatatctcttatctgaaatgcttgggaccagaagagtttcagattccagacttttttcagattttggaacatttgcatatgcaaactggtagtgcattcctaatctgtaaaatctgaaatccgaaatgcttttgagcatgacctttgatcatcaagtcagtgctcaaaaagtttcggtcggatcttagagcattttgcaatagggatgctcaacctgtacaaaggtaaatttacccaacctctcttttcttggcctaaatgcatccaaaaggcagtttttgagacacacaaaagattctgagtcatggcttg

SEQ ID NO: 713154 - DNA, 1103 bp, Homo sapiens
ttggttcccacagcacatggtggggctgagaaaacatctgatgagagacacatatatatttacatgctttggtcttaacatcttttcctttatatactgtggatattgctttggttataaagcaggaaagatgggaagcttcacagccgcctgcaggctttctagctaaagagcaaatggcaacaaaatgcaatttttgcagtttctcacaatagcaatctgcatagtgaatcacaatctaaatgtctccagcaatacccttcaactgctctggggactaatcttatttcagcagtttaaaaaaaaaaatcacacaccaaagagtagctaaacaatatttaccactttgggactctttctgacttaacaatcgtaatgtccccactgtgaagctgccagaatggtatgcagcagataagagtgtccttcattagtggctgtttaggggttgggggtctttgggggcagtttcagcacggggtgcagggtttcttcttggattaaggaaaatgttctaaaattgattgtgatggttgtacacctctgtgaatacactaaaagccactgaattgtacacatttacactgttgaatcagaaagaagcccaaagtggtaaatattatttaattaacaattcacatggtgaactgtagggtatgctaacagttgttaaaggaaaaaaaaaaaatagtgtccttcaggaccctgtccctccccccacccccaaaataattaactgtgacagcaatatcctcaagagtctccaaatgacttgtcctaagtacaggttgcatatctcttatctgaaatgcttgggaccagaagagtttcagattccagacttttttcagattttggaacatttgcatatgcaaactggtagtgcattcctaatctgtaaaatctgaaatccgaaatgcttttgagcatgacctttgatcatcaagtcagtgctcaaaaagtttcrgtcggatcttagagcattttgcaatagggatgctcaacctgtacaaaggtaaatttacccaacctctcttttcttggcctaaatgcatccaaaaggcagtttttgagacacacaaaagattctgagtcatggcttg

SEQ ID NO: 713155 - DNA, 586 bp, Homo sapiens
caaatacaagtaagcataatctacaagtaaatgtaaatcagcatcttgattgctcttttgaaaggagcaatagtgcctgggctgggcaaggttctttttcttggtcttggcactaataacttaacatatgttaacttcatgcatatttagtaatctacatacttataatctgtaagttatatttcgataaaagctttatctaagaatataaacaataaacagatagctgattatgggcaaaatatggctcaatgttgaaatctttaattttttttaaagaatgtgtatcttatctgtgcatgtgtcggtgagatccatgctgctattctcatcctgcagtaactagaagcagtgtaattactttttgaaaattttgaacatactcttctggaagcatgcagaatccactgttggaaaatacttatttgtagaggtcacaccttaattatttgrggccaaaatccactgtacttttggtattatttaataataatattgcttttctgttgagaaaggttggacactgctaattaaatagaattagactcaatgtttccccatctctgctgtcaaaatccattcactc

SEQ ID NO: 713156 - DNA, 1688 bp, Homo sapiens
tcataattagtatttctatcacagtggttattgcttttccaagcaaatttctcatattttgatgagtttgacagtctattaaaaaattagcttctagttcccagaatttatgtgcatttggcctttctttctccaccagtgttccacaagctgcggggaaggcacccagactcgaagcgccatttgccgaaagatgctgaaaaccggcmtctcaacggttgtcaattccaccctgtgcccgcccctgcctttctcttcctccatcaggccctgtatgctggcaacctgtgcaagtaagtatgtcagggctctgggaatggggagatgaaacccacacagcagcagctatagccaccacgccgtggccttccctaaactcaagacctgtgggaaatagtgggacagtagaaccccatggagggctgcaggcaggagagctcagctggagacggaaaaggaatcttaattacacgtggccaggctaaattctcctctccactggaaaaacagtttgcaggggggtagagcaaagttcacttgctggcatacagagatctggaagctggaggcagtgtattactaatgatgtctaatgttatccactctggggttttaaacgactctaaacagatttgttctgtttaatattaatccctagagccgcaacacttctaggctgtccttaccatgtcctttagggctctggtgccttgcaggacccagaaggcaaacatttagcggaagacattctcctctctgtcctctgcctctttttatgacgttgatttcttgtttaaaaattattttaatgagaggaaatgctttcccccgggatccccctccatctagaactctgcatctcagcttctaggagcaacaaggcccagcagggagacattgggttgcccactgcatctcattagttctgattgtggtggcagcttgatggtccacagccgggaatgaggtcctcccgaaaaacacaggcagtaaaggatggccccggccaaaataaaccccgaagaatactttctctcccgtcctccggcaccttcgtctctccttctcttctccactctggctctttcctttgcccctctctcctggctgcatctcactctgggttttctctctccccacctctttctctgtcccttcgggttcgctctccttccagggcccgggcggccatccacgaagcacagcccgcacatcgcggccgccaggaaggtctacatacagactcgcaggcagaggaagctgcacttcgtggtggggggcttcgcctacctgctccccaagacggcggtggtgctgcgctgcccggcgcgcagggtccgcaagcccctcatcacctgggagaaggacggccagcacctcatcagctcgacgcacgtcacggtggcccccttcggctatctcaagatccaccgcctcaagccctcggatgcaggcgtctacacctgctcagcgggcccggcccgggagcactttgtgattaagctcatcggaggcaaccgcaagctcgtggcccggcccttgagcccgagaagtgaggaagaggtgcttgcggggaggaagggcggcccgaaggaggccctgcagacccacaaacaccagaacgggatcttctccaacggcagcaaggcggagaagcggggcctggccgccaacccggggagccgcta

SEQ ID NO: 713157 - DNA, 1688 bp, Homo sapiens
tcataattagtatttctatcacagtggttattgcttttccaagcaaatttctcatattttgatgagtttgacagtctattaaaaaattagcttctagttcccagaatttatgtgcatttggcctttctttctccaccagtgttccacaagctgcggggaaggcacccagactcgaagcgccatttgccgaaagatgctgaaaaccggcctctcaacggttgtcaattccaccctgtgcccgcccctgcctttctcttcctccatcaggccctgtatgctggcaacctgtgcaagtaagtatgtcagggctctgggaatggggagatgaaacccacacagcagcagctatagccaccacgccgtggccttccctaaactcaagacctgtgggaaatagtgggacagtagaaccccatggagggctgcaggcaggagagctcagctggagacggaaaaggaatcttaattacacgtggccaggctaaattctcctctccactggaaaaacagtttgcaggggggtagagcaaagttcacttgctggcatacagagatctggaagctggaggcagtgtattactaatgatgtctaatgttatccactctggggttttaaacgactctaaacagatttgttctgtttaatattaatccctagagccgcaacacttctaggctgtccttaccatgtcctttagggctctggtgccttgcaggacccagaaggcaaacatttagcggaagacattctcctctctgtcctctgcctctttttatgacgttgatttcttgtttaaaaattattttaatgagaggaaatgctttcccccgggatccccctccatctagaactctgcatctcagcttctaggagcaacaaggcccagcagggagacattgggttgcccactgcatctcattagttctgattgtggtggcagcttgatggtccacagccgggaatgaggtcctcccgaaaaacacaggcagtaaaggatggccccggccaaaataaaccccgaagaatactttctctcccgtcctccggcaccttcgtctctccttctcttctccactctggctctttcctttgcccctctctcctggctgcatctcactctgggttttctctctccccacctctttctctgtcccttcgggttcgctctccttccagggcccrggcggccatccacgaagcacagcccgcacatcgcggccgccaggaaggtctacatacagactcgcaggcagaggaagctgcacttcgtggtggggggcttcgcctacctgctccccaagacggcggtggtgctgcgctgcccggcgcgcagggtccgcaagcccctcatcacctgggagaaggacggccagcacctcatcagctcgacgcacgtcacggtggcccccttcggctatctcaagatccaccgcctcaagccctcggatgcaggcgtctacacctgctcagcgggcccggcccgggagcactttgtgattaagctcatcggaggcaaccgcaagctcgtggcccggcccttgagcccgagaagtgaggaagaggtgcttgcggggaggaagggcggcccgaaggaggccctgcagacccacaaacaccagaacgggatcttctccaacggcagcaaggcggagaagcggggcctggccgccaacccggggagccgcta

SEQ ID NO: 713158 - DNA, 1688 bp, Homo sapiens
tcataattagtatttctatcacagtggttattgcttttccaagcaaatttctcatattttgatgagtttgacagtctattaaaaaattagcttctagttcccagaatttatgtgcatttggcctttctttctccaccagtgttccacaagctgcggggaaggcacccagactcgaagcgccatttgccgaaagatgctgaaaaccggcctctcaacggttgtcaattccaccctgtgcccgcccctgcctttctcttcctccatcaggccctgtatgctggcaacctgtgcaagtaagtatgtcagggctctgggaatggggagatgaaacccacacagcagcagctatagccaccacgccgtggccttccctaaactcaagacctgtgggaaatagtgggacagtagaaccccatggagggctgcaggcaggagagctcagctggagacggaaaaggaatcttaattacacgtggccaggctaaattctcctctccactggaaaaacagtttgcaggggggtagagcaaagttcacttgctggcatacagagatctggaagctggaggcagtgtattactaatgatgtctaatgttatccactctggggttttaaacgactctaaacagatttgttctgtttaatattaatccctagagccgcaacacttctaggctgtccttaccatgtcctttagggctctggtgccttgcaggacccagaaggcaaacatttagcggaagacattctcctctctgtcctctgcctctttttatgacgttgatttcttgtttaaaaattattttaatgagaggaaatgctttcccccgggatccccctccatctagaactctgcatctcagcttctaggagcaacaaggcccagcagggagacattgggttgcccactgcatctcattagttctgattgtggtggcagcttgatggtccacagccgggaatgaggtcctcccgaaaaacacaggcagtaaaggatggccccggccaaaataaaccccgaagaatactttctctcccgtcctccggcaccttcgtctctccttctcttctccactctggctctttcctttgcccctctctcctggctgcatctcactctgggttttctctctccccacctctttctctgtcccttcgggttcgctctccttccagggcccgggcggccatccacgaagcacagcccgcacatcgcrgccgccaggaaggtctacatacagactcgcaggcagaggaagctgcacttcgtggtggggggcttcgcctacctgctccccaagacggcggtggtgctgcgctgcccggcgcgcagggtccgcaagcccctcatcacctgggagaaggacggccagcacctcatcagctcgacgcacgtcacggtggcccccttcggctatctcaagatccaccgcctcaagccctcggatgcaggcgtctacacctgctcagcgggcccggcccgggagcactttgtgattaagctcatcggaggcaaccgcaagctcgtggcccggcccttgagcccgagaagtgaggaagaggtgcttgcggggaggaagggcggcccgaaggaggccctgcagacccacaaacaccagaacgggatcttctccaacggcagcaaggcggagaagcggggcctggccgccaacccggggagccgcta

SEQ ID NO: 713159 - DNA, 1880 bp, Homo sapiens
tgacagacatgcatttctgagaactatgtgaatttcaactagtaagttatataaatgatgagacacagtagtatcagaattattagtgattcttttctaaaactaaattctttcaaatcaaactttggaatatttaaaagcaaagaaataacagacttctctcacttttttctgacctggacctatcttgctggctcatgctatttggaggatactttaacaaattgcaaagtcccacagaccaacacacagctgaatcttgcagatgctcagaaggtagatttgggcctttagcaaaaacagactaactgaactataacactggacatttcagcacttctgtttgaaaataaatgagcatttctgaaccactaccagacatagtaatgatgacaagcaatgaaacccaacacaggaaaggtcaccaacagcccacagcaaagcagtcctaatggcagctctgtgcctcctgcatgatctgtgcagatacattcactcttttcttaaacagaacttgaaagatagagaaaactaagctccagccgtatttcttattgaacagccaacaaaaatggaaaaattgtgatgtcaaaggtcagaaagggaaatgtcttatttttccttaccacatgccattaacgtgcattgaaaagcttagtcaagcctagatccagaaaaataaaaaatgtgatggcagcaaaaactgtttgttcctgcctctcaggtatcttccctcttaccctcttagtgctaccctcccccacaacgatgtcctggatgatggagaatccaggactttccctctgcttgcctaggcccagtgctttagtgttctttgcacctggctgccacgtctctgtttctatcaagattccactgaaccttctccatcttaaagccattggagttagactctcaatgcccattaaggtaaaaattaaaagggccaaagtgtgtttcctaagtgctatttcaagaattattggtgttcctgagattactaagccgaaaaattgttcagtgattaaaggagaactttgaaaccacagcatactatattgtccacttggaaagtcacaacacacattggaatgcttaaaagagtaaaataaaaagaaaaatcccaaataattttcagttgggggatagttaaatgcattcaggaacagtaatcagctgttaaaaaaggtaatatagacctctacctactattatgaaaacatctcatagacatgctgttaagtaaaaaccagtcacatttctgaacatgactaatatcctattaaaaaacccaaatcctatgtgtgcatatatgctttttatgtaatacagtaaaatatataaacattctaaaaggatgtataccaaattattaagaatgatagcctctrggagcattggggggaagagggaggcttgtactttttatagatttagatatttgaattgttttatagcccttttattacttttataataaaaaatcaagtgtgatattaaaaaaatagacataaaatccagcagtacatacatctgtttagccttaagtttgcccttctcaaactcttgtgatcactgagcctgtttgtggagcatttagaaacaacttgtgccacaacttctgaagttactgtggtcaaggttctcccatcagcatatgagttttaaccttccgtggccttccgtaaatgagggaaggaggtaggagggatgtcacagatgatatggtacagtctcctcatttatgaaatgaagagactaagaccgtgaaaagtgcagggccttggcaagatcagattggacccctcaatgcttgtctacctccttccacatcattcctgcagtcaccaggtgacctagatgggccatgggccttggat

SEQ ID NO: 713160 - DNA, 1880 bp, Homo sapiens
tgacagacatgcatttctgagaactatgtgaatttcaactagtaagttatataaatgatgagacacagtagtatcagaattattagtgattcttttctaaaactaaattctttcaaatcaaactttggaatatttaaaagcaaagaaataacagacttctctcacttttttctgacctggacctatcttgctggctcatgctatttggaggatactttaacaaattgcaaagtcccacagaccaacacacagctgaatcttgcagatgctcagaaggtagatttgggcctttagcaaaaacagactaactgaactataacactggacatttcagcacttctgtttgaaaataaatgagcatttctgaaccactaccagacatagtaatgatgacaagcaatgaaacccaacacaggaaaggtcaccaacagcccacagcaaagcagtcctaatggcagctctgtgcctcctgcatgatctgtgcagatacattcactcttttcttaaacagaacttgaaagatagagaaaactaagctccagccgtatttcttattgaacagccaacaaaaatggaaaaattgtgatgtcaaaggtcagaaagggaaatgtcttatttttccttaccacatgccattaacgtgcattgaaaagcttagtcaagcctagatccagaaaaataaaaaatgtgatggcagcaaaaactgtttgttcctgcctctcaggtatcttccctcttaccctcttagtgctaccctcccccacaacgatgtcctggatgatggagaatccaggactttccctctgcttgcctaggcccagtgctttagtgttctttgcacctggctgccacgtctctgtttctatcaagattccactgaaccttctccatcttaaagccattggagttagactctcaatgcccattaaggtaaaaattaaaagggccaaagtgtgtttcctaagtgctatttcaagaattattggtgttcctgagattactaagccgaaaaattgttcagtgattaaaggagaactttgaaaccacagcatactatattgtccacttggaaagtcacaacacacattggaatgcttaaaagagtaaaataaaaagaaaaatcccaaataattttcagttgggggatagttaaatgcattcaggaacagtaatcagctgttaaaaaaggtaatatagacctctacctactattatgaaaacatctcatagacatgctgttaagtaaaaaccagtcacatttctgaacatgactaatatcctattaaaaaacccaaatcctatgtgtgcatatatgctttttatgtaatacagtaaaatatataaacattctaaaaggatgtataccaaattattaagaatgatagcctctgggagcattggggggaagagggaggcttgtactttttatagatttagatatttgaattgttttatagcccttttattacttttataataaaaaatcaagtgtgatattaaaaaaatagacataaaatccagcagtacatacatctgtttagccttaagtttgcccttctcaaactcttgtgatcactgagcctgtttgtggagcatttagaaacaacttgtgccacaacttctgaagttactgtggtcaaggttctcccatcagcatatgrgttttaaccttccgtggccttccgtaaatgagggaaggaggtaggagggatgtcacagatgatatggtacagtctcctcatttatgaaatgaagagactaagaccgtgaaaagtgcagggccttggcaagatcagattggacccctcaatgcttgtctacctccttccacatcattcctgcagtcaccaggtgacctagatgggccatgggccttggat

SEQ ID NO: 713161 - DNA, 1142 bp, Homo sapiens
tcctgaaccattcatttagccccctgcttcaaagggttctcttcctccaaacacataccaacaatccagttagattaaaaacctattgaacttcctctcattttctttggtccctgaatgaaatttaaatctccttggggccttccctttgtcatctgtcccacagcagcaataacttcttcagacttattttaagatttagattcagtgggagtaggyaacagaattaggaaaaggtgaatgacacagaaataggataatgggcctatcacctgcatgatttgccttctgtacctttttacatgaaccatctgcaaaactgtagagagctgctccagcaatttcaaggtctagattatgtcacccataagtatttgcccctctgatagaaatatcagtatttctgcaatgacttcaacagaaaaacaggacaggaatgaaaagacaatagactttaaaaactactttgacattgcaaggttgttcagttcataaaacaaactttaatgtgtagaaggagttgcatttatcattttgctctttttatttctaatatttactcactttactcatactctgtacaaatatatattaaaatttataaatgtatgcactaaaatttattagtattatgcattaataaatactaaaaatcaagataaattactagaagtcgtatgcattctgattcatgtaccctaaaatataaacacatacatgtatatatataaatgttatagcttgtgtgaatcaaaatgatccagtacttgctaatttatcttattatttaatattcattaatacatattttattcctctaaatgctgggagctaactgattgttgtatcttcagagagcactggagtcagttccataaccagaaagcaaagagtgtgacatttattcatcggactctgaaatggatctgtagcattatggaattaaataaagccatggtatccagaggtgtaaaaaacaaaaactgagtggcagacacagtggcttaggagaacttaacggtaccatctttttttattacctttgctctggtgtcaagggtaagttaaccttctttttaaactctttaccttcacttcagtgtcttcctcctatcctgggcagccagcactctccttttgcc

SEQ ID NO: 713162 - DNA, 1142 bp, Homo sapiens
tcctgaaccattcatttagccccctgcttcaaagggttctcttcctccaaacacataccaacaatccagttagattaaaaacctattgaacttcctctcattttctttggtccctgaatgaaatttaaatctccttggggccttccctttgtcatctgtcccacagcagcaataacttcttcagacttattttaagatttagattcagtgggagtaggtaacagaattaggaaaaggtgaatgacacagaaataggataatgggcctatcacctgcatgatttgccttctgtacctttttacatgaaccatctgcaaaactgtagagagctgctccagcaatttcaaggtctagattatgtcacccwtaagtatttgcccctctgatagaaatatcagtatttctgcaatgacttcaacagaaaaacaggacaggaatgaaaagacaatagactttaaaaactactttgacattgcaaggttgttcagttcataaaacaaactttaatgtgtagaaggagttgcatttatcattttgctctttttatttctaatatttactcactttactcatactctgtacaaatatatattaaaatttataaatgtatgcactaaaatttattagtattatgcattaataaatactaaaaatcaagataaattactagaagtcgtatgcattctgattcatgtaccctaaaatataaacacatacatgtatatatataaatgttatagcttgtgtgaatcaaaatgatccagtacttgctaatttatcttattatttaatattcattaatacatattttattcctctaaatgctgggagctaactgattgttgtatcttcagagagcactggagtcagttccataaccagaaagcaaagagtgtgacatttattcatcggactctgaaatggatctgtagcattatggaattaaataaagccatggtatccagaggtgtaaaaaacaaaaactgagtggcagacacagtggcttaggagaacttaacggtaccatctttttttattacctttgctctggtgtcaagggtaagttaaccttctttttaaactctttaccttcacttcagtgtcttcctcctatcctgggcagccagcactctccttttgcc

SEQ ID NO: 713163 - DNA, 1142 bp, Homo sapiens
tcctgaaccattcatttagccccctgcttcaaagggttctcttcctccaaacacataccaacaatccagttagattaaaaacctattgaacttcctctcattttctttggtccctgaatgaaatttaaatctccttggggccttccctttgtcatctgtcccacagcagcaataacttcttcagacttattttaagatttagattcagtgggagtaggtaacagaattaggaaaaggtgaatgacacagaaataggataatgggcctatcacctgcatgatttgccttctgtacctttttacatgaaccatctgcaaaactgtagagagctgctccagcaatttcaaggtctagattatgtcacccataagtatttgcccctctgatagaaatatcagtatttctgcaatgacttcaacagaaaaacaggacaggaatgaaaagacaatagactttaaaaactactttgacattgcaaggttgttcarttcataaaacaaactttaatgtgtagaaggagttgcatttatcattttgctctttttatttctaatatttactcactttactcatactctgtacaaatatatattaaaatttataaatgtatgcactaaaatttattagtattatgcattaataaatactaaaaatcaagataaattactagaagtcgtatgcattctgattcatgtaccctaaaatataaacacatacatgtatatatataaatgttatagcttgtgtgaatcaaaatgatccagtacttgctaatttatcttattatttaatattcattaatacatattttattcctctaaatgctgggagctaactgattgttgtatcttcagagagcactggagtcagttccataaccagaaagcaaagagtgtgacatttattcatcggactctgaaatggatctgtagcattatggaattaaataaagccatggtatccagaggtgtaaaaaacaaaaactgagtggcagacacagtggcttaggagaacttaacggtaccatctttttttattacctttgctctggtgtcaagggtaagttaaccttctttttaaactctttaccttcacttcagtgtcttcctcctatcctgggcagccagcactctccttttgcc

SEQ ID NO: 713164 - DNA, 1740 bp, Homo sapiens
tcagttgttaaattgacaaagaagtaaaactttaggtttacttgaaaggcaaatttaatctgatagttatactttttcatagttaatatagaataacagtgctggactatctcaaattttagagtggtacatgtgaacctgagaccttgctagaactaagtacctttctatccagcaaagcatccatccctgatgattcgtgtgtccctgatcatccagctgtttatcctctgaggaagatttcagtaggtgtttacactctcagtcagtcagggttcaacccaagcttatttctcaaggtccactgatttgggacatgatactttccatcctttagtttttccaacatatgtggatactccttaaatgcacacttgagatatttatttccctagtaccccatgatgatcttctagtcctggtggctccaacaaacttcataacacctaagacaaaattgagaattacctttaagtgtttggagagaaaaataatttttgaaactatcaaatgcttaaacactgagtgaggtaatttaatgtaagcttgttattttaatcttagaatttcaatcttatttttctagttaactgttggcttactttggtgtttattcaatgttgtatttgatgcatcactacaatgcatttcaaagtttttgtatgctaaacctttctatgaatwacttataattctatctcatttactcaggctgaagttaaggaaaagaaaaaaaatgaagcacacttcaaacaaatgcagtcaaattataatagcaaaatagcaatagtcctgaccacccatataatgagacttcagctccccgagaacatggcacaacacatgtgtcagtgtcaacccaaggctgagatctaattagggcacattcagccggtctgattatgtgtttcttgtttggtgacaaatccgttcattttgcaacaacatttccgcaaacgtccaacaatttgtttcagagcctgaagcagatttttaaaatatataattttatgaagtggtgaataagagtgtttctcagcaaataaccgttcacatataatctgtttatctgaccctttagatgaaattgccaagcctgatgaatggtccaattctatcaattaatatttttgaatactaattttttttaactgaagacaattgactgatgaaagatttagctgatttaatttggctgagtacttcagttgtgtatgtagattgttgtggttttcaaagaccaaatatgtcagggaaacatctttaaatagtagaaatacactggatgctagatctgggttttgttgcaaatttgtggtgtgattctggcagagtcgactttcataaggtttgtaaatcagactcttgtaaaggaagctagacaggaagtcaagagttctagaattctagtctttgccctatctattcagggcctacttctcttcacataaaatatgacaaatttatatcagtgtcttctgaagttagcaaacccaaattttaggcttctgtcccataagccatcaattattcaggctgtggttcttgggcagtgacatcacaggctctcttgaccttcagaagaatgttttacattttggtgattgtaaataaaggcatctctgtgtgtgagcatactattttccatatggagtaagagtggtgctgatctatattagggagaaaaagtactcctcagtaaacacaacatgctgatatagaatagttcagggttttttg

SEQ ID NO: 713165 - DNA, 1098 bp, Homo sapiens
ttctcttgaaatgatatgaatactgtccttggctcatgaatccatcccattgctatgtggtacagctttcttggtgacttagaaaaataagtcataagaacacttctagaataaatcatctcggttttgtctttcactgaagacagtcaacactggtctattctaacaggctagtagtatggtggtaaaaaaaacttggtacctgtattagtccattctcatgctgctatgaagaaatacctgaggctgggtaatttataaagaaaagaggtgtaattgactcagttctgcatggctggggaggcctcaggaaacttaaaatcatggcagaaggcacctctttgcggcgcagcaggagagagaatgagtgccaagagaatgaagacccttataaaaccatcagatcttgtgagaactcactgtctccagaacatcatgggggaaactggccctaggattcaattatctccacatggtcccacccttgacatgtggggattattacaattcaaggtgagatttgggtggggacacacagccaaactgtcagtatctgaaattagatagccttgcatttgaattcaagatccccaaatattaactttgtgaatgtgggcaagtttcttcaacatcctaagcctcattttttgacatttgaaaaatagtacctccttcatagggttgttgtagcatttacaagcatttaattaatgggaattaattatcacataagaatatatttaaaagagagcactccaagcaatcatgctttgaaaattmagaagatgagttattatatttaaggtgtaatcctgggtcctctgaatcaaaagattgaaacatgatcttggattgggagtaaaaataagtgattgaatttttttcttttggacaaaaatgaatattttgcagttgaaaaaatatttcattaactagattgaaacttctcacagtcaatgtgagccagctcagctgaatatctgttatttggggctggacagtgagggatgccatacaaagctcttctgtgtccaggctgagtaacagccatatgatactcccagacataccttttcaagccacgtgacacattgccat

SEQ ID NO: 713166 - DNA, 594 bp, Homo sapiens
tttttttttttttttttttgctttaccttcagtttagcttaagtggtatcaaaggggttgatctttgactcctttgctctgtcttcaaaaaaattaataacatatccaatcaaacaatggtctgttatgtcatcttggcacaggtacatatttatttgtaaaacaatttttccttcataaatatcatttgwaaaacattaaaatttgttttcagttctggatctatgttcttctttctttagttctgtagctaatatttttttaaaagtttcaaattttttgactctatctttttctccttcagagagcttgatccttccctaacttcctaaaaaaaaaaaagtcctcgtccttcctcttcatctgtaatgggtgagaaaatgacaacaacaaaaaaacacatgaaaaacaagacatccagccatctgtgtcgacaagagaagcattcccttgcttgtccttgacgtcacggcatttactaccagtcactcagacccagcccttggagtggcatggggcttggtactccattcagagctgctcagcaatgcctggtattcctgttgaggaatgctcttggcaagggggaagtga

SEQ ID NO: 713167 - DNA, 594 bp, Homo sapiens
tttttttttttttttttttgctttaccttcagtttagcttaagtggtatcaaaggggttgatctttgactcctttgctctgtcttcaaaaaaattaataacatatccaatcaaacaatggtctgttatgtcatcttggcacaggtacatatttatttgtaaaacaatttttccttcataaatatcatttgaaaaacattaaaatttgttttcagttctggatctatgttcttctttctttagttctgtagctaatatttttttaaaagtttcaaattttttgactctatctttttctccttcagagagcttgatccttccctaacttcctaaaaaaaaaaaagtcctcgtccttcctcttcatctgtaatgggtgagaaaatgacaacaacaaaaaaacacatgaaaaacaaracatccagccatctgtgtcgacaagagaagcattcccttgcttgtccttgacgtcacggcatttactaccagtcactcagacccagcccttggagtggcatggggcttggtactccattcagagctgctcagcaatgcctggtattcctgttgaggaatgctcttggcaagggggaagtga

SEQ ID NO: 713168 - DNA, 628 bp, Homo sapiens
tgagagacaccggagcaacattccacaggtactgaactcctcacgcatctatctcaggattctgaggtgggatgaggcaatgacaagaagcagtcaaacactgtgctaagcattttactgagaaaaagccctgcacaggtattgggttagctgggtctcaatctgtttatgcctctaaacaccttactgatgaaaaaaaatttcacytccttgggcctctgcatttccttgtctgtaaaatgaaggggtttttactagaaaagtggttttcaatctttagttttcagcaacaaaaccctttctgcaaatggaatcccaatacagagcacaggcaaaagctgagatgctctggccacagaggagaggtgcaaggaggccctcccattcctcaaggggtgaccttaaggcatctccctgaacccaagatccagcttcggaaaagacaccccgtagtggttgggatccctttcaacatctgtgtttaaatttaagatctgtgtacaaataatatgtatacagaatgaacacaaggcaagtgatttgatggagaaaactacttggtgtttgaaaacacaaaatcctgactctggagctcatgactaagtaatgtgtaaacttctgaagttcc

SEQ ID NO: 713169 - DNA, 628 bp, Homo sapiens
tgagagacaccggagcaacattccacaggtactgaactcctcacgcatctatctcaggattctgaggtgggatgaggcaatgacaagaagcagtcaaacactgtgctaagcattttactgagaaaaagccctgcacaggtattgggttagctgggtctcaatctgtttatgcctctaaacaccttactgatgaaaaaaaatttcacttccttgggcctctgcatttccttgtctgtaaaatgaaggggtttttactagaaaagtggttttcaatctttagttttcagcaacaaaaccctttctkcaaatggaatcccaatacagagcacaggcaaaagctgagatgctctggccacagaggagaggtgcaaggaggccctcccattcctcaaggggtgaccttaaggcatctccctgaacccaagatccagcttcggaaaagacaccccgtagtggttgggatccctttcaacatctgtgtttaaatttaagatctgtgtacaaataatatgtatacagaatgaacacaaggcaagtgatttgatggagaaaactacttggtgtttgaaaacacaaaatcctgactctggagctcatgactaagtaatgtgtaaacttctgaagttcc

SEQ ID NO: 713170 - DNA, 628 bp, Homo sapiens
tgagagacaccggagcaacattccacaggtactgaactcctcacgcatctatctcaggattctgaggtgggatgaggcaatgacaagaagcagtcaaacactgtgctaagcattttactgagaaaaagccctgcacaggtattgggttagctgggtctcaatctgtttatgcctctaaacaccttactgatgaaaaaaaatttcacttccttgggcctctgcatttccttgtctgtaaaatgaaggggtttttactagaaaagtggttttcaatctttagttttcagcaacaaaaccctttctgcaaatggaatcccaatacagagcacaggcaaaagctgagatgctytggccacagaggagaggtgcaaggaggccctcccattcctcaaggggtgaccttaaggcatctccctgaacccaagatccagcttcggaaaagacaccccgtagtggttgggatccctttcaacatctgtgtttaaatttaagatctgtgtacaaataatatgtatacagaatgaacacaaggcaagtgatttgatggagaaaactacttggtgtttgaaaacacaaaatcctgactctggagctcatgactaagtaatgtgtaaacttctgaagttcc

SEQ ID NO: 713171 - DNA, 584 bp, Homo sapiens
ttgtcctttccccacacttcaatgtccaaaatgcccatcctgtcagagaagtagtgaaagtcaaactgttcctgccactgcggatttgcactcttacacagtgtctagaaaacatgcagttataatatttattttcttaaaatgtcattcattgctacagaagctacacattaatttcatcattaaactgcagagggtcaagatgatggacctcaccccttataaaggtaaacttctttttttagaatgaaagggacttggtgggttcaagaactggcaaaacattactactatcttagctgccccccagatccaataatttatccaccaagttacaaagagtactgttacctcacargaaaccataaattatatatacacacacatacacagtggacatatatcagcagacatcttacaattgtctgtcttataggacatcacactaattgcttaattgaatgcaagtaacagttttgttggcatatccattcaatgctagcttactaactatataaattaacagtttagggtcttaattaacatctgtcagctgcattaaatgagaaacccacgacttgtat

SEQ ID NO: 713172 - DNA, 584 bp, Homo sapiens
ttgtcctttccccacacttcaatgtccaaaatgcccatcctgtcagagaagtagtgaaagtcaaactgttcctgccactgcggatttgcactcttacacagtgtctagaaaacatgcagttataatatttattttcttaaaatgtcattcattgctacagaagctacacattaatttcatcattaaactgcagagggtcaagatgatggacctcaccccttataaaggtaaacttctttttttagaatgaaagggacttggtgggttcaagaactggcaaaacattactactatcttagctgccccccagatccaataatttatccaccaagttacaaagagtactgttacctcacaggaaaccataarttatatatacacacacatacacagtggacatatatcagcagacatcttacaattgtctgtcttataggacatcacactaattgcttaattgaatgcaagtaacagttttgttggcatatccattcaatgctagcttactaactatataaattaacagtttagggtcttaattaacatctgtcagctgcattaaatgagaaacccacgacttgtat

SEQ ID NO: 713173 - DNA, 584 bp, Homo sapiens
ttgtcctttccccacacttcaatgtccaaaatgcccatcctgtcagagaagtagtgaaagtcaaactgttcctgccactgcggatttgcactcttacacagtgtctagaaaacatgcagttataatatttattttcttaaaatgtcattcattgctacagaagctacacattaatttcatcattaaactgcagagggtcaagatgatggacctcaccccttataaaggtaaacttctttttttagaatgaaagggacttggtgggttcaagaactggcaaaacattactactatcttagctgccccccagatccaataatttatccaccaagttacaaagagtactgttacctcacaggaaaccataaattatatatacacacacatacacagtggrcatatatcagcagacatcttacaattgtctgtcttataggacatcacactaattgcttaattgaatgcaagtaacagttttgttggcatatccattcaatgctagcttactaactatataaattaacagtttagggtcttaattaacatctgtcagctgcattaaatgagaaacccacgacttgtat

SEQ ID NO: 713174 - DNA, 584 bp, Homo sapiens
ttgtcctttccccacacttcaatgtccaaaatgcccatcctgtcagagaagtagtgaaagtcaaactgttcctgccactgcggatttgcactcttacacagtgtctagaaaacatgcagttataatatttattttcttaaaatgtcattcattgctacagaagctacacattaatttcatcattaaactgcagagggtcaagatgatggacctcaccccttataaaggtaaacttctttttttagaatgaaagggacttggtgggttcaagaactggcaaaacattactactatcttagctgccccccagatccaataatttatccaccaagttacaaagagtactgttacctcacaggaaaccataaattatatatacacacacatacacagtggacatatatcagcagacatcttacaattgtctstcttataggacatcacactaattgcttaattgaatgcaagtaacagttttgttggcatatccattcaatgctagcttactaactatataaattaacagtttagggtcttaattaacatctgtcagctgcattaaatgagaaacccacgacttgtat

SEQ ID NO: 713175 - DNA, 1567 bp, Homo sapiens
catgtagtaaaaaaaaatttcaagcagtacaaaaagatatacttttaaaaatcaatccctctctttatcccagactatggggtctattgttcagaggtaactagtgtcaaatctttattccttctccttcaagaaattgtccatgtataataaatactgttataagcctttttagtgaataaatatttatacactatcacacttgcttcttttccactttgcaatatagcacagagatctttccatttcagtatgtataatttcacctcattattttaaatagctatatggtattccacacatcagattgttacatcatcttctcagtagtccccagttggcagataatcaacagtccccaattgttgattattacaaacaaggcttcaatccattcttgcactatctaccctttgcaaccatgtgggagtatcactgtaggaaaaaaactcctaaaaggagaattgctggatcaaagggtatgtgctttttaaatctgagagctattttcaacttgcccatttaaaaaaataccaatttatattcccacaactagaatatgactgtatctacttctgtatactctttacatcactctgttatcaaactttaagtcttggccaatctgataactgaacattgtttatttccttgttttgacttacatttctttaactgagtgaagataaccaatggctcatatgtttataaaccatttgcacttctttgtctaagaacaactttttttatttttccttgccaatttttctattagtttgttatattttcctccctgatttataacagctatttatattttacagaaataagaaaattgaccaccatttcatttacggcttctgggctctatccaatgcttagaaagatctcttccacgccaatgttatttttaaatccactcatgttttctttcacacttttatgacttcctagttcatgtttatgtttttgataaactaagatcttgttttgctgtagggtatgagatctggattttattttattattccttctttatgtctttcttttaatagattattttaccctcactaaaattgtcataatacgtatgtttgttcttagttctgttctcttatttgttttcttctttttttattctttctcagattttcattttttggttacatggtctgttttcgtcttctttgatctatctgcaatttgtttttctttatggagaattatttgatggaagaacaggagctctacctggcacacagtaaagcctcctctatcacaagtgtgtgtttatgcatctgcctgtgttgttcagttgactctgatatgatgacatccaccctctgagagggttatgatgttctctctcactgagaattcccataaggatggcatggtagcaggattctcttttgactctgcttcccatgttgctctgcagtatggaacagggacaaggatgctctcccagtctacrcacaaccacatgtgttgctgtttcaggcacaactggcttttcagagatgtgctgcctccttttggagacctctgtggaactgtggattta

SEQ ID NO: 713176 - DNA, 428 bp, Homo sapiens
gaatacacaaatagttattttctacgagctacattcactgcttttcaagttgatgagtatggctacattcctcttcaaagcaaatttcaattgaaggccaattggggagataaagttaagaatggcttttcaggaatgacaagtcctagatataatagtgtaaccaagtacacttacagaaatttaaaaataaagtgccttaccaataataaaaaagcagaagttatctccaagtacaaaacgcaacaccaatagagtggatgtactgacaagacatgagtaatattttccacacataaggaaagctttcatctcagaatcccttttttttcaaagctatttttgcacctcaattaagatctacagaactcagtggagtgttttttctccatttactaatwtattaactaaggtacagaaattcttgc

SEQ ID NO: 713177 - DNA, 997 bp, Homo sapiens
gaaaaagaagttgtaattctacttcactgtggcttctacaatttctgctggaaacaggccctccctttgctgcaattgctaaatgcgttccatagtgtgctttggacacagtcccatatttaatcctaatgactgggtagaaagtgccagccctgggcttcaggaccacataakaattgatgagccccccttgaaaccaagtgcaagaggccgaaggactaatgtctggatattgcttttcattgcatttaataaggaataaaagccttggactgccctctgctctttgttttcccacaatttccatctaactgttattaaaggaaacaaagcacagtctaaaaacttctgatttgccaactgctaactgctagatctctcatgagagcatacataatactttctataggagaagtgtacaagtccccttaggaagtcagcattgaaagtcactctgatagggacaaaaggcagagaaattctagacagagaggagaggggaggagaaaagaagtagccagacatctgagagaagcagcttgacttcagagggacagcttgatggcagggctttggagaagagccttgccaggggtggccagactccaggggaagacaaccttcccagtctatccccttttcggctccctttcctgatgaaagccactttcattggcaataaaaatcctccatattcactacctttcaatttgttcatgtgacctgattctcctggacattgaacaagagcttgggagccacgggtgcagatgctttagccgtttaattcttaagccctctaaagatggcaaagctaaaagagcactgtaatacatgccctctggggctccaggggtcacaggtacacccctaggtgccgccatggggctgcgctgagttctgctttggctggtgcccagaagtactagtcccagctcctgaacctgctcacctgtgtgctcctcctcccgcaaggggttaagagctacgggctgag

SEQ ID NO: 713178 - DNA, 997 bp, Homo sapiens
gaaaaagaagttgtaattctacttcactgtggcttctacaatttctgctggaaacaggccctccctttgctgcaattgctaaatgcgttccatagtgtgctttggacacagtcccatatttaatcctaatgactgggtagaaagtgccagccctgggcttcaggaccacataagaattgatgagccccccttgaaaccaagtgcaagaggccgaaggactaatgtctggatattgcttttcattgcatttaataaggaataaaagccttggactgccctctgctctttgttttcccacaatttccatctaactgttattaaaggaaacaaagcacagtctaaaaacttctgatttgccaactgctaactgctagatctctcatgagagcatacataatactttctataggagaagtgtacaagtccccttaggaagtcagcattgaaagtcactctgatagggacaaaaggcagagaaattctagacagagaggagaggggaggagaaaagaagtagccagacatctgagagaagcagcttgacttcagagggacagcttgatggcagggctttggagaagagccttgccaggggtggccagactccaggggaagacaaccttcccagtctatccccttttcggctccctttcctgatgaaagccactttcattggcaataaaaatcctccatattcactacctttcaatttgttcatgtgacctgattctcctggacattgaacaagagcttgggagccacgggtgcagatgctttagccgtttaattcttaagccctctaaagatggcaaagctaaaagagcactgtaatacatgccctctggggctccaggggtcacaggtacacccctaggtgccgccatggggctgcrctgagttctgctttggctggtgcccagaagtactagtcccagctcctgaacctgctcacctgtgtgctcctcctcccgcaaggggttaagagctacgggctgag

SEQ ID NO: 713179 - DNA, 997 bp, Homo sapiens
gaaaaagaagttgtaattctacttcactgtggcttctacaatttctgctggaaacaggccctccctttgctgcaattgctaaatgcgttccatagtgtgctttggacacagtcccatatttaatcctaatgactgggtagaaagtgccagccctgggcttcaggaccacataagaattgatgagccccccttgaaaccaagtgcaagaggccgaaggactaatgtctggatattgcttttcattgcatttaataaggaataaaagccttggactgccctctgctctttgttttcccacaatttccatctaactgttattaaaggaaacaaagcacagtctaaaaacttctgatttgccaactgctaactgctagatctctcatgagagcatacataatactttctataggagaagtgtacaagtccccttaggaagtcagcattgaaagtcactctgatagggacaaaaggcagagaaattctagacagagaggagaggggaggagaaaagaagtagccagacatctgagagaagcagcttgacttcagagggacagcttgatggcagggctttggagaagagccttgccaggggtggccagactccaggggaagacaaccttcccagtctatccccttttcggctccctttcctgatgaaagccactttcattggcaataaaaatcctccatattcactacctttcaatttgttcatgtgacctgattctcctggacattgaacaagagcttgggagccacgggtgcagatgctttagccgtttaattcttaagccctctaaagatggcaaagctaaaagagcactgtaatacatgccctctggggctccaggggtcacaggtacacccctaggtgccgccatggggctgcgctgagttctgctttggctggtgcccagaagtactagtcccagctcstgaacctgctcacctgtgtgctcctcctcccgcaaggggttaagagctacgggctgag

SEQ ID NO: 713180 - DNA, 759 bp, Homo sapiens
  misc_feature 2, 3, 4, 5, 6, 7, 8, 9, 10, 11, 12, 13, 14, 15, 16, 17, 18,19, 20, 21, 22, 23, 24, 25, 26, 27, 28, 29, 30, 31, 32,33, 34, 35, 36, 37, 38, 39, 40, 41, 42, 43, 44, 45, 46,47, 48, 49, 50, 51, 52, 53, 54, 55, 56, 57, 58, 59, 60,61: n = A,T,C or G
  misc_feature 62, 63, 64, 65, 66, 67, 68, 69, 70, 71, 72, 73, 74, 75, 76,77, 78, 79, 80, 81, 82, 83, 84, 85, 86, 87, 88, 89, 90,91, 92, 93, 94, 95, 96, 97, 98, 99, 100, 101: n = A,T,C or G
cnnnnnnnnnnnnnnnnnnnnnnnnnnnnnnnnnnnnnnnnnnnnnnnnnnnnnnnnnnnnnnnnnnnnnnnnnnnnnnnnnnnnnnnnnnnnnnnnnnnnctggagtgcaatggcgcgatcttagctcactgcaacctccgcctcctgggttcaagcaattctcctgcctcagcctcccgagtagctgggattacagctgcgcaccaccatgccyggctaatttttgtatttttagtagtagagacggggtttcaccatgttggtcaggctggtctaaaactcctgaccttatgatccgcctgcctcagcctcccaaagtgctgagattacaggcgtgagccactgcgctcagccaagaatgtgcctttttacaggtgaagggattttaatttgggagattaagtaacttgcttaaggtcaaatgacatggaaagattctgatccaggtctatctggctctaaaaccctcataagaacaaagaaggctcccatgaacccaagactgtaagatgttgtctgcctgccttaatgactggctggaatggtggagctgggggtcacaaggcaatcttaggcttctgacgtgatctgaaggcatatttagcatcagtacaatcccttggcactgctccaagagctgccccatttgagctgagggcactcacaacattacctctataattaggcctgccagataggtgctcaaagggccacctggggaagggcaaagacttaaatgtgagtctcagctctgcca

SEQ ID NO: 713181 - DNA, 759 bp, Homo sapiens
  misc_feature 2, 3, 4, 5, 6, 7, 8, 9, 10, 11, 12, 13, 14, 15, 16, 17, 18,19, 20, 21, 22, 23, 24, 25, 26, 27, 28, 29, 30, 31, 32,33, 34, 35, 36, 37, 38, 39, 40, 41, 42, 43, 44, 45, 46,47, 48, 49, 50, 51, 52, 53, 54, 55, 56, 57, 58, 59, 60,61: n = A,T,C or G
  misc_feature 62, 63, 64, 65, 66, 67, 68, 69, 70, 71, 72, 73, 74, 75, 76,77, 78, 79, 80, 81, 82, 83, 84, 85, 86, 87, 88, 89, 90,91, 92, 93, 94, 95, 96, 97, 98, 99, 100, 101: n = A,T,C or G
cnnnnnnnnnnnnnnnnnnnnnnnnnnnnnnnnnnnnnnnnnnnnnnnnnnnnnnnnnnnnnnnnnnnnnnnnnnnnnnnnnnnnnnnnnnnnnnnnnnnnctggagtgcaatggcgcgatcttagctcactgcaacctccgcctcctgggttcaagcaattctcctgcctcagcctcccgagtagctgggattacagctgcgcaccaccatgcctggctaatttttgtatttttagtagtagagacggggtttcaccatgttggtcaggctggtctaaaactcctgaccttatgatccgcctgcctcagcctcccaaagtgctgagattacaggcgtgagccacygcgctcagccaagaatgtgcctttttacaggtgaagggattttaatttgggagattaagtaacttgcttaaggtcaaatgacatggaaagattctgatccaggtctatctggctctaaaaccctcataagaacaaagaaggctcccatgaacccaagactgtaagatgttgtctgcctgccttaatgactggctggaatggtggagctgggggtcacaaggcaatcttaggcttctgacgtgatctgaaggcatatttagcatcagtacaatcccttggcactgctccaagagctgccccatttgagctgagggcactcacaacattacctctataattaggcctgccagataggtgctcaaagggccacctggggaagggcaaagacttaaatgtgagtctcagctctgcca

SEQ ID NO: 713182 - DNA, 1025 bp, Homo sapiens
atgcggagcctgacatgccacagtttgctgggcagcctctctcccagccttagtgagcctctacagggaaagaaagatgtctggttcatctctttaatgctgggccatgcaaggggtttggcaaggaaaagctcctcagtagctatttactgaacacaggattccaaaatctgaccctgtcccagaagagaaggcacagccccacctcatggaactttcagtctgtctgggtggcactggtggaccagtcactgtattctccatttctgccttactaggtgactccacttttatttagggcagcaacaggcagctcttaaagaaaaaaaaaaacacatattccagagctttgggaggccaagcaagagaactgcttgagaccaggggtttgagaccagcctgggcaacatagcgagaccctgtctctatgaaaaatttaaaacaattagccaggtgtgttggtgaatgcgtctagtcccagctactgagaaggctgaggcaggaggatcgattgagtccaggagttcaagactgcagtgagctatgattgtgccactgcactccaacctgggcaacagagagagaccccatctctaaaatgaacgaacaaacaaactctgtttcccaaattctcctaaagctatgggtgtccatgtgatgtggtctcaccagtgagctataagcagatgtctcctagatggggatcccagaaaagttattactattgtgatgaaaaaggataaactccccggcaggccccattttgcccttttcccttcccagyctgcctgtctggaatgctgccctgtgagcaggagggaagaagccacaatgtggatggtggagcaggaaaggagtaggcgctgggggccctgtgtgggatgagaagtttccattccattcaaaaggtggtgaaagccactggagggttttaagcagggaagtggcatggcctgatttccactgtacaaagctgaccctggctgactcacggtgagtgcattgggagggcaagagtgaaggca

SEQ ID NO: 713183 - DNA, 1466 bp, Homo sapiens
caaggtaagagtgtcattcatttgcacattctcaaggaggtgaaacaggatgcagagggcttctcaaggtagggttaccccagagcatttgagcattttcctaaaggaagatgaagggagtagtagccaccagtggctgagttctcccctctacatcccactggatatcaccaatccctaattctccactccaaagccctagctctgccttgatagagtggggatgtgcctgggccattagtagccattgtccactcttttattgcttgggctttttagggggacctttatgcgaagatgctcccaacctcatcacatctgggacctttttgcgaagatgctcccaacctcatcacatctgggacctttttgcgaagatgctcccaacctcatcacatctggccaaagtgcttttagtcacaagcggcagaactcagttcacaggaacacatatgaaaagtggatgtagagataactatgagggatatgagactttaattaagcaaagtacccggcctcgtcattctctctcctcctgggctgtggtctcttggctcagcctttctctcttcgtgactttggtttgcctatggttttataacatggccctaacaagtaagtcctccttgatcatgacatttacttgagctccctatgaccaaacagagtctgctttttaatttcaaactcttaagagagaaaaaccggatggctgtttattgccaacacgttggctggccttgggtacttattcctggtctagttagccgcggctgaggagcagagcatgtggtatgaaacacatataaggtagcaggggctgaaagtgggaaacaacttctctgagaagcaacccaagctggtattccacccaaggtgtgcctgatgcaccccctgtgtggttctgggattcacccgagggacaggtaatagccgtcctcagtgactgtctcggcagaggctgggcttggagctcaaaggccagggaagcagcaggtccactgatgcagctgccacctccacagcatgctggggacatggtgacattctcctaagagcacttacagagacagtgtcctgtgaaagcagcgctggactgggagttggcagtcctggcttgtcatccagctcggctgctaacccccatgaccccggggaaccgaccttcttcctctaggtcttagattctccagaagttaaaaatgaatttaaaaaccattrttattaataataataaacagcattgaatgaaatcatctccagggttcttttcaatccctaagatttccctaagcctcccccatctccacttgacaacttcccagaaatgctttcaaatggagctctttaacccataatttggtggggcctctgccagctgcctctctcccacaacacacccagtccctgtgataagtcctcctcaggggctttccagcctagacctgcagctattcaagaaagtc

SEQ ID NO: 713184 - DNA, 1466 bp, Homo sapiens
caaggtaagagtgtcattcatttgcacattctcaaggaggtgaaacaggatgcagagggcttctcaaggtagggttaccccagagcatttgagcattttcctaaaggaagatgaagggagtagtagccaccagtggctgagttctcccctctacatcccactggatatcaccaatccctaattctccactccaaagccctagctctgccttgatagagtggggatgtgcctgggccattagtagccattgtccactcttttattgcttgggctttttagggggacctttatgcgaagatgctcccaacctcatcacatctgggacctttttgcgaagatgctcccaacctcatcacatctgggacctttttgcgaagatgctcccaacctcatcacatctggccaaagtgcttttagtcacaagcggcagaactcagttcacaggaacacatatgaaaagtggatgtagagataactatgagggatatgagactttaattaagcaaagtacccggcctcgtcattctctctcctcctgggctgtggtctcttggctcagcctttctctcttcgtgactttggtttgcctatggttttataacatggccctaacaagtaagtcctccttgatcatgacatttacttgagctccctatgaccaaacagagtctgctttttaatttcaaactcttaagagagaaaaaccggatggctgtttattgccaacacgttggctggccttgggtacttattcctggtctagttagccgcggctgaggagcagagcatgtggtatgaaacacatataaggtagcaggggctgaaagtgggaaacaacttctctgagaagcaacccaagctggtattccacccaaggtgtgcctgatgcaccccctgtgtggttctgggattcacccgagggacaggtaatagccgtcctcagtgactgtctcggcagaggctgggcttggagctcaaaggccagggaagcagcaggtccactgatgcagctgccacctccacagcatgctggggacatggtgacattctcctaagagcacttacagagacagtgtcctgtgaaagcagcgctggactgggagttggcagtcctggcttgtcatccagctcggctgctaacccccatgaccccggggaaccgaccttcttcctctaggtcttagattctccagaagttaaaaatgaatttaaaaaccattgttattaataataataaacagcrttgaatgaaatcatctccagggttcttttcaatccctaagatttccctaagcctcccccatctccacttgacaacttcccagaaatgctttcaaatggagctctttaacccataatttggtggggcctctgccagctgcctctctcccacaacacacccagtccctgtgataagtcctcctcaggggctttccagcctagacctgcagctattcaagaaagtc

SEQ ID NO: 713185 - DNA, 1466 bp, Homo sapiens
caaggtaagagtgtcattcatttgcacattctcaaggaggtgaaacaggatgcagagggcttctcaaggtagggttaccccagagcatttgagcattttcctaaaggaagatgaagggagtagtagccaccagtggctgagttctcccctctacatcccactggatatcaccaatccctaattctccactccaaagccctagctctgccttgatagagtggggatgtgcctgggccattagtagccattgtccactcttttattgcttgggctttttagggggacctttatgcgaagatgctcccaacctcatcacatctgggacctttttgcgaagatgctcccaacctcatcacatctgggacctttttgcgaagatgctcccaacctcatcacatctggccaaagtgcttttagtcacaagcggcagaactcagttcacaggaacacatatgaaaagtggatgtagagataactatgagggatatgagactttaattaagcaaagtacccggcctcgtcattctctctcctcctgggctgtggtctcttggctcagcctttctctcttcgtgactttggtttgcctatggttttataacatggccctaacaagtaagtcctccttgatcatgacatttacttgagctccctatgaccaaacagagtctgctttttaatttcaaactcttaagagagaaaaaccggatggctgtttattgccaacacgttggctggccttgggtacttattcctggtctagttagccgcggctgaggagcagagcatgtggtatgaaacacatataaggtagcaggggctgaaagtgggaaacaacttctctgagaagcaacccaagctggtattccacccaaggtgtgcctgatgcaccccctgtgtggttctgggattcacccgagggacaggtaatagccgtcctcagtgactgtctcggcagaggctgggcttggagctcaaaggccagggaagcagcaggtccactgatgcagctgccacctccacagcatgctggggacatggtgacattctcctaagagcacttacagagacagtgtcctgtgaaagcagcgctggactgggagttggcagtcctggcttgtcatccagctcggctgctaacccccatgaccccggggaaccgaccttcttcctctaggtcttagattctccagaagttaaaaatgaatttaaaaaccattgttattaataataataaacagcattgaatgaaatcatctccagggttcttttcaatccctaagatttccctaagcctcccccatctccacttgacaacttcccagaaatgctttcaaatggagctctttaacccataatttggtggggcctctgccagctgcctctctcccacaacacacccagtccctgtgataagtcctcctcaggggctttccagcctagacctgcagcyattcaagaaagtc

SEQ ID NO: 713186 - DNA, 617 bp, Homo sapiens
tgcatttgttagaagttaggtcacaagtcccacccacactcgaggggcagggactacacaggctgtggatacaaggagatggggaccattgggagtcatcttagaggctgcctgccagagaggaggcagaaagaggccacccactgagccttgagcagaatcagccctggaaagcaacgcagggacaagtgtcccagccagaccagctttcatccaaaaggttatgtgtcctgcaggttagaaccagaggagcggcatctcaggatgagatgatgccacactgcacacgctgacagcctgggagaatagtgtcagaagagggarccggtggcagggtgtgtagtggtgattgtgtgctggccgtgtgtgttctcaaaagaaaggaaaggacctggtcaccatttgagggttatgatataaattggggaagggatgatcagcccacccttcactcccctgccaagtcactatatgcctttttcaggaaagacccaccctgccatcccctagccaggaatcagccccacctatatccactgtagtgttgagatatggaattgtccagtggggtagaggtagggaactccaggcataatcggaattcaatgtgtccttca

SEQ ID NO: 713187 - DNA, 1224 bp, Homo sapiens
gtgtcttgcaaaacccactccaactaactaataagacttttcatttaactctccagttgtagttgatattctagtttcaaactctattttctgtgtgaaggctgcactgatatcacaattttgtttcttcagtgtgagcattggcagcctgtggcctatggttttggtacagcctgcaaggtaataatggtttttagagatttaaatgattgaaacaattttttaaaataacattttgtagcatataacgattgcataaagtaaaaactgcagtgttttcataaataacaaggttttttttttggacacaagatcattcacttacatgtggtctatagatgttttcaggctattatgtcagagttgagtggttgcaacagaaactgtatgattgtcaaagcctaacatacttaaaatctgacgctttgtagaaaaagctaacatttgatctaaagttttctgtaaagatacatctacattatgtttatcgtaatttatatttatttatctgcctactggttgcagttttgaaaaactataatmttccagaaaatagaaactataatatttttaattagacctcaagcaaaattattttaaaatgtggtctcaatttttaagaaagtggggaagaatgcttttttttcttttgttaaacttctttgcttccagtccaagaagtgactgtcatttatttttatcttattgcttcctttctcatattagcttgataagaagtaatgaaataatattcaggtttcttagtagagtcatgttgtaaacatagcttttttttctagccactctcgaaaaatggaaagcctctgctttatgagtcacctaattaatgacattgaattatctagtaagtggactcttcagtttaattaaatatcttcattaacttttcactgcttttaaaaataacatttacacatttatgcaaataggttcatcatgtgtccttaatcagttatttagctttggtgcagagttaataattccaatatttgttcaaactgaagaaaatacaggactcaaaaaagaaaggatatttttattcaggttttgagaaaatcacaagtaaaacccccaacttatttatcaataattgtatgttatatacatttccatatttacaattttgataaaatagttataattaatatttatctttaataatttaaatattagttatgtatttattggctcatattatttaaa

SEQ ID NO: 713188 - DNA, 1680 bp, Homo sapiens
gttagaccacccccttttagaagtgtgcataaaaggcaagtgctgtctttgttcagggtccagtctttggatattaatctgctggttctgagtgcactcaataaaaatccttctgtttcacctaccaatctctccagtctcctgattcccacaacaacctgatcgatctcttacactgtggctcctcgagatttggagtccactgtgctggggatagcaaactgcagtacctgcagyaaagtattagtggatataggggtgtctgcctctctgcaggtgttcaccacagtattggaggcaaggcagctgttgggggagcaagggccttctgctggagacagagtgcactgctgcactgtaggtggtgatggcttggggtggggtgctggccagtggaggtcttggagccttatctgtggtctgcaagcaggagcaattgctcaggttgtggggggatcccctgctctgtgtgcagcacagcacaagggcagggcactggtgtagatggggcttgatgactctgtgcccaacaaggatccatctgcagtggtggttggtggggcttatggggggtcacactgcattcccatgtgctgttgaagcaagtaaagcccacccatgcagatatatgccagcaaagtgatgtggggagatgtgggcagttgctgtctcatatcaattttaataaatcttctgatattgtctcaaatcttggaaacctgtgtcagctcaaaaagacttccttgtataaaactgaaatgcttctacctttaaaatgtatatgtgatagattatttattcatagtagttgaatttaatgcaattaatgttgtaatgaatacaggacatattaatatgctaagagtagactacttaaatgtttgtattttcagtaactcaaatataagcatgtctataaatgaactaaaacagaattttgcccaaatcactcaaaaaattagttaaattgaatatgtttaaaatatacttaaatactttgtatataatagattgtcaagtaattaaaataatttacatgttttatttagttgtcctcaactttaaaaatatatatctacatataatttacattatattactgaccacatggctaaatatgatagtttggcagaaatcaattcatattaattatgaaagacctacttttggcaaaaatatttctcaagtttgatatcaattctgactctattattgacattgatgttaaatgtaaacctctgtccatattcttccagggacagaatatcatgaattagcatttttttttacttatatatcacagtatcacatactcagaaagctgttttgataaaatacaactttatcagtcattgcccaatactgcaattatatgtcacaaatgtatctgtataaccaaacgtaacatatgcaaattttttttgctgattataattaatgaatcaaccaaatgagaaaaaaactctcaattcgatattgacttaaactttccaatttactaaaagtgttggtaatatttgttttaaatatttaaatgtttgaatcatatgaatatgttaaatgaataaatactaatggtatcttttacaagcggacacttcaacattttggagaggtaagtgcatacatattttttgtgtgttcattcacatataaacaatctgtgattaactttgatca

SEQ ID NO: 713189 - DNA, 1680 bp, Homo sapiens
gttagaccacccccttttagaagtgtgcataaaaggcaagtgctgtctttgttcagggtccagtctttggatattaatctgctggttctgagtgcactcaataaaaatccttctgtttcacctaccaatctctccagtctcctgattcccacaacaacctgatcgatctcttacactgtggctcctcgagatttggagtccactgtgctggggatagcaaactgcagtacctgcagcaaagtattagtggatataggggtgtctgcctctctgcaggtgttcaccacagtattggaggcaaggcagctgttgggggagcaagggccttctgctggagacagagtgcactgctgcactgtaggtggtgatggcttggggtggggtgctggccagtggaggtcttggagccttatctgtggtctgcaagcaggagcaattgctcaggttgtggggggatcccctgctctgtgtgcagcacagcacaagggcagggcactggtgtagatggggcttgatgaytctgtgcccaacaaggatccatctgcagtggtggttggtggggcttatggggggtcacactgcattcccatgtgctgttgaagcaagtaaagcccacccatgcagatatatgccagcaaagtgatgtggggagatgtgggcagttgctgtctcatatcaattttaataaatcttctgatattgtctcaaatcttggaaacctgtgtcagctcaaaaagacttccttgtataaaactgaaatgcttctacctttaaaatgtatatgtgatagattatttattcatagtagttgaatttaatgcaattaatgttgtaatgaatacaggacatattaatatgctaagagtagactacttaaatgtttgtattttcagtaactcaaatataagcatgtctataaatgaactaaaacagaattttgcccaaatcactcaaaaaattagttaaattgaatatgtttaaaatatacttaaatactttgtatataatagattgtcaagtaattaaaataatttacatgttttatttagttgtcctcaactttaaaaatatatatctacatataatttacattatattactgaccacatggctaaatatgatagtttggcagaaatcaattcatattaattatgaaagacctacttttggcaaaaatatttctcaagtttgatatcaattctgactctattattgacattgatgttaaatgtaaacctctgtccatattcttccagggacagaatatcatgaattagcatttttttttacttatatatcacagtatcacatactcagaaagctgttttgataaaatacaactttatcagtcattgcccaatactgcaattatatgtcacaaatgtatctgtataaccaaacgtaacatatgcaaattttttttgctgattataattaatgaatcaaccaaatgagaaaaaaactctcaattcgatattgacttaaactttccaatttactaaaagtgttggtaatatttgttttaaatatttaaatgtttgaatcatatgaatatgttaaatgaataaatactaatggtatcttttacaagcggacacttcaacattttggagaggtaagtgcatacatattttttgtgtgttcattcacatataaacaatctgtgattaactttgatca

SEQ ID NO: 713190 - DNA, 1680 bp, Homo sapiens
gttagaccacccccttttagaagtgtgcataaaaggcaagtgctgtctttgttcagggtccagtctttggatattaatctgctggttctgagtgcactcaataaaaatccttctgtttcacctaccaatctctccagtctcctgattcccacaacaacctgatcgatctcttacactgtggctcctcgagatttggagtccactgtgctggggatagcaaactgcagtacctgcagcaaagtattagtggatataggggtgtctgcctctctgcaggtgttcaccacagtattggaggcaaggcagctgttgggggagcaagggccttctgctggagacagagtgcactgctgcactgtaggtggtgatggcttggggtggggtgctggccagtggaggtcttggagccttatctgtggtctgcaagcaggagcaattgctcaggttgtggggggatcccctgctctgtgtgcagcacagcacaagggcagggcactggtgtagatggggcttgatgactctgtgcccaacaaggatccatctgcagtggtggttggtggggcttatggggggtcacactgcattcccatgtgctgttgaagcaagtaaagcccacccatgcagatatatgccagcaaagtgatgtggggagatgtgggcagttgctgtctcatatcaattttaataaatcttctgatattgtctcaaatcttggaaacctgtgtcagctcaaaaagacwtccttgtataaaactgaaatgcttctacctttaaaatgtatatgtgatagattatttattcatagtagttgaatttaatgcaattaatgttgtaatgaatacaggacatattaatatgctaagagtagactacttaaatgtttgtattttcagtaactcaaatataagcatgtctataaatgaactaaaacagaattttgcccaaatcactcaaaaaattagttaaattgaatatgtttaaaatatacttaaatactttgtatataatagattgtcaagtaattaaaataatttacatgttttatttagttgtcctcaactttaaaaatatatatctacatataatttacattatattactgaccacatggctaaatatgatagtttggcagaaatcaattcatattaattatgaaagacctacttttggcaaaaatatttctcaagtttgatatcaattctgactctattattgacattgatgttaaatgtaaacctctgtccatattcttccagggacagaatatcatgaattagcatttttttttacttatatatcacagtatcacatactcagaaagctgttttgataaaatacaactttatcagtcattgcccaatactgcaattatatgtcacaaatgtatctgtataaccaaacgtaacatatgcaaattttttttgctgattataattaatgaatcaaccaaatgagaaaaaaactctcaattcgatattgacttaaactttccaatttactaaaagtgttggtaatatttgttttaaatatttaaatgtttgaatcatatgaatatgttaaatgaataaatactaatggtatcttttacaagcggacacttcaacattttggagaggtaagtgcatacatattttttgtgtgttcattcacatataaacaatctgtgattaactttgatca

SEQ ID NO: 713191 - DNA, 602 bp, Homo sapiens
aatactattcagtcatcaaaggaacaaaatattaattaacgcaatcatttggatgtatttttaggaaattttgtcgagtgaataaaagtcaattatatacattatgtacaacagtacaagtaggccttgagacctatgggatcattctgtgctgcagcgaggccctgcctgcctcaccagatgtggtgagcccatcctatctcactcggaggggtccaaaatcggatctgaacgggagtccggtgaacacagcaggcatcctgaagttcccctccctcggaggaagtcggctcaaggaggtcctgaggacaagactcctggggatttggccctgggacaggacaagacacccgcgggcccctctcccactycgccccaaactggaccccggatacagccgccgccgcagcagcaggaggaacctcgctgacaccgcgcggcggtggcggtatttaaaggggacacagcctgactgcccggagcagagcacgagtccgctcagccaatacgcatgcgggaggcgcgaacggctacccctgtcacagtggttcccacggttgtcttaaaaaccagtccccgaggcttggcaaagcagcagccct

SEQ ID NO: 713192 - DNA, 557 bp, Homo sapiens
tcattggatgatgaaccacacatatgatggtggtcccataagattatatttcctatttttactgaacattttctatgtttggatacatacacacttaccattgcattccagttggctacagtattcagtacactaacctgccatayaggtctgtagcctaggagcaataggttgtaccatatgacctaggtgtgtagtagtaggctgtaccatcctaggttcatgtaagtacactctgattttcacacaatgaggaaatggcctaagtatgcatttctcagaacctatcttcatccttaaacaatgtgtgactatgctttctccttccctcaggatatatttatcaattcctggaaaaaatagtggagacaacactgagaaacttactcaacatttccacaagctactcgttcatggaagtcgcataacagcttagggtacgtattctggtaccttgtcttttggtaaattcctgtagcgttaagttcttctacattacttccaaaactcatgtggtccagaaccatgatttgactgttttgttactgtaccttgaa

SEQ ID NO: 713193 - DNA, 415 bp, Homo sapiens
catttctttatattattttcacattattttaatgaactgaaatgatttttaaactaattaaataattgttagactttatcaaatatttaaataatttagaaatataaaataaaatcaattttaaaagttgtatgtcttaaatattgtaagtattatctaaatcttagatataactttatattaagagctgaaaagaaatacctggaaattatcttartatgattttttaccacaacattatttgtggtggtaagatttgaccaatccattaaaataaaatggctattgtagaatgagtagataaactgtggtacacatttttgatggaataattaatagataaaacaccacaaatgtaatcttaaatgtatccctctaagtgaaggatggtaatcctaaaagactaaatatttta

SEQ ID NO: 713194 - DNA, 1621 bp, Homo sapiens
tgcatggtgtttttaagcaggagcgggcccctgggaggagatgcagaaagaaatcaagtcagggaagagtgcctttttcaacacttactgcacagtccacaggccaggcatgcacgtctgttaacaagctccgcactacacacacacacacacacacacacacacacagagagagagagagagagagagagagagagtaagtttaatatttatacataaggaagtgaaggtcaaagagaggaaggtcactcaccccactggccttctgggcagccaacaccatctctaagccatccccttgcctaaacccctccatggcttcctgttatctttaggatagagtcctccagttgttagcagacccaaaaggccctctgtatctggccccagtccccttttcaccctttttgcccctccatatgtccctttccttttccgttccacccttgcagagttcttttgacttcctccaaagaggcaggctctcccagttaggtctgggtcttccacaggctgggcatccatctccactccccttccccagctaatgactgctgcttcaccctttcaggtttcagctcaaatgctaagagccttccaggtcccctagacaggtgggggccacctgaaagttctcaggccaccttgttccttcccrtctcttggctcacggtatctggcttccccactagccaatgagctccactgatgcagaaactgcatctgccttgttctctgccaatttctaatgtctagtatagcacctagcacacagtaaatgtccaaagcccgtttgtgttatttcattatttttctctcttctttgtttgtagtttttgttttgtttttaatttcttttggcaaggggtgaggacagaaccacacagtggtggtgggggaagggccagggagatgagagagctggggaagagaaaagaaaatgcaagaaacagggagtgcagctgggtgcaggggctcacgcctgtaatcccagaactttggaaggcggacgcaggaggattgtttgagtccaggagtttgagaccagcctggacaacataatgagactctgtccctacaaaaaaatacaaaaattagctgggtgtggtggcatgtgcctgccgtctcaactactcaggaggctgaggtgggaggatcacttgagcccaggaggttgaggctacaatgagctgtgatcacgccactgcattccagcctgagtgacaaagtgataccctgtctcaaaaaaaaaaaaaaatcgggatggcgatcaacatgcatagggagaaatactaaacattggtaaggaaagtagggagataagagaggaacaaggaaggaagggaggagaggagaaaggcaagagggaagagaagaaggaagaaaggagaggtaagagaagaaaagggagggataagggagaagaaaagaggcagtaaagaggagagggaagaggaaggccagagggaaaggaggaggaaataagagaagggcaatgggtggcaaggggagactcttcttcatttgatgaggtattctttcactaactcatttcatcacttcttcatttatcattcattcatgtgctaactcattcagtgaatcatttactcactccaca

SEQ ID NO: 713195 - DNA, 1939 bp, Homo sapiens
cccttgtctttggccctgatctcagtcctgagcccacagcctctatatccagttccctcctcgggaaggccgaggcaggaaaatggactcaggaatgacccacgacaagccccatgaccaaaatccctcccaccctgcccctccacccctcagtcccgaccatctgcccacctgggcatcattctagacaccctttcacacacacaatcaaagccaccaactgcccggctctgcctcgggtggcctatcacagcctcacattccggatctctctgtgagccccaatgtgtagacgctgaagtctctgtgcacattacaggtgattcctggactcgtttaaattctggggtcctcagaataggggcagcctctaacttgcttcccataccagggcccccagaactccctctgcatgaagtggtgactcagccccttccccatggactcgctgccccagaaccggcctgcagtaacccatgccagcatgccaggactatccatttctatcccaggtagataatctgttaaccataatctcagatgaaaggaagattattgccccttacgcagatctaatctgtctttgtcaccacccttgcctgataatgcaggattccctgagggcagggcagaaagcctggagttagaaagggaaagaacagaatgttcgggatcacccagtctagtgcctccttttacacggaaggaaatgawgcccagagaccggcagacacttgctccaggactccagaaaagcaacaggggctgggattggtctcctgactcccaagcaggggcagacagccaggggtcggggctcggtccaacattctctgctgcctcttactgtgctcaaaggtcattttagatatggtagatattctggttagcctgttaagatcctgggagggtgtggggaagaggattggggcggggagggaggaggggcttcaggggttatctccagaggggatattacagggctgcagagcagaccaggcccggtggagaattaggtgctgctgggagctcctgcctcccacaggattccagctgcagggagcctcagggactctgggccgcacggagttgggggcattccccagagagcgtcgccatggtctgcagggagcagttatcaaagaatcaggtcaagtgggtgtttgccggcattacctgtgtgtctgtggtggtcattgccgcaatagtccttgccatcaccctgcggcggccaggtaggtgcctccccccatgtcatcctgagtggcttccctcatcgctcgctccttatccccacttctcacttacagctctgaccagtcccttttttttttttagacggagttttgctcttgttgcccaggctggagtacaatggcacgattctcggctcactgcaacctccgcctcccaggttcaagcgattctcctgcctcagcctcccgagtagctgggattacaggcacccgccaccacgcccagctaattttttgtaattttagtagagatggggtttcaccatgttggccaggctggtctcgaactcctgacctcaggtgatccacctgcctcagcctctcaaagtgctgggattacaggtgtgagtcatcatgcccggccaaccagctcttcttgagccctcgtccccaccaagcctcattccccatccacagctctttctctcttccatcccccaaccctacatgacttcatccccagcagaaagtcccgttgacttccccagcagaaagtcccgttaactattttttttgagacggagttttcactcttgtcccccaggctggagtgcaatggtgcaatctcaactcactgcagcctcggcctcctggatctaagtggttttcctgcctcagccccacaagtagctgggatcacaggcgtgtgcaaccatacccagctaattttttgtggttttttt

SEQ ID NO: 713196 - DNA, 1939 bp, Homo sapiens
cccttgtctttggccctgatctcagtcctgagcccacagcctctatatccagttccctcctcgggaaggccgaggcaggaaaatggactcaggaatgacccacgacaagccccatgaccaaaatccctcccaccctgcccctccacccctcagtcccgaccatctgcccacctgggcatcattctagacaccctttcacacacacaatcaaagccaccaactgcccggctctgcctcgggtggcctatcacagcctcacattccggatctctctgtgagccccaatgtgtagacgctgaagtctctgtgcacattacaggtgattcctggactcgtttaaattctggggtcctcagaataggggcagcctctaacttgcttcccataccagggcccccagaactccctctgcatgaagtggtgactcagccccttccccatggactcgctgccccagaaccggcctgcagtaacccatgccagcatgccaggactatccatttctatcccaggtagataatctgttaaccataatctcagatgaaaggaagattattgccccttacgcagatctaatctgtctttgtcaccacccttgcctgataatgcaggattccctgagggcagggcagaaagcctggagttagaaagggaaagaacagaatgttcgggatcacccagtctagtgcctccttttacacggaaggaaatgatgcccagagaccggcagacacttgctccaggactccagaaaagcaacaggggctgggattggtctcctgactcccaagcaggggcagacagccaggggtcggggctcggtccaacattctctgctgcctcttactgtgctcaaaggtcattttagrtatggtagatattctggttagcctgttaagatcctgggagggtgtggggaagaggattggggcggggagggaggaggggcttcaggggttatctccagaggggatattacagggctgcagagcagaccaggcccggtggagaattaggtgctgctgggagctcctgcctcccacaggattccagctgcagggagcctcagggactctgggccgcacggagttgggggcattccccagagagcgtcgccatggtctgcagggagcagttatcaaagaatcaggtcaagtgggtgtttgccggcattacctgtgtgtctgtggtggtcattgccgcaatagtccttgccatcaccctgcggcggccaggtaggtgcctccccccatgtcatcctgagtggcttccctcatcgctcgctccttatccccacttctcacttacagctctgaccagtcccttttttttttttagacggagttttgctcttgttgcccaggctggagtacaatggcacgattctcggctcactgcaacctccgcctcccaggttcaagcgattctcctgcctcagcctcccgagtagctgggattacaggcacccgccaccacgcccagctaattttttgtaattttagtagagatggggtttcaccatgttggccaggctggtctcgaactcctgacctcaggtgatccacctgcctcagcctctcaaagtgctgggattacaggtgtgagtcatcatgcccggccaaccagctcttcttgagccctcgtccccaccaagcctcattccccatccacagctctttctctcttccatcccccaaccctacatgacttcatccccagcagaaagtcccgttgacttccccagcagaaagtcccgttaactattttttttgagacggagttttcactcttgtcccccaggctggagtgcaatggtgcaatctcaactcactgcagcctcggcctcctggatctaagtggttttcctgcctcagccccacaagtagctgggatcacaggcgtgtgcaaccatacccagctaattttttgtggttttttt

SEQ ID NO: 713197 - DNA, 1939 bp, Homo sapiens
cccttgtctttggccctgatctcagtcctgagcccacagcctctatatccagttccctcctcgggaaggccgaggcaggaaaatggactcaggaatgacccacgacaagccccatgaccaaaatccctcccaccctgcccctccacccctcagtcccgaccatctgcccacctgggcatcattctagacaccctttcacacacacaatcaaagccaccaactgcccggctctgcctcgggtggcctatcacagcctcacattccggatctctctgtgagccccaatgtgtagacgctgaagtctctgtgcacattacaggtgattcctggactcgtttaaattctggggtcctcagaataggggcagcctctaacttgcttcccataccagggcccccagaactccctctgcatgaagtggtgactcagccccttccccatggactcgctgccccagaaccggcctgcagtaacccatgccagcatgccaggactatccatttctatcccaggtagataatctgttaaccataatctcagatgaaaggaagattattgccccttacgcagatctaatctgtctttgtcaccacccttgcctgataatgcaggattccctgagggcagggcagaaagcctggagttagaaagggaaagaacagaatgttcgggatcacccagtctagtgcctccttttacacggaaggaaatgatgcccagagaccggcagacacttgctccaggactccagaaaagcaacaggggctgggattggtctcctgactcccaagcaggggcagacagccaggggtcggggctcggtccaacattctctgctgcctcttactgtgctcaaaggtcattttagakatggtagatattctggttagcctgttaagatcctgggagggtgtggggaagaggattggggcggggagggaggaggggcttcaggggttatctccagaggggatattacagggctgcagagcagaccaggcccggtggagaattaggtgctgctgggagctcctgcctcccacaggattccagctgcagggagcctcagggactctgggccgcacggagttgggggcattccccagagagcgtcgccatggtctgcagggagcagttatcaaagaatcaggtcaagtgggtgtttgccggcattacctgtgtgtctgtggtggtcattgccgcaatagtccttgccatcaccctgcggcggccaggtaggtgcctccccccatgtcatcctgagtggcttccctcatcgctcgctccttatccccacttctcacttacagctctgaccagtcccttttttttttttagacggagttttgctcttgttgcccaggctggagtacaatggcacgattctcggctcactgcaacctccgcctcccaggttcaagcgattctcctgcctcagcctcccgagtagctgggattacaggcacccgccaccacgcccagctaattttttgtaattttagtagagatggggtttcaccatgttggccaggctggtctcgaactcctgacctcaggtgatccacctgcctcagcctctcaaagtgctgggattacaggtgtgagtcatcatgcccggccaaccagctcttcttgagccctcgtccccaccaagcctcattccccatccacagctctttctctcttccatcccccaaccctacatgacttcatccccagcagaaagtcccgttgacttccccagcagaaagtcccgttaactattttttttgagacggagttttcactcttgtcccccaggctggagtgcaatggtgcaatctcaactcactgcagcctcggcctcctggatctaagtggttttcctgcctcagccccacaagtagctgggatcacaggcgtgtgcaaccatacccagctaattttttgtggttttttt

SEQ ID NO: 713198 - DNA, 2601 bp, Homo sapiens
tgaacaataaagttttatagctagagtatgagaattagccctcattttctatatacacactgagttgcaatcacttgtctttctgcagaatctggattggctaagctcacaggtattgcacttggaagctgataaaaccagcatgcttgctttggttcaaatggagaacagtcatcataagtgttgttagatacacacttatctgcctgatttatctcctatgcatcaccttgtgtaggacatccctggtttaagtttatttctgatattcctggtcctggcatatcctgtcttgtctttaaactttaaggctgtcatttacaaaattgccaattttattaaattgtctttgaaatccaagatttaagctttcttcacaccttcactgatttcacctttttttgtttaccacttgagattgttatgtatattcttaatttatgaaaaatattacagtgagataacatgttttctgaaagtctatcgtttattaatagacatttcaaataggacatttgggactaattttttatttcttttttagagaggtttaaaaagaatagttcacatcagtatacgtgatcttgtaaggaaaagtctgatatttaattgtgtttacagaactcagcgcagtataaatggttcttttgctcccgggctagagatcacttctaagctatttgtagtatcacatgatgcaaagttgctcttcagtgctggatactgggataatagcattcaagtgatgtcacttacaaaaggcaaaattatctcacacatcatccggcatatgggtaagcattagctttttttccaaaaatgctcaaaaattttctttttttcttaagtataaaagtagtacgtgctctttgtaaagagcattaaattttacctttgaagctgagtgaacttttttattgtgtaggattataaatatatactttctataggagtgtctcatgtattttgggtataataaagcaccacataaattaaatacatcttcatagtatctggaaaatgttaggctaagttgtttttttttaatgaatgataaaagtaagaattttaagacaaaatggtaataaaatctgctgtcattagataagacatcaactgctctattactttgttaacagttaaacatgagagtgatgaaattgttgaatgtagttttaacttgctacttcttagtgtattagtcttcaatataagaataaaacattgagtaggtttttttctaataaacctgttagggaaggaaaatggagtctgctgctaattctgtaccagtcaatcctaagataacacttacgtctgcagtttaggaaaaatatatttgtattgtgaatttatagtatagtatgtgcagtttttctaaggacatatattctataggattacaattcccaatgggagtagaaggtgaatggggatgagaaagcaaagtagcatatgaaaattaactggggatctatctcaaactatctaacctcctcccaagattgtggtagtcattccccacactgcatgtcgacttctcatgctcagagaagggggatttcaaagaaagctctccgaggtgattttgacactgctgctttcctgtgtctctcttccccartgcttttccagtaccatgtctacattcctccctgttggcataactgatttaggaatagtttgaacattaacaaaaattgcgctgaaagttctattttagcaaaacgaggcatctcattttatttaattccttttcttacagatattgtgacttgcgtagctacagattactgtggaatacatttgatttctggttccagagatactacatgtatgatatggcaaataacacaacaggtagtcacacatttaaatgttcttgaattaggtcagagattcaccctgagaatactagcaaaatgttctactaggacatcgaattgttttctggcagtgactgagctcctttgtattctttttacccacattttgtcctgttcaaatcaccacattttttcctaggtttactgtctgattcattaccttattccctattgctttccaaagattcttccttcttacctttcctaggaaaacgggaattattttattgtcttttagcatagtaacatttctgctttctttcttgtgggactactagaaatgatagatttatagttttcatcaacctgattgcattctcataataatattggtccaggaagtatcatttttattgaatagcttctgttttcttttcttttttttttgagatggcatgatctcggctcactgcaacctccgcctcccgggttcaagcgattctcctgcctcagcctcccatgtaactgggattacaggcacgtgccaccatgcctggctattttttttttattgtattttttgtattttttgtatttttgtatttttagcagaaatggggtttcgccatgttggccaggctggtcttgaactcctgaccttcagtgatccacctgccttggcctcccaaagtgctgggattataggtatgagccactgtgcccggtcagcttctgtgttttctgcattgtcttaacaggctttctcccactccaa

SEQ ID NO: 713199 - DNA, 987 bp, Homo sapiens
ttggctccagaaagcaaatacttacctcttcttttagattactcagcatcttcttacacactgtcgttcagttagccaacctctatcaaatgcctgctgaatgccaagcccagaactgagagatgaggcgcacagggtcttttccttctggagctcacagttcacatggggctaagaagagaaggacctgtgcaaacagccaattaaatagattacaataaagtgtcaccagagagtcaaagtccaagttgtacaaggaaagctcagggcagggacctyccttaacagctcattcttagttgggcagcattacatagaagggatgatgtttgagttagttttctggaagcaaagggcatgctgagaagcccagcacatgcaatgatggggaggaatgaaagagggagatatgtttagagaatggcaggtctttgaaacacagtttggatagaagagtgtggcagaagatgcagctggaaaaggtggtttgtgcccaatggcatacagttctattgggctacagaagagttctttttttttttttctgtcctcttttacaagctcaagtttggaggcatctgggcatgaaatccttgagtctgggcagaaatttctgtgaatgtgttcatcattctccttcttagctatagtcaccttccccaggaaggcaggcagctggaactactttattagtggctctcctaggtagaaagtatacacagagttcctggggcagcgtggggggatgagaaaatgccaaatttggtatcagaacaacttaagaattcattccaccatcccaccacttatcagctgatgatcttagagaaattagctggtcactcgaaacctctatttttgatgtaaaatggttacaattatacccgccttacagtgtaattagtagtagcattacaaaataaattcaggaggtccctcaaatctctgggactggataggcagtggatgggtagacagatggagaaa

SEQ ID NO: 713200 - DNA, 987 bp, Homo sapiens
ttggctccagaaagcaaatacttacctcttcttttagattactcagcatcttcttacacactgtcgttcagttagccaacctctatcaaatgcctgctgaatgccaagcccagaactgagagatgaggcgcacagggtcttttccttctggagctcacagttcacatggggctaagaagagaaggacctgtgcaaacagccaattaaatagattacaataaagtgtcaccagagagtcaaagtccaagttgtacaaggaaagctcagggcagggaccttccttaacagctcattcttagttgggcagcattacatagaagggatgatgtttgagttagttttctggaagcaaagggcatgctgagaagcccagcacatgcaatgatggggaggaatgaaagagggagatatgtttagagaatggcaggtctttgaaacacagtttggatagaagagtgtggcagaagatgcagctggaaaaggtggtttgtgcccaatggcatacagttctattgggctacagaagagttctttttttttttttctgtcctcttttacaagctcaagtttggaggcatctgggcatgaaatccttgagtctgggcagaaatttctgtgaatgtgttcatcattctccttcttagctatagtcaccttccccaggaaggcaggcagctggaactactttattagtggctctcctaggtagaaagtatacacagagttcctggggcagcgtggggggatgagaaaatgccaaatttggtatcagaacaacttaagaattcattccaccatcccaccacttatcagctgatgatcttagagaaattagctggtcactcgaaacctctatttttgatgtaaaatggttacaattatacccrccttacagtgtaattagtagtagcattacaaaataaattcaggaggtccctcaaatctctgggactggataggcagtggatgggtagacagatggagaaa

SEQ ID NO: 713201 - DNA, 671 bp, Homo sapiens
attgaaaaaccaaattcatcttgaaggagcagccgaagcatttgaattgagaatttctcccctccctggcactgggccaatattgctacaccatgcgacagcagaagggtagaagtagattcctaattgtttctaggatcratttaagttccctgcttttctgcaacctcttattacaaacctccaaatccacggccttacatgctgtttagagaagcctatttgtctgctgtatttaccagcagcctgcctgactcacttctatttggcctggcccaccaaatccagggggccccaaatcatccttgtttctccccaaaaatactcatcctctcccaagccccaaccagcacccttcagacaccactgggactcagcacatcttcggctgcttcactttactgatcactttttaaaaaggcattgctcatccgttcctgagagccctgaaatcctcggctgggctggagcccttggtgtctcctgccctgtgttctggcgtaggccgtggggagagcctgcttgagttgtgcacattcacaggaactctacagggctgtggtcctgggggacaaggctgtttccctccatgctcatggcagtggagttttctggagagaggagtggaggaggacagctgagtctcgtccagcagtgggctaagaggcagt

SEQ ID NO: 713202 - DNA, 1896 bp, Homo sapiens
cgaactccagcattcatagccccagtctgtgctgataactcccactccatgctgacatccatttcttggatgtcgactacaccgttagggctacgcgggctctgtggctagtcacaagttaaatcgtggtctctgctcctcaaagggtcttcaatcttgttgagaaacaaacttaacatgggaaacaatttgaaagccctaggatgacaagttatttcagctggcgagaagaaagtgacatcctggagctgggttagctggaggaggagtgccacgagaggctgttcgccttgaaggaggggctctgtgcaggggtggagagagatggcaacaggcagcatggggtgtccatggagggcatcttcctgatggatgggtgcgtgtggggagcagctggccatgatgggtcgatgggagggcaaggtcagatcaggggttgcccagggggaagatccatacatccaaacttgatgtcttagacaacagggagccattgcagggacacgacatcaggcatagagagagccrtgagatgaaggggggccaaggtgattttttattttaaaaatgtaaatgtgggctgggcgcagtagctcatgcctgtaatcccagcactttgggaggctgaggcttatggatcacttgaggtcaggagttcgagactagcctgaccaacatggagaaactccgtctctactaaaaatacaaaattagctgggcatggtggcgggcgcctgtattcccagttacttgggaggctgagacaggggaattgcttgaacccaggaggcggaggttgcagtgagccaagattgcaccactgcactccagcctgggtgacagagcaagactccatctcaaaaaaataaaataaataaataaataaataaaaatgtaaatgtggagttttaaaaaggtttaagtaagctgagcatgatggctgacgcctgtaatcctaacactttgggaggctgaggcaggaggatcgcttgaagccaagaattcaagaccagcctgggcaacatagcaagatccggtctctacaaaaaataaaaataaaaaacttagctgggcacagtggcatgtgcctgcagtcccagctactcaggaggctgaggtgggagtatggcttgagcccaggtggttgacgccacagtgagctatgatcatgccactacgctccagcctgggtgacagggccagattctatctctaaaataaataaataaattatgatttaggtagtttaagcaaaataggtggagtggagatgtactagggcaaaatgtctataggatagccatgtttttgcatgtgactccctgtggtaggcagaattctaagatgactcccagtggcccacacccctgtataactgcatctcactgagtgtgggagggatcttgtgaataagatgggaaaacgtacccatgattaggttatattccatggcaggagattatcctcagtgggtctgggctaatcaggtgagctcataaaggtatgggttggccaggcacggtggctaacgcctgtaatcccagcccttttggaggccgaggcaggcagatcacgaggtcaagagatagagaccatcctggccaacatggtgaaacctcatctctactaagaatacaaaaattagctgggcgtggtggcaggcgcctgtactcccagctactcaggaggctgaggcaggagaatctcttgaacctgggaagtggaggttgcagtgagctgagatcgtgccactgcagtccagcctggtgacagagcaagactctgtctcaaaaaaaaaaaaaaaagatatgggtttttttcttggtgaaagagattctagtcagagatttgaaacaggagagagacttgaggtgagtctgttgctggctttgaaga

SEQ ID NO: 713203 - DNA, 1391 bp, Homo sapiens
aacacagccattctcattcatttacctattgtctatagttgctttcacattacaatggcaaagttgagcagttgtgacagactgtccgtctcataacgcctaaaatgatcacaataggccctttccagaaagctagctgacccctgctctaaatattcctttttcagccaccacctaccagtaccaggaactgtactcctgtaattaccacgcatgtcaagagaccctttaaaagttagagtttccttattggagggattacatgaagctcacactcagccacttaggtttcaaggtgttcccagatgaaaattctggcccagattcatgtctgacagacttttgggaggaggaggaggaggattggatcaccagattaatcaaagtctgttgcctttatttctaaagactattacatgactgaagtaattaaattaaattaaattaaattaaattaaattaagaccttgggaaatacaattctaagtcttaacattttgcatatgttgttaaatgtccatgattcatagcaaatgagatctatttactggaagtaatctccccgatatggccatctaaacttggttctccatcagatatattcttgggaaattacaattgttttttccaacaagtagacacttgtttaccttctaggtttgtggaaggcatgaagtcctttatagtatcattttttttcttatttaatatttactgtcatatatgtttgcatgattaaaaggaggcattaaaccttggttcttaattataatccgtgatccatagaggctgcaaagcaaaagctcaacaagtttgtrgtccttaataatagacgactgctttgtttctatctgaaagatgatgttccctgtactaagaagcagaataagacgaaaaactctgaggtcctttgactggtgagggtccaataagaaggtcaggtttaacatccttctagtgttagaccaatctgtttaccaagcgattgtaccacttgttaagaagcataatttcctctgattaggtacttctgttaaaacaaacattattcatactaataatacctgtcatgtattaagcctttaccgtgcaccaaacacttttaagttcctgactgaattatctaattagttcccttaacaacaaccctatgaagcaggtactattattatcaccattttacaaacgaggaacttgggaatggggtgttaagtcaatgtatacaataccccaaagaaatgagaacagacatatttgtaccacgactcctctgccattagacacttaaacatgatttgagtataaggaagcacaaaataatagagattactttcacagctaaacttctctcttgcactaatttagccaccagagttactgtcattcttgca

SEQ ID NO: 713204 - DNA, 1852 bp, Homo sapiens
tgtggcttctttcactcagtatcagtctttgagatttatcgatgctattgtatagaacagtagttcatcacaacattttgaaagctaggacgtacctgagaacttattctctcatggaaacaatataaagttaagggcttttgtagcccaagagggaaaaaattaaaatattttaaaaatattttaaaacctcaagtagcctaagacaagcctagttaactcatactgaagtgacactgctacttgcccttagagctctcctacttactcccactgcctaattgggattcttctcctccatgtatgttaaagcagcaaattatgcattaaaaagacctctgtggggtttccagtacaagtgactttgctcctaatacagatctttgagaaaaatgtaaagaagaaaaaggggcagaccagcatccagcaagaaaaaaaagtacagttgcactgaaaatactctctctctgggaacttccaggtatgagtcaggttaaagacaaccagggaggctcctacaactgattttcttatctttttagaatttaacttagatccttgaaacagatttaaaaaaaaggggggggggtatctcttgcggagcaaaatcttttacagccaaaatatttattaagttgaagttgagttttaattaagtttattaaaagttttaggctggctcctagctaagaataagaaaaggccaataaccaaatagaaaaattgggcaaaggaataaacaaacaaaaatactacagaaaaggaaatgtaaaagtgattcttaaacatatgttttcaggtcacgcgtggtggctcacgcctgtaatcccagcactttgggaggccaaggtgggcagatccctgaggtcaggacttcgagaccagtctggccaatatgttgaaaccctgtctctagtaaaaatataaaaattcgccaggcgtggtggcgggctcctgtaatccccgctacttgggaggctgaggcargagaatctcttgaacctgggaggcagaggctgcagtgagccgagatcatgccactgcactccaacctgggcaacaagggcaaaattccgtctcaaaacaaacaaatgtttttaaatgctcagccttactcagaaattacctgcgaattaaatctacattttttaacctgttagactgggaaagatctgagtcttgtaaatccactgtgctgaccagggtgtgaataacacatattctcatatactgcaagtgggtgtgtaaatgggtataaccctcaggacagactttggctgtatttatcaaaattgcaaatgtacatacatgtacgctctttggccagttctcagaatctgtccttcaaatgtatgtgcgtgtggaaaataatttaaatacaagattatgtactacacacacagttaatgtgcacataagtttgaaaataatctaaatgtccctcactgggagacttgttcaattatgatataaacaatcaaaggaatagcatgtaattatttaaaaagtaaaattattttgcttatagtaagtgaaataagcaaagtgacaatcagtggagtatgttacctcatctgttaaaaagaaaaggttgtgggggtggggtgggacaaaaatatatattcatatttactcagagtaataactgataaattaattacatcagttacctggggagtaagggggaaatgaggaattggtaacattgagggaattaaagggaacaaggtgggaaatttctgtatcctttttttttctccttttaaaatgtttgaagcaagagaatgaatcatgtagccaaataattaaattaaaagatgttttaaattgctttcattttaagttaattcta

SEQ ID NO: 713205 - DNA, 1747 bp, Homo sapiens
cctggatgataaaacatagatgagaaagaaaagagtgacagttgctttctaagaagagtaaagtagtgactctggttttctagttgggttcagattgagtaataccctgtagtgagactacagcctcctgctgtgttaactgctacatatctcttttacctttaagtgttacacatagtattctactttttatctttcaggccatatgtcaaaattttatttgtgttctttccagatgttaatttttctcatctctgagtaactcagaggaacaaagagagaattacctttttcygcagcaacttatattcatgttttttcatcagcagttcgccaggttgatgaagaatagtcacttgagtaatcacaggcaaatgtcgttcagcctctaaaaatgagtaaaggattaggagccctgctgaggtcgtgtggtttggcagtgtgcaggtctttgcattttgctacttgataattatgtttaggaacttaaatttatatggcaactgagaagttcttctcagataacacataggtatcttagttgctcaagttatgctacttgttctatcatgcaagtatttgtggtactttaatattgagttctctttgagtatatattaaagattcacatgactgcaaaaggtttttgctgctgctgttactttaaattcaggaggatagagatagaacagtgggtgacttagagttctagtgcccagttagcacccaagtgagaatttaatgttcctgagtaaagctaaagtaatcatttacatttcagacaccatttaaaaatactgaattataatcaattttattgttgaagttgctgacaaatgatttcctagccagatacctggaatatcctgcaatcagttcacattgtcagtgtgttaagttgatatgtggcatccggaattttaaaggaatcctgcatgtcaatcagtgatcatgaagagggacatttatattccctaggctctgaactagtgtaatcagattatattgtcaattattagcatgagcgatagcaggacacataaactcatgtagatgtgtatgtcagaggaaacaatcacctttctatcctcaggctagatcctgggataataatgttcttgattatttgataatttctctctagaaaatggaatagcaagatacaaaatagcaacccttagtcagcttctccagaagtcaagtttccttagtggctaccaagggccaaatatagtgctgctgttctaatgtgggggtggggggcattgatgagacatgatgatcttaacattaactgtgactttgtgagttttgcatcaaacagcctcatgcagcctcagtagtgtattatttctcaagtctactttttagtcctgaagttctaatgtggctcttgtgtttgaataacagtagtcaattggtatcataaaatagccttgcctctcattataactgcagaaaatatggcccaggtttttagcatatcttttctgtcatagctatcacagtattaccttcatgcagctgcattgttcatgatttatttatttattcagttatacacttaagaactatttattaggtgctgaccatatgcaaaacactgtgccaagatgtattattttaagggtgaataagactaggctcctgccttcaaaaccttacaggctactggggagacattaggacattagcatagagtgcaatgcatgttaggaaagggtgcatattgctgtagtctcaccca

SEQ ID NO: 713206 - DNA, 760 bp, Homo sapiens
gtgcaaccacagccttgaccttccaggcttaagtgaaccacaggcacatgctaccatgcccagctaatttttttttgattttttgtagagacagaagtctgcctatatttcccaggcttgtttggaactcctgggcttaagcgatccttctgccttggcctcccaaagtgctgggattacaggtgtgagccaccacactcggcccccaggggacctatgggttcacacacaaggctgctcccatggacatcacctggcctctgctaggagccgatgagtatacacctgccagtcactggtgaaagtggaggtctgaggacaatgcttacataccaggtttctgataagaagtaaaagaggccacctctgtcctcctcagttcatcagaaawactaggatgagtgcaattcctgtttatgcttaaactgctgcatagatttaggctaatgactgaatacaaaaaccaggcatagtagtttcaacccaagaagctgtggagcctcaggctataataagtagccagagagaggttgaatgggaacctccctgttgcctccactcctgactcatccaaagcaactcaacttttatgtgttttacacactgagactccagaaaattttgcttaaaattttactctgccctaatcagtcaatttctgcttgtgttttatgatttgcattttagtcttatacaaaatactttccttttaacagaatacttatgaattttgcgattataaacatgatcttataatacc

SEQ ID NO: 713207 - DNA, 760 bp, Homo sapiens
gtgcaaccacagccttgaccttccaggcttaagtgaaccacaggcacatgctaccatgcccagctaatttttttttgattttttgtagagacagaagtctgcctatatttcccaggcttgtttggaactcctgggcttaagcgatccttctgccttggcctcccaaagtgctgggattacaggtgtgagccaccacactcggcccccaggggacctatgggttcacacacaaggctgctcccatggacatcacctggcctctgctaggagccgatgagtatacacctgccagtcactggtgaaagtggaggtctgaggacaatgcttacataccaggtttctgataagaagtaaaagaggccacctctgtcctcctcagttcatcagaaatamtaggatgagtgcaattcctgtttatgcttaaactgctgcatagatttaggctaatgactgaatacaaaaaccaggcatagtagtttcaacccaagaagctgtggagcctcaggctataataagtagccagagagaggttgaatgggaacctccctgttgcctccactcctgactcatccaaagcaactcaacttttatgtgttttacacactgagactccagaaaattttgcttaaaattttactctgccctaatcagtcaatttctgcttgtgttttatgatttgcattttagtcttatacaaaatactttccttttaacagaatacttatgaattttgcgattataaacatgatcttataatacc

SEQ ID NO: 713208 - DNA, 2209 bp, Homo sapiens
tcatgtattagtggtcatcaagtaaacaatcagctaccttgctaatagtgtcatgagggtaactcctgaactgctgtgctactttgctttgggcattagtggttttgtggccccttctaagccatttacacaagtaggagcagtgagatttgctcttttcattggatcatattttcttcttgcgcagaaagccttgtattttctgctaggcacttggttggaatgggatccatatcaatttgtctcagctgctgaatggtacttactatgttatatggtgagctataaagctctgttcttaataaataggtgaactgcttttccatccctgtttctcatttaatttaatttaatggagaatattcaaattggctacatgatgctaattcatgtttaaaagtgtctgagtttggaattcaagtccttagagtatgtcaggacaaagagktttatgagagaaggtgtatttattgttgagatgagtagaagaacttaattttagttttattttaatatttagcatcttcatagctacttttaaaatccactagagaaaatctgctcaggtcatatttctaagatcctgacaaaagaaaaagccattctcttgaaggttggggaaagattgtcttgcaattctgctgactcaactgtaaagttacaatgagtacatctcatacaattgagtagtggccagtagtaaggaatttggtgtttgacatgtttaatataactcacatacatttgcaatttcaaggaaacacaatattgtttatagaagccctctaattttcataagttgctaccttcatttggtacctactgattatcatgtgctaactaggagaaaacacctacaagcaaacaatattatagtgctgcgattgattctgctttaatgttgcttgttcaggtagcaaagccattagctacttcttgatagtttttatgaatagacttagcacctagtattgagcaaccactgaagaatgcatcttccgttaaaaggttgatttattagtttatatgtaaaagaacactggaggttataaaggtaacaaagaccttaaacattacattgatttttttttctcagagctttttttcttcttgttgtattgcagggtaataaaatttcactaggcccattggatctataaaatctgaagtacaaccaccaactgatacaaatgaaattgtttgactggagcgataagcaaggacttggctttgaactctgagcagtataagtcgtttctctggcccgtgagggtgaattacagcctgctgtgcattaaaggacaggcatgtatttgtaggagctcccagttcagtaatcactgggtgatacagtgacctttacatggccactgtagtttcacaaagaggctctttagacatggaaaatcaacaccatgcctttttaatagaacttagatatttcattatgcgaattaaaattgtggatggatataagatctttgatttctgaaataaaaagtagaataggaaaataggaagttttgtttgcaaatctcaggatgtattatatttaagatagtgagcttttctttctttgtgtgagttgcaggctccccatagtataatgtgctgttctgtgacagactagaattttttgggcctctactatgtgctgggcacagacttaagtaaattcttggcatgcgaaccattagctcatgttacctttgtctccctgtagccccagtactgtcccttgcagctcccagcactctatcactctatcacccagtgcttgaggcatgattcccttattaccagcctcatcagtcaagtacaatagagagccagtgggaaagagctctgaaacctacccagcaaagtgaagttctgattgcaacggtgaaggcttgagagcagtatgcaaattagcgaaaaagtaggcgaggtctaccttaaagctggcccggcctggcgtggtggctcacgcctgtaatcccagcagtttgggaggctgaggcgggcggatcaccaggtcaggagatagagaccatcctggctaacacggtgaaaccccgtctctactaaaaatacaaaaaattagccgggcgtggtggcgggcgcctgtaatcccagctactcgggaggctgaggcaggagaatggcgtgaacccgggaggcggagcttgcagtgagccgagatcgtgccactgcactccagcctggg

SEQ ID NO: 713209 - DNA, 2209 bp, Homo sapiens
tcatgtattagtggtcatcaagtaaacaatcagctaccttgctaatagtgtcatgagggtaactcctgaactgctgtgctactttgctttgggcattagtggttttgtggccccttctaagccatttacacaagtaggagcagtgagatttgctcttttcattggatcatattttcttcttgcgcagaaagccttgtattttctgctaggcacttggttggaatgggatccatatcaatttgtctcagctgctgaatggtacttactatgttatatggtgagctataaagctctgttcttaataaataggtgaactgcttttccatccctgtttctcatttaatttaatttaatggagaatattcaaattggctacatgatgctaattcatgtttaaaagtgtctgagtttggaattcaagtccttagagtatgtcaggacaaagaggtttatgagagaaggtgtatttattgttgagatgagtagaagaacttaattttagttttattttaatatttagcatcttcatagctacttttaaaatccactagagaaaatctgctcaggtcatatttctaagatcctgacawaagaaaaagccattctcttgaaggttggggaaagattgtcttgcaattctgctgactcaactgtaaagttacaatgagtacatctcatacaattgagtagtggccagtagtaaggaatttggtgtttgacatgtttaatataactcacatacatttgcaatttcaaggaaacacaatattgtttatagaagccctctaattttcataagttgctaccttcatttggtacctactgattatcatgtgctaactaggagaaaacacctacaagcaaacaatattatagtgctgcgattgattctgctttaatgttgcttgttcaggtagcaaagccattagctacttcttgatagtttttatgaatagacttagcacctagtattgagcaaccactgaagaatgcatcttccgttaaaaggttgatttattagtttatatgtaaaagaacactggaggttataaaggtaacaaagaccttaaacattacattgatttttttttctcagagctttttttcttcttgttgtattgcagggtaataaaatttcactaggcccattggatctataaaatctgaagtacaaccaccaactgatacaaatgaaattgtttgactggagcgataagcaaggacttggctttgaactctgagcagtataagtcgtttctctggcccgtgagggtgaattacagcctgctgtgcattaaaggacaggcatgtatttgtaggagctcccagttcagtaatcactgggtgatacagtgacctttacatggccactgtagtttcacaaagaggctctttagacatggaaaatcaacaccatgcctttttaatagaacttagatatttcattatgcgaattaaaattgtggatggatataagatctttgatttctgaaataaaaagtagaataggaaaataggaagttttgtttgcaaatctcaggatgtattatatttaagatagtgagcttttctttctttgtgtgagttgcaggctccccatagtataatgtgctgttctgtgacagactagaattttttgggcctctactatgtgctgggcacagacttaagtaaattcttggcatgcgaaccattagctcatgttacctttgtctccctgtagccccagtactgtcccttgcagctcccagcactctatcactctatcacccagtgcttgaggcatgattcccttattaccagcctcatcagtcaagtacaatagagagccagtgggaaagagctctgaaacctacccagcaaagtgaagttctgattgcaacggtgaaggcttgagagcagtatgcaaattagcgaaaaagtaggcgaggtctaccttaaagctggcccggcctggcgtggtggctcacgcctgtaatcccagcagtttgggaggctgaggcgggcggatcaccaggtcaggagatagagaccatcctggctaacacggtgaaaccccgtctctactaaaaatacaaaaaattagccgggcgtggtggcgggcgcctgtaatcccagctactcgggaggctgaggcaggagaatggcgtgaacccgggaggcggagcttgcagtgagccgagatcgtgccactgcactccagcctggg

SEQ ID NO: 713210 - DNA, 2209 bp, Homo sapiens
tcatgtattagtggtcatcaagtaaacaatcagctaccttgctaatagtgtcatgagggtaactcctgaactgctgtgctactttgctttgggcattagtggttttgtggccccttctaagccatttacacaagtaggagcagtgagatttgctcttttcattggatcatattttcttcttgcgcagaaagccttgtattttctgctaggcacttggttggaatgggatccatatcaatttgtctcagctgctgaatggtacttactatgttatatggtgagctataaagctctgttcttaataaataggtgaactgcttttccatccctgtttctcatttaatttaatttaatggagaatattcaaattggctacatgatgctaattcatgtttaaaagtgtctgagtttggaattcaagtccttagagtatgtcaggacaaagaggtttatgagagaaggtgtatttattgttgagatgagtagaagaacttaattttagttttattttaatatttagcatcttcatagctacttttaaaatccactagagaaaatctgctcaggtcatatttctaagatcctgacaaaagaaaaagccattctcttgaaggttggggaaagattgtcttgcaattctgctgactcaactgtaaagttacaatgagtacatctcatacaattgagtagtggccagtagtaaggaatttggtgtttgacatgtttaatataactcacatacatttgcaatttcaaggaaacacaatattgtttatagaagccctctaattttcataagttgctaccttcatttggtacctactgattatcatgtgctaactaggagaaaacacctacaagcaaacaatattatagtgctgcgattgattctgctttaatgttgcttgttcaggtagcaaagccattagctacttcttgatagtttttatgaatagacttagcacctagtattgagcaaccactgaagaatgcatcttccgttaaaaggttgatttattagtttatatgtaaaagaacactggaggttataaaggtaacaaagaccttaaacattacattgatttttttttctcagagctttttttcttcttgttgtattgcagggtaataaaatttcactaggcccattggatctataaaatctgaagtacaaccaccaactgatacaaatgaaattgtttgactggagcgataagcaaggacttggctttgaactctgagcagtataagtcgtttctctggcccgtgagggtgaattacagcctgctgtgcattaaaggacargcatgtatttgtaggagctcccagttcagtaatcactgggtgatacagtgacctttacatggccactgtagtttcacaaagaggctctttagacatggaaaatcaacaccatgcctttttaatagaacttagatatttcattatgcgaattaaaattgtggatggatataagatctttgatttctgaaataaaaagtagaataggaaaataggaagttttgtttgcaaatctcaggatgtattatatttaagatagtgagcttttctttctttgtgtgagttgcaggctccccatagtataatgtgctgttctgtgacagactagaattttttgggcctctactatgtgctgggcacagacttaagtaaattcttggcatgcgaaccattagctcatgttacctttgtctccctgtagccccagtactgtcccttgcagctcccagcactctatcactctatcacccagtgcttgaggcatgattcccttattaccagcctcatcagtcaagtacaatagagagccagtgggaaagagctctgaaacctacccagcaaagtgaagttctgattgcaacggtgaaggcttgagagcagtatgcaaattagcgaaaaagtaggcgaggtctaccttaaagctggcccggcctggcgtggtggctcacgcctgtaatcccagcagtttgggaggctgaggcgggcggatcaccaggtcaggagatagagaccatcctggctaacacggtgaaaccccgtctctactaaaaatacaaaaaattagccgggcgtggtggcgggcgcctgtaatcccagctactcgggaggctgaggcaggagaatggcgtgaacccgggaggcggagcttgcagtgagccgagatcgtgccactgcactccagcctggg

SEQ ID NO: 713211 - DNA, 1054 bp, Homo sapiens
ttgactctatcctatcagactgggagctgttgccaggaacaaaggctaaattaagcctccttattccgtttcatatttaacactaagtgagaggaatgatctatacttcacaatgatagaaatatttggagaccctttggctcaccatgttaattacactgagaactgaactgagagtctattactttaaaccgaacactgagtcattactttgccccatgaaggagatttttcaagtggtatttttcttaaggttgaatatcgaagtatatatctaaatgatataaatagaaatgtctggtgtagtccaatattaaacacagcaaaatttcaattagccaaataaaaatttcacagccctccattataatttaatcttgcttttcctttcagagaggaaatcatatgaaagaggtgtgttatcagacaacaagctgaagatatgtcaggcactgtgttctgagcccccacagtgggctacctgatatgttgaaagctctttgttactttcagtaagaggggtgcccattgggagcatatagttgaagtgaattgacagagatttatttcagaaagtcactttcagggtcagcacaatgagccaaagcttctgttgttctgcaaaagcaccaaaaactgttcacagcaatggccttcaggcgtggaagagaccagtctccaagaaggagacagacatcgttatgttctgctgatccaaagataaagggactaawttaggtgaaaataatcaaatatccagaattatacacactaaaaattctggtgtattaagtctctggcatatataaattatattttcacagtggttatattatctcaggtctaaaagtactgccttgttacactttaaatcctacataagaagagataactttcaaaattctgggatcatatttagtatgttaaaataaattgcaataattcaggaaaacatttattatcaatttcagtggaaaatctgactccttaatgagcacatttttttcactaaagccctttattcatgtttattagagaggtttctgttctatta

SEQ ID NO: 713212 - DNA, 649 bp, Homo sapiens
ccctccgccaaacttcccaaactttgctttctttgaaccaagctgaaaagtgatctccctaaaaggggatcagaagattgcaagcaattggatttagcacggagttctacctggtgctctagagagctctgggcacacaggatggtgcgggaatcctggaaggaattacagcctgaatggtggcagggcaggggaggagccactgtgaagccgtggtagtcgctgaaacgctttgttaatgccatttattagctgtatgcgacaagaagtgtaagaggttaggcaggtcttcaaaaatatccaaaaagagaaaaataaacattcccttgtttgctttttgtggctttgctcattttcttcccctygagtggcccttcatctaaggctgttttaaacccaaaatcggttatctggtttcagggtaagggctccctcttgccaaggtattaaataaacaagtacagcaaaaacttgaatccttatgtaatccaaatgccgtttcctcgaaaaccacaacaaatgctgctaaaccagataacaggaccgggaacattcggccccccaacccccaccccacaacacacagcctccgcccccagctttagggccagcagaggacatttatgttcaggaactcctctccaggaca

SEQ ID NO: 713213 - DNA, 600 bp, Homo sapiens
agtgagaatttaaatagttctaattaactaatctcattttaattggaataagttttttagcaaggtattggcagttttaaaataatcattttcagattaagagataatgttttttcagataaaaataaaaataaccccaatattgataacctgatgataacctaaattataatcattggttacatggaaaactataaatacagaacttaagtgtgttatctctaattatttataacttttggatcatcatgaaaattatgagtcatatgaaagtttcttctcaaaatctacgatcattttttgctaaattaacgagtaagagtaatgcagcattgatgataatagtcattggatgtatttttttgtctctggcacttaacattcaggtccctatttgagacaaaaagctgagtctcatggatgacaaataatgtgctgtagttaacctggctaggaaggggaagggccagatttcaratccatgtcttcattgccctaagtcctatctctttactttgtactgtatttcttcatcataaagatcagctttttaggttttgatatttctaacaatgtttcagctacaatcttttgttcaag

SEQ ID NO: 713214 - DNA, 606 bp, Homo sapiens
ttctgaaattgagtaaccccatgtagcaaaagtcagctgtgattaaacaaaactggtcggtttctcttcctctcctagctgaaatagtagttgacccaccgtactggcctattatgacctgagataacaatccagttgccattcagctgaacacttcctgaggccagagactttgtctgcttgtgtaataactcctgcattgccagtacctagaatagtgcctgacttttaggaagtgctcattacgtatatgtttaaaatttaaataaatacaaaagcctttctcatttttgtttcctcttccaacccaatgtaaaacttcttastaaggcgaatggtatagtttgtttttcttactttgagtttttgtaaacaaatacaaaatacacataagccagttagttttctaaaatggattagaattagcacaacaatatttctttacttactaatttttaaaaaatttgtctgttgtgagcagacttttgattaagcgctagaaatttaaagatgtgccatgagctttctttttcagtagagaagaatgatataaacaaccattattctggctgattatagaaaaaggcattcgacaagcaaagaaaa

SEQ ID NO: 713215 - DNA, 1474 bp, Homo sapiens
agtatacataaataatgtgtgctgataatataaaccataaatttatatcttaaccaaaaaacatttaataagattatgctaacgtaaaaattaatgtgcttaagagtttaattctccatgaattataaaatcacaggcagataccatatagtttatatttatttaaagattctaagagattttctgtactcatactttactacccagaaatcaaccattttccagtaagttcaagttggtgagctatggtatagaattagaacttttcaggttcttgctgagagccttttatctgtgtacatttaaactagtatttttattatagaattaatatatccacatgctcaaaactcaaatcataaaaaagtaaaatgaaaactcagcctccctggctcctattttgtttcagtcccacaggcaacccctgatcacagttgctgtttttacatttttaaggtggctatgataaaacttaaaattaaattttacacgtattcccctttttcttgatttgtcaactttayagaatatctactcttgtttacctgctattgtaaatgagtaatttcttacatttaggttacctcctatctccctttctcctgctctgcttccggttatgtataattttcactttaatggttatcttcagattaattgttgcctttatagctttaaataatatacttaaacatctatttcttgatttacccaccctggccaatatttcttactccttgatatgaaaagggaaaaaataagaatactcttccttatattaacttttccttgattcatcgctatgtttttataaatccattgttacttttatctaaaaatctgttttattctactcttgatgaatatttgaattatccactttgggattattaataatgcttctatgagcatcttgcactgtctttggtgcacaaatgtacatgtgttgctaagtctgtacactgtgagttaaaggctgtgtgtataataccagttttcaaatagctatactaaattatactcacaccagcagtatgagacagtaggaattccatatcctcatcaataattggtactgtttgcctttttcattttagctattctgatgggtattttatggtataaaattaggtttaattttcgtttccttgaggattaaggaggttgagcacctcttcatatgtttgttggccatgtttattttatgaagacttatatagataggtctcttgcccataattgtattggatttcatccatctccctcctctctctcatcactgtgtagattttctttatatattctctgttacaacccttttatcaaaaacatgggttgtgggtatctgcttgtgtcttgctcttttcactctctatttggtaacctgggtgaatagttattttaagctagttcaatctatcaatcttttcctttatggatggtgcttttatattctgttaatatatctttccct

SEQ ID NO: 713216 - DNA, 1474 bp, Homo sapiens
agtatacataaataatgtgtgctgataatataaaccataaatttatatcttaaccaaaaaacatttaataagattatgctaacgtaaaaattaatgtgcttaagagtttaattctccatgaattataaaatcacaggcagataccatatagtttatatttatttaaagattctaagagattttctgtactcatactttactacccagaaatcaaccattttccagtaagttcaagttggtgagctatggtatagaattagaacttttcaggttcttgctgagagccttttatctgtgtacatttaaactagtatttttattatagaattaatatatccacatgctcaaaactcaaatcataaaaaagtaaaatgaaaactcagcctccctggctcctattttgtttcagtcccacaggcaacccctgatcacagttgctgtttttacatttttaaggtggctatgataaaacttaaaattaaattttacacgtattcccctttttcttgatttgtcaactttacagaatatctactcttgwttacctgctattgtaaatgagtaatttcttacatttaggttacctcctatctccctttctcctgctctgcttccggttatgtataattttcactttaatggttatcttcagattaattgttgcctttatagctttaaataatatacttaaacatctatttcttgatttacccaccctggccaatatttcttactccttgatatgaaaagggaaaaaataagaatactcttccttatattaacttttccttgattcatcgctatgtttttataaatccattgttacttttatctaaaaatctgttttattctactcttgatgaatatttgaattatccactttgggattattaataatgcttctatgagcatcttgcactgtctttggtgcacaaatgtacatgtgttgctaagtctgtacactgtgagttaaaggctgtgtgtataataccagttttcaaatagctatactaaattatactcacaccagcagtatgagacagtaggaattccatatcctcatcaataattggtactgtttgcctttttcattttagctattctgatgggtattttatggtataaaattaggtttaattttcgtttccttgaggattaaggaggttgagcacctcttcatatgtttgttggccatgtttattttatgaagacttatatagataggtctcttgcccataattgtattggatttcatccatctccctcctctctctcatcactgtgtagattttctttatatattctctgttacaacccttttatcaaaaacatgggttgtgggtatctgcttgtgtcttgctcttttcactctctatttggtaacctgggtgaatagttattttaagctagttcaatctatcaatcttttcctttatggatggtgcttttatattctgttaatatatctttccct

SEQ ID NO: 713217 - DNA, 1418 bp, Homo sapiens
ttaaatatgcttcagttatttgtgtttcaaatgcagattatagttcctgacaggccatgacagtatcaaagtgaatttagggcccaatccagatgtgtaacactttggcttattcaggttctagaagaaatgcacatgttatccagatgcccaggagattgacttctcaataaaccataacctgacttcatacttcctgagaagcaaaaggccatttgacttaagttctgtcagcctcttacatgagctggacaacctatggctgagccctctacttgtgtctcaattccttgtactgctgcatcccattgtctggtcagcaagcatcttgttgttcctgtcctgttctcctgcatctccaatttctcccttctcatgtatttttcactcagtctaaaggtatgctcagatttctctaccctgaaggatccttacttccatcttactgcttcttcaagcttccatcaccagtgacctacccgcgaccatctctgttggtctagctttgatgattcccaccacttatttttttttttttttttgaaattgactctctttggttttcatgtctttattttctgattattttcctatctttgatcacatcacatccatcactctctctaaatcttactcattgtcctcccatgtagccacagatgttcctcaaggatctgtcttagaccagtttgtcccctagactccctgccttggccagctcctggatccaagtatatcttccaatgaaagagacctaaatctctatggctccaatgtctctttttgatatcagcttcctagatgtcatcatgcacatttcaaacttcactatgtacctccctctccagtccagatcctgaccttttcaaatatcctcatctacttaaaattctaatttctagcaatgacatctccattatgcaacttgctctggctgaaaaacctcaggaatcactgtaattcttctcttttttccttcctacaaccagtcatttattaatgcatgcctattatgtttccacctttagacagatgcagtgcaccctttacttatcctttgttgtttggccttgtcttcagtgtatctttttgctgtcagattaatcttgccaaagtasagatgtgatgtcgtatctttcatttttgcattcaaggctttgtaataaatttttaaggtgattctgtgtctgattcatttttctatattcaaaacacccaaatctgtgtcttacacacagctggatcatttgtacaaaaaatacaactgaggcatttaaataaaaaacctgattgataagcacactgaagtatttttgtacctactagtcaatgtattttattcccagaatagaattcttataggtgaatgaaattttgatcagagaatctttccagaataattttcatatcctaaatga

SEQ ID NO: 713218 - DNA, 636 bp, Homo sapiens
tatggaagatccaaaatgacatagattagcacaagcaaagattcaaactgagaaacattaccagtttcacaaagggcagctcccaagagcaatccgtaaagaaagaactctaggctaggaatatggaaatctggtttttatttcaaccctgccacttatttactatgtgaacgtggccatgcatcttcttactctagctccctatggaatgagactgcttcttacttatctcagcctagctcagagggtctagcccatagtagatgctcagcacacttgtgttaagtgccagctacagtaggagttaggagtggactcctcatggctcataaagttgaaaaggcaaggctcagaggatggaaggtaaacccaataggagtaaaccatctcctttcaccttcaggstatcccataagcatgatttcttgtgtttattaccactcctcaaacacttatcatgttgggcactgtagatataaaggtgatttagacaaggactctgcccgaaggaactcatggtatccaggggaaagggaagcgcagccaattacaacacaatatgacaaatgtatgctgttgtggaagccttgacatgatgctatgggagcaccaactctgtatgtttctcaacctgca

SEQ ID NO: 713219 - DNA, 639 bp, Homo sapiens
ttttaagtatagaattctgtaagttcaaagaaacgcagagtaagaaatactacacaacagctaccaaggctgagaggtgagtttgaggcatgtacaggaggggttccaagcaggaacagatcctaaacacttgcagaaacctgttctttaagagcagagattacaaatgtgcaaaataycctagacatcacatgtctcacaccccaaggaggcattttacttagtatcaggcctttttttttctgttgtgatctttttttttaaagaagcccctatatttatcagctactttcttcatctttagaaacctccctacatttcactagtccaacatgactgatagtctttaaagacaagcttgatgtaaaaatatcttgaattcagactggattaagaaaatgtggcacatatacactgtggaatgtatgcagccataaaaaatgatgagttcatgtcctttgtagggacatggatgaagctggaaatcatcattctcagcaaactatcgcaaggacaaaaaaaccaaacatggcatgttctcactcatagatgggaattcaacaatgagaacacttggacacaggaaggggaacatcacacaccggagcctgttgtggggtggggagaggcgggagggat

SEQ ID NO: 713220 - DNA, 660 bp, Homo sapiens
tcttttcttcataaattacccagtctcagatagttctttatagcaatgcgagaacggactaataaacatggtgatagaaatgcgatagaaatatgatcttaggtgattttgatgttgcgtgaacatcacagagtatactcacacaaacctggatgttatagcctatgacacacctaggctgtatggtatggctcattgtttctagactataagcctgtacagcatgtaactatactggatactgtagacaaccataatacaatggtaagtgtgtgtatgtaggcaactataatacaatgstaagtatgtgtatatctaaacatatctaaacacagaaacatataatacagtacagtaaaaataaggtataatcttatgggaccaccattctatatttggtcccttgctgactaaaatgtagttttgcactgcaagactgtcctacactattttatataaggaatttcagcatcctcagggtatcgaaaccaatcccccttggatactgagggatgactaggaagcatctagaactagttgttataagagtttgcaggttgaactgctggttcaaggtggactgcctctgaacaagtgctcattagctcttccatttattcctgaaaatccactaagggactacatcaatataaattgctc

SEQ ID NO: 713221 - DNA, 660 bp, Homo sapiens
tcttttcttcataaattacccagtctcagatagttctttatagcaatgcgagaacggactaataaacatggtgatagaaatgcgatagaaatatgatcttaggtgattttgatgttgcgtgaacatcacagagtatactcacacaaacctggatgttatagcctatgacacacctaggctgtatggtatggctcattgtttctagactataagcctgtacagcatgtaactatactggatactgtagacaaccataatacaatggtaagtgtgtgtatgtaggcaactataatacaatgctaagtatgtgtatatctaaacatatctaaacacagaaacatataatacagtacagtaaaaataaggtataatcttatgggaccaccattctatatttggtcccttgctgactaaaatrtagttttgcactgcaagactgtcctacactattttatataaggaatttcagcatcctcagggtatcgaaaccaatcccccttggatactgagggatgactaggaagcatctagaactagttgttataagagtttgcaggttgaactgctggttcaaggtggactgcctctgaacaagtgctcattagctcttccatttattcctgaaaatccactaagggactacatcaatataaattgctc

SEQ ID NO: 713222 - DNA, 1822 bp, Homo sapiens
ggagggtggctgcaggcccagtgctcaggatcctcccagaagatgtccatgagatgggccacaggagcagccaccactgttaccatccagaagacagaaaatcaagaagtcaatgccccatgtccatcaaagacacagatacgcaccctctcaagcccagcaatgcataaattgtatgtatgttcaccacaaatctttcattggaatgttcacagtgacacccccaaatgatagccctcctcaactgattatcaactgttgaagggataaattgtgttatagtcatacaactatatagcaatgagaatagaccgtctatttacaactataagcaacaatatggataaatcttacaaacattgctgagtaaagtcagacatataatatgtacttcataattccatttgtgtggatatacagaaagtgtggaagatcacctaaggtgttagaagtcaggagagtgtcacccttgtgaagaagatcatgcctcgcagggacacaagaggggcttctggggagctgatgtttcctatcttgttctgggtgctggttacacagatgtgtttagtttatgaaaaatcatcattatatatacagaatgtatgtgctttcctcaggccttttatgttcttccattaaaaattgttttttgcagggcatggtggctcatgcctgtaatcccagcactttgggaggccaaggtgagtggatcacctgagctcagaggttcgaaaccatcccggccaacatggtgaaaccccatctctactaaaaatacaaaaatcagccaggtgcagtggcacatgcctataatctcagctacttgggaggctgaggcaggagaatcgcttgaacccgggaggcagaggttgcagtgagctgagatagcaccactgcactctaccctgggtgacagagcgagaccccatctcaaactaaataaatacacaaataattgttttgtttttgtttttgtaatctgaagtcttgctgtattgcccaggctggagtgcagtgggtattcacagatgtgtgatcattgcacactatagcttggaactcctggactcctgggctcagcctcccaagtagcttggattacaggtgtgtgccactacacccagccctgttcgtttgtttgtttttaagtcacaactactccttgactactgcctccaccacaagtctgagcacacaccacccagccgtagcccactccagcagactggacacctgtacaccgttatggacacccacaaagctaaagacccaacaagggctcccctgcccaggaaaggccctattgccagcttgcctgcaggagtgacgatggcagaaaaacagcctgcactttacttttaccttcctcatctgcaaggcagcttggcagaagccagtctactgaaaatcctcagaagtacaggtctgagcagcatcctgttgagcctaagaaatgtaccagcttctggaagggggccctgggcaagtgggctggaatagagtcgagtggccagtctgcacagcagccttacctccccattaactcacctccccrtcgactggctgatgttgctgatgtccacctcttcagttcagttctgtctggtgtgttaagaatggaaagacagccttctcaggggcatttgtttgtttgtttgtttgttttgtttttcgttttgagatggagtctcactcttttgcccaggctggagtgcagtggcggaatctcagctcactctaacctccgcctcctgggttcaagtgattctcctgcctcatcctcccgagtagctgggactacaggcacatggctaattttttg

SEQ ID NO: 713223 - DNA, 2058 bp, Homo sapiens
tcggctcactgcaacctccacctcccgagttcaagcgattctccttcctcagacttccgagtagctgggactacaggcacgtgccaccatgcccagctaattttttttttttttttttgkatttttagtagagacggggtttcaccatcttagccagggtggtctcgatctcctgacctcgcgatccgcctgcctcggcctcccaaagtgctgggattacaggcatgagccattgcacctggcctacttcatttatttttaactgctttatacatgtcattgtatgacagcatcacaatttatctgttctccatatgttggctatttgggttgttcccttttctgctgctattacaaacaatgctgcaacaaatacctatgcacatatgtttgagatctccaggccagtgcctgggaattcccaggggctaaaatgcagattccaatttagtaggactcggaggggcctgagattatgcgtttctttttcttttctttcttttcttttcttttttttttttttttttttgttgttgttgttgttgttgagatgtgtcaccagggctggagtgcagtggtgccatctccactcactaaaagctccacctcctgggttcaagcaattctcctgcctcagcttcccaagtagctgggattacaggcacccaccaccactccaggctaatttttgtatttttagtagagacggggtttcgccatgttggccaggctggtcttgaactcctgacctcaggtgatctgcccaccttggcttcccaaagtgctgggattacaggagtgagccaccatgcccggctagattctgcatttctaagaagaggatactgctggttccaaggccaccactggtgcagcatacgcaatgagaagtgaaatagttgagttgaagagtatgtgtgtcttcaactgcgtttccaagtagtttttccacattactcaccagggtggcactaatgactccctttctgtgtatgagagttctctttgcaccacatctttagcagcacttggtacgatcagaccacaatctcagatatctagactattcattacctccctacaagggaagaaaaagagaagcagacctcaagcaacattctccagacaactcacagatggctgtagatggaaacctgaagaacactctagtagtgaaatcatgtttgtgagatgggcaagttcagctgaaagcatgtgtcatggttcagaataatggtcagagtagtaaaagcggttgattcttccaggtgaatttcttaaaatataatatgcatcatgttaccttcctgctcaaaaagcttcccagagcctctttctgaatcaatttctcaggctagctttcaaagcgctctgccagatggcctctacctgctccgctctgcttgcctcctgccacccctccctggagcaccacctgagtgaaggttatctcagaacaattttgtaagatgggctgaactttggtgtttgtttttgtcttagcctcaggccaccctccatgctcccttggcctcttttgaagaagtgagtttgcaaagctctgagtcaaccgcagacccagctccttcccaagctgtgcagtgcacagaaggcacctatcacgttgttgtaaaattaaatgggcacaaagatgacataggggaagacccctgtgttttgccaaaaactctcttgagcacctcttggctgtccagaccccatcctgggctctcctgggtcctctcccttctcctttcctctccccaccccaaacctaccaaccttgtttttggagttcttttaggagattgattttggcttccatggtggtatccaccttcttgataaaggcatcatggttttctagaggttgattacggaccaaagcattctctttcctggacagaattctctcacagcacccacctgggtgcacaccttaagccatgagccatttcaaggtcagacattgggaagaataatcagagtgggatagcttttaggcaaattccacctgaccacacagaaactggagtcgcctgccaaaagccatccatc

SEQ ID NO: 713224 - DNA, 1009 bp, Homo sapiens
ttgaacagagctgctcagcagctttacctgctccctgtttccccctgagctttgcacagcacagagaactgctctagaaaggaaaaaataaagcatgggccaggcatggtggctcatgcctgtaatcctaacactgggaggccgaggtggaaggatcacttgagccaaggagtttgagaccagccagggcaacacggcaaaacctcatttctacaaaacatttaaaaaccttagctgggtgtggtggcacgcgcctatggtcccagcttcttgggaaggctgaggtgggaggttgaggctgcagtgagctatgatcacaccactgcactccagcctgggcaacagagagagaccctgtctcaaaaaaataacaaataaaaatwaaaaaattaaagtaagccaggcgtggtggctcaggcctgtaatcccagcactttaggaggccgaggcaggtggatcacctgaggtcaggagttcgagaacagcctgactaacgtggcgaaacctcgtctctactaaaaaatacaaaaattagctgggcgtggtggcaggcacctgtaatcccagctactcgggaggctgaggcagaagaatcacttgaacctgggaggtggaggttgcagtgggccgagattgtgccattgcactccagcctgggtgacaggaacgaaacttcatctcaaaaagaaattaaagcaggcatgtataaagagcatcaaagactcaataagagaaacagcagcaattcagtgtaagtcagaatcgtacaggatgctcaaacccctttaggaattacaaaatgaagcaatgagaaatcactttttggccaatgatattggcaaattaaaaacaaaatggaggccattgcactccagcctggtcaacagggcaagactccctctcaaaataaataaataaataaataaataaataaataaataaataaaaatggggccaggtgcagtggctcatgcctgtaatcccaccactttgggaggctgaggcgggc

SEQ ID NO: 713225 - DNA, 1009 bp, Homo sapiens
ttgaacagagctgctcagcagctttacctgctccctgtttccccctgagctttgcacagcacagagaactgctctagaaaggaaaaaataaagcatgggccaggcatggtggctcatgcctgtaatcctaacactgggaggccgaggtggaaggatcacttgagccaaggagtttgagaccagccagggcaacacggcaaaacctcatttctacaaaacatttaaaaaccttagctgggtgtggtggcacgcgcctatggtcccagcttcttgggaaggctgaggtgggaggttgaggctgcagtgagctatgatcacaccactgcactccagcctgggcaacagagagagaccctgtctcaaaaaaataacaaataaaaattaaaaaattaaagtaagccaggcgtggtggctcaggcctgtaatcccagcactttaggaggccgaggcaggtggatcacctgaggtcaggagttcgagaacagcctgactaacrtggcgaaacctcgtctctactaaaaaatacaaaaattagctgggcgtggtggcaggcacctgtaatcccagctactcgggaggctgaggcagaagaatcacttgaacctgggaggtggaggttgcagtgggccgagattgtgccattgcactccagcctgggtgacaggaacgaaacttcatctcaaaaagaaattaaagcaggcatgtataaagagcatcaaagactcaataagagaaacagcagcaattcagtgtaagtcagaatcgtacaggatgctcaaacccctttaggaattacaaaatgaagcaatgagaaatcactttttggccaatgatattggcaaattaaaaacaaaatggaggccattgcactccagcctggtcaacagggcaagactccctctcaaaataaataaataaataaataaataaataaataaataaataaaaatggggccaggtgcagtggctcatgcctgtaatcccaccactttgggaggctgaggcgggc

SEQ ID NO: 713226 - DNA, 1263 bp, Homo sapiens
ttgggaggccgaggtgggcagatgacttgagaccagcctggccaacatggcggaaccacagctttactaaaattatccgggcccggtagcgggcacctgtagtcccagctacttcagaggctgaggcacgagaattgcttgagccaagtgagaattccagtgagccaagaccgtgccactgcactccagcctggggcgatacagcgagacccctgtctcaaaaatataaaaaataaaattttaaaaatgtgtggacccctggggagttaataaaaaattacaaatgggcttagatagcaggaacagaaacaggggtagagggcaaatgttatgagaaatgaggtcaaccccaaatggctcactagcacccaagcaccctgttacatgcacgctgctcacagcaccccctggacccaagcatcctgtctgcaagcattcagcctaaagcagcacagccttataaaactcccatctagcccctacctctttgcaaatagcagacagccttccctccgctgtcttgcccattgctcccttgcaatgtatctcccccgtttctctaaataaatctgtctttctacactcattaatgtcttggtaaattcctttaccacccgcacgccagcctcagagagtcgctgactatgacaaaatgtaagttaccttaaaagcaatatacaattgacccttgaacaatgtgagggttagagcggccagccctcatgcaggtgaaaatgtacatataacttttgactcctccaaaacttaactaataatataataatagcctgtgtttgtgtgcataaattttgataaattttaactttttataatagacttgtgtatatcttatrgcagtaaatgatggactagtatctacgtatattttatgtatttatgacacatctaactttaaaaaaagttattcaatatatctaggctatgaagtttgtctgcctgtttttttaaattgttgcaaatctccaaaaaattttccaatgtatttattgaaaaaaaaaaactgtgtataagtagacctgcacagttcaaacttgtgttgttcaagggtcaactaatcttacttgttttgaaataaataaataaaaagctggcctggagcagtggctcacgcctgtaaccccagcactttgggaggccaaagtgggcagatcatgaggtcaggagttcgagaccagcctgggcaatatggtgaaaccccatccctattaaaaatacaaaaattagccaggcgtggtggcatgc

SEQ ID NO: 713227 - DNA, 1721 bp, Homo sapiens
atttaatttgtattctaagatcattttaaattatcataccacagcagcaacaaaatacaatttcctacaaataaactattggcacatcacaatttgtgctttcacagaatgtccactttatctcttagtactaggaaaagaaaacctttgcaaacttaataaaatgttacgaagtggggattatgtttccttcactttacaactgggggaaggaagggttcttcttgctttgtgtgattggtgtggatttacatggtgacacttcactgctgtgactccaggggaagggaggaagccgtgccaagtgcaaacccagaaaaagtcctgaagccatcctctgtctggcccaaaccagcagctgggaggcaagagagccaacctactgaggccaacaagagtgggtttatacctaagcaaaatacattttttacgctttccagaaagggcaggccagcttaaaatcctttatgtagggtcgggcatggtgactcacacctgtaatcccagcactttgggaggccaaggtggacggatcacgaggtcaggagaccatcctggctaacacaatgaaaccccatctctactaaaaatgcaaaacattagccgggcgtggtggtgggcgcctgtagtcccagctattcgggaggctgaggcaggagaatcacttgaacccgggaggtggaggttgcagtgagccgagatcacaccactgcattccagtctgggtgacagaacgagactccgtcgcaaaaaacaaccaaacaaacaaacaaaaatcctttatataggatttttattgctatgcatcataggccctttttggatctcaggacctagtcatttgtgaatctgaatttctcccccatgccatcagccctgacctacaagctacaatcacttgttcccaggttttctaaggccttccgagggctttcttttgcatgtaagcccctctccccacagcacacctttttcaagatttgtccaccatgagtattgtccacggattgaaatcatcccatttctttttactggcattggcaattcttgatttgttatttatttaggcaggtatgttatgtgttttaattttttttttttttgaagtggggagagatgaratgccagggagggtgagttgagaaaggtaaaggaaacatttttcaatggttcagctctcccaatttgggtaggaaaactgatagagagggaaagaagaaacagattagaatgtggggacacagggctcggctgctgagaactatatgctgtgcagaaactgctaatgacagcttggctcccttctttggatgtgcccacagcactgggagaaaccttactcaaactccaaactgatgcccggctttcagaacaaaacaaacagcatcaactacactcaatgtttgtaggactcttcctactctcacagagttttgataaactgccaagagcagaagtccctccagtgcctattaaagtgtgtgtgaggggcttatgcccctaatgggtctatcaacaccatgtcaccttctcaagagtgacctcagtgatggcccaactgctaccttccatagaagtttccttttgggagagagctcaaaataactgagaaccacattgcataataaaaaaatagacaagcaattaaaaaaatagcctccttgccacccccgtattatgatattcaggtgatatttttaatttttttgttgtgactggaa

SEQ ID NO: 713228 - DNA, 577 bp, Homo sapiens
aatacattccttatctttaatcttttaaacaggagtatatttcagtatatggacttgtcaaaatttatttgttcaatatcaatggacactttggtgggtgctgattttttatattgcaaacaacattgcaaaggatctctctttctrtatatactgctttagaaccttaagactttggaatcagagagaaccaagtgcagatcctgggtcagacacttcctagctgttttcaagttggcaagttacttataactgaatctcagcttcttcatgtctgaaacccattaacaatacctatctcaaagggttatataaattaagtgagataatctttatacataaaggacctagtgtggcacaaaacaagccctcaataggtgatagctaccaagtctgtagaaagctacagttctaggaaaacaaagagtaatttttcatcctaatagtaatggagctatttcaggattgtggtatgacgaactatctaatgcataaggagatcatagaaatggccttcccgcaaaagcataagccctgtctgcacatgtctttgtagtccatatccttgcatggatat

SEQ ID NO: 713229 - DNA, 663 bp, Homo sapiens
taatagccccaaactagaaacaatccaaatgtccatctgcaagtaaatagatagaataaacaaattgtggcatagccatacaatggaatattattaaaccattaaaaggaatgaagtactgagacatactacaacatggttgactctcaaaataattatgctgagtgaaaaaagtcagacaagaatgggtacctattgtatgatttcatttatataacatgctagaaaatacaaatgaattgacagtgatagaagcaaatcagcagatgccttgggataggcagaacggctgtagagggttgagagggagggaatacaaaggarcacaaggaagctgtcagggatgatggcatattcattatcttcatcatgatgatggtttcctgggtgtgaacacatgtgtaaaatgtaacaaattgtagactctaaatatgtgtagcttattgtatgttaattaggcctcaataaagccttacaattttatcagctcccaacatgccctttgtcctgtgaattgcccctgacatagaggaggggccacccgctgccacatttgtactacatgaccctgccttcctggccagagcagatccatctaatggcaggtcactaaagatgagaaacaaagatatcaacgttccagagaaaaggtccagctgggtg

SEQ ID NO: 713230 - DNA, 1314 bp, Homo sapiens
ggtaaggaaatggaacatgagaggtgatgtaatttgccaaagggtcacatggttattaagtgtcaggactgagatttaaaccccaatttacctagctattttttttaacttttattttaggttcgggggtacatgtgcaggtttgttatataggtaaactcaaatggggtgggggttgttgtacagattatttcaccaaccaggtactaagcatagtacccaatatttatttttctgatcgtctccctccacccattccctccctcaggtaggtctcagtgtctgttgctcccctctgtgtgtccatttgttctcattattagtggtatttagttttctgtacctgagttattttgctaaggataatgtccttaatcacagcataataggaagagaagaacacctttcatttcaggaaggtttggttgaggactgcactccattttcctcatttctttcactcaagtctcaggtgccagcccaagtgctcaaagccctgacagcctccaacatctctgccctcatggaggggaacaaggcaaaggaggcttctggatactgtggggaggatgaaacaggaaccagggacaccccaattggagaacttcttgatgtggctcccttcacacatgtccacctcccatctccccagggctctatcccagccaccactttctccagaccccaaggacggaatgaaagcaaactattttgatacacagagaaagccttttgggtgaatttcagctggaaaataaggaattagaaaattagatgaatatttaaaccaacaggggtctgaggccaaggaagacagacccccagaagactgaggaatcttcttaaagaatcttgaggactttaaatgatataataaaattcaacactgatgaaagagaatgagctgaaagtctttgcaaggtccttccagctctctatgtttcaaggacagttggctttaataagaagttgcactaaaaatgttaaaattgagtccttgaatgaagcatgctttcaagagcaagagtgcatactgacactcccaggaccagccacgctgacctccgtaatgtgctacttatctgaggagtgacctttcagtgcattctctgattgcacagaagagaaaaggaaaaggaaaatcttagraactttcttctgagctggactcttccttagtacaatgttgctgtattagtctgttctcaaactgctacaaagaaatacctgaggttgagtaatttattaaaaaaaaaaaaaaaaaaaaaggtttaattggttcacagttccacaggctctacaggaagcatgatg

SEQ ID NO: 713231 - DNA, 1403 bp, Homo sapiens
cctctgctcacttcctcccttcttcctgggctaccctatcccctcccttcttttggacccaatcctcaaggtccagctcaagtcccccctcttcctaaagacttggagtgttgttaatgctccatggatgtgtttgtgactgatatagtttgagtgcgtgtccctgcccaaatctcatgttgaaatgcaattcccagtgttggaggtggggcctggtgggaggtgattggatcatgggggaggtttcttatgaatgatttagcaccatcctcttggtgctatcctcatgatggtaacttctcacaagatctggtcatttaaaagcgtgtggacctcctgcctcactctcctgctcctgcttttgccatatgatgtgcctgctcgccctttgccttcttccatgattgtaagtttcttgaggcctcctcagaagctgagcagatgccagcaccatactttcttgtcagcctgcagaaccatgatccaattaaacctcttttctttatacattacccagccttgggtatttatttatagcaatgtgagaatgggctaaaaaagtacctaatcatctcaattagatatactaggttgcagatttcttgagaacaggtggcatgctttatacatccttgcatacccaggagcatttggctcaggaccttgaactaagttcttaatacagtttcattaattcacttccaatcttggggtaggagagttatatttcttaagagatggaaaaagtatttacaatatatagtaaaggattattaatgttaatatagtaaaataaggctttacaaatcaataataaaggacaagaaatccaattgggaagtaggccaagaaaattaacatgaaattcactgaacaacccatacttatcaaaagatcaactttagcagttatcaaagagatgcaaattaaaacaattttattaaactgttgcttatcaaattgggtaagattgaaaaatagattctgtagtgttagtaagacaatggtgaaacagctactcatatgatacaaggtgggacagcacatgggtacaactttcctgatgataaatttggcaatttttattaagtctttaaaatgttcaaacttttaamatctgtaattctgcttctaggcttttatcctaagaaagttatcaaagcttcacacatagattacatatgaggacgcatatcttagtatggtggtgaattaactggctaattctcacttattcagtgtctagaaggcagcccataaagagaagtgagatttatacagctccttctcacttgcctgacttacaggttgataattgatttgatgcctgctggaatgtggtaagtagatttctttccattggtaggggatgctctaccttacccgatggacctccacctgtg

SEQ ID NO: 713232 - DNA, 971 bp, Homo sapiens
cgccctcgcgggaagtcaccttttggtgcttcggagaaaatcgaacagccaggccccgcactggggacggtgttctcaccccacaaactcattcccggactgagtccagaaggggtcactgagagcccctgtggagatccgggccccgagctccgctctgccaagaagtcgcccctgggagagtcagagatgacgccagggacacaagggttaaggagacgccaaggtgactcgcgccaatccctgcaggggcacgacgggcgcggacgagggccgaaatattaagaaaragccagtcagtctgagagcgccccgctcccgccaagggcggagacgctacccagggcgggcagtgggaccgaggcggcgccgacaacaggagcggagccgcaccagccgcgcaggacctcatagccgagggcagtgaacccgccacggggcccgggcgcccccccagttcgaccctaccattggcctgtcgcggccgccgtgttggcccgcgtcgccccgagctgcggcgcacacggtgctcccgggcagccgcggggggcgcccatcgtcgccccagcgccgcgcttcactttctctttcctccctgcggcgcgtgggctctcgcctcctcagccaagcccggcaccgcgggtgcatgactgaagctgggcggccgctcccggcgcactcacctcgaagggcgcccacccccgcctcccagagcgcccaaagcggataagcccgtcacacctccgccgggacggccgacgtcgcggccagccagcccgtcgccccatccgccttatcgggacttagtctagacaaaccacctcaggtccgctgcagggcgcgaaaccgccggcctggcgccgaacaaagagcagcgcggccggcgggcgctcgccgccacttcccgcggccggcccgcgccccaacacgcgccccccagcacttccgattcccaacgcgcttgagtttca

SEQ ID NO: 713233 - DNA, 584 bp, Homo sapiens
acaaatgtcagttttcctttactgggattttccacatgatctgtgtattggtgaggagcctcttaattgaaagtgacagaaacccagcatgtagtagcttaggcacaaaccggattaaygggcgaggtaaggaagggctaagaggaactggctatgaggatgctgaataggaactccctgctgccagtactctgtccccatcacttgtcctccacctcccatggaggttctttctctccgccaggcttctgctccttgcagggaccgtggctcctggagactccaggcccacaggctgctccttgataaaccagagaggaaaagtctcggtttcccctgttggatctgatcaatcctagggggaaggaccctggttggcccagcctggatcctgtcagagcaggctgctcccagaaaggggaaggaggggcccaaagcagcctgtcccttgtggctcccctaagtcccccactgcaagggacactgtcctaacccccatccctcctatatctgaaggttccccagcagataaaagttgcctttcccacaaaaataggccaggactccagatggggtccgatgtt

SEQ ID NO: 713234 - DNA, 902 bp, Homo sapiens
attcacttttagtaaacttttatctaaaaatagatatttaaaattatattaaaatcatcctgactagaaataagtgtttattaacaatggattgtagtataaattttaccctaactggctaatactcttttattagtgcttactgggggtctatgatgtagcagacacaggaggtgacacataggttccagttccatgtcttcatctgttacttataagaagtaaattctatgataagttcactccacatttgctggctgatctgagccttaaagagtgtttatagcacacagaaatgttgtatttcatttttagacttcattgctggatcttacgtgaacatttygtctcacacatacaaacagctacatgtggtttttggttcacctttctcaatttctgttaggtcagttcctctttggttcctagtctgctaggtgggaaaaatgattccacagataatttcctatacccacatcaataaaacagtacaaaaacacccaagccaaaaatccaaaaccaatcgactaaacaatatctcagtcttccagcaactcacagtttttttatatcaatgaaatgatattttacttttattaaaatagtgaaagttttatgttcataaatcagaaagaaaagtacagctgtcgtcaccctgcaaacactaactttgtaagagatccaaccaagaacgctcattgacgcaaccttcgaaccaaatagtactttttgcttactcttaaataatttaattgttttgttgtgtagtatagaatatcttattgattgataagatattctatcttatcaatatagttgagaatatctcttctcaactatgatgtaagctctttgaagacaaaactcatcacagaagaaattcaacaaatactggcagactg

SEQ ID NO: 713235 - DNA, 1689 bp, Homo sapiens
tgcataatttacaagtaaattatatctcattagaaaaagtaaagcatataaaggctatgtgctaatttcagtacaatgtacttacttacaattacacctcttttgaagattccataaattatattactcaccagtaagatattatttactttttttttccaaacagaaatatcctactgatgggacatggtgggagaagacagtactaagcaaatgtcgaaatagcatctaagataagttaatacctgaaccatatgaagttcactgcatctgatggggacaatcgtaccttaaaagaaaagacacaaaatactctttcctatagctggtataaaatgtagaaatgatacaatctgaaatattataatttctaaaatattaaaaattcatgtaacttttagttttcactacgccaagcaaggtcataaatacaacagaatacatgaggccacaatgacttcattttatcgagttaacccaagaaagaattaggagagaagaaatagaaaactcatcaattattgaaacttttagctttgagactacatgttgtttaccctccatataatcagtcttgtgtataaaactaatatcaagcaataagtggtcagactggcagctatacagagtacattgtataccatgtcattcctttattataacaatttaatggccattatatttatagcaacttgcagcaaatctacacagattttagatccacaagagagtcttccttcttccccaaagcttcccacagcctctcatccaggaagtcccaaaaccagggcttattctaccaaagggaccaaacaagaaacaaggcccttcaggatcaggaatcaaggccaatataacatcttgaattggccagaaagatctactcttcacatctattctaggactcttttctatcaactgttctcttttatttgcatgttgaatctatttcatggacattctctcacttgaaaacctatctatgctttccaaataattctcatttaatactttatttccctaaatctgcaattgttggggggcagagctagggaaccaattctgatgaaaaatcatcacctcagatacagttaccaataaaattctgggtaagcgactttccaaatgctcctttatatatatatgcatgtatacattatataatttgtgtttttcatacacatcatactgtacctgttgggtcataacttgttcaatttcagctaagttgttagcatctttccataacaatgaaccaaaccaatgtcaccgtcacatttcttcaaagtgtcagttaaacctgttgcctctacttatcaccatcctctgctgaattatctctaaaactgcttttatgaagaccacaaccagttttctcatccctcattcaagatctcattctcaatttctgatcctcacaattccaatagcctaggttgctgaaggttttcttcctcctctagcttctatgataatatcttctcctacagatttgattctgaccctcacctttgtcatttccatgaatcttctcataattcaggcctttatcacttctcatttgratagttatgaagtcccaaccctagacctacctctccctacttcactctacattctattgctcaattttcctgcttttatactcactatggtattttgttacaccttaatattgccagatcatta

SEQ ID NO: 713236 - DNA, 1587 bp, Homo sapiens
caggtagatgccattattacgaggattaaatatgtaacatgcttagaatcatgcctgacaattacacttatacttctattattgataggatttgggttttattctcttaatacccaacttggttcagcaaaggacttaaagaaactggaatgtgggcttggcccattttacatcatcttttgatggaatctcagctctatccaaagaaccctgagttaaaatacctcaaggtgcttttctgagtgtgtgcagcacttggagcagtagttatacagaatattaataggtgttaaagagttttgtggtcaggtaagcttggcagatattgggttaaattaaactaggtccctcatttcaggacttctcagaccatctgatttactatgtgcaatgagaatatcatactaaagtcacagtattcaaggttttgcaaatcaatttggccaaagcttttccagggttttgttattgtggttgttgttttggagacagggtctcacctatcatccaggctggagtgcagttgcccaatcatggctcactgcagcctcaaattcctgggttcaagtgatcctctcacttcaacctcctgtgtagctgaaactacaggtgtatgccacsacactgtttgtttatttatttatttccttattcatttatttttggtaaagatggaatctcgctatgtagacatagctggccttgaacttgtggtctcatgcaatcctcccacctcagcctcccaattagctcaactgcaggtgcgtgccgccatggctactttttgtttcgttgttttgttttgttttttggtagagatgagatttatctgttgcccaggctggtctgggactcctgggctcaagagatccacccaccttggcttccagagtgctgagattactggcatgaacccccatgcctggcctaaggaactcttttttttttctcagaccatctttagagacgagttttccacagataactttgagaatgctgtcttcctagataagttgactcttataaaacttaaactcaccatgccaggtcccagcactgtgaacatagtaacagaatctcagtaaatgttatttgcatagccattgaggaacttactagaatgtagatgggtagaataattagaaacgaagacaatgccattttcacaaattatccctgattttttattacaatgtattttttgttccagaaattgtatcagaaagaagaactgtaaaaacaaaaagataaaaataaaagtcagatgtagttgttaaggccaagtagtttgctgcttacaaagcatgcatttttcctttctgccacgagatggctctttgtatcgtgaatcaatgaaagttctactagaactgatcattttccgagacctgctgggaaagggacaaatgagtggactgtcaaaacgaaaatgaactataggtacttttaaggacatatgagtgtcaataaaagagatctgccttaacgaagttctacaaattcagcagaggatagattactgtggattaaaataaacaatcagggaaagctttgtagagagggtgacgtgagctggacttaaaagat

SEQ ID NO: 713237 - DNA, 1587 bp, Homo sapiens
caggtagatgccattattacgaggattaaatatgtaacatgcttagaatcatgcctgacaattacacttatacttctattattgataggatttgggttttattctcttaatacccaacttggttcagcaaaggacttaaagaaactggaatgtgggcttggcccattttacatcatcttttgatggaatctcagctctatccaaagaaccctgagttaaaatacctcaaggtgcttttctgagtgtgtgcagcacttggagcagtagttatacagaatattaataggtgttaaagagttttgtggtcaggtaagcttggcagatattgggttaaattaaactaggtccctcatttcaggacttctcagaccatctgatttactatgtgcaatgagaatatcatactaaagtcacagtattcaaggttttgcaaatcaatttggccaaagcttttccagggttttgttattgtggttgttgttttggagacagggtctcacctatcatccaggctggagtgcagttgcccaatcatggctcactgcagcctcaaattcctgggttcaagtgatcctctcacttcaacctcctgtgtagctgaaactacaggtgtatgccaccacactgtttgtttatttatttatttccttattcatttatttttggtaaagatggaatctcgctatgtagacatagctggccttgaacttgtggtctcatgcaatcctcccacctcagcctcccaattagctcaactgcaggtgcgtgccgccatggctactttttgtttcgttgttttgttttgttttttggtagagatgagatttatctgttgcccaggctggtctgggactcctgggctcaagmgatccacccaccttggcttccagagtgctgagattactggcatgaacccccatgcctggcctaaggaactcttttttttttctcagaccatctttagagacgagttttccacagataactttgagaatgctgtcttcctagataagttgactcttataaaacttaaactcaccatgccaggtcccagcactgtgaacatagtaacagaatctcagtaaatgttatttgcatagccattgaggaacttactagaatgtagatgggtagaataattagaaacgaagacaatgccattttcacaaattatccctgattttttattacaatgtattttttgttccagaaattgtatcagaaagaagaactgtaaaaacaaaaagataaaaataaaagtcagatgtagttgttaaggccaagtagtttgctgcttacaaagcatgcatttttcctttctgccacgagatggctctttgtatcgtgaatcaatgaaagttctactagaactgatcattttccgagacctgctgggaaagggacaaatgagtggactgtcaaaacgaaaatgaactataggtacttttaaggacatatgagtgtcaataaaagagatctgccttaacgaagttctacaaattcagcagaggatagattactgtggattaaaataaacaatcagggaaagctttgtagagagggtgacgtgagctggacttaaaagat

SEQ ID NO: 713238 - DNA, 1587 bp, Homo sapiens
caggtagatgccattattacgaggattaaatatgtaacatgcttagaatcatgcctgacaattacacttatacttctattattgataggatttgggttttattctcttaatacccaacttggttcagcaaaggacttaaagaaactggaatgtgggcttggcccattttacatcatcttttgatggaatctcagctctatccaaagaaccctgagttaaaatacctcaaggtgcttttctgagtgtgtgcagcacttggagcagtagttatacagaatattaataggtgttaaagagttttgtggtcaggtaagcttggcagatattgggttaaattaaactaggtccctcatttcaggacttctcagaccatctgatttactatgtgcaatgagaatatcatactaaagtcacagtattcaaggttttgcaaatcaatttggccaaagcttttccagggttttgttattgtggttgttgttttggagacagggtctcacctatcatccaggctggagtgcagttgcccaatcatggctcactgcagcctcaaattcctgggttcaagtgatcctctcacttcaacctcctgtgtagctgaaactacaggtgtatgccaccacactgtttgtttatttatttatttccttattcatttatttttggtaaagatggaatctcgctatgtagacatagctggccttgaacttgtggtctcatgcaatcctcccacctcagcctcccaattagctcaactgcaggtgcgtgccgccatggctactttttgtttcgttgttttgttttgttttttggtagagatgagatttatctgttgcccaggctggtctgggactcctgggctcaagagatccacccaccttggcttccagagtgctgagattactggcatgaaccmccatgcctggcctaaggaactcttttttttttctcagaccatctttagagacgagttttccacagataactttgagaatgctgtcttcctagataagttgactcttataaaacttaaactcaccatgccaggtcccagcactgtgaacatagtaacagaatctcagtaaatgttatttgcatagccattgaggaacttactagaatgtagatgggtagaataattagaaacgaagacaatgccattttcacaaattatccctgattttttattacaatgtattttttgttccagaaattgtatcagaaagaagaactgtaaaaacaaaaagataaaaataaaagtcagatgtagttgttaaggccaagtagtttgctgcttacaaagcatgcatttttcctttctgccacgagatggctctttgtatcgtgaatcaatgaaagttctactagaactgatcattttccgagacctgctgggaaagggacaaatgagtggactgtcaaaacgaaaatgaactataggtacttttaaggacatatgagtgtcaataaaagagatctgccttaacgaagttctacaaattcagcagaggatagattactgtggattaaaataaacaatcagggaaagctttgtagagagggtgacgtgagctggacttaaaagat

SEQ ID NO: 713239 - DNA, 654 bp, Homo sapiens
gattggatcttggcggtggttttcccccttgctgttcttgtgacagtgagtgagttctcatgagatctgatggtttaaaagtgtgtggcacttccccattcactcactgtctctcctgccgtcacgtgaagatgtgcttgcttcccctttgcccttccaccgtaattgtgagtttcctgaggcytcaccagccatgcctcctgtacagcctgtggaactgtgagtcaattcaacctcttttcttcataaatcatgcattctcaggtagtttttttttatagcagtgtaagaacagactaatataccacaggagcattttatttaagaaacaggttacaaaacattccctaccatcaccaccacctccaagaataaatgtcagtgtatgaaaaaagctcagaactgataacttctgctttgatttcctatttattctaatatatgcattctaatattctaatataatttgcaaaaagtactctatattcaaccacatttagactttcataatttagtgattctgggaatgcagcttatgcatagtttgttctgacctaaaatatctcattatctgaggtgagaaggggacaaagtagaggaacacatttgagttctaggacaaaaaatttgcaccccagattgaagaatggagca

SEQ ID NO: 713240 - DNA, 1642 bp, Homo sapiens
tgatctctcctcatagtttgtgtgtaggaaaagaagtgataaaactgacctaattgaacttcaccttttgctcagtgacagataaagctttccttgatagcatacattggctcagtgccagtagtaccataaatgttgtttcttaagagaatgtcaagtttcagtaaatttactttgaacttcaaagtagtgtgcaataactttgataaataagccgatcttatgaaatttgaaagttacgtttataattatattataaaataaaatgttgaattttctgttttaacttccctgatgtcccatattgattttattacattcacagatttttcttttcaaaagtaagcttcacttggtttgacatcagcagcttatttcttgcaatctatttaattgagacttttctgctgtttatcctaaaatgcagataaatggctttcagcacactgtttatagtataatagctcctgaagtgagtcagcattatcagctagagtctccatgtcataactaatggtctctctgcttatactttcctgctagtgaggagccactgaactccacagagacaggagcctggcatagttgggggtgggtagattattttgatggtgcctataggacaaggcttttttcctcctttattggtgtgaaatgagaagagaaatatgtccttatcatgattttagcatgctcaaaagtgccatgttctaagactggggcaaagaacttttaggatataatgatcctagagggatttgttttattccagattatctgctatgtcataatagcacaattttaatacttttctcttgaggctgtttgacttgctgctagagaatgggagccactaggaaatatttgtattactaccaaatattatgggcttaataataaaagtgagtattttttgtttcccaagaaagaaagaaactaaaaaacttcaattgttaactaatcatttatcataaatcgggcctattcattttgaaaggycattaagttttttctttagaggaaagaagaaaaaaaaaagctatgagactcctagtgaagatcaacagacttgaccatgagagttaaaactgacaagttttgccaccctgtaattctttgctgagtttttacatagaagatagaggattctgtaggtaaatacagggaatagttttcataactgaagtaccaatgaatacaatttggtaaaatgttttgtttgatctcatttgttcttttagaatgtggaaaattttgactgaagtggccattaagatagccatggtcctttgcccccatattagtattatgattgtttgggatcactttggtcatttaaatacaatgtatttatttcttaactcactctgataatgaaatttaagataatatatccaacttcttaaaaatatttcaagggtggaaaaacataacacacacaaatacatctaccttatgttggtgtggcttaaaatacagaaatatctgaagatagggtttgtgaagggtaattatttctcacatagcatcccagatacaggctttttgttgttctttttttggcggtggtttgtttattgggagagcccatattgacagttatttaaaagaggaggaaggaaacattttgaccttagggtag

SEQ ID NO: 713241 - DNA, 1642 bp, Homo sapiens
tgatctctcctcatagtttgtgtgtaggaaaagaagtgataaaactgacctaattgaacttcaccttttgctcagtgacagataaagctttccttgatagcatacattggctcagtgccagtagtaccataaatgttgtttcttaagagaatgtcaagtttcagtaaatttactttgaacttcaaagtagtgtgcaataactttgataaataagccgatcttatgaaatttgaaagttacgtttataattatattataaaataaaatgttgaattttctgttttaacttccctgatgtcccatattgattttattacattcacagatttttcttttcaaaagtaagcttcacttggtttgacatcagcagcttatttcttgcaatctatttaattgagacttttctgctgtttatcctaaaatgcagataaatggctttcagcacactgtttatagtataatagctcctgaagtgagtcagcattatcagctagagtctccatgtcataactaatggtctctctgcttatactttcctgctagtgaggagccactgaactccacagagacaggagcctggcatagttgggggtgggtagattattttgatggtgcctataggacaaggcttttttcctcctttattggtgtgaaatgagaagagaaatatgtccttatcatgattttagcatgctcaaaagtgccatgttctaagactggggcaaagaacttttaggatataatgatcctagagggatttgttttattccagattatctgctatgtcataatagcacaattttaatacttttctcttgaggctgtttgacttgctgctagagaatgggagccactaggaaatatttgtattactaccaaatattatgggcttaataataaaagtgagtattttttgtttcccaagaaagaaagaaactaaaaaacttcaattgttaactaatcatttatcataaatcgggcctattcattttgaaaggccattaagttttttctttagaggaaagaagaaaaaaaaaagctatgagactcctagtgaagatcaacagacttgaccatgagagttaaaactgacaagttttgccaccctgtaattctttgctgagtttttacatagaagatagagrattctgtaggtaaatacagggaatagttttcataactgaagtaccaatgaatacaatttggtaaaatgttttgtttgatctcatttgttcttttagaatgtggaaaattttgactgaagtggccattaagatagccatggtcctttgcccccatattagtattatgattgtttgggatcactttggtcatttaaatacaatgtatttatttcttaactcactctgataatgaaatttaagataatatatccaacttcttaaaaatatttcaagggtggaaaaacataacacacacaaatacatctaccttatgttggtgtggcttaaaatacagaaatatctgaagatagggtttgtgaagggtaattatttctcacatagcatcccagatacaggctttttgttgttctttttttggcggtggtttgtttattgggagagcccatattgacagttatttaaaagaggaggaaggaaacattttgaccttagggtag

SEQ ID NO: 713242 - DNA, 615 bp, Homo sapiens
tgttaactttaaagttatcttaaattgcactattctgttcataaataattttaggggaagttagyagcatctgaaaatcaaactaatgactaggtagcaagtctcaaaaggcaatctagaagacaaattatttctaaattacttatatttacttatatccatgtcatttccctaaaagaaaactctattcttcattaagaaagttgtcttggcaaatgtaaagacttcttgagatttggttaaaaaaaaaatagattcctaaatttttttttctccccaaaggaaattttatatccaatgtataagcatatctccttaatagtaagttactttcaggtttcatttaaacaaacaaaaatagaaaactttgatgcaacataatttacttgactttagcagttctagcctaatttgaaataaaattccacagaagaatttcattcattgtctcctccatctagtaaaagttttgccaaatagattttaaagacaagtggcatattattttcaaatatatccatcacactggtcttaaaacaaaaagcaactgtttgccatcctagtatacatcctttaaaaggtttaaaataacagtgataattcataattaagata

SEQ ID NO: 713243 - DNA, 621 bp, Homo sapiens
ttcaaagaatgatctcataggcatctttggcaaaaagctggcatatatcctgtgtactccagtgaggcttacattagccaggcattccaccccctaggaagtaaatttcgtggattgatttacagtgcttttattatcaaatcacttttttgggagaagagaaggcagtctttgtgggaggctgttagccatccttgcataaatcatttctcrttaatttagattgctacataatgtctttctggaatttttttggatgttctacaaagtcatatttctatcctcatgtatcaaacaaagccattggcatatgatagaatagatttatatttaaatctttttgtggatttttggtaactttttcttgatcgatagtattcctacagtaaaatttcacaaatcataaacttttcactcattgaaaatttacagatgtaaccatcatgcatattgagttaaatttttccagcatccacaaagcagacactgtaccatataccctaccaaaggtaattactattttgagttctatcaacctagtgttgtttggccttttcatgaaatgtatatgtatttttatatatacacacacatacacattcacacacatatatgtatatg

SEQ ID NO: 713244 - DNA, 659 bp, Homo sapiens
cgcaccactgccatccagcctgggcgagagaacaagactctgtctcaaaaaaaaaaaaaaggcagggtctccctctgttacccagactggagtgyggtggcacagtcatagctcactgcacccttgacctcccaggctcaagtgattctcctgcctcagcagctgggactatcagcatgcatcaccatgcctggctaattttttaattttttgtagtgatggtcttgctatgttgcccaggctggtcttgaactcctggcctcaagtgatcctcctaccagggcctccttgcaaagagctgagaggacaggcatgagccaccatgcccggccccccgaagctgcctgttccttgagcacgatgtgtagcaaggggagctggagtgacagcagcaccgtggggaagggacaggattgccaccctgagctgtgtgacattaggccagacccctcttctccaagtgaggtcaaccacatgggtgatttcgggagcctgtgccccagtcagcctggattttaccttcataggtagataggaaactatgagggttcagagatgctgggagaaccttttccctgggagagctttccaaacaggaaacaaacagagccaccctgggccccactgagggaggatcctaccagcactgtcatgctcca

SEQ ID NO: 713245 - DNA, 659 bp, Homo sapiens
cgcaccactgccatccagcctgggcgagagaacaagactctgtctcaaaaaaaaaaaaaaggcagggtctccctctgttacccagactggagtgtggtggcacagtcatagctcactgcacccttgacctcccaggctcaagtgattctcctgcctcagcagctgggactaycagcatgcatcaccatgcctggctaattttttaattttttgtagtgatggtcttgctatgttgcccaggctggtcttgaactcctggcctcaagtgatcctcctaccagggcctccttgcaaagagctgagaggacaggcatgagccaccatgcccggccccccgaagctgcctgttccttgagcacgatgtgtagcaaggggagctggagtgacagcagcaccgtggggaagggacaggattgccaccctgagctgtgtgacattaggccagacccctcttctccaagtgaggtcaaccacatgggtgatttcgggagcctgtgccccagtcagcctggattttaccttcataggtagataggaaactatgagggttcagagatgctgggagaaccttttccctgggagagctttccaaacaggaaacaaacagagccaccctgggccccactgagggaggatcctaccagcactgtcatgctcca

SEQ ID NO: 713246 - DNA, 939 bp, Homo sapiens
ggaattgcattgaatctgtagatggcactgggcagtatggtcattttcgtgatattgattcttccaatccatgagcatgggatgtatttccatttgtgttatctacgatttcgttcagcagtattttgtagttctccttgtagagatctttcatcttcttgattaagtatattcctagggttgtttttgttttgttttgttttgttgaagcaattataaaaaagattgagttcttgatgtgattctcagcctggccgttgataagtagcagtgctactgatttgtatacattgattttgtaacctaagactttactgaatttatttatcaaatctagaagtcttttggaggagtctttagggttttttacgcatacaatcatatcatcagcaaacagagatagtttgacttcttttccaatttggatgtcctttccttctttctttctttctcttgcctgattactctggcaaggattccttaatttgcatttatctgatctgaacatatttctctgtgcttattgcaaaataggatttttatctctgtcttgcttaatagggtactgatcctccaaaagcttacgtgccttcccaaaaatcatgtagtaaaaatagaataattgttgaaatgcaggctctggagcccaaatcctggcttttctacytattagctgtgatgctcaggcctcggttacctcatctgtaaaatgggagcaaccataactgcctaaaaatgtgttgtgagattcagaaataaaatacgtcaaattaccaccactacctgacccttaagagaatcactctataaatgacagcatgattatcatcttcagacaagaaagggtgagggctgcatgatgtgaggtggattctcctgaccattgctgcctgtgcatgttggtggactggcttctccctttgctgaatgtttttccca

SEQ ID NO: 713247 - DNA, 1673 bp, Homo sapiens
atttttgttaaaaatggtgtacaattaactttcttttttaataagtaggagtacactctaaaataatgatgaaaagcatagtataataaatacataaaccagtagcacagtcatttattaaatattatttactgtacataattgtatgtgctgtgcttttacctgactggcagcatggtaggtttgtttacaccagcatcgtcacaaacatgtgtgtcccgtgctgcgctatgataccacatcagtaggtgacaaggatttttcacctctgttagactcttacrgaaccactgtcgttaatgcggtccatcatggactgaaacgtcgttatgcggcccatgactgtattcctgaactttgccctcccactgcacccacacgttgagagctgcacggcacttctcagcccacaagcccactttccatgcaccaagcccaccccaccttacacttggcccctggctccttaaccttgagctcagcctccatcttaaggtttcaccaagctgcccttcactatccggtctgttggagattttccagctagactctgctagccacgctctgactctgtttgacccagctcccggggagaagccaagccgactcccttccactccctctgcccccgctgctgtcttacacagccgtaccttcctttcctttgccccctctcttggctggtgctgagccacatttagcaccagcctccaagagcaagcaccctgtgctaacttgggctcgtgtctcgcaagctaccaccctgatcttagaaacccgaagctcagaaaatagttcctatcttatgtgcgttatactcttcaagaaggtagttcgttttgcatcgtggaaggagcactaaactaggagtttaaagacttggatccacccttgattgcctcgcttggggctgccccattgcacaataacgagggccatcatctttgtagaataaatagaaacagagcaccctgaagttgtgtaaccaactgggttcccctggccaagtctagtggcatggccttgggcaagacattgaatgattctggacctcggtttccctatcttattcctagccaagtgtccttccttcagaacctcaagtttaggcaggggagagtagttgggaaatgatacctgagctttgccttatgctctgctagcatggagaagtggaaactgatttggagaaatagtttgaaggctgggaatgaaaacttgtttgcaacctagtcatgctgtttgattgattttccatgtggcataaagtcctggagatattctgaatgaaagtcaggcctttcttgactgtcccagtacacttgtgggaactgaggagagggctctggcagaaaactgactggcggcagaaataaaaccaccatagaacttaccttggtatctattcatccgctgtaacccacaggtccctgcctggttagactttacttcgctctgtccccctctactcatccctactttccttctcccagcaacacccttgggagggaagaatgagaccattcttgctcacttcttccttaagaaataatacttcctactatgcattatgtcagagcaaggatcttctatgtatatcgtttaatcctcaccagaaaatttggcaaggtgaaaatcattattactctcatcttaaaagtgagaaaattgag

SEQ ID NO: 713248 - DNA, 1636 bp, Homo sapiens
ttatataactagattccaaagagcatttcaaatacactaattcacaagtggtgtggctgtaatgattctctgactctagcttcaaaatgaatactgttattggtatgaatactgttattggtataaatgttaattattatccacatatttatttatatagtaatttagaagagaattattagttgtacttgcttatgttttgcttttgcccatgtcatttcaggactttgaataagagagagaatttgataaaaaaaaatagatagacttgaatgagacttataagagcagaattatatggggattaatacttacccatgagtagaatatttaaaggaagtggtaaaatactggtgtgtaaggaggttaggaaactggtgtaagaagaataaaggtgaactagtgtgacacattggtaggaagaagagaggatatgtaagtcatatatcatatatacgcaaacgtatatgtgcatttgtatgagtgtgtttttctgtatttcatatttctgattgtattatgattacacggaaagaccaggacaacaaatatgtgtggtataaaagagtgtagattgtactcttttgctccctcagtgtgggaatttgactcctcagactctgtatgtgggagagacgtggacctgtagcctccctcacttgtttacccgttaaccaagcacttagctattcctgtcacccaagcagttttcgttctccatgctaggtctttacgatgctaagatgaagttaatttagaggtcaataaagtatcaccagccagttcactataattccccttctcttttgaaaaggctattctggctacagcttcagtttttcctaacctcacttcttctctgagcctcagagattcctagtgacttttgttgctttatgcatttctaagaatggaaaactgatcatctctgactttcgcacccctgagacaagctcagaggcactgtgggatctctggagtgtggcagggaggggtgtgggcaggactgagctttcattggcctggcaccaggctgtagggccaacccaaaggagggcrtgcaggaatccagtcagtgtgcaagggactgtgtccactgggcttgatttggtttggcatcagtttcaaagtgctcacaataatctttatggctgggtgggggcactctgcttccaaggagcccagccaggacttggaaaagaaaacgctgcagtccagattccaaaccaataagactgaaatgggcccaggaaagcaaggatgatcctagggggcaggaaaggaaggggagatatagtcagtgttgggggactgtagttcaaaggcagcacaagtgtttgggatttcccccaggagtttctcacaccaaattcagttcacaaggattaatatctctaaactccacttccctgctgaggaagtgatgcctaaaacactaccaagctttgctggaacagtcacagggcagagctaggggtagcagagacccctttgtttttgttcacagtcaggccggaagcatttttagagggcgtagtttagttgtgtgtgtgtgtatgtgtgtgtgtgtgtatgtatggtgtgtatgtaacttaaaaacaaagtttttaaggttttacatgggtattctaataac

SEQ ID NO: 713249 - DNA, 1429 bp, Homo sapiens
ggaggcttgaggacaaggagaggagcccagaggcaggaggtgggttaggaggcaagtttctgaaggcctaggttgggagaagggagtggagagctcagacttgacactgggaacagagaacaagacagggaggcccatgagaagccacaaggaatcaagataaaccaacaaagacaacaaaactcagttgactgaagaatttcattcatgtactggagtctcttttcaaacataatgaataaataaacatgctcccagtgacaaagcagcactttgcttctatctaaatcactccccagagcccgtggttgtaggagcactgagagagcaccatctcatccagcattaactcctcttcttgcagaggcccctgtgctgggcagcactaagccaaggggaaagagacagagttcaagaatgtgctggagtctgagaacaggccccactttgccttgcctccacccagggacactggactagagcctcccccaccacagcctccgtttcccatctgtaaaacatggactctgcgattgcttccagctcaaatgctctgattctaaagatgggatttcctcttcagggatgggatgtaayacgcctctgtgctgcttagaggttgtcatctacatccaaatgtcggtatcacactgtggtttgaaataaaaaactgcttggcaaagtcagccactgttactgaagtaagtactcactgtacttcttatattagtaagaacagcttgataacatttttactgatcatctactatgcaaagtacttaaaacgcctgactcagtcatagcaatcttttgtggtaaggactacaacactctccttttactgatgaggaaattacagctccgagaagctaagtaatgtatccaaggtatcgtggttaataagtgacaagcgggaatagaaatcaggctgtgtggctccaaccctactcctatccattatactgcactatcttacttacccaaccttaccgcatctatatttctacataggtatagatggttagaaggagaaggagaaggagatttggcaagacccagctcaggattgccaacactcaccctttcctcccctaaggcagacatggctaatcaattacagaattcttccccactgacttgtgaccacaaatccatttctgactaatcagagttcaagatgaagctcgatcctttatcttcatctctgggataatggaatcccatcagaggggtgtaatttgtttaaggaagcacagcttgttagtgacagggttggaagtagaatcttggtctcttgactttcggtctaatgggttgatggtaagatctccctatgcaaaggacagtgccttttctaactgaccagagagaaataatagaaggtataccaaagatgaccacatcatcaggtgccagaggagactgctct

SEQ ID NO: 713250 - DNA, 634 bp, Homo sapiens
aaaccaatgagccagagctgataaacctttgtgtatcactgctttggctgcagctgagagaggaaacctcacatcaggggccaagatcatgaacacatgtgaaggactctaggcaccagagcccacttgggggatggtcactgagcatgggggaggggtctcttagcagccactgctgcagtctatgtcaggaaataagtgctggagtatatgtgatcactcctgcacactgtcctagctaggttcaagggcttccacacacggtgagtataagcaggctgggctgcatcaattaagtcactctgtgtctgggagaattctggtgaggcacagtccaaactcaagtggagaaagccaaagataaaagacaaaagaraaaagaatggctcctctagagcttcacctcctgaaaatttgttcatccctgagacccacttcacgattggggtgctcaaaggacataaggatagctgtcagtggtcctgaaccaacaccctaccaataccaaggctgggcatttcaccagggcctaagactcaggtggcagagccaggcttttaaaaaaaaaaatcttattttctatctaaataaaaacatattgtatctattttacattgtcctgaaatgaacagac

SEQ ID NO: 713251 - DNA, 634 bp, Homo sapiens
aaaccaatgagccagagctgataaacctttgtgtatcactgctttggctgcagctgagagaggaaacctcacatcaggggccaagatcatgaacacatgtgaaggactctaggcaccagagcccacttgggggatggtcactgagcatgggggaggggtctcttagcagccactgctgcagtctatgtcaggaaataagtgctggagtatatgtgatcactcctgcacactgtcctagctaggttcaagggcttccacacacggtgagtataagcaggctgggctgcatcaattaagtcactctgtgtctgggagaattctggtgaggcacagtccaaactcaagtggagaaagccaaagataaaagacaaaagagaaaagaatggctcctctagagcttcacctcctgaaaatttgttcatccctgagacccacttmacgattggggtgctcaaaggacataaggatagctgtcagtggtcctgaaccaacaccctaccaataccaaggctgggcatttcaccagggcctaagactcaggtggcagagccaggcttttaaaaaaaaaaatcttattttctatctaaataaaaacatattgtatctattttacattgtcctgaaatgaacagac

SEQ ID NO: 713252 - DNA, 634 bp, Homo sapiens
aaaccaatgagccagagctgataaacctttgtgtatcactgctttggctgcagctgagagaggaaacctcacatcaggggccaagatcatgaacacatgtgaaggactctaggcaccagagcccacttgggggatggtcactgagcatgggggaggggtctcttagcagccactgctgcagtctatgtcaggaaataagtgctggagtatatgtgatcactcctgcacactgtcctagctaggttcaagggcttccacacacggtgagtataagcaggctgggctgcatcaattaagtcactctgtgtctgggagaattctggtgaggcacagtccaaactcaagtggagaaagccaaagataaaagacaaaagagaaaagaatggctcctctagagcttcacctcctgaaaatttgttcatccctgagacccacttcacgattggggtgctcaaaggacataaggatagytgtcagtggtcctgaaccaacaccctaccaataccaaggctgggcatttcaccagggcctaagactcaggtggcagagccaggcttttaaaaaaaaaaatcttattttctatctaaataaaaacatattgtatctattttacattgtcctgaaatgaacagac

SEQ ID NO: 713253 - DNA, 652 bp, Homo sapiens
taaataaataaataaataaatcagttttagatgccattaaaagcctaacccaattatatttcttctcccatggaaataaacatatatacacatacatatacgttataaataatttcaggagtaaggtacaccttctaaaacgtccttgaactctgcatccacgaggacttccggactcaacgttaagaaactcaaaatagtgcatcttttgcttcccactgctgtctcagtctttggggagttataaggctggggttgttccattcatttccacaatagtattttcagatstggaacaggtacagggctggcacaaagtagggactcaatacatactagcagtatattttattatttaatcttcatgagaatccttctgaggaaggtaatatcatttccatcttacaaaaccagctcagagaggtttagtacttggctgagacacacagctagtgaggagtgcaaactgaattggaagaatcacaggactctgattttaaagtgtgcacttttttaaggctttttgtgcctctggggttattgtacaaagaggcaagcatttttgagtgggggttcctttgtgactagattaatgatgtatatgtagaaaaaagagacattaagtaacaacgatttacagaatgcctatgac

SEQ ID NO: 713254 - DNA, 1824 bp, Homo sapiens
tgctcctatgatgcatattgtacctaacaagcagtggattaaggggcttcattaggaagacatggccaattcataggaggcattaacacatctctacttgtctttgtaaggaacattttgataaattgcttaggatgaggggcagagtaaatacttcactgccccccaacctcaaacaaagggtaggcccaaggaacgacagatgacagatgaccagtaatttgccatcaaggggatgggactggcaggtccacctatccatcaagtggctatttcactgcatggtctgtgcctatttggagcagaattgctgaagatgatagagaggagaaagactgagatcaaccaggagcaccatccttttcctctgtttcctcataagtgcatggccttttcacttaataaatgctgttcaaatttgcaaagaagatttgcttgataaaattccaaattactacattttttaggatactcttatgtcttggtctggttctgaccacagaatacattttcctggggctgaatgttaccccgtcatattacctagttctgctagttctaggcttgttcatcctttatgaactgaaggacattcttggagaagaaatgtaggaaaagaaacacaaagaaaacaaatcagaatatttaaaagttgcctcccttaaaagaaatgtagtaagagaagagagggaaagaaataattcaagtatttaggaacgcagttttcatgtgcaggctctttactttcttatcaatggaatcttatygtcctcttgctcactaaaagtcaaaatcccgagtctggaaggggggtcttgatagttcaatttttaccttcaatgctgtaagtcagagagactgacttatggtatagagaccatacagagagaccttcaatgctgtaagtctggctagagaaaaattaacggtcttccagccaccattcagcctccaggaatagggtgatatccttcaggagcatgtagctgcttcaccaagaggacatcatgaagagtttgggaggctcttggggctgctttggaacagaagttcaatcattctttgcatttgagctttatttatattccctaatattagccactctcctgtccttggtactttttcattagtgggaatacaatctatgtctgggcttatcatcagtaaagcgaagacttggttgttattgaaccaaagcttaaaacaaacttccctgtggctacccattaagcctttttaatagtgttactccaaggtactaagtctactattactagaaaattttaaatccacataaagcaccttaacttcagctttcttgtttataaaattgaaattctggaacacaaaatagatttgtgaactccattttgcaaaataccaaggttcctttttaggagcttcaattacgacagcacacagagagtctcccagaacacttcccccaaagcagctctgcctgtgtcaattttaagatggcatttaataacatgattccactgcttaaaaataaagtttgaaaatactagactagaagatccctaaagttcctcccagtttaggtattcttttgttctattaattaattggggactttttaaccagagaacagaaggctaagatgtgacttgattcacatattcaatagttcccccaatttatgaaagagaagcttattggctttttcaagtgcacaggagggccaacatgaaataaataggcttagattaaaagaggtacatttccatttcaatttaaggcaaagacatgaccatcatgatggtgaacaaggaaaatggagcaggtatcatcagcctggaagaa

SEQ ID NO: 713255 - DNA, 1824 bp, Homo sapiens
tgctcctatgatgcatattgtacctaacaagcagtggattaaggggcttcattaggaagacatggccaattcataggaggcattaacacatctctacttgtctttgtaaggaacattttgataaattgcttaggatgaggggcagagtaaatacttcactgccccccaacctcaaacaaagggtaggcccaaggaacgacagatgacagatgaccagtaatttgccatcaaggggatgggactggcaggtccacctatccatcaagtggctatttcactgcatggtctgtgcctatttggagcagaattgctgaagatgatagagaggagaaagactgagatcaaccaggagcaccatccttttcctctgtttcctcataagtgcatggccttttcacttaataaatgctgttcaaatttgcaaagaagatttgcttgataaaattccaaattactacattttttaggatactcttatgtcttggtctggttctgaccacagaatacattttcctggggctgaatgttaccccgtcatattacctagttctgctagttctaggcttgttcatcctttatgaactgaaggacattcttggagaagaaatgtaggaaaagaaacacaaagaaaacaaatcagaatatttaaaagttgcctcccttaaaagaaatgtagtaagagaagagagggaaagaaataattcaagtatttaggaacgcagttttcatgtgcaggctctttactttcttatcaatggaatcttattgtcctcttgctcactaaaagtcaaaatcccgagtctggaaggggggtcttgatagttcaatttttaccttcaatgctgtaagtcagagagactgacttatggtatagagaccatacagagagaccttcaatgstgtaagtctggctagagaaaaattaacggtcttccagccaccattcagcctccaggaatagggtgatatccttcaggagcatgtagctgcttcaccaagaggacatcatgaagagtttgggaggctcttggggctgctttggaacagaagttcaatcattctttgcatttgagctttatttatattccctaatattagccactctcctgtccttggtactttttcattagtgggaatacaatctatgtctgggcttatcatcagtaaagcgaagacttggttgttattgaaccaaagcttaaaacaaacttccctgtggctacccattaagcctttttaatagtgttactccaaggtactaagtctactattactagaaaattttaaatccacataaagcaccttaacttcagctttcttgtttataaaattgaaattctggaacacaaaatagatttgtgaactccattttgcaaaataccaaggttcctttttaggagcttcaattacgacagcacacagagagtctcccagaacacttcccccaaagcagctctgcctgtgtcaattttaagatggcatttaataacatgattccactgcttaaaaataaagtttgaaaatactagactagaagatccctaaagttcctcccagtttaggtattcttttgttctattaattaattggggactttttaaccagagaacagaaggctaagatgtgacttgattcacatattcaatagttcccccaatttatgaaagagaagcttattggctttttcaagtgcacaggagggccaacatgaaataaataggcttagattaaaagaggtacatttccatttcaatttaaggcaaagacatgaccatcatgatggtgaacaaggaaaatggagcaggtatcatcagcctggaagaa

SEQ ID NO: 713256 - DNA, 1824 bp, Homo sapiens
tgctcctatgatgcatattgtacctaacaagcagtggattaaggggcttcattaggaagacatggccaattcataggaggcattaacacatctctacttgtctttgtaaggaacattttgataaattgcttaggatgaggggcagagtaaatacttcactgccccccaacctcaaacaaagggtaggcccaaggaacgacagatgacagatgaccagtaatttgccatcaaggggatgggactggcaggtccacctatccatcaagtggctatttcactgcatggtctgtgcctatttggagcagaattgctgaagatgatagagaggagaaagactgagatcaaccaggagcaccatccttttcctctgtttcctcataagtgcatggccttttcacttaataaatgctgttcaaatttgcaaagaagatttgcttgataaaattccaaattactacattttttaggatactcttatgtcttggtctggttctgaccacagaatacattttcctggggctgaatgttaccccgtcatattacctagttctgctagttctaggcttgttcatcctttatgaactgaaggacattcttggagaagaaatgtaggaaaagaaacacaaagaaaacaaatcagaatatttaaaagttgcctcccttaaaagaaatgtagtaagagaagagagggaaagaaataattcaagtatttaggaacgcagttttcatgtgcaggctctttactttcttatcaatggaatcttattgtcctcttgctcactaaaagtcaaaatcccgagtctggaaggggggtcttgatagttcaatttttaccttcaatgctgtaagtcagagagactgacttatggtatagagaccatacagagagaccttcaatgctgtaagtctggctagagaaaaattaacggtcttccagccaccattcagcytccaggaatagggtgatatccttcaggagcatgtagctgcttcaccaagaggacatcatgaagagtttgggaggctcttggggctgctttggaacagaagttcaatcattctttgcatttgagctttatttatattccctaatattagccactctcctgtccttggtactttttcattagtgggaatacaatctatgtctgggcttatcatcagtaaagcgaagacttggttgttattgaaccaaagcttaaaacaaacttccctgtggctacccattaagcctttttaatagtgttactccaaggtactaagtctactattactagaaaattttaaatccacataaagcaccttaacttcagctttcttgtttataaaattgaaattctggaacacaaaatagatttgtgaactccattttgcaaaataccaaggttcctttttaggagcttcaattacgacagcacacagagagtctcccagaacacttcccccaaagcagctctgcctgtgtcaattttaagatggcatttaataacatgattccactgcttaaaaataaagtttgaaaatactagactagaagatccctaaagttcctcccagtttaggtattcttttgttctattaattaattggggactttttaaccagagaacagaaggctaagatgtgacttgattcacatattcaatagttcccccaatttatgaaagagaagcttattggctttttcaagtgcacaggagggccaacatgaaataaataggcttagattaaaagaggtacatttccatttcaatttaaggcaaagacatgaccatcatgatggtgaacaaggaaaatggagcaggtatcatcagcctggaagaa

SEQ ID NO: 713257 - DNA, 2093 bp, Homo sapiens
tcacgtgcttgtaggtatgtattcatttcctaccaccgtagtggaagagagactatccctatcaatacacctggtaacattcccaacagtaagycgtgagattctgcttgaaatcacctctcagacaaataaaaaacagtcctgggaaatgtacgacactcattctgctaaagaaataggcaagtaacaatttttaacaagtgaaatatattactacttaattttattcaaaattcaccaacttaatgtgctttataaatattttcatgcctttcaagctctactgataaaacatagtttacagttaattaaaaagtgaagttaaagtaagtacaaaaacattttcaaggtgacaaaattagaaggtgacagtgccgattgaaacacagacatatcagacccaagggtcaagtcaagccattctattacttgggatattttccccactcacatctggttcagtgaagtgggtcatgaccatcctaccaggagccgctaccctgtgctcctctgtgtccctgaggtgcattttactttgcaggtttttgcactgcctcactaggttgggtttctttgtcctttgaaatattttctctcccttcaccaatctgagaacattttttcctcaatatcagcatccatttgcctggcctgcaatgtgtctctaaggaatggaaactaagctttggggtaagaaaatcttaatgacctaatgggtttgcttttagcgcaagggtatacctagagattccttccaggcacagctcaaacaaccactccacagagaggctgcattcccataccttgggctgttccctgagaggagatgacacaagggatgctatttactagacacttcaagagtcatggccactgttggcatcttggggaatcctcaaacagttttgaaattcaaaaccaagaaaataacaggatggctgaggatgtattgccctgtgaagtttccaaaatgaaacctgaacccaaaggctttctgatggggtgtctgtgccaagagaagtttaaacaaaggggcacaaaggttttccgctttttatttattttttttacagtggggtgtcaggggattattctctgctttcatctcctgtaaaatgtttacaaatgagaaaaaatttttttaaatgacatccactgctttttgacaaaaagaagaattgaaatactgtgtctgaaatgtacaataaagaacagttgataatgttgtgaattatggaaggttagttagtgttggtgagtgtcaggaaagaactggaaatttaaaatctgattgcaagccagagttaggctggggcaacagggagttagatttgagtctctgcctgccacacatttggaaaatgcatgagaaaactagttcccttttggagtgttaaaataactaaaaaacaggtgattatgttgaggtggctctagtgtcctgagctctgagtggagagacaggccaaggcctccgtacttccaaaaagctgcccattcttctccagctgtgcacctgattagatagtttccactccaagacccatgattggatgtagttcaattccctaccctgccgcctcagaccatgagtgacatatgtgatttgacactgggttgaataaagcaagaattataggtttttcctggatccttttctagcagggcttcctctgtgaactagaaactggccctgcctgtaaaatatttgcatttacatttgtatgtaagattatttgtattaatgaataatatatatgtgttattcatatatggaatcaatataatgacaattgttttaaaatttcagatgttttactttcctggcacatccaggttttagagcaggcagcctgagatttcaaaagggaggcaattctctaagaaataatatgagaggcacaagtgaattttaaatattctggtaactacattttaataaatacaccgggcatgcttccctgtgcctgtaggtcgaactattagggagactgaggtgggaggatcacttgagaccaggagtttgagaccagcccaggcagcatagagaaagccatctcttcaaaaaaaaaaaaaaaaaaaaaaaaaaaaaa

SEQ ID NO: 713258 - DNA, 2093 bp, Homo sapiens
tcacgtgcttgtaggtatgtattcatttcctaccaccgtagtggaagagagactatccctatcaatacacctggtaacattcccaacagtaagccgtgagattctgcttgaaatcacctctcagacaaataaaaaacagtcctgggaaatgtacgacactcattctgctaaagaaataggcaagtaacaatttttaacaagtgaaatatattactacttaattttattcaaaattcaccaacttaatgtgctttataaatattttcatgcctttcaagctctactgataaaacatagtttacagttaattaaaaagtgaagttaaagtaagtacaaaaacattttcaaggtgacaaaattagaaggtgacagtgccgattgaaacacagacatatcagacccaagggtcaagtcaagccattctattacttgggatattttccccactcacatctggttcagtgaagtgggtcatgaccatcctaccaggagycgctaccctgtgctcctctgtgtccctgaggtgcattttactttgcaggtttttgcactgcctcactaggttgggtttctttgtcctttgaaatattttctctcccttcaccaatctgagaacattttttcctcaatatcagcatccatttgcctggcctgcaatgtgtctctaaggaatggaaactaagctttggggtaagaaaatcttaatgacctaatgggtttgcttttagcgcaagggtatacctagagattccttccaggcacagctcaaacaaccactccacagagaggctgcattcccataccttgggctgttccctgagaggagatgacacaagggatgctatttactagacacttcaagagtcatggccactgttggcatcttggggaatcctcaaacagttttgaaattcaaaaccaagaaaataacaggatggctgaggatgtattgccctgtgaagtttccaaaatgaaacctgaacccaaaggctttctgatggggtgtctgtgccaagagaagtttaaacaaaggggcacaaaggttttccgctttttatttattttttttacagtggggtgtcaggggattattctctgctttcatctcctgtaaaatgtttacaaatgagaaaaaatttttttaaatgacatccactgctttttgacaaaaagaagaattgaaatactgtgtctgaaatgtacaataaagaacagttgataatgttgtgaattatggaaggttagttagtgttggtgagtgtcaggaaagaactggaaatttaaaatctgattgcaagccagagttaggctggggcaacagggagttagatttgagtctctgcctgccacacatttggaaaatgcatgagaaaactagttcccttttggagtgttaaaataactaaaaaacaggtgattatgttgaggtggctctagtgtcctgagctctgagtggagagacaggccaaggcctccgtacttccaaaaagctgcccattcttctccagctgtgcacctgattagatagtttccactccaagacccatgattggatgtagttcaattccctaccctgccgcctcagaccatgagtgacatatgtgatttgacactgggttgaataaagcaagaattataggtttttcctggatccttttctagcagggcttcctctgtgaactagaaactggccctgcctgtaaaatatttgcatttacatttgtatgtaagattatttgtattaatgaataatatatatgtgttattcatatatggaatcaatataatgacaattgttttaaaatttcagatgttttactttcctggcacatccaggttttagagcaggcagcctgagatttcaaaagggaggcaattctctaagaaataatatgagaggcacaagtgaattttaaatattctggtaactacattttaataaatacaccgggcatgcttccctgtgcctgtaggtcgaactattagggagactgaggtgggaggatcacttgagaccaggagtttgagaccagcccaggcagcatagagaaagccatctcttcaaaaaaaaaaaaaaaaaaaaaaaaaaaaaa

SEQ ID NO: 713259 - DNA, 1164 bp, Homo sapiens
tgtagatagacattgcagttgtcatgtgccctatggatttgtactttattagaaatatgaattctcaggccgagtatattggctcacgcctgtaatcccagcactttgcgaggtggaagagagtggatcacctgaggtcaggagttcaagaacagcctgaccaacatggtaaaaccccatctctctactatttacagttcgcattgtaccttgcaatgaatatacattttatccaaaaagcctaaaaaataatgaaattgggggtgggggcatggctggaagtatagataaaacaaaaatgacacatgactagcagctgttaaagctgggtgactggtctgttatactttttttgtattgtgtatgtttttagtgatctgtaataaaacacttgtacaaaatgacaaagtttatctacacttagctcttaaggtcttggttacctttgggaaggggaaagtgtcaggggcatgaacaaatctgattcttagatacacaagtgtatttatttagtaataattcatcaaacattccctaaatgctttgtgcctatattgctgtatgcatgttatttatcaataaaaatgtaaagagtgcatgtttgcataacaatcctaaattaatattttagaataatagcaatgttttgttttgttttcaagtggggcgtgttcactcaggacatcatcaggtgtatgttaatgttccaagttatttatttatgttttaacttttgggtgagcccccctgggtcttttaatttttacttcaacacagtaagtagcatggttttaactttttggaatgcagctttgttttcatcaaggttctccccgaagaatgatgctcaccyaggccagggcacacagtgacccgtgcacaggatgcactgagcacacacggcactgggtgaaccaggaacagaaggagaagccagcccgggtctgcaaaatatactttgcaggaaaagcagataaaatggaaaggtcacaattcagcagcaaacgttttcacattcattggagaaatcatttctaacaaaagctgctcgttaaagccatggttttctggcttgcctacacattgtaatcacctgcacgactttcaaccatatttttttcagatccagctccaaggattctgatttagttgtgcggttacaac

SEQ ID NO: 713260 - DNA, 1164 bp, Homo sapiens
tgtagatagacattgcagttgtcatgtgccctatggatttgtactttattagaaatatgaattctcaggccgagtatattggctcacgcctgtaatcccagcactttgcgaggtggaagagagtggatcacctgaggtcaggagttcaagaacagcctgaccaacatggtaaaaccccatctctctactatttacagttcgcattgtaccttgcaatgaatatacattttatccaaaaagcctaaaaaataatgaaattgggggtgggggcatggctggaagtatagataaaacaaaaatgacacatgactagcagctgttaaagctgggtgactggtctgttatactttttttgtattgtgtatgtttttagtgatctgtaataaaacacttgtacaaaatgacaaagtttatctacacttagctcttaaggtcttggttacctttgggaaggggaaagtgtcaggggcatgaacaaatctgattcttagatacacaagtgtatttatttagtaataattcatcaaacattccctaaatgctttgtgcctatattgctgtatgcatgttatttatcaataaaaatgtaaagagtgcatgtttgcataacaatcctaaattaatattttagaataatagcaatgttttgttttgttttcaagtggggcgtgttcactcaggacatcatcaggtgtatgttaatgttccaagttatttatttatgttttaacttttgggtgagcccccctgggtcttttaatttttacttcaacacagtaagtagcatggttttaactttttggaatgcagctttgttttcatcaaggttctccccgaagaatgatgctcacccaggccagggcacacagtgacccgtgcacaggatgcactgagcacacacggcactgggtgaaccaggaacagaaggagaagccagccygggtctgcaaaatatactttgcaggaaaagcagataaaatggaaaggtcacaattcagcagcaaacgttttcacattcattggagaaatcatttctaacaaaagctgctcgttaaagccatggttttctggcttgcctacacattgtaatcacctgcacgactttcaaccatatttttttcagatccagctccaaggattctgatttagttgtgcggttacaac

SEQ ID NO: 713261 - DNA, 1164 bp, Homo sapiens
tgtagatagacattgcagttgtcatgtgccctatggatttgtactttattagaaatatgaattctcaggccgagtatattggctcacgcctgtaatcccagcactttgcgaggtggaagagagtggatcacctgaggtcaggagttcaagaacagcctgaccaacatggtaaaaccccatctctctactatttacagttcgcattgtaccttgcaatgaatatacattttatccaaaaagcctaaaaaataatgaaattgggggtgggggcatggctggaagtatagataaaacaaaaatgacacatgactagcagctgttaaagctgggtgactggtctgttatactttttttgtattgtgtatgtttttagtgatctgtaataaaacacttgtacaaaatgacaaagtttatctacacttagctcttaaggtcttggttacctttgggaaggggaaagtgtcaggggcatgaacaaatctgattcttagatacacaagtgtatttatttagtaataattcatcaaacattccctaaatgctttgtgcctatattgctgtatgcatgttatttatcaataaaaatgtaaagagtgcatgtttgcataacaatcctaaattaatattttagaataatagcaatgttttgttttgttttcaagtggggcgtgttcactcaggacatcatcaggtgtatgttaatgttccaagttatttatttatgttttaacttttgggtgagcccccctgggtcttttaatttttacttcaacacagtaagtagcatggttttaactttttggaatgcagctttgttttcatcaaggttctccccgaagaatgatgctcacccaggccagggcacacagtgacccgtgcacaggatgcactgagcacacacggcactgggtgaaccaggaacagaaggagaagccagcccgggtctgcaaaatatactttgcaggaaaagcagrtaaaatggaaaggtcacaattcagcagcaaacgttttcacattcattggagaaatcatttctaacaaaagctgctcgttaaagccatggttttctggcttgcctacacattgtaatcacctgcacgactttcaaccatatttttttcagatccagctccaaggattctgatttagttgtgcggttacaac

SEQ ID NO: 713262 - DNA, 1227 bp, Homo sapiens
aagtttgggaaaagtagaggaatatatggagggcagaaggagtgaacattagggaaaccctcccctagctcagtcttcagatacgctggtggacttccccactcagcctgagtcaccttcgctactgacctcatcttgtcttctgactggatgctcctttcaggaagctggtgtctggaaaacttctcaattttagtatcaattattattcagaggctgaaaggcaagcctccacctaaagtgccagtcttggggccttggtgagaccctctgctggggagaaactccacttcactggggggttcttattttatacaaaatggggacatgacggggcagccaagcagcagaaaaccaaatcataagcaagaaccaaactcttggggagtttgattctttctgctacatagtgcacaagttctggagagactataggggtgaagaataataaaagattttatttttgaatcatcttgcgtggttgcctgtttggagtgcagtagcgtgatcatagttcaccgcagcctagaactcctggctcaagtgatcctctgcctcaatatccagcatagctgagacaacagtttggaactatcacacctggctaaatgtttttaatgcttcaagttttttgtataaatggggtctcactatgttgacaaggctggtatcaaattcctgscctcaagcaattctatctcctcagccaatcaatatgccaggaatacaggcatgagacaccgtgcctggccagcgcctttataatgttttattctcccaagttcttctcaaaaaagtcaacatccaccaagtatcagctgagatttgaacttcaaccctgggctgaactcagtggcaggactctccattcccaacaagggacaaatggagaaataaatggtgagagggaggagcttgattctgcccatgctaattggacacctattgtgtgctaggaagacacacagaggtcaatccaaattccagctccagccacagcaggacagccatggtgtagaaggcctagcccagaggagggagccttagcaagcggagcacccctccatggagtattgacactctgttacttcagttatactgaaaactagtagaaggtatgagatgttgcactcaaccattatgagcaagaaaatccattcaatcttctttaatttggttaaaactaacctttactaaaaggcagcaaagaataatgcttgtctgtga

SEQ ID NO: 713263 - DNA, 365 bp, Homo sapiens
tcaggagaccacaaagaactctacagttttcaaaaagagaaaaattttggaaacattacarttcctgttttcaaaacctgttacaaatctacagtaatctaagtagtttgttactggcataaagacagacaaatagactaataaaaccgagtgcaaaaaagatgtaaacgctcacgtatttattgtagctttacttacaaaaatcaataggttaaagcaatccatacttccctcaacaaacaaatgaatgggtacaatttggaatataaaaacaatagaatattacccagcttttgaaaagcagaaaaccttttatctataataaaaataaaatcttgatgacattatgctaaataaaataagcc

SEQ ID NO: 713264 - DNA, 613 bp, Homo sapiens
tttatattgtatggatcattcagttgaaaactgcaagtaatctttgcatttaagcatccctatttttcttttttaggaattttaactgacayataataattacacatagtcatggggtacaatgtgatgtttctatagatatatacattgtgtaatgatcaaatcagggtaatgagcacatttgtcacttcaaacatttatcatttctttgtagtgttaacattcaaaattcttctaggttttttgaaatatatatcacactactgtgcaatagcacaccagaacctattcctcatagctaattataaatttgtacctgttgaccaatctttctccattctcccatctgccttcctctccccagtctttggtaatcactgttctattctctacttctatgacatcagctgcttagattccacatatgagtgagatcatgtggtatttgtctttctgtgtctggcttatttcacttaccatgatgtcttccagttccaaccctgttgttgcaaatgacaggattccattcttttttaaggctaaatagtattcagttgtgtatctacatcacattttctttatctgttgatctgttggtggacaattaggctga

SEQ ID NO: 713265 - DNA, 1731 bp, Homo sapiens
attctacaaaaagagtgcttcaaaacggctcaatcgaacgaaagtttcacctctgtgaaatgaatgcacacatcacaaaatagtttctcagaatgcttctttgtagtttttatgtgaagatatttgctttgtcataataggcctcaaagcgctccagatatccacttgcagattctacaaatagagtgtttcaaaactgctcaatcagaagaacatgtcaactctgtgagatgaaggctcacatcacaaagaagttcctcataatgcttctgtgtagtttttatgtgaagaaatttccttttcgacaataggcctcaaatcgctccaaatatccacttgcagattctacagaaaaagtgtttcaaaactgctcaatcaaaagaagtgttcaactctgtgagatgaatgcacacatcacaaagaaggttctccggatgatgtccgaataggaacagctccagtctacagctcccagcgtgagcgacgcagaagacgggtgatttctgcatttccttctgaggttctgtgttcatctcactagggcatgccagacagtgggcccagcacaagtctctgcaccctggaaagtgtgaccatgttgactgtttgtttcccgacctctgtggggccccagaaacttccagaaatacatggaagaccagcatcgtgtcgctctcctttccagttttcaaacaggctatattggagactccccatttttcaggaaacaggaatcattcttcaggacgtgatgcatgggacgtttcttttctctgtggtttcgctctccttgtctacatgaaaataaacgagatccacacacctgcgtgtgtgagactattacggcaactgtgacacccacgcgctggctaagagttggcagcctgatcctggcacaaaggttctgagggacatccagacacaccccaccacagtcactagcaaacccactcccaaacacacagatacacaggggcgcacgcgtgggaacacaagcacacacacagacacacaaagacacagacagcttgaagaagaacaagggacagagagatggagagatagaaacggaaggagagtgagaaacagcgatcgagagaaagacagagaagaacctgggagattgagagagagagcacgcaaggtggagagggaagtagagaaagggagagggtgagggagctagagagggggagcaacagagccttggagagggaggctctgctctggtagacaggggcccctttggcgagggtagggtcgagggtgcctgggccgggctggaacaggggggcagggctgcccacacgggaaaaccaacggagccctgagacatgtttttacttggattggtttgttgctttgggtgtgtgtttcctagggtcattcctttgttggctcctccctgtcctcttggtgctgtgggctctgaaagttgtagagtgctcctgccctgtggtggaagcagtggcgcsgagcctgctcacaggacacagcttgggtctgtcttagatttgtcttcgtggggcgattttctagatcctcccctgcctctttctctacatcttctttaaaaccaataactcttagatctgtctttgtgaggttattttctagatcctgtaggcatgatttgctgtttttattctttttcttttgtctcttctatgtattttcaaagagcctgtcttctctgcttgatccattctgctattacatggctctaatgca

SEQ ID NO: 713266 - DNA, 1380 bp, Homo sapiens
tgattgtggaaaagaataaaaagcctcataccattaacaagattggattctgactcccacaagtctaattatccccttgcaaagtactcttctctactctttagctcttgtctcttaaaacaatttgctacagtcttgatttttgtttctgctcattatctataggttctaacttcaaagtggctacagctagtgtatttctactgtttaatctaatattgttataggcacaattatataatattaatacttctttcaaagtaatttgtttcgtagaatccattatgagttgttccttatttcatgattttgtttaaggagattcccaatgaaacacatttctgttttgacattctactggcttctgcaagtggactgtaagccatttggtctttctcatgtaatcataacttttctcttggtataactaaagttactgcatttcttaccttcaataacagtgtaatttctaaaatgtgccacaacagaattacctttccttcattcacttagagatggtggaatgaaaatttggggtaaatggagaaaaaaatgtgttaactagaaatatttaaggcaacctaatttgaattaaatgaagactttatcacttaaaagtgttttgcagtgcctctatcgaatattgattataacattgtttatttgtgtttcattttttattttaaaattaaaaaaattttttccagagacagagttttggtctgtcgcccaggctggagtgcagtggggtgatactagctcactgaagccttcaccttctgggctctagatactctctgcctcagcctcctgagtagttgggactacaggtgtgcaccaccaagcccggctaataaaatatatatatatatttaagagacgtggtctcactgtgttgccctggctggtgtgaaactcttggcctcaagcgattctcctgctttggcctcctaaagtgctgcgattacaggcgtgagtyactgcacatgaccttgtttgggttttaacaatccagttctcagctaattcaaatggcggcgctcattcttactcaggctgtttggtgtatctgttcctactgtgatggaaaaatcatttggaggacaaaacccttaataacttttaacaagacctcaaactattatctgtcagaataatttcttgaatataattcttccttgtgcttctgctgaacattgatatagcaatgagatgttaacaactcctaagggagctggctgggttttattatattttagaaggaataattgtttctctaagagatcatgatttaatttggatagtgtatccaaggacctcaacctcagaaccctctctagaagtagaatgacccaataaagccactttggatagactttt

SEQ ID NO: 713267 - DNA, 1380 bp, Homo sapiens
tgattgtggaaaagaataaaaagcctcataccattaacaagattggattctgactcccacaagtctaattatccccttgcaaagtactcttctctactctttagctcttgtctcttaaaacaatttgctacagtcttgatttttgtttctgctcattatctataggttctaacttcaaagtggctacagctagtgtatttctactgtttaatctaatattgttataggcacaattatataatattaatacttctttcaaagtaatttgtttcgtagaatccattatgagttgttccttatttcatgattttgtttaaggagattcccaatgaaacacatttctgttttgacattctactggcttctgcaagtggactgtaagccatttggtctttctcatgtaatcataacttttctcttggtataactaaagttactgcatttcttaccttcaataacagtgtaatttctaaaatgtgccacaacagaattacctttccttcattcacttagagatggtggaatgaaaatttggggtaaatggagaaaaaaatgtgttaactagaaatatttaaggcaacctaatttgaattaaatgaagactttatcacttaaaagtgttttgcagtgcctctatcgaatattgattataacattgtttatttgtgtttcattttttattttaaaattaaaaaaattttttccagagacagagttttggtctgtcgcccaggctggagtgcagtggggtgatactagctcactgaagccttcaccttctgggctctagatactctctgcctcagcctcctgagtagttgggactacaggtgtgcaccaccaagcccggctaataaaatatatatatatatttaagagacgtggtctcactgtgttgccctggctggtgtgaaactcttggcctcaagcgattctcctgctttggcctcctaaagtgctgcgattacaggcgtgagttactgcacatgaccttgtttgggttttaacaatccagttctcagctaattcaaatggcggcgctcattcttactcaggctgtttggtgtatctgttcctactgtgatggaaaaatcatttggaggacawaacccttaataacttttaacaagacctcaaactattatctgtcagaataatttcttgaatataattcttccttgtgcttctgctgaacattgatatagcaatgagatgttaacaactcctaagggagctggctgggttttattatattttagaaggaataattgtttctctaagagatcatgatttaatttggatagtgtatccaaggacctcaacctcagaaccctctctagaagtagaatgacccaataaagccactttggatagactttt

SEQ ID NO: 713268 - DNA, 1295 bp, Homo sapiens
agacatggtggattgaggcatagccatgacctgaaggaaataattaaaatgcaggagggttgctgtgagggacacactaacttagtacatctttctctgatgaaatctgtcaggctcttagtttaccaaatgtgggaacttttgtgcttgttttgctcttaggcacaggataggtcccaggagagattccattcattcctcaaagagaaacagaagaaaaagaatgaagtctcactaatagcttgttagaagaattgtgtttactctgagatctgactcaagaaatggacatggaatctcagcaaatccaagctacagatgatatctgttttgcagctgggccatgcagagctcagccatggcttctcctgaccaagggatgttaaagttatctagaacattaagagtgttaatgagtatatacagagagactaattgtgagcaaaatcattaattagggtcatgtttacatttttattgtggctaatctttcatctgttyggactaaggttcttactgtgttccaaaggtgataataatataactaaattcctctgatactaaagtagtcacacttttatttcttaatttacctgagttgattcctggccaccctccccctccttatcacactagagataattttcagtaatgttttctttatgctgttaagtgattcccttcccagtggagcgagaaggtgaatgtacttaatgaaatgattgatctgcattttggcattcgtccaaattgataaaatatagagggacttttccattcattattttgttcatcatttatagaaaatgcggaaacttttgggtaggtttggctttctgccaattaatgttgtcactgttttcctctgatgcatattcacatgagtcaacagaaaccttttcgactaagcagagttagatttagcgagactgcgtacatcacggtatttattggatgtggaaacctaaaataggaggggcgtggtaaaacctcagacagaagtactgacaaagagtttccccaaacaatagaaccgccatagcccgcacacattcccaggacacattctacagaatggacaaagaaatactcatctgtgtcatcacttgctcaaaaaaaaaaaaaaaattatctgaaacatggaaggtatatcaatcagatttgcatttggctgtgagtgatagaaaatgcaaaataatagtaggttaaaatacataaattttttttctgtctcttgtaaaagaagtcccagagtaggtaaaccaggagggagacacttaacagtatcagggatc

SEQ ID NO: 713269 - DNA, 956 bp, Homo sapiens
  misc_feature 293, 294, 295, 296, 297, 298, 299, 300, 301, 302, 303, 304,305, 306, 307, 308, 309, 310, 311, 312, 313, 314, 315, 316,317, 318, 319, 320, 321, 322, 323, 324, 325, 326, 327, 328,329, 330, 331, 332, 333, 334, 335, 336, 337, 338, 339: n = A,T,C or G
  misc_feature 340, 341, 342, 343, 344, 345, 346, 347, 348, 349, 350, 351,352, 353, 354, 355, 356, 357, 358, 359, 360, 361, 362, 363,364, 365, 366, 367, 368, 369, 370, 371, 372, 373, 374, 375,376, 377, 378, 379, 380, 381, 382, 383, 384, 385, 386: n = A,T,C or G
  misc_feature 387, 388, 389, 390, 391, 392: n = A,T,C or G
tgtgagattcaaattcttgttttataactgaattttggaagacagaacttatgtaagtaaattggaaactctggaaactgcctgtatygttattagtagtaagtaggattactaaatttagagttctagctaagcccaaaagacaggtatgttttaaccttctatggtagtaggaataataagcagtgattatcccttttaattttccaaacatgttatgaggtgttagaggttccatccatggtggaatgttggagaagcatcaacagaaaaaaagaggcccacaaatacannnnnnnnnnnnnnnnnnnnnnnnnnnnnnnnnnnnnnnnnnnnnnnnnnnnnnnnnnnnnnnnnnnnnnnnnnnnnnnnnnnnnnnnnnnnnnnnnnnngtggttgttaagcaaagttcctaaataaggaacttcaaaatacaagtttaaagcaacactctgtaattatttgtattatagtataagggtgttaagtttgtcttcaccctttgaaagagttctgaacagagttagtgttttcgtaaaaaatatcagggcgtacaaaaaatgccatttggcctccacaataagttgctcccacccagaaagtcattctcccttctacagcttcctgtataaaaggctgggataccaacatctgcctgaagcaaaaacacatgtattttaaccaaataaataaaaaggaacaaaagtctgagtacatcatgctgctcatagtcttactggctgactcccattggctctctcactgttgttataatttcgtttatgccctaggcagatgggcctctctgctcataggtgatttagaatctgctgatagtggctggaatgaagcatggaggatctggcaacttctaagcacactggcttagaccactgtattcttgggctttgatgtttactccatatatgattcccatcaatggtgatacctgggcc

SEQ ID NO: 713270 - DNA, 2214 bp, Homo sapiens
acacaactttgtgcgatggcatatatgcattttcagtgtggacgcattccacagtttcgtcagattctccaggggttccaagggcgaaagaacctgaagcctaggcctgtggagatgggaagactccactaatactaggcacactgtgattctccactctacacaacagctaactctaggacatccggcatttcctttctttgtgtgtctgttcrttctagtttcaggaatctgaagagaaagcaaacgtaactttcttcatgcctaacatatttcctttacgttggacttttgttatctattttgttatctatctaggcattttcttgtttcttttttttgagacggagtctcgctccgtggcccccagggtggagtgcagtggcgcgatctcggctcactgcaagctccgccttccgggttcacgccattctcctggctcagcctccctaggagctgggaatacaggcgcccgccactacgcccggctaatattttgtatttttagtagagacggggtttcaccgtgttagccaggatggtctggatctcctgacctcgtgatccgcccgcctcccaaagtgctgggattataggaatgagccactgtgccccgcccattttcttcttttctaaaaggcagtcagtcctcagatagcagctgaactcttttcattctcttttgcagttcaggtttgagcccagtccaacaattttttgctttatttttaagtgacctcttaccattttcaggcttcctcccctctcaccttgacctctaactccaaatttatgtctccttgtcattgtggggaacttcttggagaaaaggttaaagctaagttggagctctgtctcgggcctttcatagcaacactgactcttattattagcggtgcactccaggctgctagagttcatattttggcagtagaccatcaaacaccctatttttaagagcctttaacttcgttgtaaacatgtgctgtgactgggagcttattttctttactcatatttaccaaaagcaatttagctgttgaaaagttgctataaggaaaaaaacaacaacaacaacaacaaaaaactcggccttcaggaacatttttccactcatataactcaaaactgttcatgatctttaaaaaaaattggcatttagttgtttgatggtccagtcatattggtaatttgaagggaagaagaaatggaactgctaggtcattttgctatgacaaatgtccattaaacacatgtggagggaatagtgttggccacacatattttatatgattgaccagaacagaatggctcaaagaaggcagtctagtatactgagtaaatcgttttgcccttaaaatctcctatatttagaacaaaaaccttctatagacatacttcctgcacactctaaattctgtagactctactagtcccattaggagaacaaataatatcccaaacgccaagcatcagcttgtacatgcactgatggattattgatgtctgaggaccttgaaaaagaatctacagaaatatgataaaggaaggaatatcgcaaatatgtctatttcttttgtctctggaaggaatttaagcaagtgtaacaaaacacatagtaatcttttgaagcggttgtgacttctggccttcaagcgggagctttaggaggaatttcagtgttaaaaaggagaggcttgaactttgacatctttctctcgtgatttaagattctaaaagtagtgttaggcaaattcttatattccagcacaggagaaacaccagctttccaagaggatttagcatttcttcatccctttacaatacaaaagggcaactgtgctcagaggttggctacatttgtgaagtgggaagtatagaaagatctggaagtatgttttcagggtcacgagcccagtgggcatccatatgctgtggaagtaccttggcctggaaaccctccaggttaaatgatgagtgtgtctttctacacaaacccatatttgaaggcatgttgctgcagtgttgtttttacccctcaggtaaaatgttattttctaccccatatccgaggcagataagccctgaaattggccagcatgtggattccacatgttttctcccactcttccaactggatgtgctcttgaaaacattgactttcttggtccttgtcatatgatatgttttcttattgccatacttcctgctctg

SEQ ID NO: 713271 - DNA, 2214 bp, Homo sapiens
acacaactttgtgcgatggcatatatgcattttcagtgtggacgcattccacagtttcgtcagattctccaggggttccaagggcgaaagaacctgaagcctaggcctgtggagatgggaagactccactaatactaggcacactgtgattctccactctacacaacagctaactctaggacatccggcatttcctttctttgtgtgtctgttcattctagtttcaggaatctgaagagaaagcaaacgtaactttcttcatgcctaacatatttcctttacgttggacttttgttatctattttgttatctatctaggyattttcttgtttcttttttttgagacggagtctcgctccgtggcccccagggtggagtgcagtggcgcgatctcggctcactgcaagctccgccttccgggttcacgccattctcctggctcagcctccctaggagctgggaatacaggcgcccgccactacgcccggctaatattttgtatttttagtagagacggggtttcaccgtgttagccaggatggtctggatctcctgacctcgtgatccgcccgcctcccaaagtgctgggattataggaatgagccactgtgccccgcccattttcttcttttctaaaaggcagtcagtcctcagatagcagctgaactcttttcattctcttttgcagttcaggtttgagcccagtccaacaattttttgctttatttttaagtgacctcttaccattttcaggcttcctcccctctcaccttgacctctaactccaaatttatgtctccttgtcattgtggggaacttcttggagaaaaggttaaagctaagttggagctctgtctcgggcctttcatagcaacactgactcttattattagcggtgcactccaggctgctagagttcatattttggcagtagaccatcaaacaccctatttttaagagcctttaacttcgttgtaaacatgtgctgtgactgggagcttattttctttactcatatttaccaaaagcaatttagctgttgaaaagttgctataaggaaaaaaacaacaacaacaacaacaaaaaactcggccttcaggaacatttttccactcatataactcaaaactgttcatgatctttaaaaaaaattggcatttagttgtttgatggtccagtcatattggtaatttgaagggaagaagaaatggaactgctaggtcattttgctatgacaaatgtccattaaacacatgtggagggaatagtgttggccacacatattttatatgattgaccagaacagaatggctcaaagaaggcagtctagtatactgagtaaatcgttttgcccttaaaatctcctatatttagaacaaaaaccttctatagacatacttcctgcacactctaaattctgtagactctactagtcccattaggagaacaaataatatcccaaacgccaagcatcagcttgtacatgcactgatggattattgatgtctgaggaccttgaaaaagaatctacagaaatatgataaaggaaggaatatcgcaaatatgtctatttcttttgtctctggaaggaatttaagcaagtgtaacaaaacacatagtaatcttttgaagcggttgtgacttctggccttcaagcgggagctttaggaggaatttcagtgttaaaaaggagaggcttgaactttgacatctttctctcgtgatttaagattctaaaagtagtgttaggcaaattcttatattccagcacaggagaaacaccagctttccaagaggatttagcatttcttcatccctttacaatacaaaagggcaactgtgctcagaggttggctacatttgtgaagtgggaagtatagaaagatctggaagtatgttttcagggtcacgagcccagtgggcatccatatgctgtggaagtaccttggcctggaaaccctccaggttaaatgatgagtgtgtctttctacacaaacccatatttgaaggcatgttgctgcagtgttgtttttacccctcaggtaaaatgttattttctaccccatatccgaggcagataagccctgaaattggccagcatgtggattccacatgttttctcccactcttccaactggatgtgctcttgaaaacattgactttcttggtccttgtcatatgatatgttttcttattgccatacttcctgctctg

SEQ ID NO: 713272 - DNA, 2214 bp, Homo sapiens
acacaactttgtgcgatggcatatatgcattttcagtgtggacgcattccacagtttcgtcagattctccaggggttccaagggcgaaagaacctgaagcctaggcctgtggagatgggaagactccactaatactaggcacactgtgattctccactctacacaacagctaactctaggacatccggcatttcctttctttgtgtgtctgttcattctagtttcaggaatctgaagagaaagcaaacgtaactttcttcatgcctaacatatttcctttacgttggacttttgttatctattttgttatctatctaggcattttcttgtttcttttttttgagacggagtctcgctccgtggcccccagggtggagtgcagtggcgcgatctcggctcactgcaagctccgccttccgggttcacgccrttctcctggctcagcctccctaggagctgggaatacaggcgcccgccactacgcccggctaatattttgtatttttagtagagacggggtttcaccgtgttagccaggatggtctggatctcctgacctcgtgatccgcccgcctcccaaagtgctgggattataggaatgagccactgtgccccgcccattttcttcttttctaaaaggcagtcagtcctcagatagcagctgaactcttttcattctcttttgcagttcaggtttgagcccagtccaacaattttttgctttatttttaagtgacctcttaccattttcaggcttcctcccctctcaccttgacctctaactccaaatttatgtctccttgtcattgtggggaacttcttggagaaaaggttaaagctaagttggagctctgtctcgggcctttcatagcaacactgactcttattattagcggtgcactccaggctgctagagttcatattttggcagtagaccatcaaacaccctatttttaagagcctttaacttcgttgtaaacatgtgctgtgactgggagcttattttctttactcatatttaccaaaagcaatttagctgttgaaaagttgctataaggaaaaaaacaacaacaacaacaacaaaaaactcggccttcaggaacatttttccactcatataactcaaaactgttcatgatctttaaaaaaaattggcatttagttgtttgatggtccagtcatattggtaatttgaagggaagaagaaatggaactgctaggtcattttgctatgacaaatgtccattaaacacatgtggagggaatagtgttggccacacatattttatatgattgaccagaacagaatggctcaaagaaggcagtctagtatactgagtaaatcgttttgcccttaaaatctcctatatttagaacaaaaaccttctatagacatacttcctgcacactctaaattctgtagactctactagtcccattaggagaacaaataatatcccaaacgccaagcatcagcttgtacatgcactgatggattattgatgtctgaggaccttgaaaaagaatctacagaaatatgataaaggaaggaatatcgcaaatatgtctatttcttttgtctctggaaggaatttaagcaagtgtaacaaaacacatagtaatcttttgaagcggttgtgacttctggccttcaagcgggagctttaggaggaatttcagtgttaaaaaggagaggcttgaactttgacatctttctctcgtgatttaagattctaaaagtagtgttaggcaaattcttatattccagcacaggagaaacaccagctttccaagaggatttagcatttcttcatccctttacaatacaaaagggcaactgtgctcagaggttggctacatttgtgaagtgggaagtatagaaagatctggaagtatgttttcagggtcacgagcccagtgggcatccatatgctgtggaagtaccttggcctggaaaccctccaggttaaatgatgagtgtgtctttctacacaaacccatatttgaaggcatgttgctgcagtgttgtttttacccctcaggtaaaatgttattttctaccccatatccgaggcagataagccctgaaattggccagcatgtggattccacatgttttctcccactcttccaactggatgtgctcttgaaaacattgactttcttggtccttgtcatatgatatgttttcttattgccatacttcctgctctg

SEQ ID NO: 713273 - DNA, 2054 bp, Homo sapiens
tgcatttctggttgttatcgaaaaatatataatacatgtattatttgctacctgtgtaccagacagaacctcaaaaacagttgtaatgcccagtgaaaaacagttgcaatagcacagtgaaaactggctacctagtaaatgctgaatgaatttgttgaagaatgaatgaatgcacagatacctttatgtgtaaacattttaagagtttctgctaataaattacaggatattcgaatagatgctaatctagtttctcctaagtatctattattgcagttgttttatggggaagaaaaactttaaaaaagttttcaatactgtccttaatgtacagttttgaaattaggagttccattcttgatgatttgagtaataaaacacagaggttaggaatacaggcttttttgactttgacagatttagcttcaatttctggctctgctacttgtttaatrtgtaaatttaggcatgctatttaatctctttaagcttacttcatcactactcaaatagggaaaagattatctaccacataggattatactgatcattaaatatataataaatcaattcatggcctggcacatagtaagtcctccataaataacttataaaatactttgaaaatcccttaaagctactgtacagggcaggtagctaggcatgaggtaattataaataaaatataatgacttgaagatgaacccagttctcctcaaagtttaaaactatctctttcagagaagttgaaccttaaaattcatgtttaaatttataaattaataatatgtatttttccaataaaatgtacaacagaggtctaaaatctgaaacagtttggtaatgtatttatctacataaatgagctacaagaaaaatttatatttcaagttaattaaaaatgagtaatatcaatagcgcggaaatcaagagtacttatatcgctacggcttttacatacaacaagtatagaaagtggcctagaaaatgacactggacctttaataaataaaatatctttccaggcatggtatctgaactatccactcagtaacatgtaaaagaattttaaaattcaacaccaagataattaacgttcagtgtatctttttataggttctcccctccatcaatctgccaacttatatgaatcaatgttgtacccaagctagatgtgctagataaagaggccagaagatgaaaagctagacagaagatgaatactgaactctcttcagtaactaacttctttacttatgctgcaatgtctttatttacatacttaaatttttcaatgctattccacaggatctctttcttttctatacttggaaaaatctactttcatttataattgtttggttggtttttttttttttttttttttttggttttttttgttgttgtttttgctttgttgaaggtgaatcatatctctattcaaggaacctatcttttatagcaatcatctggtctaaataatataatcactacaataatataatcactaatggatcacgtaatactgagcaaagaggattatggctgttgagcagaggagttggggcaagagtctggaatttggatacctgaaggactagggaagtcacaagagtaaaaatctgtgggacagttagcatttctctctccaactaagcacctatgatgtgcataacatatagaacactagaaaaggagtgaaataactttggtgagccatttgaactttctaccactttgagataaagtagtagctcatttgagtggtttctgaatagttaacactgtgagacttaaagaaggcctgtgcttatgtgacgctcactggacttttgactacacacccctatctcctaagtgtactcaccatcagcatcggctttacccatataatgccaaaacaactattctatcaaatcaggcaaactacaaatcaatcctaacgtagggatgggagatctgtttaatagtttattgaactgaattgaatacttcagtaaaaagagttatatccatagcccttagcagacatgggttgtttttactaaaggaca

SEQ ID NO: 713274 - DNA, 957 bp, Homo sapiens
gagttttcagtggccagatctcacgagaactcactcatgattgtgaggacagtaccaaggggatggtgctgaaccactcatgagaaatttgccttcatgattcaatcaccttataccaggatccacctccaacattaggaagcataactcaacatgagatttggtggggacacatattcgaattgcctcatcagtctttgagtataaagacatccatagcaggctttatccagccagcttctttgggattctttatagggtttcaggtctatagcatatccactaatatattcctgcttcaaaaggcaataaagtggtattatcattcttcaaaaagttataatggtagtgtaggcattcatagtatgatttagttcacgtttgctactgtttctattctatcaccatagtaacactttcctacacaattctatattcagctgggtttcagttgagcacaaagtcatccttgtactaccactgatagctggcactagctctttgatactgttatcattctgctgtagaaagtacccacgaactggaaaaagtccacaatcaaatagctagtcattcaacactatcaaattttaggtgactttttgaaaaaatagtatctcttgttgcaagaaatgctccatctgtgatgtcaagtctctcacttgagttaattggatggaagtggtgaatttcagccaaagtggccaaagaaatcctgttcctgtgataatgacgccatcagcctctgcacctctgtcttcccatctgccacatgttgcctgttctccgtgactttggtaatagcttccttgtgtatgaggatgatgtccaggatgttggtctggtatccctgagacagcactaacaggtccatggctgggtytaggtccttcctggactgattggcaaagagctcactgatgttcttgaaggcatctctggtgaagtggatggtct

SEQ ID NO: 713275 - DNA, 579 bp, Homo sapiens
ttaaagaaagacctgtggagagagaattttggaattttcctaattccacatgttctccctttgtatctctaatgcaaagctcctcagaggtttaattataaatcatagtcacaatttagcaaaatacggatataaggaaggtatccagctgatacaatgaaagacaaaagcccttataatttctggccagtaggaaaaaaggtaaaaagacaaaattaggtcacagataaatgttctcatttactcctcagagtagaaaacctgggtgtgtagggtatagaaatagtcagagtgaagaggattagaagtgaagaggaaggtgacagaatcttyactcaaaaacctcagactgattgatggaaaatatgggagctcttgggccattgatttccattcagtattcacacatcacggaagtgcagggtgaaatggggtgaagagaaagagactagccagatggggtagggatagcacttccaacatttcctgagctcctatgtgacagggaggagcccccagttcctgtgtgctctgagcgggacctggaggataactggaaattgagaataatgggactga

SEQ ID NO: 713276 - DNA, 1601 bp, Homo sapiens
aacagtcagggactaagtaaaagtaactaatgagggaatgttagtgtcaagtacattttatttatgtattccaatgatgaaaaacaaggattaactagaaaaaaaattggattaattcatgttttctggttacagtgaatctttgggtttttttttttttttttttttttaagacagagttttactcttgttgcccaggctggagtgcaatggtgctatctcagctcactgcaacctccgcctaccagggtcaagctattctcctgcctcagccttccaagtagctggtaatataggcatgtgccatcaccacgcccagctaattttgtatttttagtagagacagggtttctccatgttggtcaggctggtctcgaactcccgacctcaggtgatcacactttagcctcccaaagtgctgggattacaggcgtgagccactgtgcccagcctacagtgaatcttaagatgagttttcaaggggatgactattcagatagacattagggaaatcgtatgagcaaaggtgtagagatggaagcaagaaatgttttggcagaaatatgaaaactgatgagctttttacatgaaacataggactgactgctatatttgttctccttggttgtcaattcagttcaactgcatttcttttggaaaaagggaaatcagagaaatccttaggcttgggtaaaatactttgatttcaagaggtcctctctaggattgttagcccacaagaaatggatgcatttcataaatacttttatacctttagagtcagttaatattgtaaccataaagcattcatgtcatagaaattaatacacagcattatttaagtcagataggaagaaaaaccactccttgtagttgctagtcttcaaaattaagctgaaagattatgctcttttccctcaagttttataagcttttattttgtagtgatatgaacttatgtcagtatcaactagtttatagaaacctccacttctgagatagattgtcatatggttggtaactactgtttatagagtttaaatctgctaacaattttgattaaggggtaaagtgaaaatgcatgttagttaagtctccagcttcaattgtccatgtacttacaaacaacaagcagtgagcagwggcccccaagagggaaaacacctacagtgaaatcttgtacctcagtgagtcagaagagaaaagctttgtttttcacattaactttagattaatgtggctttgttttcaaataccatatgccaagtttaatgtctgttgccttttcctggaaagttcagaaaatcaaacttgtgaaagatcacttgggacatgaagcatgctgggcagggtatctgtgaaatgaacatgcaggatgatggaacgctcttcccatagctttagggaggtaggacggtcatctcgtatcattatctgcaactgcctccacctctcattcattatcatttcccaaactaatatcactaacatttatgggctgctatctatgtgccagacactacttcacacctcttatgcactggctcactcaaccaacataacaatcttgagttagccagttcttttccacattttgttta

SEQ ID NO: 713277 - DNA, 634 bp, Homo sapiens
tcagctaaggatgtatgctgcaggccaggtgcggtggctcatgcctgtaatcccagctctttgggaggctgaggcaggtggatcacgaggtcaggagaccagcctggccaacatagtgaaacctcatctctactaaaaatacagaattagccaggcgtggtggtgggcgcctgtaatccctgctacttgggaggctgaggcaggagaatcgctcgaacccgggaggcagacgttgcagcgagccgagatcacgccactgcactccagcccggggtgacagtgygagactccaaaaaaaaaaaaaaaaaagatgtatgctgcaactatggaataacaaaaagaatagtaaaagaatgtataaccaggggggaggggtgagggggtgagaagaaaaaagacttaatctaaaagaaagaaaggacataaaaataaacagtcaaatggaaaaatgtggtagatttaaacaaaatatcagtaatttgtaattaaatatataaagaccaagtaaaagcaaactatcattaaaaatacaattgtcagacaggtaaatgctctattctgattttgcaacttcatatcctgccattctgtcgattgctcaccagttctaagcatacttagtctactcggttca

SEQ ID NO: 713278 - DNA, 634 bp, Homo sapiens
tcagctaaggatgtatgctgcaggccaggtgcggtggctcatgcctgtaatcccagctctttgggaggctgaggcaggtggatcacgaggtcaggagaccagcctggccaacatagtgaaacctcatctctactaaaaatacagaattagccaggcgtggtggtgggcgcctgtaatccctgctacttgggaggctgaggcaggagaatcgctcgaacccgggaggcagacgttgcagcgagccgagatcacgccactgcactccagcccggggtgacagtgcgagactccaaaaaaaaaaaaamaaaagatgtatgctgcaactatggaataacaaaaagaatagtaaaagaatgtataaccaggggggaggggtgagggggtgagaagaaaaaagacttaatctaaaagaaagaaaggacataaaaataaacagtcaaatggaaaaatgtggtagatttaaacaaaatatcagtaatttgtaattaaatatataaagaccaagtaaaagcaaactatcattaaaaatacaattgtcagacaggtaaatgctctattctgattttgcaacttcatatcctgccattctgtcgattgctcaccagttctaagcatacttagtctactcggttca

SEQ ID NO: 713279 - DNA, 1135 bp, Homo sapiens
gtaatctattttctaccatctagtgtatgccagtcaaagaatgaaaaaatgaaatctttactgagcatctactacgtgccgagtgatcacattgctagttttcaagatttgtaaaacatggttcctggcctcaaagagaatctggtaaaaattaatatagttttatgtcatctggtgaattacaacctggtagaaaaaaaatcccatgatttcccctttacgtggagatggcatctgagattttcacttcaattctcaggaaccacccttggtctatcctgtgtgtgtgaagtcatgtcctccacccttagaccacccagaaccacttcccaggcaagcaaattcagtagccactaaattacagaacgtgggtgaacattcacgttactacctgaatccatgcctgttctgcagaccaaaccaaactcagccctcccttcctcattattagagcactttgctgttccctacccaaaatattaggctgtcacctttgttcccagcccagagcaatatactgctatcacacggtgcattgtcggtacttgcgcatagcatccaccaacagctactggagttttctttttcttttcttttgtattttattttattttatttttggagacggcgtttcactcttgttgcccaggctggagtgcaaaggtgcgatctcggctcaccacaacctctgcctcctgggttcaagtgattctcccgcctcagcctcccaggtagctgggattacaggcatatgccaccacaccgggctaattttgtatttttagtagacgcggggtttctccatgttggtcaggctggtctggaactcctgacctaaggtgatccacctgccttggcctcccaaagtgctgggattacaggcgtgagccactgcacgtggctcttttttttagagatagggtcttactgtattgcccaggctggagtgcagtggcacggtcatggctcactgcagccttgacctcctgggctcgagcaatctttcytcagcctcctgaggagctgggaccccgcgcggggaccatgcccggctaataagtttactttttcttgtacagattgtgacagttgttttgagtaatcctggagttacagcttttcctattgtaagaaa

SEQ ID NO: 713280 - DNA, 1321 bp, Homo sapiens
gggaaaaaaattagaaactatgtataaaacttaaaaatattcaagtatcaaaaggttatttaggatgaaagttttaaaacaagtcatcagcaagctgctgccaccaagtggagacttatacaaaagttgagcgagtccactgagctgagaggacagaaatgaagtcacctgtgctggggcaggggcagggacactgggggcagggagtgtgtgggcagagaagccagagaagtccaggcctgtggaagccaaacaggagagcgtgggccggaagggcggtcaggatcgggggacgaggtcgctctccctggagaacgaaccctaaagtgcgtagcctggggttccctccctgggggtcctgtcccccgacgtttcacgggccttctgagctgccttccaaggaggactaacacggcaacaaaagacccatttctgcacaaaaatccttctgggaagaaaaagaagaaagccaagaatggagtcaaaacgctacccagtgctgactaagcctctcaaaccctgttctaagtggagtgtggtttctaagtcagggaaatggaagaggccccacccacacagggacagggccacggcccccacaggatgaagcagcagcgtttattcaagatacaacagtgagggaatccggtcacgttcccttctccccagagagggcacttcttgacaagtgattcagtagaaatcttttagactctataagttaagttcataaaaaccattgctttcaccctgtctccgagggccaggcctggactcagagatgaactggcttggggcgccctcgggtggccrcataaaaaacccacagtctgaggccagcctggggctttcagacctgggcgggatctgcccaggccacctgtccttctgctttgggccgctgtctcttggcagatggcctgacacctgggggtggcccaaggatgcctcagaaaatcttgattcccactctacagatggcccgattagccagaggtttccaggccatctgtccgcctccaggagatggactgggacctttagacatcggtggagaacaggatgctctgtctcttgctgtccagggcagggatggcctccagccgcaagaagtacagcagcacctcgacctgccctcgcagagtggggaagaggagagtggctcagagcggggctcacagctgctggtggggaggtctttggggcccaagtcccaagtccacctcaggtgctagaaacccctgctggtgtcatgaaccccttacagtgagacgggggtggggtggggtcctgacaaggcatgacttgttgggtggggggt

SEQ ID NO: 713281 - DNA, 1321 bp, Homo sapiens
gggaaaaaaattagaaactatgtataaaacttaaaaatattcaagtatcaaaaggttatttaggatgaaagttttaaaacaagtcatcagcaagctgctgccaccaagtggagacttatacaaaagttgagcgagtccactgagctgagaggacagaaatgaagtcacctgtgctggggcaggggcagggacactgggggcagggagtgtgtgggcagagaagccagagaagtccaggcctgtggaagccaaacaggagagcgtgggccggaagggcggtcaggatcgggggacgaggtcgctctccctggagaacgaaccctaaagtgcgtagcctggggttccctccctgggggtcctgtcccccgacgtttcacgggccttctgagctgccttccaaggaggactaacacggcaacaaaagacccatttctgcacaaaaatccttctgggaagaaaaagaagaaagccaagaatggagtcaaaacgctacccagtgctgactaagcctctcaaaccctgttctaagtggagtgtggtttctaagtcagggaaatggaagaggccccacccacacagggacagggccacggcccccacaggatgaagcagcagcgtttattcaagatacaacagtgagggaatccggtcacgttcccttctccccagagagggcacttcttgacaagtgattcagtagaaatcttttagactctataagttaagttcataaaaaccattgctttcaccctgtctccgagggccaggcctggactcagagatgaactggcttggggcgccctcgggtggccgcataaaaaacccacagtctgaggccagcctggggctttcagacctgggcgggatctgcccaggccacctgtccttctgctttgggccrctgtctcttggcagatggcctgacacctgggggtggcccaaggatgcctcagaaaatcttgattcccactctacagatggcccgattagccagaggtttccaggccatctgtccgcctccaggagatggactgggacctttagacatcggtggagaacaggatgctctgtctcttgctgtccagggcagggatggcctccagccgcaagaagtacagcagcacctcgacctgccctcgcagagtggggaagaggagagtggctcagagcggggctcacagctgctggtggggaggtctttggggcccaagtcccaagtccacctcaggtgctagaaacccctgctggtgtcatgaaccccttacagtgagacgggggtggggtggggtcctgacaaggcatgacttgttgggtggggggt

SEQ ID NO: 713282 - DNA, 1473 bp, Homo sapiens
ataaaggtcaccaggattctcctgatttcttgtttcccaagatagggtctcttccttcccccacaggccggttccttcacaggaggagtcaggggctccgcaggccgcttctcagagcccatatgctcccggtgtcactgctcccctcccgtggccctgcacagggtctgctgagtgatgccctccagcactgtgctgggcactgacatccaacctgccagctcacgtcaagaaactccaccatcctctggaaagcccgacagtgccctgagcaggtgccggggagtctcacaaagcacagaatccgggtcccggagtccccagagtccagcttcttgccagggaaatctctttggagattgctgagtgcttttcgggggcgtctacgcgttcccttggcgctgtggaacgagccagtgtctgtggggcgtcagctgacttcacgcggccctgtgttccggccgctttcagcgatgcctgtccttgctagttcactttctggctttgagatttctcactggcagagagaatcgaaacacagagaggcccgcacctccctcctcctgcatcgcgaacgctgcacaagggcagcctccagggcacaagggcagcctccgcagcacagccctgcggtttgttgcttcagatttttttttaacctcaaatatgcctaaaaggaaaaacaatgcctcgtggtccccggcatcctgtgggtctcagggcacccccgacacctcccgacattattcctgcacccttgatgctccgccggatttctctaaatggccgcgtggattcccttttccacactgttggtggaattgtgacaggtgctgagctctgatcctgacacgtctgcactggggagcccgccgtcctctcgcgggacttttgcccacacctgtgtaactgaggactcacacctactccttttaagtctaaagtaaatacctgctgattctcagtgtccttttgttcctttttatgaactccatgacaatactgccaatttttaagtctctgctgaacatrttgaaggaggaaaagaagaaaaagcctgcttcagccagatgtccatcaaatgccaggtctgagttatgttttgagccaagctctgggcctcccaagtctgtcaggccagggcgtggagacagttggagaagctgccttaataaaggcacagaataacagagaaagcccgtttttatcttcatgggagacaaaaagggtttccaaacacaaaaaagaagtcctttaaaattaaattcactagatgaaggatatgcaaattacctgaagaagcggaaccctataatgttctcaaaattctgcaatagcctatttaattagtattttaatttatcagactaattctttgcacttgacaatttatgcagcattccatataattaagcaggcagctacagtggaataattttgcctactctctttatcctcgttattttaacctga

SEQ ID NO: 713283 - DNA, 1565 bp, Homo sapiens
tctggctggaaggttcccaaacctaggccagggtgtgaatgccaggggccctgtgagtggtgagtgatggttgctgggtgctgggggctggcgctgttcccgccgcgccctccatgaagctgactctcagtcctgctctctgacaccgggctgtgctcagcagccacgagctgaccacgcggtgaggctgttcacttttctccctgactccagctctccccacatgcagctcatccccgacatgggctcttatcccaccaaccgcttctaaagacctgcagaagctccctagtcacaggacgtggcgagcccaatactcacgtctgcccctgacttctgcactaggccctgcctcagccactggcctcctgcccctcactgtcggcctcaggcccaggctctctgtgtagaggcctcctggcttccccaccccgtgctgctccccacccggtgctactcccctggctgagcgcccacacttctttccccttttccaaatcccacctgcaggtggtggtctctagcactcctcttggttcatgggccttgactgacagctttctsctgcagccatcctctccacaattctgggagcgtcgactgtgctcactcaacactccctttaacaaagtgacatcagatgtttgggccctacttgcatttaagccatccagtgcattccacataaaaagcgtgcacctggaggaaactaaataatcacaaccaatcactctttttttagaaaaaagcagcagctctctcaatgtagaccaatttatcggtctaaactagagagaccgggcaagccacttccatcttgcgagtttagcatatttgcctgttgacacctacacttggaggaagccattctgtgtgtgtggtgtgccttcacaagtaatttctatggaaaacagccgtcagacagtcatcctggcccaaggtgacctcattaccagaatttgttctagttgtcattagacatatcacactatgtcactcaaaatgggaaagaaagagaagatactgacatgccgccccagtgattagagatgaaaatgtagttataccatatatgatccctgcttggagactatacggatagggtttaagattcaggcccccctcagatccatcactgtggtcctgaagcctctgtccttcttctgttcttttaaacttctctgtgtagatacagcaagtgtgttttctactcactgcacagccagcgctgctcttgaacaaactcctgagggaggtgcacggaaaccatgcatccaaatccggagagcagggagaccagccggatagcccacctggctgacgagacccggcctcgctcagaaagctcctccaagatgccaccgcgtgtgaaatgcttggggttgaatctcgagagcagggagaccagccagacagcccacctggctgacgagacccggcctcgcttagaaagctcctccaagatgccaccgcatgtgaaatgcttggggttgaaatgtaacgaatctctcactactgacaagagaaaggccagaacacaaacacacttcctgcttccagatgga

SEQ ID NO: 713284 - DNA, 965 bp, Homo sapiens
aattgtagtctagaaaaaataaatatttatataatccttttgtagaatactctgatagaatttgcaaatattgcaaatatcagctattttaaagtttggtagaattgtaaacattcttggttgcatgtggaactattataaagtattgatacaaccttttaattattatcgtcttttcctccatttattcttaaatcaatttagataagctacattttactaggaattagtccagtgcatctaaatttgcattttattctcaaaatgtttggtttattgtcttgttatttaaactatcacatcagtaaatttgagctgtttttctttcttaattttgtttattggtgtgttcttttattcttgaaatactagaatttgcctattttattgttttattttaaagaatatttgggcttacttttaaatatcatattttaatattctgtgtagtaattcatcatatgcctggtaaggagaatttaagttaataaaaataaaaaacttagaacaatgctcagcatacagtaatcgctatgtgggtgtcagccaatactattatttctattttttctgctcttcatttcattaacatttgttattatttcatacattcttaagtttgttgctgagtttattcatcttgtttaaataaataaaaatatttagtgttattacactccctctaaatactactttagctgtatcctacacggttttaactatttttgttattggtcgttttcaagtatttttaaagtttcattattgtttctttgagccatgagttacatttacaagtgtgtttytaaaattttcaagtatttgatcatcttcaagttgtttctttactaatgattgttaacagaatcattgtgatcagaaaatatggtgtacataaactcaatctcttgaaatttgctaaaagttactttatgcctattatttagccaccttttgtaaatatt

SEQ ID NO: 713285 - DNA, 2396 bp, Homo sapiens
aataaataaattattaattttaaaaaagcttcagaaagagcaatttctaagtggtaacagtaagtaaaaaaagggaggaaagaaagagaaagaaaataaaagatgaatgcatttaagattaaataaaagtgacaaaccagaggctattttcaaagtcaaaattatattaaataatgtagaatgttaccaaagaaaaaatgaaaaaattacagagcacaaacttactaacagaagtaaaacttggttaagaactggaatcaaaatgtagggtcacggaacatagaataccagatttatcatatttctggtattaaaaattagaggtacataaaatgtttcaatgcagtggctctgtaaatcaatggacattgttaaaagataaaatttcagtagtctagagcaaattgtcaacaatgacaacaaatacaataaaaataagaaagactgattgtaaagatgtccttaaaatttaaattatgccactctcgaacaccagttccttggttactcataaaaaccttaatcacagagtaagaattatgacacattatcaagaaatgcatctaaagagaaataatatattttaaaatattttttcatatataatactagtgggtaaaacggaataaccaccttgacaaaattatctagcaaatttcacattcatttaagttctggtgaaatggatttatttcaagatattttacagacaccaagggagagactagttttctacttcaaatcccacataatgcayggattcgccataccctgaaaatgctgatgacccagaaatcattagggaggtagaacaattaataaagaaataggaaataaatcatccttgcaaaaatatccatttgtcagattatggaaaatctgacaaacatgcctgactacttatgtctcaaatcacagaggatttaaaagaccataagggcccaccttgttaaatgcaatataaattgtcccaaaatactcattgtcaaggagaacttgatagcatttttattgtatgaaacaaatgttaatttttgataatttctccaaaatgtataattgctgtcaataaaaccttttaagattaagcaacagcctttcttttccctcatggttctgttatttttccttaaatgcactgtaattaagttctccccaggtaaacaagcttccctaccaggcaggtattcacagttccacctagttctcaaaaccacattctcattagctgtgtcctgaccgtttagttctacacatacagttatattctaattcacagaacttttttttttttttttttttttgatacggagtctcgctctgtcgcccaggctggaatgcagtggcgtgatctccgcttactgcaagcttcgcctctcgggttcacgccattctcctgcctcagcctcccgagtagctgggactacaagtgcccaccaccacgcctggctaattttttgtattttttattagagatggggtttcaccatgttagccaggatggtctcggtctcctgacctcgtgatccgcccgcctcggcctcccaaagtgctgggattacaggcgtgagccaccgcgcccggccgacagaacttttaattacaactctaacctgtgattccagaaacaagattggtgtgtcagtcctgctgatactcagacaccacttaactttttggctggttcccacatacaagtaaacaaacactttgcaagagaagttggagacatgctcattggtttttgcatatctacctactgatattcaggcagctaaaattctctaagatgctttgtacctagaagacattaaaacactgaaatttgagaatatccttatattaatccttgactttttgtgaacttgactagtagagcttctagcccattagagaccagagagagcatacagaggggtctggttgacaatcatgaaatatgaagcaatttgacatagccatttgtcgattcaatctcaattctgttttaagcttcatttaccttaaaagaggctcacttacctctactcgtttactgcatttgatctaggttttataacggcagcttgacaaaataaatgtctttacctgaaggctttttttttaaactaaagaacccgttatttagagcaaataaatgacaaagaacattacatagagtatctaggaagtgatgtaggttaagccttctaatctagattttcttttagtttgaaaataaaaatcataccagataatttcaataacaatttcctttaaacaagaaatagtaagcatgacttctattgcctttctttaaataaattttcttggaaaaatcaatagtcaccacagaagacattttccagtaggacaaacttgatactaaatatagtagtataaaatatatggcagta

SEQ ID NO: 713286 - DNA, 2396 bp, Homo sapiens
aataaataaattattaattttaaaaaagcttcagaaagagcaatttctaagtggtaacagtaagtaaaaaaagggaggaaagaaagagaaagaaaataaaagatgaatgcatttaagattaaataaaagtgacaaaccagaggctattttcaaagtcaaaattatattaaataatgtagaatgttaccaaagaaaaaatgaaaaaattacagagcacaaacttactaacagaagtaaaacttggttaagaactggaatcaaaatgtagggtcacggaacatagaataccagatttatcatatttctggtattaaaaattagaggtacataaaatgtttcaatgcagtggctctgtaaatcaatggacattgttaaaagataaaatttcagtagtctagagcaaattgtcaacaatgacaacaaatacaataaaaataagaaagactgattgtaaagatgtccttaaaatttaaattatgccactctcgaacaccagttccttggttactcataaaaaccttaatcacagagtaagaattatgacacattatcaagaaatgcatctaaagagaaataatatattttaaaatattttttcatatataatactagtgggtaaaacggaataaccaccttgacaaaattatctagcaaatttcacattcatttaagttctggtgaaatggatttatttcaagatattttacagacaccaagggagagactagttttctacttcaaatcccacataatgcacggattcgccataccctgaaaatgctgatgacccagaaatcattagggaggtagaacaattaataaagaaataggaaataaatcatccttgcaaaaatatccatttgtcagattatggaaaatctgacaaacatgcctgactacttatgtctcaaatcacagaggatttaaaagaccataagggcccaccttgttaaatgcaatataaattgtcccaaaatactcattgtcaaggagaacttgatagcatttttattgtatgaaacaaatgttaatttttgataatttctccaaaatgtataattgctgtcaataaaaccttttaagattaagcaacagcctttcttttccctcatggttctgttatttttccttaaatgcactgtaattaagttctccccaggtaaacaagcttccctaccaggcaggtattcacagttccacctagttctcaaaaccacattctcattagctgtgtcctgaccgtttagttctacacatacagttatattctaattcacagaacttttttttttttttttttttttgatacggagtctcgctctgtcgcccaggctggaatgcagtggcgtgatctccgcttactgcaagcttcgcctctcgggttcacgccattctcctgcctcagcctcccgagtagctgggactacaagtgcccaccaccacgcctggctaattttttgtattttttattagagatggggtttcaccatgttagccaggatggtctcggtctcctgacctcgtgatccgcccgcctcggcctcccaaagtgctgggattacaggcgtgagccaccgcgcccggccgacagaacttttaattacaactctaacctgtgattccagaaacaagattggtgtgtcagtcctgctgatactcagacaccacttaactttttggctggttcccacatacaagtaaacaaacactttgcaagagaagttggagacatgctcattggtttttgcatatctacctactgatattcaggcagctaaaattctctaagatgctttgtacctagaagacattaaaacactgaaatttgagaatatccttatattaatccttgactttttgtgaacttgactagtagagcttctagcccattagagaccagagagagcatacagaggggtctggttgacaatcatgaaatatgaagcaatttgacatagccatttgtcgattcaatctcaattctgttttaagcttcawttaccttaaaagaggctcacttacctctactcgtttactgcatttgatctaggttttataacggcagcttgacaaaataaatgtctttacctgaaggctttttttttaaactaaagaacccgttatttagagcaaataaatgacaaagaacattacatagagtatctaggaagtgatgtaggttaagccttctaatctagattttcttttagtttgaaaataaaaatcataccagataatttcaataacaatttcctttaaacaagaaatagtaagcatgacttctattgcctttctttaaataaattttcttggaaaaatcaatagtcaccacagaagacattttccagtaggacaaacttgatactaaatatagtagtataaaatatatggcagta

SEQ ID NO: 713287 - DNA, 2396 bp, Homo sapiens
aataaataaattattaattttaaaaaagcttcagaaagagcaatttctaagtggtaacagtaagtaaaaaaagggaggaaagaaagagaaagaaaataaaagatgaatgcatttaagattaaataaaagtgacaaaccagaggctattttcaaagtcaaaattatattaaataatgtagaatgttaccaaagaaaaaatgaaaaaattacagagcacaaacttactaacagaagtaaaacttggttaagaactggaatcaaaatgtagggtcacggaacatagaataccagatttatcatatttctggtattaaaaattagaggtacataaaatgtttcaatgcagtggctctgtaaatcaatggacattgttaaaagataaaatttcagtagtctagagcaaattgtcaacaatgacaacaaatacaataaaaataagaaagactgattgtaaagatgtccttaaaatttaaattatgccactctcgaacaccagttccttggttactcataaaaaccttaatcacagagtaagaattatgacacattatcaagaaatgcatctaaagagaaataatatattttaaaatattttttcatatataatactagtgggtaaaacggaataaccaccttgacaaaattatctagcaaatttcacattcatttaagttctggtgaaatggatttatttcaagatattttacagacaccaagggagagactagttttctacttcaaatcccacataatgcacggattcgccataccctgaaaatgctgatgacccagaaatcattagggaggtagaacaattaataaagaaataggaaataaatcatccttgcaaaaatatccatttgtcagattatggaaaatctgacaaacatgcctgactacttatgtctcaaatcacagaggatttaaaagaccataagggcccaccttgttaaatgcaatataaattgtcccaaaatactcattgtcaaggagaacttgatagcatttttattgtatgaaacaaatgttaatttttgataatttctccaaaatgtataattgctgtcaataaaaccttttaagattaagcaacagcctttcttttccctcatggttctgttatttttccttaaatgcactgtaattaagttctccccaggtaaacaagcttccctaccaggcaggtattcacagttccacctagttctcaaaaccacattctcattagctgtgtcctgaccgtttagttctacacatacagttatattctaattcacagaacttttttttttttttttttttttgatacggagtctcgctctgtcgcccaggctggaatgcagtggcgtgatctccgcttactgcaagcttcgcctctcgggttcacgccattctcctgcctcagcctcccgagtagctgggactacaagtgcccaccaccacgcctggctaattttttgtattttttattagagatggggtttcaccatgttagccaggatggtctcggtctcctgacctcgtgatccgcccgcctcggcctcccaaagtgctgggattacaggcgtgagccaccgcgcccggccgacagaacttttaattacaactctaacctgtgattccagaaacaagattggtgtgtcagtcctgctgatactcagacaccacttaactttttggctggttcccacatacaagtaaacaaacactttgcaagagaagttggagacatgctcattggtttttgcatatctacctactgatattcaggcagctaaaattctctaagatgctttgtacctagaagacattaaaacactgaaatttgagaatatccttatattaatccttgactttttgtgaacttgactagtagagcttctagcccattagagaccagagagagcatacagaggggtctggttgacaatcatgaaatatgaagcaatttgacatagccatttgtcgattcaatctcaattctgttttaagcttcatttaccttaaaagaggctcacttacctctactcgtttactgcatttgatctaggttttataacggcagcttgacaaaataaatgtctttacctgaaggctttttttttaaactaaagaacccgttatttagagcaaataaatgacaaagaacattacatagagtatctaggaagtgatgtaggttaagccttctaatctagattttcttttagtttgaaaataaaaatcataccagataatttcaataacaatttcctttaaacaagaaatagtaagcatgacttctattgcctttctttaaataaattttcttggaaaaatcaatrgtcaccacagaagacattttccagtaggacaaacttgatactaaatatagtagtataaaatatatggcagta

SEQ ID NO: 713288 - DNA, 933 bp, Homo sapiens
  misc_feature 625, 626: n = A,T,C or G
tgccctgcactttaccttatatcctttaaattttagctgttaatacggtatatctcatgttttgttttcatacacaaagagttggtagataataaaataattaaattgtacctgaagaaaacattctctctagcagtgtcatctaaaataagaggaacatttattttaaaattaagaatggcaggggttttttttgcctgaaaataatgtctttgaggctatagacaactttcagtggttcaggggcctgcctgctcatctaatttatgaaggattcatggagtaatatctcctctgtctctgtgtcatccatgatctcttgtcggcttcactctaatcagcatgtctatggaagaaaaaccaaactgtattgaattagttctctttttcttcaaataacttgaaaggaaagtcctgatgtactatattatttgacttatatgattcaacacctttgatgtcagggataggcttaatggaagaagaaatttatgatacattagttccattaaaatgcacctataaatgtcctcttttgagaaagtggctgtcattatccttcacccactttttgatggggggtggttggtttttttttcttgtaaaatttgttggagttcaatgnnagatcttgggtattagccctttgtcagttgagtagatggcaacaatygtctcccattctgtaggttgcctgttcactctgatggtagtatcttttgctgtgcagaagctctttagtctaattagatcccatttgtcaattttggcttttgttgccattgctttggtgtcttagacatgaagtccttgcccatgcctgtgtcctgaatggcattgcctaggttttcttctagggtttttatggttttaggtctaatgtttaagtctttaatccatcctgaattaatttttgtataatgtgtaaggaag

SEQ ID NO: 713289 - DNA, 619 bp, Homo sapiens
atcccagcactatgggaggctgaggtgggtggatcatgaggtcaggagatcgagaccatcttggctaacacrgtgaaactccgtctctactaaaaatacaaaaattagccaggcgtggtggtgggcacctgtaatcccagctacttgggaggctgaagcaggagaatcacttgaacccaggaggcggaggttgcagtgagctgagatcacaccactgcactctagcctgggcaacagagcaagacttcatctaccaaaaaaaaataaataaataaagtgagttatctgcacaagctctctctttttgcttgctgccatccacataaaatatgacttgctcctctttgcctttcatgatgattgtgaggcctccccagccatgtggaactgtaagtctaataaacctcttcttttgtaaattgcccagtctctggtatgtctttatcagcagcatgaaaatggactactacagtgttaaatgcaagagccaatggataaaggtcaagtgtccaatggatacagttcctagatataagtcttagggatgcagggatagggcttcaaataacaaatgtggtttaaaaatgtgccttggtcctgtataaggcaaagagttgaa

SEQ ID NO: 713290 - DNA, 543 bp, Homo sapiens
aaaaattagccgggtgtggtggcaggcgcctgtagtcccagctactacggaggctgaggcaagagaatggcatgaacccgggaggcggagcttgcagtgagacgagatcgggccacagcattccagcctgggcgacagagcaagactccaactcaaaaaaaaaaaaaaaaaaaaaaagaggcgccccagcttctgcaggatatccacaccgccaatttcagagrcaacaagaactgacatgggtttcagtctgcctttgtgggattgcagctcatgcttgtgggttccagcatgactttgatctgccactctttatatccattttttttttcctgactacttgccctctggaattaaagttccagcatcagacacaaaggtaacagccacgcatagattgcctaaccagcttccacaattgtataagagaaatctcttagtgttatagcttttctagtaaaatcctcactgataaaataagcaacgcccccaagcttttctccaaactgtctctctgtgtgtgtctgtatagagagagagagc

SEQ ID NO: 713291 - DNA, 628 bp, Homo sapiens
aaataaatgaatcattattctgtatagaaaggagtgtttctgtgtctttgtttttacaaaacagcatcggcttccaaattctacggyagtcactgcagtgggcacttctaatgtaatagaacagcagcaacaacaaacaaagatctagagacaaaatccatatgaaaaacaacccaatgcaaccctaaacaataatgatgaatcagtaaaggaaattaaagagctcggtgatagagaggcttgattttattgacagcacattggtgattttcttttgacttgagtatgaactaatgctcccttctgtttttacttgaatatggtcccagctgcagtcaccctactgctagaaatggaaactttctaaaaaatagagctaatccaatcattctctttcaataactcccaagttcctatggaatacaattattatctctaaagttcttatatcccaaatgctctaacaaaattggactaagagtacttctatttatttaccaaatattccccttctctgggcctttactgacattacactttctgtttggaattccccagcctcaccttggcatctctacatctgtattgtttatatttcgtatcttctgtatattacagtatttcagta

SEQ ID NO: 713292 - DNA, 1233 bp, Homo sapiens
tggaacccttgcacctggaaaaacaagttgtgttgatgagtagcaactaatacctactgttgatggacagaaatacctgaaacactgactctttatatggtcataaaaatatacagccataaataagcaaccacttaatgagtagcacaggtactacaatgagctgtggaaacttaatgggaacgtaacaatccctggaattctagctttcaatggatgctgtgatgagaaaccatgaagatgttattccaaagagcttgcatatcagaaaaatagcagaggccaggagagagaaaaggcagaatgtcaaacrggagataaaaatcaaccacagtgtcccatcgataagttagggatgtaagcatcggcagggggaggaaggcagggtacatgatggtgcagctaagatgaggtaggatcggcagaaacagagagatggggtgaagattgaggggagaggggagaaggaaggtctaagtctcgagctaatgttcaggtttttgtctcaaattttgtttcactgtacttttggtgggaagaacacaaatgagctttgcctctcccatgtattcctttcccattccacttacaccctcctccctctggaatgatgatatagttgctacagaatttacaaaccatggagaggctgttctctattaccaaggcagtggtatccagcagctgcaggatgggagaatctgtgtctcttggccttttcattgcatgacaggaagcggaacactgagaaaagcattgttaagcgcccacgagagctgaggaaatgccaaactggaactgaaggctgacagacagaacagagacagagtagccagaggtggggctgtctcctcaggtgcaatcggcatcagcatcatttatcactttgggagcacctctagcgtactgggtcctgccttgactgcagtattagctgcatgcagttcatggacccaggatgggaagtgaacacaaagctcagggcaatgaaagccaaggaaaacagctcggcttccaaatgtttttgagatttttccccaatgccttcttcctactctcaaactgaatccaaattccaatgtggacatgtagtttttattttttgctcctacatggcattttttttttttgctttgagagaaataatatctctagaaaccaaattctagatttaaaaaataattagcagcagtacatggacagatattcaaaaatgtttgtggaaaatacctt

SEQ ID NO: 713293 - DNA, 630 bp, Homo sapiens
ggatcattctgtggtgtcatattcagctcagccctcagccctcctgcccaactgcagtccaagcccttggcttttgcacaaaggctagcatttccttgatgggcctcctggctgggttccggttctgcaccagagccccagagatggggaggctccaggagagcaggagagtagctgagaagtgccctttaggggtctgagatgcatgttgggggcagctctctggggaagagaagcagaaggcaggatgtggtaaggtggacagtgagaatctcagccgctgccaccatttgtcaaattggacaacagcccccactrtactttggaccctgctcttaccctcgtcacccttaaaagggtcctggcagtttccagggtgtcctttgggattccagacttggggaggagttggcaggtttcctaggactccagagttgaatataaagcaaaaggaagtgccactaagaacttctgggctttgggaccctacaagaggcgtccccagaagcagcccaggccagtcagcctgggctgagctgcttggctagacactctccatggaacactggggctgactcctgggcagtgggctttgcagggcagccccatcccaaatctgtgcagagcaca

SEQ ID NO: 713294 - DNA, 1760 bp, Homo sapiens
tcacaaagttaagctcaataacctgaaagctttaaaactatgcagtcactcaccttgtagggcaaagagagaggctgcatctgtggctgtctcagatggggcttgtgttattggccttaagtatgatctgtaaccttttaaaatagaggccatgaaaaacaaaaatgcctcttggatttccaaatctatcatgtgcaacctctttccagaattaaaatcatagtcatttattgctaaatccatgagtccatcatctctcggtctctgctgcactgtgaagacatacagtgttagtgttttctccaaactcacaaaayactcatgatggtaccaatataattttgttgtattttcaaaaggacccaagctacctcaactctttgtttacataacttaatcatacgtaaaccttagcaaagcttgccatagcattttgtagtctccgttgagtaaattttatccaaattaaacacaaagctacccgtttatctcactaccaccaggaaaaaaaaagctcaggtcggtcatggtagctcatgcgtgcaatcctagaccaaggcaggaggatcacttgaggctaggagttcaagactagcctgggcaacataagagagattctgtctttacaaaattttttttaagttcatgttctaaaataactatatataagttaataatgattgtaaccgagaaggcaatagaatataagaaagctgttcaacataaatatatatcactcataggctcaccaagtattggcattgttcagaaagaatctgaacaaccatgtcatctatacctcccacaccactactattttgcacatgccctgagaggggaaatgacctgacatacgaataaggagaataataaaaaaggaacataaacccagatctctcaaatcttcatacagaattgtctccattgttctctcaccatcaagtgattatggtgagattatacataaactagtacatttgaaaatatttcaaaaactgcccccctttccctcaaaagttttgcatgttttttttcctttttttttttttttttttttttttttttggttttttgagacagagtcttggtctgtcacccaggctggagtacagtggcacgatctcagcttactgcagcccctacctcccgggctccagagattctcctgcctcagcctccttggtagctgggattacaggtgcccatcaccacgcccagctaatttttgtatttttagtagagacggggtttcaccgtgttggcgaggctagtctcgaactcctgacctcaggtgatccgcctaccttggcctcccaaagtgctgggattataggcatgaggcaccatgcccagccactttgcatgttatgtgcacatacttgctctcacactctttccatatgaatatatataaaacatacatattttatataatacatatatatgtctttttcaaagtggcagtgacattccctcttgtattcattcatgtttttgtcttacatattgaaaacagacttttaaaaaaagggaaagaagaactattgcatttaccctgtgcaaactgagtgcagggcaaatgcaacagttcttctttcccttttttttttttttaatataagtacctgcaggaagaacacacaaggattaaaatataaaaaacaattcttcttcctggacaattcaatgctaaagccattagatagtaaacatgtaattttatagtagagaagtctagtagacaccaccttaatcaagtg

SEQ ID NO: 713295 - DNA, 1760 bp, Homo sapiens
tcacaaagttaagctcaataacctgaaagctttaaaactatgcagtcactcaccttgtagggcaaagagagaggctgcatctgtggctgtctcagatggggcttgtgttattggccttaagtatgatctgtaaccttttaaaatagaggccatgaaaaacaaaaatgcctcttggatttccaaatctatcatgtgcaacctctttccagaattaaaatcatagtcatttattgctaaatccatgagtccatcatctctcggtctctgctgcactgtgaagacatacagtgttagtgttttctccaaactcacaaaacactcatgatggtaccaatataattttgttgtattttcaaaaggacccaagctacctcaactctttgtttacataacttaatcatacgtaaaccttagcaaagcttgccatagcattttgtagtctccgttgagtaaattttatccaaattaaacacaaagctacccgtttatctcactaccaccaggaaaaaaaaagctcaggtcggtcatggtagctcatgcgtgcaatcctagaccaaggcaggaggatcacttgaggctaggagttcaagactagcctgggcaacataagagagattctgtctttacaaaattttttttaagttcatgttctaaaataactatatataagttaataatgattgtaaccgagaaggcaatagaatataagaaagctgttcaacataaatatatatcactcataggctcaccaagtattggcattgttcagaaagaatctgaacaaccatgtcatctatacctcccacaccactactattttgcacatgccctgagaggggaaatgacctgacatacgaataaggagaataataaaaaaggaacataaacccagatctctcaaatcttcatacagaattgtctccattgttctctcaccatcaagtgattatggtgagattatacataaactagtacatttgaaaatatttcaaaaactgcccccctttccctcaaaagttttgcatgttttttttcctttttttttttttttttttttttttttttggttttttgagacagagtcttggtctgtcacccaggctggagtacagtggcacgatctcagcttactgcagcccctacctcccgggctccagagattctcctgcctcagcctccttggtagctgggattacaggtgcccatcaccacgcccagctaatttttgtatttttagtagagacggggtttcaccgtgttggcgaggctagtctcgaactcctgacctcaggtgatccgcctaccttggcctcccaaagtgctgggattataggcatgaggcaccatgcccagccactttgcatgttatgtgcacatacttgctctcacactctttccatatgaatatatataaaacatacatattttatataatacatatatatgtctttttcaaagtggcagtgacattccctcttgtattcattcatgtttttgtcttacatattgaaaacagacttttaaaaaaagggaaagaagaactattgcatttaccctgtgcaaactgrgtgcagggcaaatgcaacagttcttctttcccttttttttttttttaatataagtacctgcaggaagaacacacaaggattaaaatataaaaaacaattcttcttcctggacaattcaatgctaaagccattagatagtaaacatgtaattttatagtagagaagtctagtagacaccaccttaatcaagtg

SEQ ID NO: 713296 - DNA, 1352 bp, Homo sapiens
tcaaattctctccaagataatgtacagaaagatatttatgcattggtaataaagattgaaactttatttcaaacacttttcatttggtttcttttgcactaagatcttattgctcaaagttttttttgaaaattttttcttcttttttttttttttttttttttgagacagagtttccctctgtcacccaggctggagtacagtggcgtgatctcagctcactgcaatctctgcctccagggttcaagtgattctcctgcctcaatctcctgagtagctgggattacaggcacgtgccaccatgcccggctggtttttgtatttttagtagagacagggtttcaccatgttggtcaggctggtctcgaatttctgagctcatgatccacccccgcttggcctcccaaagtgctgggattacaggagtcagccaccgcgcctggactcctctttttttttataatagtcaccatagtaatataaggaattactatattaaaagcccaaacgtatatttatttgacctgaatatttttaaaaaatattaatatcactttaattctattacatcttgctgttaagattttgacttttcttacaccagtgaagatgagaaaatggaaataaagaaatactaggtattattaagcgttaatataattatagtagatctcatttaatctttaaaacaaagtagcgtgaatgttttaatttccaatttatatctaattttcagaggctaatatatttcctagggtcacgcagctagaatattgtagagctaaaacttgaacccagagattctgattgagaaaatagctatgattttattttttaataattttgaaataacgggcagggcaagtatttggggagaggttgtcaaaataagtaagaatttgcctttagagaagcatattcctgaggttaaaagcacaataaccttcataggtgggaattgaacaatgagaacacttggacacagggyggggaacatcacacactggggcctgtcatggggtgggggatgggggagggatagcattaggagaaatacctaacgtaaatgacgagttaatgggtgcagcacaccaacatggcacatgtatatgtatgtaacgaacctgcacattgtgcacatgtactctagaacttaaagtataataaaaaagaaaataattaaaaatgaatataaataaaaaaagcacagtaacttgaattagtctggacagtaaacagagttaggtttcttcttttaactttggtgtagaagtctctcctctgttttattttgctatcatccatctcctaggctctagatccatggcatgtcttatagaaagatactaaca

SEQ ID NO: 713297 - DNA, 1352 bp, Homo sapiens
tcaaattctctccaagataatgtacagaaagatatttatgcattggtaataaagattgaaactttatttcaaacacttttcatttggtttcttttgcactaagatcttattgctcaaagttttttttgaaaattttttcttcttttttttttttttttttttttgagacagagtttccctctgtcacccaggctggagtacagtggcgtgatctcagctcactgcaatctctgcctccagggttcaagtgattctcctgcctcaatctcctgagtagctgggattacaggcacgtgccaccatgcccggctggtttttgtatttttagtagagacagggtttcaccatgttggtcaggctggtctcgaatttctgagctcatgatccacccccgcttggcctcccaaagtgctgggattacaggagtcagccaccgcgcctggactcctctttttttttataatagtcaccatagtaatataaggaattactatattaaaagcccaaacgtatatttatttgacctgaatatttttaaaaaatattaatatcactttaattctattacatcttgctgttaagattttgacttttcttacaccagtgaagatgagaaaatggaaataaagaaatactaggtattattaagcgttaatataattatagtagatctcatttaatctttaaaacaaagtagcgtgaatgttttaatttccaatttatatctaattttcagaggctaatatatttcctagggtcacgcagctagaatattgtagagctaaaacttgaacccagagattctgattgagaaaatagctatgattttattttttaataattttgaaataacgggcagggcaagtatttggggagaggttgtcaaaataagtaagaatttgcctttagagaagcatattcctgaggttaaaagcacaataaccttcataggtgggaattgaacaatgagaacacttggacacagggtrgggaacatcacacactggggcctgtcatggggtgggggatgggggagggatagcattaggagaaatacctaacgtaaatgacgagttaatgggtgcagcacaccaacatggcacatgtatatgtatgtaacgaacctgcacattgtgcacatgtactctagaacttaaagtataataaaaaagaaaataattaaaaatgaatataaataaaaaaagcacagtaacttgaattagtctggacagtaaacagagttaggtttcttcttttaactttggtgtagaagtctctcctctgttttattttgctatcatccatctcctaggctctagatccatggcatgtcttatagaaagatactaaca

SEQ ID NO: 713298 - DNA, 1800 bp, Homo sapiens
tgcatgggttactctctcacctgcttcaagccatgcccaaataccaggttttcacattaaagagctatacttgagcatcacagcaatgtgctgacaacacgtaacaaaagcttcctgtaaaagaactgaaatggaagagatatttagtgctcaatgcttttactgatgctgttgtttccttatattaaactatgctaacttaacacatctttgttgtcttctatgatttgatatctaatgaaaaacattatgctattacattattatcaaagctatagctgtaaaaagaatttgagcagccagatatgaaaatgcagatgacaccccagaatatttatgttgttgatgttgctcaatacaattcatttcatggttcaactcagcacaatatcctacttgaacaaaataataaagagaaaaatgccaaataatagaggagaatgtagtagactctaaagcaacagtttagttattacaccaaaaacaagtgctatctgaataaatcataaacttgacagattttgacatgaaggagctaatctagtagaagagtcataattccaagtctctctcttgtctttttttatttcaaggaaattttgattgaatgccaactgaagcactgagttgcatgctgcaaaattttggaaatatttgttattttttctcaataaaacagtaaaaacaaagtagtatatgatctaaaagtaaatctgctaacaaagcagaaaccaacctgtaagcacttctctgcctcatgcctgtctcacactatataagtaatcttttacctgaacgggatattagctacatcattgcttttaaccaagatctgttttcttcagtgttgacatgcatttaattttcctggccaatgagaagtgtggctaggaaaactgaaaagggtatcaaatatggccattacaaatatggccacaatcatcactcctttccttatccatgccattttccattgattttcaacttctcccatcaagagatggagtctgtttcttcacatctttatctgggctggcctggtaaatasaatgtggtagaagtgacaggatgctattttcaagccacgaactcaacgcccttctgtgtgactctttcagaactctgccaccatcatgcctctcttcttcatgtggtttctcatccaccatcagtctaaaccagccagcagcagaccctacatacatgatcagctcagaaaaaacatccagctgagctcagtccagactgccagtttgcagatatgtaggctaaaagaggagctgctttaagccactatgtttgcgattgattgttacgtggtaattataaggtagcatcttgctttgctgaaaagtagagaaaaaagatactgatttcattttgaattgcagcttgagttttaactggaataagcagaaggtccctttggagtcaacagattagataaaaagagttgggttgtttgttcctcctagtgtttcctcactaatcacagttctagataccagtggctggcactcatgcactacgtagtggtacaggaagtccatcacccttaaagcagaggagctctgagagctgaatgggcatttccaaatctactcagacacctaagagaaaaacaccatgtttaatcactgtcacacaaatgtactacattgattgtcaacttttgtttgattaaatcactcttttgtggaaaaggaggctaaaattcttatggcacaaaattggctcacacaaactaaaggacaaaatattcataaatcacacaccacaactagaattgaattattttgg

SEQ ID NO: 713299 - DNA, 1227 bp, Homo sapiens
tgaacagcattttcttttcaaataccttgtgagaaaaaaggagcagagttaacgatgtgaacttttatccctccagctcttcaaaacaaactcttcagctaaaatgaacgctaagattgtcagcgaatgagcaaagctatgcttttattttattttatttttttaaagctatgcttttagattcaggaatcgaactaaagagactgctgagttcgccgataggaagccagtcaagggcctcctgtgagccaggccctgtgataaagggataaagtgttrctcacacagagtccagccaaacaaaggccaaactgagattcagaactgacaccgcacaacgctgacaccagctgggatctaatgcaaaagaggcggtaactgcacagagaacgcgcatatcacagagacaaagtcggtggatcctagcaaaggctttaagtcttgactgcaactgttatcaacttgtccacacaacgtctgaggatacaaatgggtcccagattaaatacaaggtgccctgtaaatcttgtgttaacactcacgttatgatgaaccagcctagaaaagcagagggttaagataaaaggataaaaagtcccgcagcaatatttagtaagctgtgaaggatttttgtttttccatcatctctgtagagagggtcacgtagaaaagtcattttcttattgtttcaaagatcacataatttaatttagtctacctcctcctcctcatcagcttcaatagtaccagctgaccatgaaatcagccctggccttagaggtcaagatggtccagtcacatatggcttcagactgccatgttcttcaacgggtccccagcacccaggcaggcatgtcttgagagtaaaccagagctgcccagcttgctttgctggttctaacagcaacccctccaccctccctacaggcaggcctaccacatactcacactgacctgtggcctctactcactcgccccctggaagaggaagtctcttccaacagaaaaggcaggtgagcttcaaagccaattcaggtgtccagtcccctcaaccatcttctattctgcattataaagggaaaaaaagtaaacaaaccacagttagagacatttcctgtaagatatgaacttacaggaaggtactcagtgcctcaagtagatttaagacagtgattccaagttaaatgccggaagtagcagaagctttcttgcaatccctaatcatac

SEQ ID NO: 713300 - DNA, 1227 bp, Homo sapiens
tgaacagcattttcttttcaaataccttgtgagaaaaaaggagcagagttaacgatgtgaacttttatccctccagctcttcaaaacaaactcttcagctaaaatgaacgctaagattgtcagcgaatgagcaaagctatgcttttattttattttatttttttaaagctatgcttttagattcaggaatcgaactaaagagactgctgagttcgccgataggaagccagtcaagggcctcctgtgagccaggccctgtgataaagggataaagtgttgctcacacagagtccagccaaacaaaggccaaactgagattcagaactgacaccgcacaacgctgacaccagctgggatctaatgcaaaagaggcggtaactgcacagagaacrcgcatatcacagagacaaagtcggtggatcctagcaaaggctttaagtcttgactgcaactgttatcaacttgtccacacaacgtctgaggatacaaatgggtcccagattaaatacaaggtgccctgtaaatcttgtgttaacactcacgttatgatgaaccagcctagaaaagcagagggttaagataaaaggataaaaagtcccgcagcaatatttagtaagctgtgaaggatttttgtttttccatcatctctgtagagagggtcacgtagaaaagtcattttcttattgtttcaaagatcacataatttaatttagtctacctcctcctcctcatcagcttcaatagtaccagctgaccatgaaatcagccctggccttagaggtcaagatggtccagtcacatatggcttcagactgccatgttcttcaacgggtccccagcacccaggcaggcatgtcttgagagtaaaccagagctgcccagcttgctttgctggttctaacagcaacccctccaccctccctacaggcaggcctaccacatactcacactgacctgtggcctctactcactcgccccctggaagaggaagtctcttccaacagaaaaggcaggtgagcttcaaagccaattcaggtgtccagtcccctcaaccatcttctattctgcattataaagggaaaaaaagtaaacaaaccacagttagagacatttcctgtaagatatgaacttacaggaaggtactcagtgcctcaagtagatttaagacagtgattccaagttaaatgccggaagtagcagaagctttcttgcaatccctaatcatac

SEQ ID NO: 713301 - DNA, 1227 bp, Homo sapiens
tgaacagcattttcttttcaaataccttgtgagaaaaaaggagcagagttaacgatgtgaacttttatccctccagctcttcaaaacaaactcttcagctaaaatgaacgctaagattgtcagcgaatgagcaaagctatgcttttattttattttatttttttaaagctatgcttttagattcaggaatcgaactaaagagactgctgagttcgccgataggaagccagtcaagggcctcctgtgagccaggccctgtgataaagggataaagtgttgctcacacagagtccagccaaacaaaggccaaactgagattcagaactgacaccgcacaacgctgacaccagctgggatctaatgcaaaagaggcggtaactgcacagagaacgcgcatatcacagagacaaagtcggtggatcctagcaaaggctttaagtcttgactgcaactgttatcaacttgtccacacaacgtctgaggatacaaatgggtcccagattaaatacaaggtgccctgtaaatcttgtgttaacactcacgttatgatgaaccagcctagaaaagcagagggttaagataaaaggataaaaagtcccgcagcaatatttagtaagctgtgaaggatttttgtttttccatcatctctgtagagagggtcacgtagaaaagtcattttcttattgtttcaaagatcacataatttaatttagtctacctcctcctcctcatcagcttcaatagtaccagctgaccatgaaatcagccctggccttagaggtcaagatggtccagtcacatatggcttcagactgccatgttcttcaacgkgtccccagcacccaggcaggcatgtcttgagagtaaaccagagctgcccagcttgctttgctggttctaacagcaacccctccaccctccctacaggcaggcctaccacatactcacactgacctgtggcctctactcactcgccccctggaagaggaagtctcttccaacagaaaaggcaggtgagcttcaaagccaattcaggtgtccagtcccctcaaccatcttctattctgcattataaagggaaaaaaagtaaacaaaccacagttagagacatttcctgtaagatatgaacttacaggaaggtactcagtgcctcaagtagatttaagacagtgattccaagttaaatgccggaagtagcagaagctttcttgcaatccctaatcatac

SEQ ID NO: 713302 - DNA, 1227 bp, Homo sapiens
tgaacagcattttcttttcaaataccttgtgagaaaaaaggagcagagttaacgatgtgaacttttatccctccagctcttcaaaacaaactcttcagctaaaatgaacgctaagattgtcagcgaatgagcaaagctatgcttttattttattttatttttttaaagctatgcttttagattcaggaatcgaactaaagagactgctgagttcgccgataggaagccagtcaagggcctcctgtgagccaggccctgtgataaagggataaagtgttgctcacacagagtccagccaaacaaaggccaaactgagattcagaactgacaccgcacaacgctgacaccagctgggatctaatgcaaaagaggcggtaactgcacagagaacgcgcatatcacagagacaaagtcggtggatcctagcaaaggctttaagtcttgactgcaactgttatcaacttgtccacacaacgtctgaggatacaaatgggtcccagattaaatacaaggtgccctgtaaatcttgtgttaacactcacgttatgatgaaccagcctagaaaagcagagggttaagataaaaggataaaaagtcccgcagcaatatttagtaagctgtgaaggatttttgtttttccatcatctctgtagagagggtcacgtagaaaagtcattttcttattgtttcaaagatcacataatttaatttagtctacctcctcctcctcatcagcttcaatagtaccagctgaccatgaaatcagccctggccttagaggtcaagatggtccagtcacatatggcttcagactgccatgttcttcaacgggtccccagcacccaggcaggcatgtcttgagagtaaaccagagctgcccagcttgctttgctggttctaacagcaaccccyccaccctccctacaggcaggcctaccacatactcacactgacctgtggcctctactcactcgccccctggaagaggaagtctcttccaacagaaaaggcaggtgagcttcaaagccaattcaggtgtccagtcccctcaaccatcttctattctgcattataaagggaaaaaaagtaaacaaaccacagttagagacatttcctgtaagatatgaacttacaggaaggtactcagtgcctcaagtagatttaagacagtgattccaagttaaatgccggaagtagcagaagctttcttgcaatccctaatcatac

SEQ ID NO: 713303 - DNA, 1227 bp, Homo sapiens
tgaacagcattttcttttcaaataccttgtgagaaaaaaggagcagagttaacgatgtgaacttttatccctccagctcttcaaaacaaactcttcagctaaaatgaacgctaagattgtcagcgaatgagcaaagctatgcttttattttattttatttttttaaagctatgcttttagattcaggaatcgaactaaagagactgctgagttcgccgataggaagccagtcaagggcctcctgtgagccaggccctgtgataaagggataaagtgttgctcacacagagtccagccaaacaaaggccaaactgagattcagaactgacaccgcacaacgctgacaccagctgggatctaatgcaaaagaggcggtaactgcacagagaacgcgcatatcacagagacaaagtcggtggatcctagcaaaggctttaagtcttgactgcaactgttatcaacttgtccacacaacgtctgaggatacaaatgggtcccagattaaatacaaggtgccctgtaaatcttgtgttaacactcacgttatgatgaaccagcctagaaaagcagagggttaagataaaaggataaaaagtcccgcagcaatatttagtaagctgtgaaggatttttgtttttccatcatctctgtagagagggtcacgtagaaaagtcattttcttattgtttcaaagatcacataatttaatttagtctacctcctcctcctcatcagcttcaatagtaccagctgaccatgaaatcagccctggccttagaggtcaagatggtccagtcacatatggcttcagactgccatgttcttcaacgggtccccagcacccaggcaggcatgtcttgagagtaaaccagagctgcccagcttgctttgctggttctaacagcaacccctccaccctccctacaggcaggcctaccacatactcacactgacctgtggcctctactcactcgccccctggaagaggaagtctcttccaacagaaaaggcaggtgagcttcaaagccaattcaggtgtccartcccctcaaccatcttctattctgcattataaagggaaaaaaagtaaacaaaccacagttagagacatttcctgtaagatatgaacttacaggaaggtactcagtgcctcaagtagatttaagacagtgattccaagttaaatgccggaagtagcagaagctttcttgcaatccctaatcatac

SEQ ID NO: 713304 - DNA, 1007 bp, Homo sapiens
ccctcacaacgggccttccctgctctggactgggtgataattgcccastttacaacttcctggcgccaatgccccctgccccctccccacttctaacttaatacttatatgtccatgcccaccttcattttcactgcgttcccccactccaatcttattctgctttaaggagcaagaaggtttaccagacgcattttcaaggcagtctgggctttaaaacctctgactcattacatcatcatcatcaccaatgcatcctcttaatagtaatgatccaaggaaaaatcaggcgcctggtaactacggagcgttggtgaagcatctgctttcctgaactcttcttaaaccctcacagcaaccctgaagctgggaccttttccccattgttcagaatccactgacccgcccaaggtgaggcagttactaactaccaagtgaggtaggtccaccgtgtcccataccctctacttccaccaccccgactcttcccacttaagagatgagatcagatgcctaagaagagacaaagaggaagaaacacccccagggccacgcagggggcacctttcctggcagcctgcacccctccccagggggagagcacggaccagccagggggtcgcggcccgcggcccgcctagctgtgtgcgcctggcttcttgcctcgccaaatctcaagtttccgcgtcctcagaaagggggcaatcaccatgccatcctaatagactgttgagagcgtttaataaaagcagtcaatctatgaaaagcactgtgcaaactgcgcggtcagtgtaaaggctcaatccacattcgctttctctctctctctttttttttttttaaactctctgggctggtaaagtctgaactttacgtggggatgatctgaaagctagaaaggatcgagaaaaatcccaaagctctaagcctgagctagggagggtctcagagggaggtgtgactgcagaccgggagtcttctcctcccgtgcgccgctgcccgggacg

SEQ ID NO: 713305 - DNA, 1007 bp, Homo sapiens
ccctcacaacgggccttccctgctctggactgggtgataattgcccagtttacaacttcctggcgccaatgccccctgccccctccccacttctaacttaatacttatatgtccatgcccaccttcattttcactgcgttcccccactccaatcttattctgctttaaggagcaagaaggtttaccagacgcattttcaaggcagtctgggctttaaaacctctgactcattacatcatcatcatcaccaatgcatcctcttaatagtaatgatccaaggaaaaatcaggcgcctggtaactamggagcgttggtgaagcatctgctttcctgaactcttcttaaaccctcacagcaaccctgaagctgggaccttttccccattgttcagaatccactgacccgcccaaggtgaggcagttactaactaccaagtgaggtaggtccaccgtgtcccataccctctacttccaccaccccgactcttcccacttaagagatgagatcagatgcctaagaagagacaaagaggaagaaacacccccagggccacgcagggggcacctttcctggcagcctgcacccctccccagggggagagcacggaccagccagggggtcgcggcccgcggcccgcctagctgtgtgcgcctggcttcttgcctcgccaaatctcaagtttccgcgtcctcagaaagggggcaatcaccatgccatcctaatagactgttgagagcgtttaataaaagcagtcaatctatgaaaagcactgtgcaaactgcgcggtcagtgtaaaggctcaatccacattcgctttctctctctctctttttttttttttaaactctctgggctggtaaagtctgaactttacgtggggatgatctgaaagctagaaaggatcgagaaaaatcccaaagctctaagcctgagctagggagggtctcagagggaggtgtgactgcagaccgggagtcttctcctcccgtgcgccgctgcccgggacg

SEQ ID NO: 713306 - DNA, 1007 bp, Homo sapiens
ccctcacaacgggccttccctgctctggactgggtgataattgcccagtttacaacttcctggcgccaatgccccctgccccctccccacttctaacttaatacttatatgtccatgcccaccttcattttcactgcgttcccccactccaatcttattctgctttaaggagcaagaaggtttaccagacgcattttcaaggcagtctgggctttaaaacctctgactcattacatcatcatcatcaccaatgcatcctcttaatagtaatgatccaaggaaaaatcaggcgcctggtaactacggagcgttggtgaagcatctgctttcctgaactcttcttaaaccctcacagcaaccctgaagctgggaccttttccccattgttcagaatccactgacccgcccaaggtgaggcagttactaactaccaagtgaggtaggtccaccgwgtcccataccctctacttccaccaccccgactcttcccacttaagagatgagatcagatgcctaagaagagacaaagaggaagaaacacccccagggccacgcagggggcacctttcctggcagcctgcacccctccccagggggagagcacggaccagccagggggtcgcggcccgcggcccgcctagctgtgtgcgcctggcttcttgcctcgccaaatctcaagtttccgcgtcctcagaaagggggcaatcaccatgccatcctaatagactgttgagagcgtttaataaaagcagtcaatctatgaaaagcactgtgcaaactgcgcggtcagtgtaaaggctcaatccacattcgctttctctctctctctttttttttttttaaactctctgggctggtaaagtctgaactttacgtggggatgatctgaaagctagaaaggatcgagaaaaatcccaaagctctaagcctgagctagggagggtctcagagggaggtgtgactgcagaccgggagtcttctcctcccgtgcgccgctgcccgggacg

SEQ ID NO: 713307 - DNA, 2436 bp, Homo sapiens
ttaattaaaaatgtgatactgtatcttataaaagcattttttaaaagtaataatcttgtctgttagtacgtctaacatactttttagctttatcttcctgctattgtaacccatggttaggccaactcagatatacagaacatattgaaatttacatataatttgatttttttttttactgtaaaaccttttgacagtgttcaagctgttttsaattctgatgtttaaaataagttgtcatttgatagttttatattgtatacttctagtccttactcagtttgaaattatttcattgactcctaagcttaaccttccttagtattgagttggtactgttttaagaaaggtgttaccaatcttagtgcattttttaccttttttaaaataaacaaaggatttgatatagatagtagctgtgttctcatttgttctggggatgcattatctggagtcgtacagtcttacttgtgctttaagaggatcattaacaaactaaatgggacccagaaaaggaagaagtaggatgatgttggccgtgataattgtggatgtgcttaatatatttaacttggagaatagaacactaaggaggatcagctgtctttcaaacatttgatgggataccgtgtaaaatagggaacttgtacggtgttgtctgaaagtacagtaaaaaccaatagagggagctacagagcaacaagttttgctcagtgtgagaaagcactttctgggaactggtgatacctagcaatgcaggaagctggccctgaaccatagagctccttttctctgcagctacttacatataagctagagatccacctgtgaaattcctgagaaatggcttcttcatcagtgaaagttgacctctaaggtcttttaaaatttctcagattattttgcgacattgagatagttgcttagctttgaagtattttgtgtttttcagaccagtgaatggaggctaagctatgtcaataaggaatttgctgtctgtccctcttacccaccaattgtcacagtgcccaaatccatcgatgatgaagctcttcggaaggtagctacatttcgacatggagggcgcttcccagtactaagctattaccacaaaaaaaatgggatggtaagtgcacagcactactgcttgatgtactgaaaggcttgggttggggatcttttcgtagaaatgttcccttttgctatctgtctgttcactgaaatgattgtccaggtctccaccacaagggcttccttcatgtaagctttagggaatcaggagtagggtgttttctgtggtgaggatgtgatgctgaattctttccatgatcctgctcagccgtataaaagccctgatagctttatctccaggacactatacaaaggaaactagtgtttatttgatgcttacagcaacattcttctggtagaaaaatgagaaatttctctgttcagaataatggtaaaatacttgaatttttcttaacaactttacacgtgaaaggtggagcagacgtatttattttcaaaggtgaaaagagtgatgctcatgtcatttagtcacaactctagtaaacactggagtcaggattaaacaaggagttaagataactaccttgtaatggtggcgtcttgaaagaactctaaaccattcgccagggaagagattagtataatagacattgatttctagagaaaagtttcaaaagcaaacatttccagatgtatagttggtggggtagtttttagaaacaagtagttaaatccttgaatactgaaaaggatggtagaggccactggagaatacataatagacagtcagcttctgaggtagtgaaaatgatttcccaaacaatgagaacagtgtttgaacttttaaattttgccactggtgcctttacttcttataattgttgttaaaacctgccaactctatgtatgtttagttgaagtcaaggtttactggctcataggccattattgtctttattacaggtccaggtctacaggtatttgattcacacactaaatgaattgcaatatttgatcttaaagaggagatataatttattatgtgacagtattttgagacagagaaattgtgtaaaagcttaaggcttatcttttatagttattaactattgtcaatacatgcaaatatttctttgtttatggatcaaatccatctgcagagtgtcacacaattgtttttgagatactcttaatctagctaatttctttctgttttcagaaactttaaaagcaactgctgttgaattttcagctttattatgcttctaggtaattatgcgaagtggtcagccactcactggtacaaacgggaggaggtgcaaggaggacgagaagctgataaatgctaccctcagggctggaaagcgtggctacatcattgacacccgatccctgaacgtggct

SEQ ID NO: 713308 - DNA, 2436 bp, Homo sapiens
ttaattaaaaatgtgatactgtatcttataaaagcattttttaaaagtaataatcttgtctgttagtacgtctaacatactttttagctttatcttcctgctattgtaacccatggttaggccaactcagatatacagaacatattgaaatttacatataatttgatttttttttttactgtaaaaccttttgacagtgttcaagctgttttcaattctgatgtttaaaataagttgtcatttgatagttttatattgtatacttctagtccttactcagtttgaaattatttcattgactcctaagcttaaccttccttagtattgagttggtactgttttaagaaaggtgttaccaatcttagtrcattttttaccttttttaaaataaacaaaggatttgatatagatagtagctgtgttctcatttgttctggggatgcattatctggagtcgtacagtcttacttgtgctttaagaggatcattaacaaactaaatgggacccagaaaaggaagaagtaggatgatgttggccgtgataattgtggatgtgcttaatatatttaacttggagaatagaacactaaggaggatcagctgtctttcaaacatttgatgggataccgtgtaaaatagggaacttgtacggtgttgtctgaaagtacagtaaaaaccaatagagggagctacagagcaacaagttttgctcagtgtgagaaagcactttctgggaactggtgatacctagcaatgcaggaagctggccctgaaccatagagctccttttctctgcagctacttacatataagctagagatccacctgtgaaattcctgagaaatggcttcttcatcagtgaaagttgacctctaaggtcttttaaaatttctcagattattttgcgacattgagatagttgcttagctttgaagtattttgtgtttttcagaccagtgaatggaggctaagctatgtcaataaggaatttgctgtctgtccctcttacccaccaattgtcacagtgcccaaatccatcgatgatgaagctcttcggaaggtagctacatttcgacatggagggcgcttcccagtactaagctattaccacaaaaaaaatgggatggtaagtgcacagcactactgcttgatgtactgaaaggcttgggttggggatcttttcgtagaaatgttcccttttgctatctgtctgttcactgaaatgattgtccaggtctccaccacaagggcttccttcatgtaagctttagggaatcaggagtagggtgttttctgtggtgaggatgtgatgctgaattctttccatgatcctgctcagccgtataaaagccctgatagctttatctccaggacactatacaaaggaaactagtgtttatttgatgcttacagcaacattcttctggtagaaaaatgagaaatttctctgttcagaataatggtaaaatacttgaatttttcttaacaactttacacgtgaaaggtggagcagacgtatttattttcaaaggtgaaaagagtgatgctcatgtcatttagtcacaactctagtaaacactggagtcaggattaaacaaggagttaagataactaccttgtaatggtggcgtcttgaaagaactctaaaccattcgccagggaagagattagtataatagacattgatttctagagaaaagtttcaaaagcaaacatttccagatgtatagttggtggggtagtttttagaaacaagtagttaaatccttgaatactgaaaaggatggtagaggccactggagaatacataatagacagtcagcttctgaggtagtgaaaatgatttcccaaacaatgagaacagtgtttgaacttttaaattttgccactggtgcctttacttcttataattgttgttaaaacctgccaactctatgtatgtttagttgaagtcaaggtttactggctcataggccattattgtctttattacaggtccaggtctacaggtatttgattcacacactaaatgaattgcaatatttgatcttaaagaggagatataatttattatgtgacagtattttgagacagagaaattgtgtaaaagcttaaggcttatcttttatagttattaactattgtcaatacatgcaaatatttctttgtttatggatcaaatccatctgcagagtgtcacacaattgtttttgagatactcttaatctagctaatttctttctgttttcagaaactttaaaagcaactgctgttgaattttcagctttattatgcttctaggtaattatgcgaagtggtcagccactcactggtacaaacgggaggaggtgcaaggaggacgagaagctgataaatgctaccctcagggctggaaagcgtggctacatcattgacacccgatccctgaacgtggct

SEQ ID NO: 713309 - DNA, 2436 bp, Homo sapiens
ttaattaaaaatgtgatactgtatcttataaaagcattttttaaaagtaataatcttgtctgttagtacgtctaacatactttttagctttatcttcctgctattgtaacccatggttaggccaactcagatatacagaacatattgaaatttacatataatttgatttttttttttactgtaaaaccttttgacagtgttcaagctgttttcaattctgatgtttaaaataagttgtcatttgatagttttatattgtatacttctagtccttactcagtttgaaattatttcattgactcctaagcttaaccttccttagtattgagttggtactgttttaagaaaggtgttaccaatcttagtgcattttttaccttttttaaaataaacaaaggatttgatatagatagtagctgtgttctcatttgttctggggatgcattatctggagtcgtacagtcttacttgtgctttaagaggatcattaacaaactaaatgggacccagaaaaggaagaagtaggatgatgttggccgtgataattgtggatgtgcttaatatatttaacttggagaatagaacactaaggaggatcagctgtctttcaaacatttgatgggataccgtgtaaaatagggaacttgtacggtgttgtctgaaagtacagtaaaaaccaatagagggagctacagagcaacaagttttgctcagtgtgagaaagcactttctgggaactggtgatacctagcaatgcaggaagctggccctgaaccatagagctccttttctctgcagctacttacatataagctagagatccacctgtgaaattcctgagaaatggcttcttcatcagtgaaagttgacctctaaggtcttttaaaatttctcagattattttgcgacattgagatagttgcttagctttgaagtattttgtgtttttcagaccagtgaatggaggctaagctatgtcaataaggaatttgctgtctgtccctcttacccaccaattgtcacagtgcccaaatccatcgatgatgaagctcttcggaaggtagctacatttcgacatggagggcgcttcccagtactaagctattaccacaaaaaaaatgggatggtaagtgcacagcactactgcttgatgtactgaaaggcttgggttggggatcttttcgtagaaatgttcccttttgctatctgtcygttcactgaaatgattgtccaggtctccaccacaagggcttccttcatgtaagctttagggaatcaggagtagggtgttttctgtggtgaggatgtgatgctgaattctttccatgatcctgctcagccgtataaaagccctgatagctttatctccaggacactatacaaaggaaactagtgtttatttgatgcttacagcaacattcttctggtagaaaaatgagaaatttctctgttcagaataatggtaaaatacttgaatttttcttaacaactttacacgtgaaaggtggagcagacgtatttattttcaaaggtgaaaagagtgatgctcatgtcatttagtcacaactctagtaaacactggagtcaggattaaacaaggagttaagataactaccttgtaatggtggcgtcttgaaagaactctaaaccattcgccagggaagagattagtataatagacattgatttctagagaaaagtttcaaaagcaaacatttccagatgtatagttggtggggtagtttttagaaacaagtagttaaatccttgaatactgaaaaggatggtagaggccactggagaatacataatagacagtcagcttctgaggtagtgaaaatgatttcccaaacaatgagaacagtgtttgaacttttaaattttgccactggtgcctttacttcttataattgttgttaaaacctgccaactctatgtatgtttagttgaagtcaaggtttactggctcataggccattattgtctttattacaggtccaggtctacaggtatttgattcacacactaaatgaattgcaatatttgatcttaaagaggagatataatttattatgtgacagtattttgagacagagaaattgtgtaaaagcttaaggcttatcttttatagttattaactattgtcaatacatgcaaatatttctttgtttatggatcaaatccatctgcagagtgtcacacaattgtttttgagatactcttaatctagctaatttctttctgttttcagaaactttaaaagcaactgctgttgaattttcagctttattatgcttctaggtaattatgcgaagtggtcagccactcactggtacaaacgggaggaggtgcaaggaggacgagaagctgataaatgctaccctcagggctggaaagcgtggctacatcattgacacccgatccctgaacgtggct

SEQ ID NO: 713310 - DNA, 2081 bp, Homo sapiens
ctcgaggttcttaaccttaaccacatctgaaaagcctcttttcctgtgtaaggaatctatgttcataggttctggggattaagacagaaacatcattgagggagaggcatataattcttcctaacatattggtttatacaatgaagctatttaattaaataaattgtaccctttgtatgaagcatcaatttgcatacctcacttagagacctttttgtcttcagaccggaaagcacatgactgattcagataagaaaaactctggagccagcatttgtttcccaaatcttgcctaccttcgtacacgcctcttaactgtttgtctttgaaattattataaagctttgtcttggataagacctctaatttgtcagagtctgatttctcaatttcattatttttgttagttgagatcccagagagcagaattgcctttgagacccacctatcacaatgactaatatgtgttttggtcagaaaaagaaaagcatgaaaaaatataagaatttgaagccagattgagtgcctacacatccttgggaaaaagtgacaaaatcttaaataaattgtcagagacaactcttgcaaattgaatttggaggaaatagcctacaaaatgtagtatatataagtattcattttttgcatatgattgtaatgtttttatatgttcatatttaaaaatccaaggaacacataatactaaaaatgatcaaaaattttaaaaattatatcaaatcccatcattctgtaatcatacttttatttaacacatttgcagagttagaaaggtaggtaagtggtaggtagaaagaaattacctagaacaaagctggataaaactatgcatctttttaaaagcatacttaatgtaataatattattataattgtttcatgtaataggaaaaaaatagatcaaacaaaaggaataactaatcttcagaagaatgtatcccagttgtaagaaatgtttgttcctataatattccttaggtatgtcttgatactctattgcaagaataaacatattattgcataattaatcaatggatayggtgaccactactatcagtttcaattcaacatctctattcctgagttattctactctattaaatacattgtttggtaatgagttccccattttttaagaacaaatcatgggataatatagtcattccttattgattgttttagcgcatatgatatttttgaacaataagctaaggaagaaaaaattatcctctaactagtaattgctaaatctactactttgagcatctttttttcctctcttttttttatcgtttcagaaaaacacttccaaattacgtttctttcgaagttaacttattcataagattttatatgcaaatctaattagtcatttccgcaacaattcctgtgacattataatttaattttttactatgtcatcagattaaattaactttaaatttggtatttacatatgcagtttaaaagcttatatgtttctgtaatcagtactcttaagtctgatgtttcattaatgattattctctgccacttttctcaattatattatgtcccaataaaataaaatcttaatacggccacctttcatatctaaactttgcactatagcaaatttggaggaaatgaataactacataatactatggtttcaaattttcaaattaaaatgtagaaaaagattacttcattgtatttattacaagtaaatactatatagtagcaccaaccactttgaaaaataagactagctaaaaggttaactttgagtatcagatttggagaggaagatatttaactttttatcatgacatgaaaagtattacatagcgtacacttttatttataaattttatctcaaatagttaatagagtagattttttaaagtgtcaaatgttttcaggtttaaacatatagaagaacatggtaaaaccttgaaaaaaagtgttgcaaatatttattgatctggcagttagaaattggagacacatagaaaagaaatttgtatcatttattggaaagaataaaatgccatccaaaatgacttaagattttcattaata
